United States Patent Application Publication US 2024/0301379 A1 - sequence listing, part 4

SEQ ID NO: 4574 - protein, 1385 aa, unidentified
  REGION 1..1385: note = Description of Unknown: Cas Enzyme sequence
VKNKKYYLGLDIGTDSIGYAVTTPDYNLIKFKGEPMWGTHLFEAAEQMADRRSFRTARRRLDRRQQRVRLLQELFADEINKIDSKFYVRLKESALWQEDKTEPGNKSSIFYKDPYWTDKHYHDEYPTVHHLINDLMTSDEKKDIRLVYMACAWLVAHRGHFLSPIDGENIEQLTEFDPIYDDFISWLNNNLIDKPWNDSGNVIKEMTDILSGKGNTTYKKSALTRILFGVKKPKDDPEEYPFSKSAMVDLLAGGSVQIKKIFIADESVSEINESISLSEEDDSIAAKIAQLGDNGGLIIRLKAMYDCALLSRILAGVNSVSEAKIKIYDDHKSDLAKLKYIIRKYRKDKYRFFFREDVPNSYTSYVGHFVSNKSNCKKTSKEDFHKEVKKITSKLSVRPEDSAVLKEINEKIESGTFLPKQVDTDNRVIPHQLYYHELKLILEKASVHYDFLNSADEDGLSVKEKIKSIFNFRIPYYVGPLNSHSNFAWLERKAEGKIYPWNFDELIDRDASEQQFINRMTNQCTYLPDEDVLPKWSLLYCKFNVLNEINNIKINGRPISVETKQGLYNEVFKPTPENSSRSKVTVKKIRDYLISGGIMSKNEKDLLSGIDIDIKSNLKPYFDFNRLLSGKVLTEGDVDKIIAHSTYTEDRERYKKWLKSNYSNLSDSDINYVSRLKYSDFGRLSDKLLNRIEGTNKTTGETGTIIHFLWNTNDNLMEIIADPNRYTFADVIRDIRNEYYAANPMTFADKLESFGLSNAVKRPVIRTMDIVTEITKVMKSAPEKIFVEMARGATAEQKNKRTVSRKDQLIELYKQIKNDDSKRLTEELEKLGDDADNRLQSQKLYLYYLQMGRCMYCGEPIDLASINNEEYYDIDHIWPQSYVKDDSILNNKVLVHSKENSEKEDKYPLPAEWRSRMRPFWEMLRENKLITEEKYKRLVRTTGFTDDEKLGFINRQLVETRQSTKAVTEILRQSYPDSEIVFVKAGLVSDFRHEYGEIKNKVYQLEKTNDEIRDMQLVKCRSINDTHHANDAYLNIVVGNVYHEKFTSKWFNVSTDRYSMNYPVLFGKEVKGAWEPQRDLATVDKVMANPHIHLTKYQTCQKGGFFDQMPVKAGTNPDLIPRKKGLDTEKYGGYNKPTASFFVLVGYTNKKKKELTFLFVDLLVADKFMADDDFAFEYIREKLGDKISDIFYPLGKRKIKINTVISLDGFEVCISGKDSGGAKIVLRSLTTAFYDRSDILYIKKIENVSNKIKENGDYSIHPKYDGIDAERSLELFDKLIGMQTNPIFGKMPCTYMKTTDDTRDKFVSLTMKEQIIVLSVLVDQFKTNRAAVCDMTLVGGVKSTGKLTLSSNVSNWLKKYNDIRIIDRSASGLREERSRNLREFL

SEQ ID NO: 4575 - protein, 1336 aa, unidentified
  REGION 1..1336: note = Description of Unknown: Cas Enzyme sequence
MPYSGDYLIGLDMGTSSVGWAVTDMEYHILKQKGKALWGIRLFDAAQTAAGRRVFRTNRRRNERKKQRIQWLQQLFDAEIAKADPAFFQRLKESKFTEEEKQGVEGKYTLFSEETLTDQTYYETYPTIYHLRKALLEETGPFDVRLVYLALHHIIKNRGHFLLETNVSEERESFPQAFHTLQEYLQEQYELDLTLPNAEAFAQHLKERKRSITAKKKILKEDAGLTKADGMQNAIVDLLAGAKVKLAVLFQDDTLKNAEPGSLSLDMEWDEEALVPVLGEKMELLLAIKAVYDWAILDDILNGQEYLSQAKVQSYEKHKQDLALLKQTVKTELPEQYAEVFHTEREKLDNYAAYSGTGSYHCTYEAFRKYLNNLFKRSRGSQAVETILTELEQGTFLPKQRSKPNSVIPNQVHRKELVDILARAAAYLPFLTEKDQDGISVSQKILAIFDFRIPYYVGPLNPTSPHAWVKRSDAPILPWTFEQVVNLEESAEGFITRMTAKCTYLKEDVLPKDSLLYSEFMVLNELNNLRINGKRVSPELKQQIYRDLFLQKKTVKRKQLEDYLKREGILQRGDEISGIDGDFKASLRSYQDFAAILRKTQDTEMVEDIIRRIVLFGEDRKLLKSYVQRTYGEVLSPEDIQYVCQKRYAGWGRLSQEFLTKLYHVDDKTGEAIPILEMMRRTNCNLMELLSSRYQYLDQIQAYNQEHYGATTQSVKEMVEASYAPPSIKRAILQTVAIVEELVKIMGHPPKRIFVEMARGEEEKKRTVSRKATLEELYKSCKKEAPELLGQLEGCSDQMLRRDKLYLYYTQMGKCMYSGEPIDLERLDTDYDIDHIYPQSKVKDDSLDNRVLVKRELNAAKADEYPIVAEIRDKMRPFWTYLKGKGLISSRKYDRLTRATTFLDEELAGFISRQLVETRQSSKIVAEILGKQYGKPTEIVYVKAGTVADFRQKADRNEKGEQVSYDFVKCREVNDYHHAKDAYLNIVVGNVYHLKFTKDPLHFIKSEAGETYSLKRVFDYRVVRDGETAWLPGEEGSISTVRKTIRKNNILFTQLAYKATGGFYDQTIQKKGGGQAPIKSGDPRMRIERFGGYNKLTGAYFCLVEHGTEKKRIRSLEAVYLMYERMYQAKPEEYCKSILGLTEPKVLLKCIKIGSLLSYDGFLMHICGRSGIQIIYHNANELIVSPEMQGYIKAVGKFLKRMRESAEKPKVTSYDKVNEQDNLKLYDVYCEKLQAHYGKMHTTPKQVIQENRDRFEGLDLYQQLETLGQVLNLFTCNALPANLSAIGGSKKTGILLTTKNLPVGKAHTMKLIHQSVTGVFEQEIDLLGEDLTPHRR

SEQ ID NO: 4576 - protein, 1394 aa, unidentified
  REGION 1..1394: note = Description of Unknown: Cas Enzyme sequence
MKDEEYYLGLDCGTTSVGWAVTDTSYNIPKAKGKRLWGARLFDAAEPAVARRLTRSARRRNERTKRRLKLLEFLFAEEIAKTDPDFYIRLRESFYLEEDKRGLSKKSKNTLFNDESGMLATDKDFHKLYPTIWHLRSDLMSTQAPRDIRLYFLAIHHILKNRGHFLLPGTRSMKGVDFDILQDEFTNAMNNCDFEIPTQTISAVAKIVTSKQTKSDKQKELFATLMESVGESEDDSETTTKRLKELSKLITGSATNLGILFAIEGEEDLFKEDKLKYPFSKGVFEEKESEIEAAVVSENNMKLILTAKKIYDFALLSDLLKDSPSISEAMINNFNQHKSDLAALKKALKPFKEDHTLLFKSKDDAGIKVKKNNKDIYVSYAAYANGTSVKGKSNKCDQEDLNKEIEKILEKHEISGDLLDRAKSRALLPKQKGQAKGTIPMQLHLTELRAIITNLKRDYPSFCESDKYIERTAESVESVEKSKLESLLTFRIPYFVGPLVHRSKSPDFSWGEEQINEIIYPWNFDQLIDKNARANAFIRRMTNFCTYLPDQEVLPKNSITYQKYMVLNELNNLKINGARLEDTTLKQEIYKKVFVQSEISGNITLKKLATWLKQNRKIDGDFELSGIDISFKSKLTTEKDFRQILGADFDKYRPVELDKCVELITILGEEKQMLATKLQQTLNCTEEQAKQLSKKSYKGWAAFSRKFLTEIKAPVGALNLSILEAMHETNKNLMELRFSDFTFKSQIDELNTTSTISTTSTTPDYSIVDNLYCSPAVKRSIWQALKIVHELVTILGKLPKKIFIEVAREEKAEKSRKLSRRTTLMKLYSAIKNNDEAAKLLGKLNKSEDRDLQRKKLYLYYTQMARCAYSGDRIEIEDLHTSAYDIDHIYPRSKTKDDSIHNNLVLVKSALNREKLDTYPISPDIRSKMAGKWQLWLAAGLITKEKHARLVRATTLTDDELRNFITRQLVETRQSTKALIEIIEKVYGIEPIPCKAEQVSDFRKLFDGSDIYEWHKLENRYIKTGKRDSWGIKVRELNDLHHAKDAYLNIVVGNVYHAHFTSDPRKWIKSNQNKRYTLKPEVIFSETPKHETSAWAGQATISTLKHTILRNDILVTRQTYEETGQISDLNIVKKSSDLLPIKNTNRLQNTEKYGGYNSLKGAFFSLVELDGRKNTRERRLVQIPIIHAKNPSQYITIQFPDKSPKVILEKIPFKSYMKINTLPVHLTGKTDRYITFNHAVQVIFSIEDVVYIKNIVRAVGKINQSKGKYIISEEKDGVSKASNALLYGKFIDKVAALERKMPAMKSQTADLQSNVSKFTELTLDEQLSLFAEYLKLFSCTAATAKLKIVGASTDFVGKGRTSSVIAEFDSFKLIHQSPTGLYERTIDLKTCGAE

SEQ ID NO: 4577 - protein, 1354 aa, unidentified
  REGION 1..1354: note = Description of Unknown: Cas Enzyme sequence
VEPKGYFIGLDIGTESVGWAVTDLSYNLCKCGGKALWGVRLFGEAQSAAECRAHRTARRRLERRYQRISWLQQLFSEEIGKVDPAFFQRLQESRFLEEDKRGSHPLGRYTLFADPQYCDKEYHRQYPTIYHLRKALIENPGPFDVRLVYLAVHHIMKYRGHFLFGDLSLDSVSLDSGLQRLNGYLRQECEKELPLLDPVKFTQALTDRTYSTTQKRALLLEATGVKKDDPQLYAIAELLCGRTVSLDDLYGGPVSNGETKSVCLKDDFDAREEKLLAILGDRFELILSVKAIYDWALLEELRGGEKYISFAKVKSYEKHREDLKRLKAVIRASGDKELYREIFHAARKGLDNYPAYCGKGAASYRCKKEGDFPTYLRKKIKNLPFPEVKIILDELDRGEFLPRQTTKDNSVIPHQLHQAELEQILERAVKYLPFLNEKDGSGLTKKEQIIRMFCFRVPYYVGPLNSKSNRAWIVRTNEKIYPWNFEQVVDLERCAESFIMRMTAKCSYIGEDILPKDSLLYSRFMVLNELNNLKINGFPLSVTDKQAIYNDLFLTGRKVTRRRLEGYLKSTGRFTGGEALSGFDGDFKATLASHQKFEWLLTRPGGIEAAEEIIRHIALFGEDQKLFAGWLSKTYGTLITPEEQKKVCAMKFSGWGRLSRQFLTGIYHVDHDTGETLSIMDALWSTNHNLSQLLGSQYTFGAAVQQYRAQKLNAAGQTLEESLDDSYASPSIRRAIRQTIRIIAEIEKIMKAPPKRIFVEMAREEGEAGKRTRSRKAELTELYEQCAKEADPLFGQLSEQLEGTPEAMLRRDKLYLYYTQLGKCMYSGEPIDLSQEQDYDIEHIYPQSKIKDDSLHNRVLVKRVLNAQKSDSYPIAPDIRKKMRPFWAMLKEKHLISTEKFDRLVRGTPFTEDEQAGFIARQLVETRQSSKIVAELLSARYGRQTEIVYVKAGNVSFFRQNQRTGPDGTQRLAGRDTKGMITAQDPLFIKCREVNDFHHARDAYLNIVVGNVYHLKFTRDPRRFLEEVHYQYSLNDLFCRNVTRDGEQAWTAGPGGSIAVVRRTIAKNNILLTRMAYEAKGGLFDQNPVPKGSDLAPIKGSDPRMRPEIYGGYNKLTGAYFCVVEHTDKKKRVRSIEAVLLLYKALYEQDPEQYCHRILGLTDPKVLIRQIKINALLSFDGFRMHLSGRSGVQLLCKNANPLIISPQWQHYIKKISKYLERCQKARTDLPVTGYDGITQEENQALYQLLLDKLQANRYAVKYATAAKTIAGCRAKFQALTLADQCRILMQILNLFANTAASADLKLLCGKAGIGKLRTSKNLGNYIGHELKLIHQSVTGVFEQEINLLTTGQDQ

SEQ ID NO: 4578 - protein, 1342 aa, unidentified
  REGION 1..1342: note = Description of Unknown: Cas Enzyme sequence
MRYFMGLDMGTSSVGWAVTDEHYQLLRRKGKDMWGIREFEEAATAVERRTHRVSRRRRQRQVARIGLLQEYFHDAIHQVDPNFYQRLKNSKYHEEDKDEIVRESNGIFNDAEYTDKEYFKEFPTIFHLRQELIKSKEPHDVRLVYLALVNMFKHRGHFLNATLSADGESRKIKDIYTDFVDKAAEQLGVSFATDIRYEELENYLSSNDLSRKRKGELIAELLHVTRKDKQQYALIECMLGLDKSVKLMFGDTLPEDFDKTIKVNFSDIAFEEKATEISEAIGEEKYDLILIMKEIYDAAILNRIMNGYTYLSDARVAEYEKHKSDLACLKHYIKEYGTQQQFDFLFRGTEKGSYSAYVHSVNSHEKQRRNMAGNKKEDLYSALKKMLKDMPENEEKTCIMMQIELDNFLPKQLTASNGVIPNQIHLKEMKKILANAENYLPFLKEKDESGYTISERIQKLFAFQIPYYIGPTTEKSAEFGGNGWVVRKEEGKVLPWNIDQKIDMKKTSEKFISRMVRRCTYMNDEQVLPKESLEYESFCVLNELNNIKVYGEKLPVDIKQDIYRTLCEKGKRVTKKSLMQYLVGRGVIKAEDEEQLTGLMDGLNNTLKSFAKFKAIFGDAIYEDSCKKMVEQIIFWCTVYGDSKHFLKEQLLEKYGEVLTDAQIKRILGIKFRDWGNLSKKFLELQGCSKETGEVNSLIRMLWETNDNLMELLAQDSYTFKEELENMQESTYKVLTELQPEDLDHMYFSAPVKRMIWQTILIIKEVTKVMGCQPERLFIEMTREHGQKNDIKDSRAKKFYELYSKIKDEDKDWRKVIEDADKDGRIRSKKMYLYLTQMGRCMYTGRPIDLDQLFNNNLYDIDHIYPRHYVKDDNLENNMVLVEKQSNAHKSDVYPLESGIYEKQVNWWRELHRKNLINDEKLKRLTGRNPFTDEQKAGFIARQLVETSQGTKGVATILQEALPDTTLVYAKARNVSEFRSDNDLLKSRIVNDFHHAHDAYLNIVIGNVYYVKFTKNPINFIREHGTYNLGKMFAKDVKRGDDIGWVAQSGNGQTATMETIKRTMARNTPLLTRMSYEVTGGLANQTLYSASKAKEGTYIPLKSSDERMQDVTKYGGFTSVSTAYFMLVEHDGKKGKRIRTIESVPIMWKERIEKNPAELERYCLEVLKLSNPDIRVRKILIQSLIKRNGYYMQITGKTGNQLYVRNTVSLCLKQEWVNYIKKLEKGNDENITKDKNLVLYDILVDKHNNTIYSQRPNPVGEKLVKRREEFINLNLNDQVTVLLEILKLTQIALGGANLKLIGEAEKTGVMLISKDITTLDEMLLINQSVTGLYEQKVNLLTV

SEQ ID NO: 4579 - protein, 1373 aa, unidentified
  REGION 1..1373: note = Description of Unknown: Cas Enzyme sequence
MNIKNIKNGYYLGLDMGTNSVGWAVTDKEYRVLRAKGKDLWGIREFDEAETSVNRRTQRISRRRRQRETARIGLLKEYFYDAIMSVDPNFYQRLDNSKYYLEDKDENVRDKNGIFNDPDFTDKDYFKKYPTIFHLRKALIEDDNEAHDVRLVYLAILNMFKHRGHFLDKSGQLENSEGSLADLYMELSDCVDECNIPENASCNVVLPKLEDENAFAAAITNRDISRKERYNELLNILHINKSQKQLLEIVKGICGLKMNLVTIFGDEIKSEEDSKIDLSFSDNNAEETLAELADKLDDDEMNVILCTKKLYSEAVLHAILKGDKYLSYARVRDYEKHKLDLRILKDLLKRTSMEDYNRMFRSEEAGSYSAYVNSCNSSTVKGNIYGGPKRRGIDGRKPEDFYAFTKKIIKNYPDSEEKKYILSEIEREQFLPKKLTASNGVIPNQVHAKELKVILSNAESNLQFLKEKDDSGLTISERIIKLFSFTIPYYIGPVSKDISRGIGTGWAVRKDSGRVLPWNLSDKIDIGETRKGFIERLIRRCTYLNDEKVLPKASLLYESFCVLNEINNIKVAGTKISVETKQALYRELYQKGKKVSRKDIERYLICCGIIKEGEQDLISGIDIQINNCLSSFGKMSAVFGENIHEDKYQKIAEDIIILCTIYGDEKTELKKILSNKYCSENNPELNVLDEKKVKRITGFKFKDWGRVSYEFLTLHGADKSTGELRSIIRTMWETNDNLMELLSDRYTFKEEIELRTNSAAKSLSEFSIEDLDGMYFSAPVKRMIWQTLRIIKELEHVMGEAPEKIFVEMAKRPDEIKKRTDSRAKGFTELYKNIKDEDKDWIKFIEKADKDGSIRSKKMYLYLTQMGRCMYTGKEIELSEVMTDKYDIDHIYPRHFVKDDNIANNLVLVEKTKNAHKSDAYPIEESIRKNMHDLWKILLDRKLITKEKYLRLTSASPFTEEQLAGFIARQLVETRQGTKGVADILREVMPEKTSIIFSKASNVSDFRHENNLLKSRIANDMHHAHDAYLNIVVGNVYNTKFTNDPRRFVKDYESDKLTNNYHLSKMFNYDVMRNGYCAWRAGENRTISTVKNMLAKPSPMLTRMSFEGHGQIADQTLYGKAKAIKSPDLYIPLKESDERLCDVKKYGGFSSASTAYFVLAEYTKKKKTVRSIEAIPIYIKEKADKDKTVIESYISKRTGGENIRVADIKIKIQSLIKLNGYYLYLTGKTGDRLILRNAVQLIFDQDTINYIKKLEKEYDNELNSEDNIRLYDTLINKHKTNIMTKRPNPVLDKLTEGGEKFINLDLDNQKKVLKEILKLSAVGGNGADLSLIGASPNTGVMLTNKNISANKEFMLIERSVTGLYEKETDILRI

SEQ ID NO: 4580 - protein, 1356 aa, unidentified
  REGION 1..1356: note = Description of Unknown: Cas Enzyme sequence
MGRDYYLGLDMGTSSVGWAVTDEKYNLLRAKGKDLWGIREFEEAEGGIARRQNRISRRRRQREQVRIGLLKSYFAEEIEKVDPDFLQRLENSKYHLSDKDEKVRYKSAIFNDPEYTDKDYYRDYPTIFHLRAELIHNQEPHDIRLVYLALLNMFKHRGHFLNASLSAEEETQSMSDAYTAFRALVEEVMTANETENLFFPDGKADEIEAIISSRDYNRKRKSELMTEMLGFTKKDKAAQALIKGMCGLTVDVKTVFREIESEAKLSISFSDSNYDEKIVEIQEVLDDEQLELLEAVKTIYDIGSLAGVLKGEKYLSDARITDYNKHKEDLALLKKIIRKYTDQKTYNDLFRGTEPGSYSAYVNSTNSGKKQRRNMGGNAKRNQEAFYASLKKLLNKLPSEDDDVQKILADIDKELFLPKQLTFANGVIPNQVHAREMKAILNNAEQYLPFLTEKDESGLTVSERILKLFSFQIPYYVGPVTTKSSRDGGNGWVVRKESGQVLPWNIEDKIDMDATSKKFIENLIRECTYIAGEKVLPKGSLLYERYCVLNEINNIKIDGRPIDVELKQKIFEDKFMSGKKVTRKQLVTYLHGKGVLEDDAQLTGIDKTINNSLSSYGKFLGVFGDELKKDSCQIMVEDIIRDCTIYGDSKKRLRETLQKKYVDNNNLSESQLKRILGFKFKDWGRMSKEFLEMQGINRETGEVMSLVQAMWETNLNLMELIYSEDFTFAEALQEKQAKDYLTLSEFKFEDLDEYYFSAPVKRMVWQTLLIIKELEKVLGAPPKKVFIEMTRSDGVKGDRGRTISRKKQFEDLYKKIKDESQDWASIIDNADASGKLRSKKMYLYLTQMGKCMYTGKPIDLDDLFDDNKYDIDHIYPRHYVKDDNLGNNLVLVEKKANASKGDRYPLDTDIRGKMHGTWKFLKEKGLITEEKYRRLTGSNPFSEEQQADFIARQLVQTSQGTKGVADLLKQLLPDAKIAYSKASNVSDFRRDYDLPKSRLINDFHHANDAYLNIVVGNAYLVKFTQNPLNYIRSGDVQYNLGRMFEKDIVRNGEVAWLADDGKGNHGTIVTVKKVMARNTPMMTRMVLNGHGAIANATLYPASKASADNYIPLKGSDSKIADVTKYGGFTSVSTSRFVLVEHLVKKERIRTLEALPILVANSCKTMEDIENYCEEELGLIAPKVKLDGIKIQSLLKINGFYVHLSGKTNKQLALRNAVNLCLDAKWKEYIHYLEKASNNGNYGNPICSDMNIELYSILAEKHSSSIFAKRPNPVGTKLVKEKETFSKLELVDQVSVLLQILQLSAIGITQADLRAIGGAGIAGKMLISKDISKQEEALLIMQSPTGLYESTIDLKTI

SEQ ID NO: 4581 - protein, 1048 aa, unidentified
  REGION 1..1048: note = Description of Unknown: Cas Enzyme sequence
MNSDKKVDYYIGLDMGTGALGCAVTDTQYRLIKVKGKDFWFVREYETAQPQLKRRNHRISKRKLQRHQVRIGLIRSYFADDVLKHDPLFYIRQDNSKYYFEDKDSRLITKDSLFADSDYRDKDYHKEYPTIFHLRQAFLRNEDISEERYSRLLYLVIVNMFEHRGHFLLNTESDDISPDMVKDAGENFINYIYNSLEDMPDVISYKEVINDLTKKGISRSSKKDKIIGLLGIEKTNKEQVELVKCLCGMDADASVMFGVKTGEKIKVSFQQMSFEDEKQKLEDAIGADNLAVIEDMKRLYDYSQLEYILKGCEYLSDARVKMYEKHNEDLRLLKDVYRYNLSREKYNIMFRSSEKGTYSAYCNSLNSKDSLAENKKYRRNMKEREQEELYKRIKKDLKDVENDDVKKILREIDLEQFLPKQITGANGAIPNQVHRKELKKILENAEKHVSFLTEKDESGYTVSERILMLFSQNIPYYIGPVGSGSKTGWAEIKEKGQILPWNIEQKIDIEKTSERFITNLIRECTYLSGEKVLPKQSLLYEKYCVLNEINNIQINGKRIEPELKQDIYNEIFTGSRLGKKVTKKNLCEYLVNRGLISDESQISGIDIELNAYLPSYGKMYAVLGERLREEAIRETAEEIIYYGTIYGEARHMFRKKVDQYVVNGIITEAQARRIYGYKFKDWARLSQNMLYLNGLDKRTNETLSLIRAMWEYNWNFMELINSEEFTFKEALEEKKQILEKTINEFQFEDLDEFYYSASVKRMIWQTVLSLKEIIQIMGHDPKRIFIEMTRTDEEKGEKGRKASREKRLLKLYENIEDSRPWETEIKNASESGKLNSKKMYLYYLQKGMDVYTGEEIDIEELFTDNRYDIDHIYPRSLTNDNNLENNLVLVSKKINENEKKNIYPVPEKIRKNPKVRKCWLTLHKMGLMNDEKYNRLISNEQLKEEQLAGFISRQLVETAQGAKGIADLLKSMMNLDTEIVYVKARNVSDFRRDYELVKSRLVNEHHHAKDAYLNIVVGNVYYTKFTRNPLNFIKNEGRRNNKEYGYNL

SEQ ID NO: 4582 - protein, 1402 aa, unidentified
  REGION 1..1402: note = Description of Unknown: Cas Enzyme sequence
MEDKRPYYIGIDLGTSSVGWAVTDEDYNILKYKKKNLWGARLFEKGETAQARREKRSLRRRLKRRVHRIKLLQDIFKDEIAKVDNKFFLRLNESKYYKEDKDESLLTDDTLFADVNYSDKDYHKEYPTIFHLRKYLMESDDKKDIRLIYLALHHIIKNRGNFLHEGSIENIIDFKTSFENLNKYLEDNEYPSFKEDDFDKIEEIISDKELKPSEKEKQFKTFIEDKQLIEVLKVIVGLSCNLTKLFDDESILNDQEKALSIKLGEKEYDILRNEIEPIINERIELIDRIKGLYDWSIINDILKNSSTLSEYRVKLYEEHKEDLAKLKYFIKNYGTSEEYFKAFKDINEKENYVAYIGLNKKGKKKEVVNKISVGEDPLKTVNNYFKKVLDKYKNEIKEEDKEIYDNIINKLNESNCLKKIRTNVNGTIPYQLHKNELEKIIEKASKYYPFFNEKDENGYVTKDKIIKIMEFKIPYYVGPLNPYHKDISGHAWIEKKSNEKILPWNFEEVVDTTKTAEKFIIRMTNKCTYLLGEDVLPKASLLYQKFMLLNELNNMKIRGDYIAKGLKDEFIEELFKKKSRISIKDLCNYYEYKYQVKLDKKDISGLDITFKSNLSTYVTFSKIFEGHNIELDPYNDMIENIIKYKTIYGDNKDIFEKKIRKDYSQYLTEENIKAIKNLNFSGFGNLSKKLLLEIPGTNNNTGESFENIMEALEGTNDNLMKILNDPYTFMNSINEINKGHDKKELTYENIMNERYISPAVKKSTWQAIKIIEEIIKIKGYLPEKVFLETTREEKDKKRTTSRKEQLKALYKNIKEEYFINSKERLENFTEDKLRDDKLYLYYQQLGKSMYSDKLIDLDDLLNNNTKYDIDHIYPYSQSGDDSINNRVLVLKDENNVKQDSYPLSEEIRIKNASRWKMLRDKNLISEEKYKRLTRNTPLTDEELSKFVARQIVETSQSIKILKDVLEEYYENIDVNMIKVSVSKKLRMALGIRKIRELNNFHHAHDAYIAILSGDIYTKRFTKDIYNYFKDNKLSSQERKVRRDYNLNGFFTHVVYSKKFTPKKSIKNKVIIEKTRLWSPLRIPEIVKMMDTSNILVTRKIEESHGNFYDETLYRKTEKSSSMRSLKEGRLSDISKYGGYDSLSIAYFFIVKFKEKNKEKVQILSLPVIDMKKIKTENDLKNYCIDKLKLEEPKILINKLRKQTKISYENHDYRITGKGNGGIVFVVNNNIELYIKNKKVTDLYHILKYLDKYNKLSKKYIKNKELVFETEEEKEFFEKTELKIRKYYEKGDWFVIDEDMLNNIYLLLQEKCSSVYKNMKYNLKDVFVNSKDVFYNLDFKDKVEIIKEVLKMFTTTAETPNFEKIGYNKKAGRMSIGYNVTDKKFYIHNESITGVFENKIRIK

SEQ ID NO: 4583 - protein, 1389 aa, unidentified
  REGION 1..1389: note = Description of Unknown: Cas Enzyme sequence
MAEVKKQAAKEYYLGLDMGTDSVGWAVTTPDYEVVKKSGKALWGIRLFDAANTAAERRMMRTARRRTHRRAHRIDLLQELFAPEISKVDPGFFARLDESRLWQEDKAVDQPYSLFNDKDFNDISYHKKYPTIYHLRYALMTSDRPFDVRLVYLAIHHIIKHRGHFLFENLKPGEEGSSGFPETFQAFLNEMKEELDIDIDPSKRDSLKSILKDTGITISEKSKKVLSCFGDTRNKSLKAAASLMSGGSASISDLFGDESLKESEAKQVSFSASNYEEKEPVLQGDLGDRFELILVLKGLYDWARLAELMGDSKTISEAKIKVYEKHKKDLKILKKLIRSVSYKDYYKTFKDVGPKSYSCYVGVCKVKGEKKVIPKRCPQDEFYKEITGVIEKADDSEDKAYALHEKETKNFLPLSVERINSHIPYQLHEQELKIILEKAEKYLPFLKEKDQYGTVSSKILQLLTFRLPYYIGPLSENSPNHWFVRKDKEGHIYPWNFSEKVDEAQSAENFIVKMTNTCTYLLGEKVLPKNSLLYTEFMVLNELNNVRAGAAGEKLNPDLKEAAWNELFLKSKKVTQKGLIRFLIRHRWEEKEAKIIQGIDGDFKSSLAPWIDMKKILGDSFDKDLAERIIKDITLFGMDRKMLRKRLENFDVKLTSNQIKELLRLKYSGWGRLSEKFLTGILPVIGKNVEPLVDEATGEVMNIITALRKTNLNLMEILSDAHGFSAAISRENEGKLGETLTYKTVEDLAISPAVKRPVWQSLKIIREICHIMGGSPSRIFIEMARDPNGANEKKRTVSRKDRLLALYKNCKDDTRNWAEEISKYSDSDLRSDRLYLYYTQMGKSMYTGKPIDINSLSDRNIYDIDHIYPQSKTADDSLDNRVLVERSVNGRKSDDYPLSEEVHTRMKPFWDYLLKSGLISKRKYDRLVRNTPLSDDELAAFIGRQLVETRQSTKAVTEILKNIFPDTTIVYAKAGITSRFRQYGNFVKVRDINDFHHAKDAYLNIVVGNVYYTKFTANPLNFIHGDSPRYSLKDEVLYRYPVIRNGKTAWVPGEEGTMAVVRKWMNKNNILFTRMTYMGHGGLFDQKLMKKGKGQVSIKEKGAIANINKYGGYNKATTAYLMYVEGQDAKGKKVYVLENVPLYLKDKLTSIKDKEVYCDKLWNQGKDQKKKITHIKVLIDEIPLQSLISINGFKFHITGRTGTSYSVKSAEELVLDPNDAEILKSVLKFTERFRIATAKAKKDKNSGPLDVALQLTSYDWTKSGRNTELTPEKAAEMREKDLIHLYDVFLNKLTSFYGRAFHAQISVLQNGREKYEGLPPEWKCVVLSEILHLFQCDRVLADLTLIGGSSQAGALKFSKNLKPDNQPMLITQSVTGFFEKKISLAPYRK

SEQ ID NO: 4584 - protein, 1367 aa, unidentified
  REGION 1..1367: note = Description of Unknown: Cas Enzyme sequence
MDTAKTNKQPYYIGLDMGTSSVGWAVTDASYNVVKKHGKALWGVRLFEEAQTAADRRLHRTARRRIQRRKQRLALLQELFAKEICKVDPGFFIRLHESRLWQEDKSIDQPNTLFNDEDFDDKAYHKAYPTIYHLRYALMTENKSFDVRLVYLAIHHIIKHRGHFLLENYDLSNQETSGFDESYIALTNAIKELLQKEIPVGHVEKIQIILKDKSLSKREKTEKILQVWDVIKDKQLKEVVQLICGGTANLSTLFMDESLKEALKVFEIKDSKISFSTAVYEEKESDLQSVLEQRFDLVYAAKMLYDWSLLAELMGDRKTLSEAKIAIYETHKKDLEVLKRLTRQDKSLYRKLFRGTDKDSYSAYVGSCMIHGEKLVIEKRGSTEEFYKFLKKEISKLPDCEDKIYVLSKIEAENFLPKAVSTINGIIPYQLQEQELDIILKKAEQYLPFLMEKDAYGTISEKIKQLLTFRIPFYVGPLNRHSDKSWAVHTDKEGRILPWNFNERINEEKSAEKFITRMTNKCTYLLGKDVLPKNSLLYTEYMLFNELNNVKIGKAGTYLTEEQKEKLWKELFLTTKKVTLSKFSKFLIKEGIDKEEAVEIKGLDGGFKSSLASWIDLKNILGEDFTRDKAEEIIKAITLFSMDKKILKKYLMRIVSEPVAKQLSKLRYTGWGRFSKEFLTEITPRVTDDVQVLVDTSTGEIMNIITALKKSSLNLMEILSSTYGYSAAISEANKELVGNTVLSYETVKELTVSPAVKRPIWQTLKIIKEITHIMGAEPARIFIEMARDKQPDKGRTDSRKKQLIELYKKCKEDVRSWSNRESKDWVEEIESKSDSQLRSNKLFLYYTQMGKCMYTGKPIDLGALLKGQLYDRDHIYPQSQTKDDSLDNLVIVDNRENRDKSNTYPLSKNIRERQIGFWKLLRDKGFISKEKYFRLTRNTPFSDAEKAEFIARQLVETRQSTKAVAEILKRVLPKSIIVYVKAGLTSRFRQYGEFIKVRDLNDYHHAKDAYLNIVTGNVHYTKFTSNPIRFVKDCQIYSLNEHALYKYPVERNGIVAWAPNKEGMMPSVTRWMNKNNILVTRMSYVGQGELFDQLPLKKGKGQVSLKKEGPISDISKYGGYNSASTAYFMYVEGEDNKGKPVYVIETMPLHMAARLTTLEEKQKYCEELWLESGGKLKNPKVLIEQIPIQSLFSINGFRMTIAGKTGSHYIFKSYEELILNNEHTITLKAVLKFVSRKKLNKESLITSYDHLEESQLLALYDVFLDKLEHSCFSKPQSFTQPIKVIKKGRDIYIRLSLEDKCQILSEILHLFQCNATLSNLTLIKGPANTGKILINKKLPQDKSITIIYQSVTGFYEQYIPLAPCKKS

SEQ ID NO: 4585 - protein, 1360 aa, unidentified
  REGION 1..1360: note = Description of Unknown: Cas Enzyme sequence
MKEINEYYLGLDMGEGSLGWAVTTPDYHVVKKAGKALWGVRLFELAKTAKERRVFRTGRRRIERRNQRIDFLQELFSEAVCEKDPGFYQRLNDSRLWEEDKTERQINSLFNDVDFTDKSYHKKFPTIYHLRQKLMDDSCEFDVRLVYLAIHHILKHRGHFLLENFEIREDGAVGFEEAMADLGNVLGQFLDRSLPVENNDACKEILKNRKLNKLEKLEQLGKLYDAGGDKSIKEIFRLIVGGTAHLAVIFCDETLKNTGRGKISFEDAQYEEYKNDVQTILDDRFDVVAACETLHNWAILAELMGNYKYISDAKVAIFNEHRKDLTVLKRLLKRDSNVYTKMFRMAGKNSYSAYVGLCKIHGKKVPIEKACTQGDFAGEIKKIIKNFPDSEDKKYILDKIERNELLPKAVSKQNGVIPYQLHLVELNKILSNAERYLPFLKKEDEYGTVSDKIRKLFTFRIPYYVGPLNGHSPFAWAVRKDGNGHIYPWNFERKIDIEASAEEFIRRMTNKCTYFVKKDVLPKNSLLYTEFMVLNELNNVRIGSAQEKLPPGMKARVWERLFLKDKKITAKKMCSYLIREEHISKEEAAQISGIERDFKASLAPWIDMRKILGDNFTVSDSEKIIKDITLFGADKKMLRRRLKARFGYLEDCQVKELVRLPYQGWGRLSKEFLTQILPKAERDSTVLVDQETGEVMNIITALKKTDHNLMELLSGKFGYSAALSEVNTTSVSVCDKAISYKNIQDMRISPAVKRPLWQTLRVIKEIIHIMGKAPSRIFIEMARAEDEKKWKTVSRKDRLLDLYKKCKDEIRNWSADIKKLGEEIKELSDGQLRSDKLYLYYTQMGRSMYTGKPICLGSLMAGADYDIDHIYPRSATGDDSLDNRVLVERTENAKKGDHYPLSIEIQGGRAVFWKVLLDKGFISKEKYRRLTRKTLLTDDEKAGFIGRQLVETRQSTKAIAEILKKAFPETKIIYTKARNVSRFRQYAEFVKVRDMNDYHHAKDAYLNIVVGNAFYTKFTSNPIHFLSEKNAVYSLNERTFYQFPIQRGSTMAWEPGDSGTMAVVRKWMDKNNILYTRMPFEEKGGLFDQNILKKGKGQVSLRARGALSDIQKYGGYNNATASYFMLVKAEKNGKTIYLLETVPLHLSGRLESIEDKINFCRELWHRDRKDYKNPVICIPKIYKQSLFEVDGFREHISAKTGNQFVMRNAEQLCLNAESAQIIKNVLKFNQRKQVQKELKITVHDKITEENLINIFETFISKIQTSIYRNKFEASVGLMIKGKGTFIELSMEDKCKCIGEILHLFQCNPVLSDLQLIGGKKASGRIYMGKRFDGNKKVFLVLQSVTGFFEKKILLAPYEKK

SEQ ID NO: 4586 - protein, 1379 aa, unidentified
  REGION 1..1379: note = Description of Unknown: Cas Enzyme sequence
MQKLKNCDYYIGLDMGDASVGWAVTDTNYNILKFNGKALWGIRLFDSANTAASTRVFRSGRRRIDRTTWRLKMLQELFAEEIAKVDPGFFMRLEDSRLHLDDKRDKAVYNLFVDKNYTDKDFYQQYPTMYHLRYALATQAGPFDVRLLYLAVQHIAKHRGHFLFDNLDASKVNDFNAVFSEVENYVRDEMGIEDWSCQNIDELAKVLCDVNLGRTTKQKAMQSLLPAQTKQQNAIIQLFSGGKAKLAELFVDEELDECEKKSVSFQDDDLNEFEPVLTAALGERYEGLLRFKAIYDWSLLAKILHLDTSKKDEDEQHLLSECKVQVYEDHKRDLAVLKSMLKGKPLYNKIFRQDGDISYEKYAKGIKGRNQIDFCKDLKKQLEGIAEYKKIMQEITSIDDAKTEEERLLFRITNGFAFPKQTTKDNGIIPIQVHLAELKCILDNAEGYLPFLGETDNNGLSVREKIEQIVKFRIPYYVGPLAGTRMSREQGRCWVVRKNEKIYPWNFTEIVNLEESAEKFITNMTAKCTYLVGEDVLPKESLLYSEFMVRNAINNITVDGERLPVDVLEKIFKQLFLAKTSKVTKKTLERFFRQENISFQNIGGIDDKINASMKSYNDFRRIFGEDYIQLHRDEIENIIRWITLFCDEKKMLVTKIKNTYPQISDDEIKAIKKLKYKDWGRLSATLLNSSTIAYEDKAFGELVTIISALRHTNKNFMELLSSYCSYDFIGKIKEFNGSRQSSNGKLTYKDVEELYVSPSVKRSIWQTLTILEEIKKIMGCEPKRIFIEMARSKEESKRTDSRLKKLQDLYKKCREENIDFMPRKDEFNALKTQLSSKKEEDLRSDKLYLYYTQMGRCMYTGERIELAYLYDNNLYDIDHIYPRSKTKDDSLSNRVLVKKQVNAAKTDIYPLDAAIRTKMHSFWKLLYDKGFIDERKYERLTRSTQLGDEELAGFISRQLVETRQSTKAVAAILKTAYQNSEVVYVKAGNVSDFRQQFKFVKCRDVNDLHHAKDAYLNIVVGNCYHVKFTANPLNFITKNQDNRRYSLKPEIFYKFSIKRDSEIAWIGGKDGTITTVTKTMHKNNILFTRQPVEGKGELFKQNPLKAKSGQLPLKAGLSVEKYGGYDSLTTAYFALVKSEGKKGSVQLSIEGIPLVYAKQGEKAVQDYLTEVVQLCKPEIKIPKIKKYSLFKINGFPMHISGRTGKQLVFYGAGQLCIADDVADYLKKALKYETDIAEKEKTLADQNADDIQKQKAQKGLDFYEQKWGISGAVNVQLYDMFIAKSANNLYKNRPASQTITLKEKREHFVKLTLSKQIHIIKEILNLFKCASASADFKLIDKGTSCGTLKISNNITKLKECILINQSPTGVFEQEVDLMKL

SEQ ID NO: 4587 - protein, 1387 aa, unidentified
  REGION 1..1387: note = Description of Unknown: Cas Enzyme sequence
MSDSKKFEGENVKSGDKKTNKNHGKVLKSSPKEIRKNTEYFIGLDIGTSSVGWAVTNTDYEILKFNGKRMWGSRLFNEASTAEERRGHRVNRRRIQRRRDRLNLLEEIFSEEMAKVDPEFFMRLKESKFHLEDKDERILGESNIIFKGSEDGDKKYYEKYPTIYHLRHKLMQSCEDVDIRELYMALHHIIKYRGHFLFKGDFEETGTSIENIIIELLELINNNLGVKKFEYNESLINELKNIVSNTSNTITNKKKLLGEFFNKKEYKAHKSLFILSIGASVKPVDLFLEEEYKDIDDIKNISFKNLEYDQVRDTYESIFLDKIEFIDVAKRLYDATILLSIKPEGKTLSEAKVDIYNKHHNDLELLKKVLKTDKEKYDSILKLDIKKGNNYVNYVKKSKNGISCSKEEFHNALKKVLVKIEKTDDIKYILNEIELERFLPLQRVKDNSVIPYQIHRYELKKILENASKKFTFLNEESDGHTNIEKIIKIMEYRIPYYVGPLNDHHSVYNNGFAWVSRKRSGRITPWNFDEMVDKEESAERFIENLTNKCSYLIGEDVLPKESLLYSEFSLLNELNNIKYDGISLPIDIKKSIVEKIFRVEKKRVTKKYIKEFLKQEGYSDGKGEVSGIDIDIKSDLKSYRDMVKIFGTEIDYRMAENIIKWVTLFGDSKDLLKTKINKEYGEKVSKDQLKKVCKLKYRDWGRLSKKFLTGIRSSVLVNDATGEGYTIIEAMRNTDNNLMQLLRNEYDYLKKIDQINMLSRKDIDEISHDILDDLYCSPAVKRSLWQTIKIVEEIKKIMGHEPKKVFVEVTRTNKADKKTTITRKNRLLELYSAINAESRDWVNELNSTEVSKFNSKKLYLYYTQMGKCMYTGKNIDIESLFTDMYDIDHIFPRSKTKDNSFENLVLVTRKANADKRDVYPIDPKIQTERKSLWDMLHDKKLIGDKKYDRLTRTTGFTDDEMSGFIARQLVETSQASKAAAEMLKLINNDSEIVYVKAENVSDFRHENEFIKVREINDHHHAKDAYLNIVVGNVYNEKFTKNPANYIKKGGGNNYSLNCIFNRNLDRNGKRIWDEKKSIDTVNRMMKSNDVRVTFKNRVDKGPILNKVTIHKASEFMDDGKKNKKGFPIKSSEKNGNNRLCNLYKYGGYKDLNYSHYTIVRYNVYEKKGLDIKYYMIPIPYYLCLCNINQHDYVYDYISNRSKKDVNNIEIIVNELKMGSLINIDGYNYYLGGSKPKTFYVDPAYQIILDKEIERCIKEIVKAKNNEYRFINTDKINKNLNMKIYKYIVNKKIIGVFRNRKWDKGEYLNSSETIEKFSGLSVESQCNVILRLINDMRGSNKGGANSKFDELEMTISRAEIPQTLSNVSSFKIINQSITGLFENEVTIV

SEQ ID NO: 4588 - protein, 1241 aa, unidentified
  REGION 1..1241: note = Description of Unknown: Cas Enzyme sequence
KNIIFKEKEDGDKKYYEKYPTIYHLRHALIQGCNDIDIRELYMAVHHIIKYRGHFLFKGDISDSGASINDNIIEIIDLMSSVAGMKKLEYNDKLIEEIRNIICNVDKTINDKKKDISKVFSGSNNDYKAYKSIFALAIGAKVKPYDIFLEEEYKDLDDIKGIVFKNTEYEEVCDTYEQVFEDRIRLIDAAKSLYDLIILLSIKPEGKGLSENKVDIYNKHHEDLTLLKEVLKEDMTIYNMVLREDKKDGTNYINYIKKSKYGKGCSREDFYKSLKKALEKLEVNEKIEHILSEIDLERFLPLQRVKENSVIPYQIHRDELKKILANASLKFNFLNHASEGYSNIEKIIKLLEFRIPYYVGPLNNHHPVDNKETKGFSWIVRKEAGRVKPWNFDQLVDKKASAEKFIKNLTNKCTYLVGEDVLPKESLLYSEFCLLNELNNIMYDGKKLSLDAKNDLIEKVYKKEKKKLTKKGIKDFLKQNNYADGKGEVTGIDIDIKSDLKSYRDMVKIFGPDFSHKMAEDIIKWVTIFGESKDILESKIRESYGNMVDDKQLKMVKKLSYKDWGRLSKTFLTEIRSDILIDECTGQGQSIIESMRTRDQILMQLLRNEYDYTKKIEEFNREKQTDTREISYDLLKDLYCSPPVKRSLWQTIGIVEEIKKIMGHEPKKIFVEVTRTNKAEKKRANSRKKRLLELYKDIKDGARNWIDEIEKTEDSKFNSKKLYLYYTQMGKCMYTDNIIDIETLFTDMYDIDHIFPRSKTKDNSFDNLVLVTKESNGRKGDKYPIDPAIQKKKIDLWRCLHEKKLIGDIKFERLTRTFGFTDDELSGFIARQLVETSQSSKAAAEMLNMINKNSEVVYVKAENVSDFRHDNEFIKVREVNDHHHAKDAYLNIVVGNVYNEKFTKNPLNFIKDGGRKYSLNEIFKHPFPKNSGIIWDPEVSMETVKRMMKSNDVRVTKKIVEQKGALYDATIYKANIAKEESYFPLKMGDDRLKNVTKYGGYTSIKPAYYTIVSYDEIGSKKSEHIVRMVPIPIYICKLVNSFEDIAEYTHQYIINRSKKSIDNFKILYKKLYINSVIELNGFKYYVGGKTDDSFYIDSALDLILYDETNKLFGKIVKFYNSDFKRRSDEFINFENNMKLYDCLISKKESSYYENKKLNKLDEFKDQTTIDKFKNLSLEDQCSVLLEILNTLTDKKTTYDLKKIGINVYRAKTSMKLSSYKSFKIINQSITGLFENEIDILG

SEQ ID NO: 4589 - protein, 1333 aa, unidentified
  REGION 1..1333: note = Description of Unknown: Cas Enzyme sequence
MKKVFGDYYLGLDIGTDSVGWAVTDPEYNILDFNRKAMWGIHLFKSGGTAEKRRLFRISRRRLQRRKQRISLLRDLFRDEINAVDPGFYDKLDSSRLQPEDRSYEGKGTMSGGICLQDLNTDKKYPTIYHLRQDLMTSDLKPDIRLVYLAVHHIIKYRGHFLFDGLSDNSEMPEFNTIFNEFQAYLTDEFGIDISVEENIDEIKRILLNKSLGVTDKGRTLQRLLSAESTDQKAVAILLAGGTSSMDKLFQDEELKETKVSFKGTSFEDGRQELENTLGPEKMQLLDLMKQIFDWSVLSGLLSESRTISEAKIKQYNQHRIDLKMLKSVVREHTMDRYGDMRLYNEIFKSDIKDNYSYYSGVTKKLQDPNNKKCNQDDFCAFLSKKLEGFDFGQNEATKSMGERIANKTFMPKQVSKENSVIPNILHKKELMAILDNVSKHYPFLLLKDDSGLSVKEKIEMMCSFRIPYFVGPLNPDSERAWAVHKSGERITPWNFEQVIDLEESSVKFIDELIGECTYVRGEKVVPKHSVIYSRYMLYNELNNIKVNGERIDPTLKLEIVRELFETDRPKKVTVKSLGEFISAKTGIKDVAIEGIDADVKANLRSEMQIRKIIGDKSKNIKMVEEIIRCIAVFGDERKRLRTKLESDYSGLLSVPEIESLSKLKYEGWGRLSERFLTGIVHNWNDGQSLNILNALEQTNRNLQELLSKDYTYAKQIDVINSQQGDERSGRISYDMVEDLYCSPAVKHGIWRALSVVGEILMITGHPPKKIFIETTRENQEIKKKPDSRKENLIRLYKNCKDQERDWAAEIGGTEESRFRGKKLYAYYTQMGRCMYCGKNIDLNDLGNDDSDMDHIFPQSKKTDDSVHNNMVLVCKNCNMSKSDRYPIPQEWQDRMETHWKYLLGCGLISKEKYNRLIRKSELTDSELSDFIARQLVETSQSVKAVAEVMKQVFGEDSDIVYVKGGNVSKFRQENGYIKARNVNDYHHAKDAYLNIVVGNVYDVKFTKNPIRIVTNEKYNLNRVFDNDVRRNGVTAWISGESGTKATVSKYMRRNNIRYTRNPYKSTGQFFDVNILKKGKGQHPIGKGLPIERYGGYNKISGSYFALVEHGDKGKSKRTLESVPVLYTSKEMGREELNEFFRSSGLVEPDVRIECIKMDTMMEINGFRATITGRSDNRIMYACAEQLILSYEVYDYCKAISNFTEAQKATRNKARALDYRLNTEMNIMTYDVLAGKLSNKYKGLPILSTQQKTLMSKRYAFMEKSLETQAEVLSEILKIFQCNSIGADIHEIGGGNNVGRLSINKDLSNFDSFFMINQSPSGLFETRTDLKTI

SEQ ID NO: 4590 - protein, 1323 aa, unidentified
  REGION 1..1323: note = Description of Unknown: Cas Enzyme sequence
VNGRIGDYYLGLDIGTDSIGWAVTDEQYNILEFRRKPMWGIHLFDGGSTAQNTRTYRISRRRLKRRAERIALLRDLFSEEISKVDPTFFERMDESDLHSEDRLVAQKNSLFNDPGFEDKDFHKRFPTIFHLRRHLFESNDKEDIRLIYLAAHHIIKFRGHFLYKGLGDGDIPPFEIVLNSLLENVRDEYGMELEVTDRDLVKNTLSDFSIGIREKSNGLVSAFNAVSDEEIALIGLISGKKTSMKKLFDDDSLDKMSFTLKDPDFETQLQENESDLGSERAHTLELSRQLFEWSRLSNILKDSDSISEAKKKDYEQHQKDLHTLKKAVMKYAPEKYSEAFKSKTHLGNYCSYVYVCGRGVPDKKCNAEDFHKYFKRILEPSGIRDDEEFKDLLYRLDMGILCPKQRTGENSIIPYSVHRKELVRILENASKHYPSLALKDENGFSRIDKTLMLEEFRIPYYVGPLDDRSKRSWIIRNSFDKITPWNFDKVVDEDKTSERFIENLTNMCTYLGGEKVLPKNSLLYSRYMLYNEVNNLRVNGEKIPAIVKQKIVTELFANKTKADKVSLRELKVFLKGEGILTGSDEITGTDNGIKATLRSEILLKNIIGNKISDRKMAEEIVRILTIFGDEKKRSKMKLKKEFSDKLTEREIEDLSSLKFEGWGRFSEKFLTGLRQEINGRSMSIIELLEETTHNLQEILSIYSFSEIINQYNKELTSEPDRIAYDVVKDMYTSPAVKRGIWRALSIVKDILKAVGHPPKKVFVETTREDREKKRTESRKTSLMQLYKSCREIEWENKLSGVEESDLRSRSLYLYYVQLGKCMYCGKNIDIENLNNNDLVDRDHIYPQSKTKDDSIHNNLVLACRICNQAKGDRYPLPQEWVRRMHDFWTMLKDRKLINSEKYQRLTRRNDLTEEEFGGFINRQLVETSQSAKAVISVLKNVFKDSDVVYVKGSNVSDFRSSFGFVKCRLVNDYHHAKDAYLNIVVGNVFDTKFTKNPSYLLRNREQYNINKMYDRNISRFGTDAWVAGDLGSIATVRKYMRRNNILFTRYATKLRGALFKETVYRKKKGLFERKKGLDTEKYGGYSGIKISYLTLLEYDKGKKRIRSLEAVPTYFANTQTKKEDLIEFFSKTRNLTNIKVMIPEVKIKSLFEYKGFRFHITGNSGKGRFWVSNAIQLLLPEDMYAYCRKIENYEKDKQKKSEKPIQNYGLDKEKNMELFGLLMEKGAKPPYCIKFENISKTLKTSYEKFKDLELKTQVGVLRQILNIFSCDRISGDLSVLGGTENAGRIDISGILSDKDSEGMIMICQSPSGLFENKVLMNRK

SEQ ID NO: 4591 - protein, 1393 aa, unidentified
  REGION 1..1393: note = Description of Unknown: Cas Enzyme sequence
MMKEIKNYFIGLDMGTTSVGWAATDENYEIIKKNGKALWGIRLFDEAQTAEDRRMHRIARRRIERRSRRIDLLQELFAQEICKKDPGFYERLNQSGLHEEDKKVHQPNSLFNDVDFNDKAYHKKYPTIYHLRHALMTENHPFDVRLVYLAIHHILKHRGHFLFENFQVDENGVSGFEESFAAFGNALEHIKGESLDMGKEEEMKALCKDKKLGVKHKALALAQCLGRSKDNDFKDMMSLAAGGQATLSKIFKDEGLKDFSKNKVSFSDSQFENDKPEIIAKLGDRYDLIAALHDLYNWSFLAELMRGHKYISEAKIEIYDKHKEDLALLKKVLKQDRSAYNRMFKEPKDEEPKGKKTKEKTTNYSDYVKACKTNGKKLPFPYKKFNHEEFIKTVKSCLKNIPDSPDKKNIENKLEEGTFLPKAVSIENGAIPYQLHLQELKIILSKAEAYLPFLKVRDQYGTVSDKIISLFTFRIPYYVGPINEHAGSCWVVKKDKQGKVYPWNFTEKIDIEKSAEGFIRNLTNKCTYLIGEDVLPKNSLLYSEFTVLNELNNVRIGEIMQKLPLRLKEKVMDNLFSCYKHVSRTKFIKYLVSEGIDKKEAESISGLDGDFKSSLSSLIDMKHILGNDFSREDAEKMIKDITIFGGDKKMLKNRLHCEFSYLTSEQLTSLTRLSYDGWGRLSREFLVNLLPVEGDSCEVLVDHTSGEVLNIISAMRQTSYNLMELLGSRFGYGQAIEERNRKEEGQGRITYKDVENLYISPAVRRPLWQALKIVREIVKITGKEPSKIFIEMARENGEKGRRTISRKARLQALYKKCRDDTRDWAKELEGKSEEDFRSDRLYLYYTQMGRSMYTGKPIDINRLFDRNVYDIDHIYPQSLTGDDSLDNRVLVEKTVNAKKGDTYPLSSALDGCYISGQQIRIQDIQKEMRPFWHMLLEKELISKEKYNRLSRTTSLSDAEKAAFIGRQLVETRQSTKACAELLSKAYPQTRIVYTKAGNASRFRQYGGFIKVRDMNDYHHAKDAYLNIVVGNVFDTRFTANPLNFLKGNHQAYSLNTEALYGHKVSRSGVDAWIPAEKDEKGQVMAGHEGTMGTVRKWMRKNNILFTRMPLEGKGGLFDQNIMKKGKGQVPLKGDSPVSDIGKYGGYNKAKAAYFVLTQSKLNENTVYTLETIPLILRNNIQSNKDKETYIQKQWKKNGTKMEHPLVCLGHIPVQSLLEINGFKAHLSGKNGKTFSLRNAEQLCINEADTAVLKKILKFNQRAVLSKKGEEISVNPFDNIQEEDLNRLYHVFEDKLTNQIYKVKLGKQAAVLKKGEETFNRLSPEQKCKLIGEILHLCQCNATNADLRLIGGAKNAGALTMSTQIYPKDHVYLIEQSVTGFFEKRILLAPFGEK

SEQ ID NO: 4592 - protein, 1330 aa, unidentified
  REGION 1..1330: note = Description of Unknown: Cas Enzyme sequence
MKQKFGDYYLGLDIGTDSVGWAVTDEKYEILDFKGKAMWGVHLFDSGKTAEERRLHRCSRRRLERRKQRINLLRELFASEISKVDPTFYERLDESRFFIEDRKHKQPNTLFNDPNFKDRDLHKKYPTIYHLRSEMMKTNIKPDIRLVYLVAHHIIKYRGHFLFEGISDGTIPDFEPLFKELLTVLNTECDTNLNADNSIEEVQSVLVDRNSGIRDKKITLVKLFSAETSAEKSFIDLMCGGTAKLSELFNNDSLKSEKLSFKGSDFDERHDELEDLIGSDGIILLDLMKQTYDWSVLSGLLKGCDTFSEVKIKQYNQHKKDLKTLKNTIKNIIPKKYKEVFKSENTENNYCSYTNVYKNKIATVKSCSQDDFCKYLRSLFKDVPLEGDEYADMKERIENNTFMPKQTTKENSVIPNALHRNELSAILNNVSKHYPFLEEKDDSGISIKEKIELLCTFRIPYYVGPLNEKSKEYWAVRKEGGKITPWNFENKIDLEKSSESFIENLTNMCTYLVGEKVVPKNSIIYSRYELYNELNTTMINRERIDNSLKNEIVRDLFENVKSVKKVTLKGLEKYLRGRGLFKDGDVITGIDEDIKSNLKSEIQIKKILGDKFKDRHMVEEIIRCITIFGDDRSRLKKKLFIDYSNKLTKTEIESLSKLQFSNWGRLSEKFLTGIYHTDTASGINMNILTALEQTNLNLMELMTNKYSYNEQRIEINNNITGKSDGKITYDLVKNEYMSPAVKRGVWRTMRIIQDIVKITGHPPKKIFLETTRENQEIKKRTTSRKQHLISLFKACREQEAEFLGLIEGTEEGRFRGKKLYSYYIQCGKCMYCGKKIDLNELENKELYDMDHVYPQSKKTDDSLHNNLVLVCKPCNQRKSDVYPLPEEWQRNMHGHWTYLLNNGLITKEKHARLVRVSQFSEEELNDFVSRQLIETSQSVKAVAEIMKKMFGKDSDIVYVKGNNVSDFRNDHKFVKCRSVNDYHHAKDAYLNIVVGNVYDVKFTKNPINVIKSNEKYNLNRMYDYDIERNGICAWVTGEDGTIKTVSKYMKRNNIRFTRFAYEEHGKLFDQNLVKAGPGKFPAKYGENSEIYGGYDNVSSSYFVLIDHKIKGKRVRTIEPVPVHVAIHSPTDKRLVEYFEVEKGLISPKLLINRIKMKSTFEIDGFRLNISGRTGKMIVYMCGEQLVLPYDIYNYCKKISKHREVCVKEKKELPVSDYGITPEENLRTYDVLLSKLKDSKYNTFLKAQVITLESKRATFVSLPTGTQSKVINEILHVFQCNPVGMNLKDLEGPGQAGRIILNNNITNFKSVKLINKSPSGLFESTVDLNKI

SEQ ID NO: 4593 - protein, 1379 aa, unidentified
  REGION 1..1379: note = Description of Unknown: Cas Enzyme sequence
MTKKFGDYYLGLDIGTDSVGWAVADKDYNILNFNGKAMWGIHLFDSGNTAEDRRIHRIARRRLERRKQRIELLQDIFADEMNKIDPDFFERLSESRFVVEDRKHSTHDTLFNDPSFKDKDYFKKYPTIYHVRNALMEWNEKEKPDIRLLYLACHHIIKYRGHFLYENLSSGDIPPFEIVFEELIKSLNSECGTEIEPVGISSSAKEILSDKKLGVKEKTKKLHEILIDENFPDLIEELCKLLSGGTANLDNMFGNNDADSKLDKLTFKNTDFDEAIAKLEGQIPEKIEILTRAKTIYDWALLNDLLDGNGRSISKAKIKTYEQHREDLKLLKSILKEDSGKYYDVFKSEDIEMKINNKNIKVNYSAYSGIHKKGTTDTNVCSQADFCKYLRTVVFKKEFGDSMFTNKFACLVEKINNDTFMPKQTIKDNSLFPNALHQHELKEILENMEKYYPFLNEKDESEYNSKQKIIKICTFKIPYYVGPLNQKSERSWLERKEGKITPWNFEKKVDLDKSAENFMKELIGNCTYLKGEKVVPKRSLMYQRFELYNEINTLKIADERLFSIDPRLKQDFVKDLLETDGSKKVTKKVIENWLRKKCQYHKDDEVGISGIDNEIKSSLKSEKQLRGILGSQMNRKIAEDIIRLITVFGGDRSRMKAKLETDYSEILDSDQIDKLSKLTFKDWGRLSEKFLTGIYAAVNGEEMNILMALEKTSMNLQELLSENYGFKKQIDELNETDNTNNSITYDLLDDLYVSPKVKRGIWRSLRIIQDILKITDHPPVKVFIETTRENQESKRTVSRKDNLVKLYDACKKESSDINSLLNELNETEEGRLRSKDLYAYYTQHGKCMYCGQKIDLNDLSNNSKYDLDHIHPRSLKADDSLHNNLVLVCKTCNQEKGKTYPLKPEWQKNRASFWKFLKDKEFITKEKYERLIRTKPFDEDELSGFINRQLVETSQSVKAVAEILKRVFGDKTDVVYVKANTVSDFRNGNNGCHGSDSNNRLKFIKCRSVNDYHHAKDAYLNIVVGNVYDTKFTKNYKSFVQSGGTYNFREMFDSNIERNGVQAWKAGDDGTIATVQKYMRRNNILFTRFTQQEGGQLFDVNPLKKTEKTDRKLPLKNKDLLVGMYGESIQKYGGYDNIKGAYFILAEHYKKETKTQKLHHVPIYLSSKKSEAFQISDIIEHLYEKNDVESPTIVIMKILFKSLFEINGFRLHITGRSNERIKYICAEQLLLSDEDYEFCKKIEKYATKEMKVSLPASAYGLTVEAETVDDNPRLHLYDTLLNKLKGKYNVFYRDNVAKNVEEKKDVFKTLSPEDQVKTLSQILNAFKCNAETVNLKSIGGPGNTGIIQLNSNLDSFDSIKLIHQSPSGLFENEIDLKKL

SEQ ID NO: 4594 - protein, 1437 aa, unidentified
  REGION 1..1437: note = Description of Unknown: Cas Enzyme sequence
MESNGKYFVGLDIGTNSVGWAATDKQYKLLRGGYRKKLMWGSHLFMPASDCKERRLFRCARRRLNRRKYRIDLLNSLFVKEIAKVDDTFFQRLHDSSLHLDDKKVKTKYPYFGNKESEKKFHKDYPTIWKLRLELIKNNPSAFDDIRKVYLAIHHIMKYRGNFLIEGDYKTDDIKKFDIALAADLNKAFCETVPFDEDGNIRIDLVNPIELEKVFINKKKVYKKDLKKALTDNVLNQDKVYKDIVKELTLALVGSDFNMCKLLNIESEENKKINLSKYDEERDSWQEIAEDAIAVIDSLHKIYSWRQVYLLLQGKSTLSQSFVEIYEQHKEDTHLLLKVCRDIDSEIKPSKSFYQLMFKDEYDSSSKSNTKKDLLNNYRNMSKHRGGVKPTEVQKFIKKVILDNEECKIFCASNPNSLLSKNLNTLAERINEEDSTFLFYPSIKSTSAIPNQLHYLELEQILDNAVKYPHLEFLENEITKIKNLFKFRVPYYVGPTPKVKNSKNPQFTWSIRKPGHENEEITPWNFYDVIDIEKTRNEFIGRMVRKCSYLPSENCLPKSSLLYEEYVALDTINNISLDGKSLDKELKKEIYALALSQGKITYKNIKDYLGERNIKESMSGIDNDTSISLKNNKIALSIFPDIFSDTKNSHNHYEIIEDIINLLTVFGDDLRDALKSIENKYSSELTSEQLKLVSAIKTESYGRLSRILLTSIHPTDLENGEVDMSRSIIQEMRDTNSHFMKIISSPEYSYAIKLFKDNHSSIEKMKIESMLDSFPSITRRAIKQSLEIVKEIKHIKKDDPEKIFIEVTREDDLEKKNKKTKSRFESYQTLLDELNQDKNKTEKLQAFCKKTNLDIDSNNLFKEAKKSDENGSINGERVYLYLKQLGIDLYTGKKIDFEKLISADGNTVYDVDHVIPQSLTKDDSFDNKVLTERDINQKVKGDIYPLPLALRKADNIVIWKFLRSKNLMSDKLFNSLMRVTPLSEDEIGEFENRQLNVVNVVTNAIRDIFHELYPETIVVFSKASNISDFRQEYNYLKCRELNDLHHAHDAYLNIVVGNVLDEKYTKDLPTIIRNKYEDLKNKLISKSLNETKNSESTSFKLINCFRAKALSNQHGELYWDRSYHDLIKRNLLSATPIVTIKTEVNHGAYYNQKMVKKGKGFLPIKKQLADTTKYGGYSGIAPAQFILCQTIDRKGKIGKRLFSVPVIYNQYINWKELKNVNLVDDPRFVKFTDCSKYTKIELISTIPLYTILRFSNLKLALSGWDGIRQLSTWKLDNYVIKNQEQIEYLRALVKNKSKIDSEIKKIGNDVPFDFSYSLQRKNQKGQLVEFKINREQNISLVKEFFSGNEKSFKSEYFLDKDNTFEEAIHKFSELSFSAQFEILQSILKAISKTSYGDLESLGLWKTAGLIRLNINLSNCKYIEFTSPTGLYFKRTKL

SEQ ID NO: 4595 - protein, 1375 aa, unidentified
  REGION 1..1375: note = Description of Unknown: Cas Enzyme sequence
MSGENMQQQGNGKSGEYYVGLDIGTGSVGWAATTPDYRLLRFNRKDMWGSRLFEEAKVASERRAFRIARRRTMRRKFRLGLLQELFAEAISSVDSDFFLRLAESPFHASDKKVPGVYSLFNDEGFTDADYAKAYPTIYHLRSALIHDEAAHDVRLLYLALHHMIKNRGHFLFGDQDLSGGPDFSGVYRELAAQAGEYMVGDEVEGSVFTDARMGQMERILTNSELTISDKKAQLNDLFAIGRKADWKELMSLIVGGKAQLYKLFGDDDYKDAQPKDIEFKKGNYDEVRDEYAALLADRIALIDAAKAVYDWMKLRQILGNHQYLSDAMVEMYDAHQQDLQDAKHLIKTYGAPGDMTKAFRSEEQGYYASYVGFTENGGSKKIIRKRAKQEDVNKHFEDLIAGYTNVSESDAPIKERLLARLKEKIAFGKMRNSDNGVIPYQVHKMEMAAMLKNAERHFPFLAQVDEDGMSVSDKVISILTFRIPYYVGPLNPAHAQEDGHAWVVRRRSGRVLPWNFEEMVDRKASAEKFIRRMTNQCSYLAGENVIPKDSLLYSRYMILNELNNVRVDGEPLEISLKKEIFDKLFKTNRNVSIAKFRNILKSNGYPDAEDAVITGIDGKFQANYKSYVEMKAIFGDVIDTPAGERMVEELILWKCLYGEDASIFKEKVQDEYSGKITAEQLKKVVAKKYSGWGRFSEKLLTGVEGVDGETGEQFASIMDALEHTQDNLMQLLSTKYTFGENIDKENAGLDTIEEVTFASVMKDTYLSAPVKRAVWQAILICEEIRKIRKAAPKKIFLEMTRDTMQSKQKNKGKRTVSRKQQLQKLYAACKEDVHALAASLEERTDAELRSKRLFLYYLQQGRCMYTGQKIDLDALLRKEHTYDIDHIYPRSLTKDDSWDNLALVTSKANRGKDGKNDEYPIKPNVQKEMKPFWQRLRHCGLLSEKKYNRLVRTEELTTEELAGFVSRQLVETSQIVKATADILKQIYPDTQLVYVRAGNVSDFRHKYELIKVRDLNNLHHAHDAYLNIIVGNAYDAKFTDNPFKYIKAQRDTGEKHPYNLYKLFDKEINNSRGITVWHPEMIGNIKHTLARRTVNVTRMPIEQTGALFKATILPKGQDAEKKTPTKTSDERLLDLSKYGSYDKASVAYFIVVEHTKGKKRIRTFEPVMLMYKTQAEKDMLAYCKTILGLVQPKIICKKIRMQSEIECDGYSLIMRSKSGSDIRCADAQELQIENIALLKKVTGDVSKKAAIGKSVKLDVSVTDLRVLYESILHELREGAFKDRPNNPIAKMESYQGNLDAVSTEEAQKDLLVGLIMAAVHLMSDTSMNGTDLRAIGGSKMSGITSFNKNISKRKMVLVNRSVTGLYINKKVLNQP

SEQ ID NO: 4596 - protein, 1383 aa, unidentified
  REGION 1..1383: note = Description of Unknown: Cas Enzyme sequence
MTNDKEFFIGLDVGTNSCGIAATDGDYNLLRFRGNDMWAVELFDEAKSAKQRRDFRCMRRRLWRRQQRIDLLQDLFAEEISKVDPTFFLRLNNSALWADDKDERLSDNFLLFSENGYTDREYHKKYPTIFHLRRDVIAGKETEIRHIYLAVHHIIKYRGNFLSGSGGMEEVDNVSSCLKALNDYISENLEECDIIFDEDKFAAFSEATKSGKNLTDLKSAANEIFGTKTKQGKEISAALCGGGFSWSNVFGDEKYKESEGNKISFKNADAVDKIEAFVKDYPETSEFVLNLKALFDKVLLEKILGGQKSVSVAMVKIYEKHREDLKMLKSVIKKYLPKEYNAVFRLYAIKQKSEKKGKSEKSKKLNNYCAYVGLAKTNGEKHYVERCNKAEFYDFLKKTLAKAAEIANGDKDYETIIKELESGDFLPRISDADGGVFPQQINALELKSIVAQLKKFYPSFDKAEDGMTKAEKIEKIFSFKIPYYVGPLTAPKDENQKSNSWIVKKEGKVLPWNFEKIVDEEKTAERFIRRMTNKCTYVKGADVLPKQSILYQKFKVLNCINKMTINAVPISVETKHKIFEGFYLTTKKPTKKKLVKWLQNNGIVSKTEETVIGGVTDELTDDMSSYVTFVNIFGADTEKYIDVMEDIILCYSLFTEKDFVEKRIMRKYGDIPAVAENIKRIRKLSFKDFGRLSRELLTELRAYGAEETDEGEIPVTIMDLLWVTNMNFMEILHDKRYGFSKALEVRNGDKGGFDGNFDDYYLSPGAERGVRRALAMVEEYVKAVKRAPDKIFVEVTRGPDEKKERKSSRYKELVDFYKANKKFIEDYDRLIGELSQYKDSSKLRSERLYLYFRQFGRCAYSGEKIDLGELSGEGYDVDHIIPRSLIKDESVHNNKVLVLRRCNRDKSDYYPLSEIPDGNPQKSEKVVNFWKFLLKAEAINETKFARLMRTEPLQEDELQDFVNRQLTFTGQTVIALASILKEKYPESRVVYSKAGNVSDFRDRFKLYKNREVNDLHHAHDAYLNIVVGNVFDKRFSGNPREYLYEREDGKTRVFNVLNIYNRNIKGAWKKGETIATVKEVYGKNSMRVIRVPSLPSGEFYKQTILPKGEGTVPIKQKGALSSIEKYGGYTQAYTAYFVAVDSVDKKGNTMRTIEAIPTYYDRMAKMGVITLETYLEKFVGLKNAEIVLPHISVKSLLRYEGTLLYIAGTSENRWSAHNANQWFISKENSDYLRLVYKALERRAELKEEENAEELLVATSRDGKRKDYVTKMLNAEIYELIENQLRKPIYGGVSTFSNVLKCMENGRQKFDGLTILEQCEVLKQLVGFMQCKGLSADLEKIGGSKNSGKIQINKVITDKNVSIVNYSPAGLYRNTIIVNRVDKD

SEQ ID NO: 4597 - protein, 1352 aa, unidentified
  REGION 1..1352: note = Description of Unknown: Cas Enzyme sequence
MDKFYLGLDIGTQSCGIAATDENYHLLKFKGQDMWGVRLFEEAKTAEPRRVKRSTRRRMARRRERIRLLQDLFAEEIAKVDSTFFIRLNNSAFFPEDKEVEGKYSLFNDAKYTDKDFHKQYPTIYHLRKALYDGVDSDIRLLYLTLHHIVKYRGHFLFEGQDFSETQNIRPIMERLNEWLSNNYSEESLLFDLSGLENFEALVQDSSKGLRANTNELYKLFNLTTKQSQKIGAVILGGSVSLADIFQNESYKLLEKKKVSFKDASFETDIPMLQASLLGDDFQLIELLKQIYDWSILSKLLQNSTHISDAMVKVYNKHKADLKDLKAFIKTHYFEQYSNIFKKVDKKGANYCNYIGMAKINGSKVYVKKCKSNLFYDYIKKIMQTKKDELGDNIFYKQFMSDMDNNNFLPKISNADNGLFPYQLNKIELEVMLDNAKKGFPFLQNIEEGSTVAEKIISLLEFKIPYYVGPLNAHHAPQTDFAWISKRSNQKITPWNFDEVVNKEETAERFIRKMTNKCTYLKGEDVIPKNSLLYCEFNVWNQLNRLKINGELVTYEIKHKIYEELFKTQTKVTDKSLKILLKREGYGNVEDIVLEGKDSDFTASLRPYITLKRILGSLIDDKPQVGEDIILWHTLFNDRQMIKQKIMATYGNIDVVKNSINALLSLKYSDFGRLSQKLFTDIYGVDEYGEFVTIIDLLRNTNLNLQNILSRDDFKEGIDSHNSCKDIASSISYKDIEEMYLSPSVKRGVWQALQMVEEYTKAVKKEPNKIFVEVTRENTNSNKTPPSRRKQIDELFRSCGKDVEDINIFINQLSQKTDADLRQDKLYFYFSQLGRCMYTNEKISLEALSSDAYDIDHIIPQSLKKDDSLDNRVLVSRTANRQKGDNPILFPEWQTKNKSFWNLLLNKKLITKEKFARLTRTTNFSDEELISFVERQLVFTNQSAKAIAELLAKRYPNSEIVYSKATNVSEFRAKNGIFKNRDVNDLHHAHDAYLNIVVGNVYNTKFQHNPRMYFTKRTDELRMYNLEKLYNYNIANAWDRNKSLEIVKRTLDKNSPTVTRFSFTGKGAFYDETVYNKDEALFPLKEKGPLKDIKKYGGYKTLSTAYFIVVDSLDKKGKVIRTIEAVPIFYDNKYKGNIDMLTKMCEDYLGLKSPKIIIPKIKKQSLLKIDGTYAHITGKTGEQISLNNANQWFVQKADSDYIRLLSKFIELYNKKYINVDLDTQVEYIVSQSRNSSRKDMVSKKRNAELYELFIKQLSKPIYLGISSFKKVCTDLTKNKEKFNTLDLIEQANLINQIIKTFKCNAELSNLSNIGLGANAGKILIGKKIDGKNIQLINQSVGGLYSATTFISK

SEQ ID NO: 4598 - protein, 1373 aa, unidentified
  REGION 1..1373: note = Description of Unknown: Cas Enzyme sequence
MEKEYYIGLDIGTGSVGFAVTDTNYEVLKTHGKAEWGVRLFDSAQTAAERRFSRVNRRRVERRRQRILLLQELFAEEIAKIDPGFFSRLNDSFFYPEDKTEVQPNTLFNDPNYKDADYHKQYPTIYHLRYDLMTNSAPHDPRLVYLALAHILKTRGHFLYSDTGDFELGKQYEVVFNELTVAVGETLNITIPPTFAEPWHQILTDQSISNSVKQAKLLDSLQTKDKNAKSLAKLLTGYDTKFTDLFGEQYKEASPKNIKLSKLEDETLDQIESVLSEEHSSMVLIASSYYNLVRLEALLQGADSLSQTKINIYQKHAADLKKLKILFKKYCPEDAYKRFFSISEKGLFNYTAYSGHLMKNKKKLPVVEKCDKEKFTEYLKKFLNDLPEKAKKSKDYQNIVNEIEVGSFLPKITDKDNSLIPHQLHQAELKKILDSASTYLPFLNKQGGNGYTYRQMIELISDFKIPYYVGPLNPAHSVKDNPNSSSHHAWLTKLSNEPVRPWNFNRVIDIEQSATDFIGNMTNKCSYLIGEDVLPKDSPIYAKYSILNLLNVVTVKSQLLPTPLKQEIFEYFFLNPHRRVKLTKKRLAEFIQAKTGEIVSDSDIEGMDLEIPGEMKAELAIERIAAGKLSMEEKENIVRLITVFPDSPKMISNRIKSDLGEKLTSNEINQLSKLKFSGWGRLSEKFINGIAALNQDNQFKTILDFMWEESLNLMQVLAEYPSLRDQIQYLNDQILGAEQNFGYQMIENYPISPPVKRMVWQTLRIIKELIKVNHGTPPSKIFLEVAREEGEKVRTVSRKNQLLELYKNLKKQGSSLYAELESRSEAELRNKKLFLYFTQMGRCAYTGEQISIDSLNNRGADGHDIYDIDHIYPRSITKDDSILNNLVLVKSQSNRDKGDTYPINDAVRKNMFGFWSQLKASNLITEEKFRRLNRNSELSLDELANFINRQLVETRQAAKAAADIIKQFLPETRLVYVKAGHVSDFRYKQSNFRFPKVRGMNDLHHAKDAYLNIVVGNVFDSKFSENPIKYLKSNPDKKYNLARMYDFEVRSMNKELAWQAGPDGSIAMVRKMMARNNILVTYQTHHQHSGQNGGIFDQNILPKGKGQFPIKTSDPRFCGEAGIAKYGAYSKETGATFFLVEHKSGKKLLKTIMPLGLAWYLTHPLTKEALQEYCEKDLGLIEPKILVSDLPYNAIISVDGYPLRILAKTGSSLKMANSIQPIFNLTFEPIVHEVFFQLAREVNEEDNEPKGADKVKADFILLYDEFLNKLGKPPFSGLSAYANQVENLKQGREKFQALSLKDQAKLLNQALTLFLCGPQLSDLSLISPLKNGKPQNTQVGMITLSQNLPWETKKIEIINYSVTGLFEQRIEVS

SEQ ID NO: 4599 - protein, 1388 aa, unidentified
  REGION 1..1388: note = Description of Unknown: Cas Enzyme sequence
MKGKEVNSDYYLGLDIGTNSVGWAVTDENYNLLKANRKYLWGVRLFETANTAEDRRLHRSARRRNQRKVQRLQLLKEMFEPHIKKVDPTFFDRLEQSYLHDDDKLHSFNYTLFDDKEKTDPTFFKKYPTIFHLRSYLVHNRDDNVDLRELYLAIHHILKTRGHFLFSGENLNTTSSFETLVEDLKNNLQDSLNIDLTINGSNEEFGEILKITKKREKKKELNDILIFSVNNEEGEPQEFSKVESEIKNALAGSPFTIGKLFANEEYEEFEPAKIVFDKDDYEATKEKLEQQLTLEEFSLIETFEGLYSWALLAEVLRGREYISDAKIDVYEKHKEDLISLKKLVKKYEKGEYNNAFKLFNKDNYPHYVGKSSKGGVLVKSPFKSKCTQEDVCKYFSKLLTPHKNSNDPLLTSVLDELDNKSLLPKLRVKDNRVIPHQLHVKELKEILNNVERYFPFLNEADEDGYTPVEKMVAMATFRIPYYVGPLNTYHMKEGGEEGFAWMIRRSGEDGPIYPWNFEKVVDIEKSAEKFIRRMTNKCSYLFDKDVVAKDSLIYSKYRVLNELNNLRINGEPISVELKQKIYNELFLESKRKNITIKQLKTYFVNNNLIDKNDEFNVEGIDNGFTNSLSTWIDFAPFLENEILLESEIENIIEWKAYYGEDDSILKRKIENEYKKLDSDQINSILKIVKPYKGWGRLSKELLEEVFHEDPTTGALHSILDLMWNTNNNLMELLSTRFTFVNEIDEYNKQNASDTNFNYKSLIEPLNISPAVKRQIWQTLIIVREIKKIQRKAPKKVFLEMARGGGIKGQRTKSRRVALIELYEACKNDYEFNKELLSSIEQKTDAELRNDTLYLYYTQMGKCLYSGEPIRLEDVNKKSLYDIDHIYPQSLIKDDSLNNRVLVKANYNSEKKNDYPIKEAWQSKQSGFWRVLLDKGFITKEKYFRLTRKTRLTDEDLATFINRQIVETRQTTKLVGTLLENLFGESKTKLVYSKAGNVSEFRKDFDILKSRSINDHHHAHDAYLNIVVGNVYNTKFTENAWNFFKLPRKESYNIRRLYYYDVERNNSIAWIADKNFEENDRSKKHERTNETGTITTIRDTFRNNQILVTRKPITGSGELFDLQPLKGKDNLIPLKGSNPILHQTEKYGGYDSKKTGYFFVVEHTHKKKRIKQIRTVPIMNLVDIQKNPNALMDYCINTLQLEEPKILIDKIHLHEKVKVDNFFYMTRGITGRQIFGNGEHQLVLPQESYDYFVTIEKYLSLLARTKTVELTANAEILADDLGISKHKNRELYELFLIKERDTLYKKRKSNQKLALENGLSIFENIDVLKQCIVLVQITNLFACNPLSADLSLIGGVKNAGVVLFNSTVTDDFKLIRSSPTGVFTKEVSV

SEQ ID NO: 4600 - protein, 1395 aa, unidentified
  REGION 1..1395: note = Description of Unknown: Cas Enzyme sequence
MKKEIKDYFLGLDVGTGSVGWAVTDTDYKLLKANRKDLWGMRCFETAETAEVRRLHRGARRRIERRKKRIKLLQELFSQEIAKIDEGFFQRMKESPFYAEDKTILQENTLFNDKDFTDKTYHKAYPTINHLIKAWIENKVKPDPRLLYLACHNIIKKRGHFLFEGDFDSENQFDTSIQALFEYLREDMEVDIDADSQKVKEILKDSSLKNSEKQSRLNKMLGLKPSDKQKKAITNLISGNKINFADLYDNPDLKDAEKNSISFSKDDFDALSDDLASILGDSFELLLKAKAVYNCSVLSKVIGDEQYLSFAKVKIYEKHKTDLTKLKNVIKKHFPKDYKKVFGYNKNEKNNNNYSGYVGVCKTKSKKLIINNSVNQEDFYKFLKTILSAKSEIKEVNDILTEIETGTFLPKQISKSNAEIPYQLRKMELEKILSNAEKHFSFLKQKDEKGLSHSEKIIMLLTFKIPYYIGPINDNHKKSFPDRCWVVKKEKSPSGKTTPWNFFDHIDKEKTAEEFITSRTNFCTYLIGESVLPKSSLLYSEYTVLNEINNLQIIIDGKNICDIKLKQKIYEELFKKYKKITQKQISTFIKHEGICNKTDEVIILGIDKECTSSLKSYIELKNIFGKQVDEISTKNMLEEIIRWATIYDEGEGKTILKTKIKAEYGKYCSDEQIKKILNLKFSGWGRLSRKFLETVTSEMPGFSEPVNIITAMRETQNNLMELLSSEFKFTENIKKINSGFEDAEKQFSYNGLVKPLFLSPSVKKMLWQTLKLVKEISHITQAPPKKIFIEMAKGAELEPARTKTRLKILQDLYSSCKNDADAFSSEIQYLSGKIENEDNLRLRSDKLYLYYTQLGKCMYCGKPIEIGHVFDTSNYDIDHIYPQSKIKDDSISNRVLVCSSCNKNKEDKYPLKSEIQSKQRGFWNFLQRNNFISLEKLNRLTRTTPISDDETAKFIARQLVETRQATKVAAKVLEKMFPETKIVYSKAETVSMFRNKFDIIKCREINDFHHAHDAYLNIVVGNVYNTKFTNNPWNFIKEKRDNPKIADTYNYYKVFDYDVKRNNITAWEKGKTIITVKDMLKRNTPIYTRQAACKKGGLFDQTIMKKGLGQHPLKKEGPFSNISKYGGYNKVSAAYYTLIEYEEKGNQIRSLETIPLYLVKDIQKDQDVLKSYLTDLLGKKEIKILVPKIKINSLLKINGFPCHITGKTGDSFVLRPAVQFCCSNDEVLYFKKIIRFNEIRSQREKMGKTISPYEDLSFRSYIKENLCKKTKADEIGEKEFYDLLQKKNLEIYDMLLTKHKDTIYNKRPNSTTLGMLTKGRYEFINLKPKDQIIVMLEILKLFCTTREAIDLGLIKGKPAAGVATLGKKISNPDNCILIYQSITGIFEKRIDLLKV

SEQ ID NO: 4601 - protein, 926 aa, unidentified
  REGION 1..926: note = Description of Unknown: Cas Enzyme sequence
MMFRIEYYVGPLNTYHHVDQGGHAWMVRKAEGKITPWNFDEKVDKEASAEKFIRNMTNKCTYLIGKDVIPKQSLLYSRYKVLNELNNLKVNGVPISVELKQKIYEELFKKQVNVTFKQLKTFLKAQGADADEIILSGVDEAAHKFTNNLQTYHKFHAIFGDKIEFEPQRSMVEDIIRWKCLMGDDIAMWKHKIEKEYGDQLSEEQLKKITRLNFNGWSRLSQEFLTDVPGVDIESGEVYSGIMDALWKTNENVMQLLSSRFTFAAEVKKQNQGTGRIEKITYDEVMKDTYLSPAVKRSVWQAITLVEEIRKIRKADPKRIFVEMTRQPDAKKERKLSRRTQLLNAYKAIGSDLAEYDKEHVSTLITQLESKKDEDLRRKKLYLYFTQMGRCMYTGERIDLSSLLRDTNSNIYDIDHIYPRSLTKDDSLDNMVLVKKVENLKKSNDYPLPDEMRKKRYGYWKGLKEKKLISERKFSRLIRTTKLTADELAGFISRQLVETSQMVKATADILEKIYPSVTIVYVKARTVSDFRHDYDLPKVRALNDCHHAHDAYLNIVVGNVYYEKFTKNPFRFIQNQKGKGKVEYNLYRLFDKDVKVGDRIIWNAKENLAHVKATLERDTVNVVRMPVEQRGQFFDATIQKKGATKNMLVLPLKGSDERLQDTSKYGYYVRPSGMSFMVVQHEVKGKRRVTIEPALLVYKNKLKSEEDYAKYCEDVLKLQKPKVLFRNIKFGSKILFDGYPFLLKARSGDRITVADAQSLFLANQELKILKKVTKISDDIAQKVKSRIKITDEEWITLWKSVVEQIVTGKFCNRLGSLNVVIKGKKVELSEDEKTRLNELDSKDQEEYLSHILLERFLQFNTEEKAHLLLQVISFSSNTRGVDLRLIGGSISTGVIRVGKDITDHSVILINESPTGLFTNRTVLNQT

SEQ ID NO: 4602 - protein, 445 aa, unidentified
  REGION 1..445: note = Description of Unknown: Cas Enzyme sequence
MKRNNDYYIGLDMGTNSVGWATTNPQGRLLRFNKKDMWGSRLFEEAKTAAKTRTFRTSRRRYDRVRQRIEFLQDIFAPIIAKKDFEFFMRLKESKFHLEDKKTDGKFALFNDADFTDVEYFDRYPTIYHLRAALIKPNHITDPRLLYLAIHHIIKNRGHFLFAGTDMESIRSFQIVYTQLSEHLKSINLDFELPVDAQDKFAAILLNEKLNKRDKKKQLKELCPHKDKRLEYAFNAIIGGKTKLKDIFGVEEYDEGTKKAVDFEKADYDEDKDEIESVIKENIHVLNALKAVYDWTILTNILGDYAYISESQVALYEAHKKDLRILKSLIKKYAKSQYADAFRHENVKGNYANYVGSTNYDNKQPVIDNPSVTQEDINKYFADILLSITPDESDRESYQYITERLHKGEALPKLRTKANSVLPHQIHKIELEKILANAAKNFPFL

SEQ ID NO: 4603 - protein, 1373 aa, unidentified
  REGION 1..1373: note = Description of Unknown: Cas Enzyme sequence
MKRDGNYYLGLDIGTDSVGYAVTDMQYNLCKFKGEPAWGVTIFDAGKLNGERRGFRSDRRRLDRRRQRVALVQELFTQEISKQDPRFFIRLQESSLYRSEVDDVYPLFCDENYTDRDYYQQYPTIHHLIVELMESRAPHDVRLVYLACAWLVAHRGHFFSNLDKDNLANIKDFQDVYGQFLAYFRDNGFDAPWNVDESEKLGDILQENGTVTEKNKALVRLLYQGKKPPKTAEETFPFSKVAIVKLLAGGTVKLKDLYQDESYGEAGSVSLQLDDEQFNALAGDLGEDFDLLAAMRALYDWALLVNVLGPYASISEAKVAVYEQHKADLQQLKRFVKKYIPEQYHDIFRAVGKANYTAYAYHSEKPKKCETLGKGTGAKKEKKDEKESRLKKASQEDFCKYLLACFKAVSPAPEDAAAFAELKRRLEQRDFLPKQKTSENRVIPHQLYWSELDTILKNAETYLPALAQKDNDGLTVSDKIRSIFLFRIPYFVGPLNPHSDYAWLERKAGKIYPWNFETMVDLDASEQNFIQRMTNSCTYLPGESVLPKCSLAYQKFMVLNEINTIKINGQRISVDLKQQLYTDLFLRDKKVTQKKLIDFLVANGVVGKGEDASVTGLDLQIHGSLSSAIGFRQLLQSGRLTEADVEKIIERASYAEDKSRLAKWLSQVYPDLSEQDQKYICSLKLKEFGKLSRKFLCELEGADKATGEKFTILRALWETQCNLMELLSDAYTFREAIVSMRNAYYEIHARTLAERLDEMYVSNTVKRQIYRTLDVVKDVTKAFGTPQKIFIEMTRGGSKDQKGKRTLSRKQQILELYAKCNEEDVRLLRQQLEDLGEAADSKLQGDKLFLYYLQMGKCMYTGQPIDLANLGSKQYDIDHIYPQALVKDDSIINNKVLCCSSANGEKSNHYPIKESIRRERGSYWEYLRRNGLISEEKYKRLIRATPFTAEEKWGFINRQLTETSQSTKAVATLLKEYYPETELIYCKAGLVSDFRREFKLEKSRTFNDLHHAVDAYLNIVTGNVYHMKFSKQWFRVDSEYSLKTKTLFTWPQICNGVTIWEGEAMLQKVIKTAKKNHGHFTKYACFKRGGFFDQQPVAAAKGLVPRKKGLPTEKYGGYNKAGVMFFIPVKYKIGKKTEVIIMSVELLFGARFLSDNDFAQAYTSDRLRQILGKPVDEISFPLGMRPWKVNTVLSLDGFRVCISGSSSGGKCLVAQSMMQFSAEPFWQFYIKKLESFVEKMEKNPAYIYDEVYDKISKTKNAELYDLCLNKLEHSIYAKRINTPVKILQDGKQQFLALDIQAQAKALLNIHQIFGRIAGGCDLSAIGGGSKAAATSNFSSSISNWKKNYSEVRIIDASPSGLWEKQSENILELL

SEQ ID NO: 4604 - protein, 1327 aa, unidentified
  REGION 1..1327: note = Description of Unknown: Cas Enzyme sequence
MDKKYYIGADIGTESVGWAVTDEDYNILKARGRELWGSYLFDKAESAAERRLYRNARRRTARVRRRLNLLQELFAEEISKVDPLFFIRLNNSSLFTEDKDGVLTSKDALFADEKFCDKDYFKKYPTIYHLRSGLIKGEVDDIRLFYLAVHHIIKYRGHFLFELQNFSLGNSEIIREKFYLINAFLSDRDMPVLDLSDLDKAIDELKKKEGSKRSRQKLLTDILHTGSEKSLTAVVKAITGGSVKLKELYNIEEDNEKITSFSFEKSTFEDNDMPAIEEAVGIDEAVLVRELKAIYDWSVLCEIMGEETYVSFAKVKIYEKHREDLAWLKRYIRENCPEKYTAVFRNKNGKDNYAAYVGMDKQKRVSKCTREEFYAFLRKEVEITDKKVLAEIERSNFMPKQVSEKNGVIPYQVHLTELRKILDEAEKKFPFLKEKKDGKTVAEKIIMLMTFRIPYYVGPLHTQSDFGWSVRNPGYEKVSITPWNYSEAIDEDASEEKFIRLLTKKCTYLKGEDVLPENSLLYSEFAFLNELNNLRINGEKSEEARRLIYEYAKTHKKVTLKSCLALLIRNGCIPAGSGKEIFSGIDDDFKRSLKSYNDLSFLGEKRYTRSEMCEKIITWLTLISDKHRFEKRLRREYGKILTEEEIKKLKSLNYSKWGRLSEKLLDGITSARCTDENGECLTIIEAMRKKGENFMQLMSDKYGFQDAIREYNSESEQDEKVTYKKVSALYCSPAVKRSIWKTIEIVKEIVKIQGKDPAKVFIEMAREVKDGSMKGSRTVSRKDQLLELYKNIKGEEREWIAEIEQTPDAKFNSDKLVLYYRQLGKSMYSGKDISIDEVFDTNICDIDHIYPQSKIKDDSLDNRVLVYKTENQGKQDKYPIAEDIRVKMTPFWKMLKERKLISDVKFERLIRRTQLTQDELKDFINRQLVFTRQSTKAVAQLLKEMLPDTEIVYAKAGNANDFKSENNIIKIRELNDLHHAKDAYINIVVGNVYNTKFNHSARFYFNERESNDYDLKNLYRRDIPGAWKVADKERIIQIVEKNTAKAIRMTLGGQGRLFDVNPVKAGQNDDLLPLKMKGAISDTSKYGGYNSQKTAYFMLVRSKGKKGKIMLSMEAFPLWMEKQNKAGIEEKVRFCAKQGLVEPEIVIDRIKLNTLLYMDGSYAWLRGKTGNRIKLCNANQLYLKGEEMKILKRISNYMTDRKLLKRQDLPVGEKIKAEDNVRLYDALVEKLESPVYRGLSIRKQAEFLKKSRERFISLSLEKQCVVIFEVLHLMQCNSVTADLTLLGGVPNAGSLVSSKFVQDNEMKIIYQSCTGYYREIIDFKRFL

SEQ ID NO: 4605 - protein, 1358 aa, unidentified
  REGION 1..1358: note = Description of Unknown: Cas Enzyme sequence
VSTIKLSQKYTSVTQPYYLGLDIGTNSVGWAVTDKSYNIIKKKGKSLWGSRLFTEAQPAVTRRQFRASRRRRKRTKNRIKLLQEYFAEAINTVDPGFYQRLKDSFYLPDDKETEQKNSLFNDTAYSDQDYHSDFPTIYHLRLHLLRENDVKDPRLIYLACHHIMKNRGNFLIEGKLATDQQLDSALISIQEYWLAESGSYLWPEDKLTEIADTLLARKMTSSDKVKALQSNLINSDKETKELCKLIVGNSAKFSTVFNNDEFDESDIKSIKFADGTYENDEIQDSIQALLGDSKELVDIAFQIYGAALLQKLLQKEDGAIANSISEARVNIYETHARDLAQLKSAVKAICENDSGSNKLYNKIFRENKKGLANYVAYSGHVDTKDSSSPIDRCGQELFYKFLKNELKKYSDVESIDNILMKIEQEVFLPKITSSANGIIPHQLHGSELEKILKNAQANFDFITDEIISEITQIFNFRIPYFIGPFDDRSEFSWIKRRSNDPIRPWNINQVVNIEETAEKFIRNMTNKCTYLLGEDVLPKESLLYSEYLVLNALNTLTVDSQRLDRSIRDQLYLDLFINRTKGGRITKKRVVSALTAQGVKVTENSLGGMDLEIPAKLKSRRDFSSIVSDKLTDQEIEAIIEKITAFPDNVEMIRKYIKENYQEKLNDKQIEKIAHLTYKDWGRFSKKFLSGIKHTGADGIRRSIIETMRTDVVNLMEVLDSNRYSFSAQIKDLNEGLIEDPNIISDEYLEALRLSPAVKKAVRQSLLVCKELFGIMKGAPERIFIEMARQDGEKDKRTKSRKQHLAELYASCKQDTEAWSKEVQEMSEDKFKSKKLYLYCLQWGRCMYSGDRIPIEDLFDPSKYDIDHIYPRSSTKDDSWNNLVLVKQELNRSKKDTYPLDSNIQAKCSTLWLGLLQCGFMDSEKYKRLTRKDPLSPDELASFINRQIVETRQSTKALAEIFNRVLPESETVYVKANLVSDFRYRDGNRLDAKTEFYFPKVRNLNDFHHAKDAYLNVVVGNSYHVKFTRNFFLKQSSIDRSKYNLVKFFDREILEKGQPIWIPGENGTISTVKKMMNRNNVLLSYEAYRRSGGFFDQMLVKKGNGQHPIKSNVPALKKLNLYGGFNKVAGSHFCIFQHQKGKKQEMSIEALPIYLKSYNFSEESIINYLSQNYTNPVIICPEIKYGSIIEYNGVRYRIKAKTGNQVKCAPAIQAAYTATDEVIFKEVERAIEKDSINQSLNDVLADNLFEDITKRIISVPYCNYQTLNTLGTQMHDNLSYFEILPLESKIKILATSIKLINGNGEPVDLSIFTDDKSNSIIGSQVGAIKIVINNKKGNILRVVNRSVTGFYENVKRVF

SEQ ID NO: 4606 - protein, 1424 aa, unidentified
  REGION 1..1424: note = Description of Unknown: Cas Enzyme sequence
MAKKYLLGLDLGTNSVGWCLTDEENKIIKKGKKRLWGVNLFKEASTNKDRRINREARRRTVRRAQRIDLLQMLFKDEIEKIDSRFFLKLNQSSLHSEDKDETIRDCNGLFKETGLNDSLFYKKYPTIYHLRDDLIHSDKKADIRLLYLACAHIIKYRGNFLQEGRNIQSYNSKDIKEILETINLCIEEIDNDIIDQEINISTPLCNEIIRISKEAKGLSQTKEQLYSALGINNKYVKNIIVPLIAGTEVSTNKIFDTDEEIDNVSKISVKQENFDENIALLSERFGDSPCFRLIIEAKKLSDIMLTIKVLGDEKYLSSAMVKRYIEHKNDLSLLKKYIKSTNKEKYFEVFRKSSSDLNNYSKYVGYTKYNGEPKINSDHCTKEEFYKYLKSVLCIDKFKKASDIDNDYLRTIYEKMSDGTYLDKQNSSENGIFPYQLNLNELLLILNNQSKYYEFLNKEDKYGSTKDKIIKLLSFKIPYYVGPLLAKKNDNPRGQYSWIVRDDKTKIYPWNFEEVVDLDATAEQFIQRMLNRCTYLKDCYCLPSKSILFQRYNVLNTINKYRINGNLISFNDKNDLLTSVFLKYKKVTKKKIIDFFKFKYGEEAKLTTSNEKEIEEINCSLSSEITFKDIFKNNYDEKLVENIIKDLTIFEDRKIVEKRLKNIYKIEDESIIKSILNLPEFTGWGRLSSELLHLKTQSINQRTGEIFDYEIIQLLRDTNYNLMEIIHKFNFEKIINEHNGEIKIEDHDLHSQIVNYVNDTYVSPGMKRSIIQALSIIEDLKKIIGAPIDEYYIECARTNKSQKGDKGRSLSRKDRLIQLYEQAIKACKDSLQKEHLTNFKAKASDEDNNKFRSERLWLYFLQLGKCAYTLETIDINLLFDNNFYQVDHIIPQSLIKDDSISNKVLVTARANESKKDKYPLNQLPFINHEASLFWKKLYQDHLMDEKKYNNLIRKEPISTDELEVFINRQLVFTNQAIKALADTLKIFEKDRNGKEPKIVYSKAENISSFRDYYDIVKSREANNLHHAHDAYLNICVGRLLSSYYNFYGEKDFIQKLRENHRSLNPERIWSDNAQKDRPPFINHIGEVIWDYRTTVNDIKKNIYERFDVLVTRRQYIDNGLLRKVSIHKANEDKGDNLIPLKSGNSTLGNAFTKTNKYGGYSDLVYGFFSLVKFKDKKDNYIISLEKIPNMFVSKKDNKHIENYLTKQKGYKNVEVIIPIVRINSVLKKDKTSIIVTGASLDSIIINNNSELFFDSKTLHVIKMIYALIEKAKSIKVKLENSTNPLLNDTFPLINNGDILVSPASNERSKARIIYSKDLITLFNAIKDKLALPIFDNISGIKSVNELLNKEDTLNLYLSLDSYKKVVVLANLLKASTATVSDLSLINGSKNSTVCTINKKSISSWKIVNQSPTGFYEKIIWKGGN

SEQ ID NO: 4607 - protein, 1564 aa, unidentified
  REGION 1..1564: note = Description of Unknown: Cas Enzyme sequence
MENSNNSKKYYLGLDMGTDSCGWCVTDDKYNIIRSHKKTYGPDGKLIKREGCHLWGARLFGPANTAKNRRLNRTARRRLARRRRRIILLRELFQPEMDKIDPNFFRRLDQSNLWNEDKDKELQMEHNFLFNDKDLTDKEYYKDFPTIYHLRKAMVNGLTINGHYYDPKKQFDIREVYLVLAHMIKYRGNFLMEGDVQGSVVDPTYLKQCFDNIDAILISLNNGEDDENEDNQIDSSECCFNIDEKKASKLANEIFQKINKVSYLEDEEGKLFGKFNSKDIRKKILKLINGGSGVKLKDFLPKEILVAHNGDDEYGDKKIDLSSETLEDDINGYGLPESYIEIILEAKKIYDFRTLAYLLHGKSLLCDAMVNVYEGHKEQLAALKRLYKKYATKEQYYFMFRDSRILDGDDSDDKEDKEESNKEESKDKKKKASYVSYIGYTKINSKAKYTGAHITSEKNISALIKKIKHDLNFDNLKSKANELSDQDRLDVDCINQAIESNTFLPRQNSRNNGVFPYQLNLNEMRTIIENQSKYYPFLKDKAPSFLDGKIEEYKIVSLLKFKIPYYIGPLSQPNDYVRDDKRDNHWVQFRGENNQGIINPWNFSQIVDLEGTADKFISNLTNYCTYIFGENTLPRESLIFQAYKVLNDLNNLKVNGSLISKEDKDYIIQNVYLKKKKIKGKDIVNALKNKYKLSDEDPTVTTKGSGKSIGEDEVDLTMFNSSLSSFIDMSDPNAFGPEFYKDSNKFELAEKVIELITIVEDKDLLKERLKKLGLSDNQVNYLFKQKYSGWAPLSRKLLDGITIDCVNENTGEAYPVTIIDVMRDTPLNFMEIYETKESQFSGFKEKVAELNDEKKLSRDDLIEESYASPAMKRSVRQTFKVIDELKNTLNIDHFDRIFVEATRAPGEAGKMVKSRKKQLQEAYDAAKDLVDQESRDDLQKLRDDLEKQTDDQLRRKKVYLYFMQLGRSVYSGEKIDLNELDKKYDIDHIIPQAKLKDDSFNNMVLVERELNNKKQDEYPIPLTIISEQGRNWIKKLANIKDKNKRSYFMPKDKENRLLRPESKQLTSDELNGFINRQLTLTNQSVKAVCDILKMTEKGSEIIYSKANFVSDFRKLCGELRPSYDAFVKVRDINDFHHANDAYLNIVVGNVYYEKFKNFYINNRIDYDNNGKKDLSVLASKLFTKTQADDKTGNIYWEAHFHNKKEINANGKEITIKVRNEGTKSTFDKIEHYMELNDPLVTQMQYTLSGKQGFFKKITLKTKAKDNEDNSDKLFPLKQYLRSDSNKVMDVNKYGGYSYMITPYFMLVQSEGKKGKHIYSLESIPTIYLKSFKKKEEDIINYLSCKNKLKNPVVISDKLLMRTIVKIPYFKNDSNLSLVKLGTSGRTGNNIIYINLSELILPIEWKNYYRKISNLLGTNVSSTKPKDLSKFTEQMKNDPTSTLVDGSNKVEHDKNNRFFSYLINNVINKPIFEGLPKTSCSFIKLESKYDEFCSLNTLEQAKIIATIIKLLSCKSVQGCKLSNLSGLPSSLGALISNKALTEGTIILKESSCGLKENIIFVVPND

SEQ ID NO: 4608 - protein, 1352 aa, unidentified
  REGION 1..1352: note = Description of Unknown: Cas Enzyme sequence
MEIMKQKFYVGLDMGTASVGWAVTDDKYNIIKRHGKALWGVRLFKTANTAEERRTFRAARRRTQRRKQRMELLQEIFGDEISKTDIGFYQRMKESKYWFEDKRDINGKQPELPYALFVDDGFTDKDYHEQFPTIFHVRNVLVNEWTQKYDIRLVYLAIHHIIKHRGHFLFEGKKMSEVTDFGSAFEAFCKVASDNDIEITVDEEKLKDIEDLLKSRQKSKTAKKQELGKIIAGADKQKKALAALITGCTVKLSEIFADKSLDDGERNKISFADSNYDEYIANVEETLAERFLLIATGKALYDWAVLSDILEGSTYISEAKVKIYKKHGDDLRKLKGLLKTRPDEYKLIFGLPEKQANYSAYIGMVKKNGKKVPIDKKCTKADFYSFLKKTLNKINFEDEKEREIAESIINEIENETFLPKQVISDNGVIPYQLHEAELDRILKNAALYYPFLSEKDDEGYTNTDKIKAIFKFRIPYYVGPLNTYHSDKGGNSWAVRKQDGKIYPWNFESKIDAEESAGKFIGRMTNKCTYLIGKDVLPKESLLYSKFMVLNELNNLRIDGEKVSVEIKQAVYENVFKKYQRVTGKKVKDFLIRSGIIEREQELSGFDQNFKSSLKAYHDIKQIAGDINLSQNQKEDIIKDITVFADSQKMLKKRLKIKYPELSDKQVTKLAAKKYTGWGRLSREFLEEVESVNKETGEVLNIISALWETNENLMQLLSNKYDYLSEIKRLNDEAEDKSEVVTYDDVQKLYVSPAVKRPVWQTLKIVEEISKIMGSKPERIFVEMAREPGQKGDVKVSRKSRLLEKYKYCKKEAPEIYENLVKEDDNKLRSDKLFLYYTQMGRCMYSNEVIDIEDLFTNRYDIDHIYPQSKVMDDSLDNRVLVKRELNSNKTDVFPVPKEYMDKSKTLWDMLKKKDLISKEKYHRLTRRDGFSENELSGFIARQLVETRQSTKAVTQLLTKAYPESEIVYAKANAVSEFRHKFGFTKVRSINDYHHAKDAYLNIVVGNTYYVKFTKDAAWFIRNNPGRTYNLKKMFEQGTVSRGGETAWVSGEDGTIFTVKRVMGKNNILFTRKAYEVKGKLFKQQLVKKGNGQIPIKGNSYDDRLAMKEKYGAYDSASGVYFMLVESTDKKCNRIRTLEFVPVYLAKEMEKSEDVALRYCIEKLELVNPDIRLKKIKTDSLFNVDGFRMHLSGRTGKQLIFKCAEQFVLDDESQKILKKTGKICADYKINKNVKISDKMELTDEMLIKLYELFYKKLKDTLYNIMLSKQVETLENGKEKFEKLTLVNKCLVIEEILHLFGCNSCKANLTLIGGGKENGKIQPVCKMSNFETAELINQSITGFYEQVIDLKTI

SEQ ID NO: 4609 - protein, 1340 aa, unidentified
  REGION 1..1340: note = Description of Unknown: Cas Enzyme sequence
MDQQYFLGLDMGTGSLGWAVTNDKYEVLRKHGKALWGVRLFESANTAEERRVFRTARRRLDRRNWRLQVLQELFAEEIGKVDPGFYLRMKESKYYPEDKRNKDGVCPELPYALFVDKDYTDKDYHQQFPTIYHLRRMLMETVETPDIRLVYLAFHHMMKHRGHFLLSGNIDEIKEFNATFLQFIQNIKNEELDFELSVGNEECKVVEEVLKDRTITKSTKKSKLWKFFGPKTLCEKEILNLIVGGKVKLSDIFSNKELDECERPAISFADSGYDDYIGGIEAELGEQYYIIESAKAVYDWAVLADILKNSRSISEAKVKIYEKHKTDLAYLKKLVKKYLTKEEYNQIFAKTEDKLYNYCAYIGMTKKNGKKVDLDSKRCSKEEFYDFLKKTVLKKLDSQEECIYLKEELEKETFLPKQVNKNNGVIPYQIHQYELEKIIDNLSDKIPFLKENGDKIKQLFAFRIPYYVGPLNGKEFSWAVRRNKEKIYPWNFNEVIDVEESAEKFIRRMTNKCTYLYGEDVLPKDSLLYSKFMVLNELNNIRLNGEKISIALKQRIYEELFCKTRKVTQKKLKKYLYLEGIADKEVEISGIDGDFKASLTAYHDFKEKLTCAELSQKDKEGIILDIVLFGDDKKLLKKRIEKKFPNLTENQKKSICTMSYKGWGRLSKKFLEEVVAPAPETGEARNIITALWETNDNLMELLSEKYLFTDAIEKFNCENKETGLSYKTVEDLYVSPAVKRQIWQTLKVVKEIEKVMGKKPKRVFVEMARDKQDSKRTESRKKRLQELYKACKTEERDWFAELEKYEDHQLRSDKLFLYYTQKGRCMYSGEVIQLEDLWDNTKYDIDHIYPQSKTMDDSIDNRVLVKKEYNANKSDVYPIAKGIREARTPFWRSLLEGGFIEKEKYNRLTRKEEFDESELAGFIARQIVETRQGTKAVAEILKQAFPETEIVYVKARTVSQFRQAYQNDAEFIKVREMNDFHHAKDAYLNIVVGNTYFVKFTKDAAWFIRKNPGRTYSLKEMFTGKYDVERNGEIAWKAGGKGTIVTVKEQLSKNNILVTRKAYEVKGGLFDQQIMRKGKGQISVKGSDDRLSNIAKYGGYNKATGTYFMLVKSKDKKGKEMRSIEFVPLYLKTAIEQSEETTLEYLRNRKENPLNEPEILIRKIKKDTLFKVDGFKMWISSRTGKQLIFKCAVQLLLAPQETEILKKVIKFINRKVENKNLKLVEKDELTNDMLLELYDVFVYKIQNTIYGIHLGKQGKDLKNGREKFINLTSEEKCVVLSEILRIFQCQSNEANLSLIDSGSRVGRLYLNSNITKCKQISIINQSPTGVYEQEIDLLKV

SEQ ID NO: 4610 - protein, 1339 aa, unidentified
  REGION 1..1339: note = Description of Unknown: Cas Enzyme sequence
MRKDYYVGLDLGTGSLGWAVTNESYEVLRSHGKALWGVRLFESAKTAEERRMFRTARRRLARRNWRIELLQEIFAQEISKVDEGFFLRMKESRYLPEDKRDSSGKCPQLPYALFVDSDYTDKDYHKQFPSIYHLRKWLMDTDVIPDIRLVYLAFHHMMKHRGHFLFAGSIDKIKEFEHVFAQLLQTIKDEGLDFLLEISDEDFGEIEEIFRDGRRTRSVKKKDLEKLLGAQTACEKAILGLLAGSTVKLSDIFGDADLDQSERPKISFSDNSYEEYAGSVASALNERFVVIEQAKAVYDWAVLVDILGDYASISEAKTASYEKHKQDLAYLKKLVRNHLGADVYKELFVKTDEKTPNYCAYIGMTKVNGRKQEIDGKQCGKEEFYGYLKKKVLGASGDTRDAEYLREELEKETFLPKQVTKENGVLPHQVHLYELNRILENLQDRIPLLKENAEKIRQIFTFRIPYYVGPLNGICVKGNRTNWAERRSNEKIYPWNFKDVIDEEACAEKFIRRMTNKCTYLVKEDVLPKYSLLYSKFMVLNELNNLRLDGEPISVELKQQLYRDLFQRYRKVTQKKLRDYLVREGMKDKAVDITGIDGDFKGTLTAYHDFKEKLTDCSLSSEEKENLILNITLFGEDKKLLDRRLQSLYPQLSQKQRKSLCSLSYKGWGRLSQAFLEKITAPAPETGEVWSIIRALWETNDNLMQILSEKYEFAAAVEMENQKDEPKDISYQMVEELYVSPAVKRQIWQTLQVVKELCEVMGEPPKRVFIEMARENAQSKRTESRKKRLIELYKKCKDEEREWVEVLNHTEEQALRGDKLYLYYTQKGRCMYSGEAIQLEDLWDNRKYDIDHIYPQSKVMDDSLDNRVLVKKTYNADKTDIYPIRSEIREKMKPFWKSLLGGGFISKEKYNRLTRGTEFEPSELAGFIERQLVETRQGTKAVASVLKQVLRDTEIVYVKAKIASQFRQDFDLIKVREMNDLHHAKDAYLNIVVGNVYYTKFTKNASWFIKENPGRSYNLKKMFTSDKDVVRNGAVAWKAGEAGTIRTVKGMMDKNNILVTRRSYRVSGGLFDQQLMKKGKGQVPVKGSDERLRNIEKYGGYNKAAGTYFMLVESEDKKGNKIRTIEFVPLYMKKKIEQEEAEAIRYLEKQQGLKNPKILLREIKIDSLFKVDGFYMWLSGRTGKKLLFKGANQLILSKKDTVTLKKLLKFVQRKKDNKNLRIVEQDKLLPDDLQNLYDTFLNKIQHTIYHVRLSAQEKTLSEKRNGFLELTIENQCVLLSEILHMFQCQSGAADLKLIGGPANAGKIQINSNITKYNQISIINQSPTGIYEQEIDLKKL

SEQ ID NO: 4611 - protein, 1384 aa, unidentified
  REGION 1..1384: note = Description of Unknown: Cas Enzyme sequence
MKKQFGEIYLGLDMGTNSLGYAVTDTDYRVQKINGKGMWGVRLFDTAQTAADTRLKRCNRRRLDRRTWRVKLLQTLMAGEIAPLDMGFFQRQAESNLHIEDKSENNKYKNSLFGEGFLSDKEYHLKYPTIYHLRMAQINDEDDAFDPRLLYLSLAHIIKYRGHFLIDNLNVDLSDSSNQSDKRFEEAYNELLLCLQNEFEDLSNHDFGNPLTVKEIMSNRDNSITVKKKLLETEIQAGKSKNLKSIAGLLSGGKIKLAELFGDEALKEAGSFGFGDTDFDAVEDELKAQLNEKMEVLYKFKAVFDIAILEELLGNKNSISAAKVDTYNEHQKDLKLLKEFARNADRELYNKIFGVPKKGEMNYSTYIGRCLTHNSKKAVLDEKICSQEDFCKFLSTALKDYVDVGQIDGNGKDISDLDRLFIRINNKIAFPKLRTKANGVIPVQLNEAELKVILKNAEKRLSFLLVKDENGLSVSDKVISILNFRVPYYVGPLAGTELSKKAQRCWVQRSNEKITPWNFDKVVDLSGSAENFIRKMTNKCTYLYTEDVLPKNSLLYGEFEARNELNNLSVNGVRLEYEIIQDIIDNLIINGKGKVTKKKIKAYLQKKNIISSSSDDNIAGIDDEIKSTMKSHKDFYRIFGKEYVNAHHEQIEDIIKWITLFADEKSMLVNKIKENYPEISSDKVKEIKKLNYKDWGRLSKTLLNSADISFYDDSIGEYITIIGAMRRESLNLMQLLAKGHQYGFAEKIEAFNATGEKPDTIDYDYVNEMAVSPAVKRSIWQTLQVVKELKKIIGHDPKRIFIEMAREDGEKKRTVSRKNQLLEFYKKCKTDIESYAGSDFFYDSAHYNDISGKLNNQEESSLQGKKLFLYYCQLGRDLYTGEKISIDELFKQNMYDCDHIYPRSKTKDDSLDNMALVYYKKNRDKDADYPLSPAIQSKMCKFWKFLLDKGLMSQKKFERLMRKTPLTDDELAGFINRQLVETRQSTKAVANLLSIECPDSKIVFSKAGNVSDFRQEFDFVKCRDINDLHHAKDAYLNIVVGNVFYTKFTDRPYEILKDRKFTYTLNPQKLYQHEIKCRGAVAWLPGEAGSISMVRKMMNKNNIQVTNQLRENHGAIFDATIYKAGENAKLFPIKKGLSPKKYGGYKSQSTAYFVYVESENKKGQKERTLEAVYCHVSNSIKDNQDALLKFVKEEYGLNNPRIIIPKVKIGACLEVNDVMMTITGTSGKQLQGKNASQLVLDKKHEQYLKHVLQYLTRKKENNNVSLASYKEINRDGNIALFDIFTEKLNTKVYINRPAVKYGDMKKKRDLFIKLSLEEQCVVLAEVLKVFETKPLCADFKLIGGSTQSGKFQISKVLSKYNNVLLHNYSITGLFEQKPIDMLKI

SEQ ID NO: 4612 - protein, 1379 aa, unidentified
  REGION 1..1379: note = Description of Unknown: Cas Enzyme sequence
MQKLKNCDYYIGLDMGDASVGWAVTDTNYNILKFNGKALWGIRLFDSANTAASTRVFRSGRRRIDRTTWRLKMLQELFAEEIAKVDPGFFMRLEDSRLHLDDKRDKAVYNLFVDKNYTDKDFYQQYPTMYHLRYALATQAGPFDVRLLYLAVQHIAKHRGHFLFDNLDASKVNDFNAVFSEVENYVRDEMGIEDWSCQNIDELAKVLCDVNLGRTTKQKAMQSLLPAQTKQQKAIIQLFSGGKAKLAELFVDEELDECEKKSVSFQDDDLNEFEPVLTAALGERYEGLLRFKAIYDWSLLAKILHLDTSKKDEDEQHLLSECKVQVYEDHKRDLAVLKSMLKGKPLYNKIFRQDGDISYEKYAKGIKGRNQIDFCKDLKKQLEGIAEYKKIMQEITNIDDAKTEEERLLFRITNGFAFPKQTTKDNGIIPIQVHLAELKCILDNAEGYLPFLGETDNNGLSVREKIEQIVKFRIPYYVGPLAGTRMSREQGRCWVVRKHEKIYPWNFTEIVNLEESAEKFITNMTAKCTYLVGEDVLPKESLLYSEFMVRNAINNITVDGERLPVDVLEKIFKQLFLAKTSKVTKKTLERFFRQENISFQNIGGIDDKINASMKSYNDFRRIFGEDYIQLHRDEIENIIRWITLFCDEKKMLVTKIKNTYPQISDDEIKAIKKLKYKDWGRLSATLLNSSTIAYEDKAFGELVTIISALRHTNKNFMELLSSYCYYDFIGKIKEFNGSRQSSNGKLTYKDVEELYVSPSVKRSIWQTLTILEEIKKIMGCEPKRIFIEMARSKEESKRTDSRLKKLQDLYKKCREENIDFMPRKDEFNALKTQLSSKKEENLRSDKLYLYYTQMGCCMYTGERIELASLYDNNLYDIDHIYPRSKTKDDSLSNRVLVKKQVNAAKTDIYPLDAAIRTKMHSFWKLLYDKGFIDERKYERLTRSTQLRDEELAGFISRQLVETRQSTKAVAAILKTAYQNSEVVYVKAGNVSDFRQQFKFVKCRDVNDLHHAKDAYLNIVVGNCYHVKFTANPLNFITKNQDNRRYSLKPEIFYKFNIKRDDDIAWLGGEDGTMATVARTMHKNNILFTRQAVEGKGELFKQNPLKANSGQLPLKAGLSVEKYGGYDSLTTAYFAVVKSEGKKGAVQLSIEGIPLVYARQGEDAIKKYLIEVVHLCNPIIKLNKIKKYSLFKINGFPMHISGRQGKQLIFYVAGQLCLDEESIAYLKKAFKYESDLAINEEIIDDKNAAEENKQKAHKRLDFYENTWGISEVANMQLYDILIAKSANNLYKNRPASQTSTLKQQRDMFAKLPLSKQIRVIKEAMNLFKCASATADFKLLGKGSVCGKIQVSTNITKCKQCILINQSPTGVFEQEVDLMKL

SEQ ID NO: 4613 - protein, 1379 aa, unidentified
  REGION 1..1379: note = Description of Unknown: Cas Enzyme sequence
MQKLKNCDYYIGLDMGDASVGWAVTDTNYNILKFNGKALWGIRLFDSANTAASTRVFRSGRRRIDRTTWRLKMLQELFAEKIAKVDPGFFMRLEDSRLHLDDKWDKAVYNLFVDKNYTDKDFYQQYPTMYHLRYALATQAGPFDVRLLYLAVQHIAKHRGHFLFDNLDASKVNDFNAVFSEVENYVRDEMGIEDWSCQNIDELAKVLCDVNLGRTTKQKAMQSLLPAQTKQQKAIIQLFSGGKAKLAELFVDEELDECEKKSVSFQDDDLNEFEPVLTAALGERNEGLLRFKAIYDWSLLAKILHLDTSKKDEDEQHLLSECKVQVYEDHKRDLAVLKSMLKGKPLYNKIFRQDGDISYEKYAKGIKGRNQIDFCKDLKKQLEGITEYKKIMQEITSIDDAKTEEERVLFRITNGFAFPKQTTKDNGIIPIQVHLAELKCILDNAEGYLPFLGETDNNGLSVREKIEQIVKFRIPYYVGPLAGTRMSREQGRYWVVRKNEKIYPWNFTEIVNLEESAEKFITNMTAKCTYLVGEDVLPKESLLYSEFMVRNAINNITVDGERLPVDVLEKIFKQLFLAKTSKVTKKTLERFFRQENISFQNIGGIDDKINASMKSYNDFRRIFGEDYIQLHRDEIENIIRWITLFCDEKKMLVTKIKNTYPQISDDEIKAIKKLKYKDWGRLSATLLNSSTIAYEDKAFGELVTIISALRHTNKNFMELLSSYCSYDFIGKIKEFNGSRQSSNGKLAYKDVEELYVSPSVKRSIWQTLTILEEIKKIMGCEPKRIFIEMARSKEESKRTDSRLKKLQDLYKKCREENIDFMPRKDEFNVLKTQLSSKNEEDLRSDKLYLYYTQMGRCMYTGEIIELASLYDNNLYDIDHIYPRSKTKDDSLSNRVLVKKQVNAAKTDIYPLDAAIRTKMHSFWKLLYDKGFIDERKYERLTRSTQLRDEELAGFISRQLVETRQSTKAVAAILKTAYQNSEVVYVKAGNVSDFRQQFKFVKCREVNDLHHAKDAYLNIVVGNCYHVKFTANPLNFITKNQDNRRYSLKPEIFYKFSIKRDGEIAWLGGEDGTMATVARTMHKNNILFTRQAVEGKGELFDQQPLKAKGGQLPLKAGLSIEKYGGYNSLTTAYFAVVKSEGKKGAVQLSIEAIPLVYAKQGEIAVQKYLTEVVQLCKPEIMLPKIKKYSLFKINGFPMHISGRTGNRMLFYGAGQLCLDEADVDYLKKALKYENDIAENELVIADKNSDDIQKQQAQKNLDYYNQKWRIGRKVNMHIYDMLLAKSGNNLYKNRPASQTTDLQEQREFFEKLSLANQIHVIGEVLKLFKCASASANLKLLDKGNACGVIKVSNNILKFKQCVLINQSPTGVFEQEVDLMKL

SEQ ID NO: 4614 - protein, 1365 aa, unidentified
  REGION 1..1365: note = Description of Unknown: Cas Enzyme sequence
MSRIMAKKLFPNYYLGLDCGTGSIGWAVTDLNYNILRFNGKAMWGIRLFETADSATDRRVVRCNRRRNQRRTQRIDWLQELFAAEIAKIDPTFFLRLNESRYHIEDKTERQPNALFNDFNYKDKDFFKRYPTIFHLRKELIDGTASYDIRHVYLAIHHILKNRGHFLFPGEDMASVKNVTPLFEQVKRLLVDAFDVEFNYADIVEIETALRQRKAASRKESLQRLLAASDDVLLKAMIDTMTGYKISLSKMFQDENLANAEITSINFSEGTFEDNTELLQTILNSDQFELLTVLKGIYDWSLLANIMEGFQYISYAKVNRFVANKEELCKLKRLIKTYAPDKYDSFFYDTDKPYLSAYVGSYKSNGKKTAVNRCSAEDFNKAVVKILEGMPDTVKEEPDYTLLLGKAKDLTLLPLLISSNNSVLPHQIHLIELKAILKQSERHHPFLAQKDAKGLSVSEKIINILSYRIPYYVGPITDFHDDKINPNKFAWMTRKKTGRIYPWNFDEKIDIEKSAEKFISRMTNKCTYLQDKDVLPKNSLLYSKFTVLNELNNLRINETPISIEQKQAIFDDLFKTHRKVTNKKLHDYLITQGWYNKNQELIITGIDSNFANSLGSYIDFKDFIETKVLTRTDVENIIRWITLFGADRKLLKKRVKATMGQKLSDQQIDTIINKFHYKDWGRLSKEFLTDIFHMEKSTGEVKSIITMMWETNNNLMELMSPSFDYAGQISNNAPIEKLDYSVVEQLSTSPSVKRQIWQTLLIVKEIQKIMGHVPKKVFFEFARGEEKKKRTVSRKNKLKELYSNIKSPDTEAKELLQFLDATTDSQLRSDKLYLYYTQIGKCMYSGDRIDITDLYNTNIYDIDHIYPQSKTKDDSLDNRVLVKKEINGHKSNVYPIEDSIRIKQHAFWKTLYDKNYISKEKFERLTRNHPLTDEELANFISRQLVETRQSTKIAANVLSRFFGDSTKIVYSKARNVSDFRNEFDLTKCRTVNDFHHAKDAFLNIVVGNVYDTKFTGNPLNFIKSKTLYNLTTKKLFMDRVEKAWEPQGENSTLQLVKHTLQKNNILFTRQQIERGGSFFDAQVVKGGSYQGLLPTKMADKKLQRALQNTQKNRKEIITEWTDKYGGYNKLSVAYFILVKHKKGKKEVVSFEPMLNLYKAFCKTEASLENYCTKELELVEPHIILKKVLINTLFKIDGFPMHLAGKAGEKVKVRPAVQLCLSKEDEAYIKRLSNYNDRRLKQKVKELQIEPQYDHISCEQNMILYQHLVQKSNEPIYIKRPAGQSKLLEMATPLFEQLSIEQQSLLLLQIVKYFSCTGDTVDLKLLGGSAQAGFTLIPKTLPNTKIALFINQSPTGLFEQEVPISL

SEQ ID NO: 4615 - protein, 1338 aa, unidentified
  REGION 1..1338: note = Description of Unknown: Cas Enzyme sequence
MKQNYFIGLDIGTDSVGWAVTDMDYNLLKANKKDLWGVRVFNQAKTAGERRANRTNRRRLARRRQRIEWLQQLFDEEISKVDPTFFLRLKESKFYSEDKDERIDGKHTLFLDKGFTDKEYYDKYPTIYHLRKDILTSSKVFDVRLVYLAIHHIIKNRGHFLLENTPSDELVPFQDAYITLAEYLYEEFEVNFTPVDIIAFETHLKDRSMNITQKRKALKQDAGTSKDDALLNAVIDLMAGAKVSLINLYQDDNLKNLDPSSISLKDNFDDIEDALKSELGDRYQLIAYVKAIYDWAVLDNILAGHKYLSCAMVQSYDKHASDLATLKDIVKEFLPKSYYNEIFRECRKDLNNYSAYSGKTKCNYRCDYDEFEKYLRKVLDPIINKSPKIKEILDELSYGTFLPKQVTKSNSVIPSQLNRKELVDILEHAKTYLPFLSDPDKNGKTVGDKIIAIFDFRIPYYVGPLNRNSEASWVERTSEKIYPWNFQGVVDFETSAEKFVERLTSKCTYVGKQVLPKDSLLYSEYMVLNELNNLRINGKRVAIDIKNNILRDLFMKSKRVTFKRLVSYLRSIGAIEKDDSISGIDGDFKASMYPHIIFKDIIAKIGSIEVEDIIKHVVCFSDDQNMLRNWVSKNYGELLSKSDINLICKQKFSGWGRLSREFLTEVYHVELTGEAVSIIEMLRKSNYNLMELLSNRFNFKDALEKYNSYHNNMTVTSAKEYVDNSYASPAIKRAILQSIGIVDEIVKCMNKVPPRRIFVEMARGEDEKKRTISRKNTLIELYKKCGEEANPLFSQLESNSDSDLRKDKLYLYYTQLGKCMYSGRPIEIERLDIDYDIDHIFPQSRIKDDSLNNRVLVERTLNHEKGNKYPIDQNIRKAMTPFWHMLKEKGLISGIKFERLTRATKFTEDELASFIARQLVETRQSSKIVADILKKRYGAETEIVYVKAGNVSEFRHAQLKNTFDFVKCRLVNDFHHAKDAYLNIVVGNVYHVKFTSDPRYFLRENANWSYSLNKVFDYPVERNGEVAWTPKRDGKEGSIAVVQKNIRRNSVLFTRLATEVGGALYDVNIVEKGRGQAPIKTSDPRMTTEKYGGYNKLTGAYFFLVEHKKGKMFIRSIETVYLMYKEQYEKNPERYCIDILKLVEPKIVIKRIKFGSLFSYDGFRMHISARTGDNIIFRNANQLLLESQWHHYINQISKYSERCKIAKTELPVTRYDAVTSENNLKLYERIQDKLKTNAYSKRFSVAAQKLDKCKTSFSKKTILDQCNILLSLIRLFSSGNATGADLTLLGESKNTSRISVSKRLSGSNQYIIHQSITGIFEQKIDLSKVKATSIEVSG

SEQ ID NO: 4616 - protein, 1316 aa, unidentified
  REGION 1..1316: note = Description of Unknown: Cas Enzyme sequence
MFLCLMLSTTSVSAAPKINKKTATVYVNKTITLRINGAKRKVKWRSSNAKIASVNKNGVVRGKRAGKAKITGYLNGKRYVCRVTVKKKKNNPKLNYSNIASSTGRVIQLKLLHCKSKVSWSSSNAKVASVSRTGKARFKNSGVAYIYAKTGKKRYKCIITVFDRPLGLYYSSMPTPTPTPKLKYDIKKAAPKAEQKILDIFNATGFKLKYRNIGNWTYGLTSTYDYDKSITLSTELFDTSKRIWKGSEQITLENVTYHELGHFVAWITDRSDLTNKMQQLKKEEDKRHTENEKHKKDLMYLKKIVRSNLSKEDYKNIFVNTDAKLNNYCAYVGMTKKNGRKVSLAGKCCSQIEFYDFLKKNVLSKIDDTVIKEYLENEINCENFLPKQINKGNSVIPYQVHLFELKSILKNMEAKIPFIRENSDKIIQLFEFRIPYYVGPLCGESAGCRGKFSWAVRKSYDKIYPWNFNDVIDTESSAEVFIRRMTNKCTYLAGEDVLPKDSLLYSKFMVLNELNNVKLNGASISPELKQKIYTDVFCRCRKVTQKKLRNYLVCEGIADRTVDITGIDGDFKASLNSFHDFKEKLTGAELNQQEKEMIILNIVLFGEDKKLLKQRLKKLFPKLTEGQMKAICTLSYKGWGKLSKKFLEEVTVPDPETGEFINIITALWKTNDNLMQLLYGPLGFMKYVEDYNSGSEKVSLDYESIENLYVSPAVKRQIWQTLKVVKEIRKCMGTDPKRIFVEMAREKQESKRTESRKKQLLDLYRNCKEEQSEIVSSLEQREDHELRRDKLYLYYTQKGRCMYSGRPIDFEKLWDNNMYDIDHIYPQSRTMDDSLDNRVLVERKENELKEDIYPINPEIQKARKTLWKSLLDGGFISKKKYERLVRTTKFDENELAGFIERQIVETRQGTKIVADILKEAFPNSTIVYVKARTVSNFRQDFELMKVREMNDLHHAKDAYLNIVVGNSYYVKFTQNAAWYIKENPGRTYNLEEMFKPKKRGRVARDIVRNGEIAWKAGEKGTIITVKKVMQKNNILVTRRSYEVKGGLFDQMIMKKGKGQIPIKSSDGRLLDINKYGGYNKATGAYFMLVKSRDKKGREIRSLEFVTLYLKNRIEQNEDAAIEYLEKDRGLKEPQIVLRKIRADTLFDVDGFKMWLSGRSGSQLIFKCANQLILSPNDEKCLKKILKFIQRRKENKNLQIYNVDGILEEDLLRLYDTFLDKLQNTMYKKRLSAQVITLTEKRNNFIKLRIEDKCIVLNEILHMFQSQSGCANLTLIGGPAKAGRIAMNSNITECKSISIINQSSSGIFEKKIDLLKL

SEQ ID NO: 4617 - protein, 1320 aa, unidentified
  REGION 1..1320: note = Description of Unknown: Cas Enzyme sequence
MKISGNREKVSDYYIGLDVGTNSVGWAVTDTEYNILKFRGNAMWGARLFEKANPAAERRQYRIARRLNKRRKQRLEWLELLFDEEISKTDPSFFIRLKESSLLNEDKTHRADFPIFNDSDYTDKDYYRDYPTAYHLRNELIESDKPHDIRLVFLALHHIIKSRGHFLFDMELSDEYKTVDIMLDEFTDRVFEAYGVKLGFADKEKFVSVLSSGNLGINAKKKLLRDGVTIEGESDDIDFALAIDSLSGAAINLSKLFFDEELKDSGKFSLNEDLDEALGETAALLGEESTELLRMLKEIFDSGKLAQMLGGHQYICEAKVERYETNKRDLKRLKEYVRKNAPDKYREIFCDKKDKLNNFAAYSGKTLESGDYSCKQEDFCKYIKKTLPELKNDSEFADIYAKLDNNTLLSKLKGADNGVIPYQLHLKELKKILDNAENYLELLKQTDENGVSVKEKIISVFSFRIPYYVGPLNKNAAHSWVVRTDEKIYPWNFNRVVDTEKSSEGFIINLISKCGYTGEEVLPKESLLFSEYCVWNEINPLKVNGEKISPEIKKEIFDELFLKSNSKVTAKLIKGFLLKKCYIKPEDEISGVADILKSRLKSYHSLSKIMSVEENYETAENIIRAVTIFGDDKKLLKGWLKRNCPSLDERQTAAVCRLSFSGWGSLSKTLLTEIYSPDENGEARSIMDMLRSTDNNLMQLLSNSFKFAENAEAHLKEKCGERESLREMIEDMYISPAVKRSLLQTVKIVDEITDIKKSAPKKIMIEVARDREGDNAKKATVSRRERLLGLYKACRDEYPELYKAIEAADEGDLRRDALYLYYTQFGKCMYSGEKISLERLDSDYDIDHIFPQSRIKDDSIENRVLVKKICNREKSNEYPIKSDWQKNMQPFWRMLKDKGYISQKKYDRLTRRTPLTEEELSAFVARQLVETRQSTKALAEIFKTMYGAAGTKVVYSKAGNVSEFRQEFKLIKCRDVNDLHHAKDAYLNIVVGNVYDTKFTDAFFKNIRNENYSLNKVFEYSVPGAWDKDKSIAAVKSVMRKNNILATRMPHETRGALYDLQLMPAGKGQLPSKSGKPIEKYGGYNKVKVAYFFVAEHTEKKARVRSIQPVYIYKKALYEKDPIAYCTEILGLCDPKIIYPRLLIHATVEIDGKRLGICGKSENYLLCRHEYQLAVSPADERYIKEISKYIARSAAERAENGIRLAPDSEICSEKNTELYRLFLRKLETQVYNRLHDGQLKKLKAKEEAFAELPLVAQCKMLLEILKLFKCDRQTSDFSAIGEGANCGNLREHNSLKKVHSAFAICSSVTGLYSRRVDLLK

SEQ ID NO: 4618 - protein, 1316 aa, unidentified
  REGION 1..1316: note = Description of Unknown: Cas Enzyme sequence
MKISGNDRRTGSYYLGLDVGTESVGWAVTSCEYELLRHRGNAMWGVRLFDEAKGAAERRSYRTARRRAARRRQRLDLLELIFSEEIGRVDPLFFVRLKESALHLDDKTQVRSKYSIFDDDKLSDVIYHKKYPTVYHLRSELIHSDEPHDIRLVYLALHHIMKSRGHFLFDMDAGDEYKDIHVILGELRTLLADEYNTEIKFGEEYISALLRSDIGVTAKAKFVKGALGEISFDEAIDTVVMSEALAGKTIKFDALFKDPALKESEEKTLCLRGDIEEKYDSYAEILGERIEIVTAMKAVFDSARLAQILGGDKYISDAKVRQWNENSADLVGLKAYVREYESEKYDNIFVCKSEKLNNYASYSRYNHGSAEHTCTQEEFCKYLKKELDSMKEHSEYSELWQKIQNNELLPKLRGADNGVIPKQLHLIELKKILDNASKYLGFLSETDSDGLSVTQKIIKLFDFRIPYYVGPLNKKSPNAWVIRTDEKITPWNFEHVVDTKASANEFMVRLTGKCTYTGEDVLPRDSLLYSEYAVLNEINPICVNGNPLPVDVKQRIFEDMFVVSNSKVTKRRIKDYLIGHCLIQPSDEITGIDDTVKSKLKSYHDFKKILDKTHDTAMVEDMISHILIFGDDKKLLREWLRDNCNGLDAKDIEYVSRLKYKDWGRLSRAFLTELYTPDEHGEALSVIDMMRATNCNLMQLMSDKYKFSEAAEAYRNNKFGTDETLEQRLDTLYVSPAVKRSIRQTLRIVDEITDIRKAAPEKIFIEMARGADESQKGKRTESRKNRLISLYKARKEDSGALYEALESEPEGRLRHDALYLYYTQFGRCMYSGEEIDLSQIDKAYDVDHIYPQSKIKDDSLDNRVLVAKRLNMDKTNVYPVSAEIRNKMRPMWHMLKEKGMISEKKYERLVRSTPLSEDELASFVGRQLVETRQSTKALATVLGELYPDTHLVYSKAGNVSTFRQKYNIVKCRDVNDLHHAKDAYLNIVVGNVYCTKFTDAFFKNISRENYSLNRIFDYDVPGAWNASIDLGRVKNNVSKNNILVTRMAYEVKGEIAKRQISPKGKGQLPIKEGMDIAAYGGYDKIAGAYFFVVEHASKEKRVRTVEPVYIYKKALYESDPVRYCTEILGLEDPIIVYPRILKDSLLELDGRKMYITGRSGDKLLGKHPYQLSLSMDAEQKIKRISKYIERCEIAKRELEITIYDNITADVNIEIYDSLINKLSTPVYGRYFSDICRTCENGRDIFISLSLYQQCVQLLELLKLFKCDRTTANLCAINGVKTAGIIQPIKTISSRGSAYIINQSVTGLFETRVDLLS

SEQ ID NO: 4619 - protein, 1353 aa, unidentified
  REGION 1..1353: note = Description of Unknown: Cas Enzyme sequence
MKRGNYYLGLDIGTETVGYAVTDENYNLLKFNGSPAWGTTVFDAVSSNAERRSFRSARRRLDRRQQRVNLLQDLFAREIANVDENFYKRIRESQLYREDVGDKYILFNDTNYTDTDYFAEYPTIHHLINELVKNPAPHDVRLVYLACSWLVAHRGHFLNNMEKGNISDVKDFEKVYKKFLEYFTETRKCAAPWECDDIEAFGKAVKAKKNVTAKNKELIEVLLNGQKPSKETTEEFPFRQDCIIKLLAGGTCKLSDLFACEEYSDYGSISLGMDEDAMTDISSKIGDDYELISAMREIYDWSLLVDILGEYSTISEAKVAVYEQHKKDLGTLKAFIKEYKPEKYNEVFREIGKDNYAAYSYHTDEPNSAGLKRKNVEDFSKYILGIINKIEPKEEDIEKFNDMKSRLELRTFLPKQRNTNNRVIPHQLYWHELNEILKNASKYLDFLNEKDEDGISVKDKILSVFMFKIPYFVGPLNDKSPNAWIVRKTGRIYPWNFESMVDLDASEDAFIRKMTNRCTYLPDEYVLPKDSLCYHKFMVLNEINNLKINGEKISVELKQRIYNELFLQKKKVTRKRIIDFLICNGYLEKGSEDLVSGIDININSNLEPQIAFRRLFENNILSESDAERIIERSSYAEDKLRFLKWLKREYPQLNDDDREYIGRLKFKDFGRLSRKFLCDFEGTDRKTGEVFTILGALWSTQNNLMELLSNSFTFAERIEEYQKEYYSENPKTLNDRLNEMYISDSVKRPIYRTLDIVKDVVKAFGVPKKIFVEMTRGGSADQKGKRTKSRKQQILDLYEKCDEEDVRELKQQLESMGELADNKLQGDKLFLYYMQLGKCMYSGEPIKLEELGTKSYDIDHIYPQAYVKDDSIINNKVLVLSALNGEKGDIYPIKSNIRQKMFGWWKHLKDKELISVEKYKRLSRSTPFSDDEKLGFINRQLTETSQSTKAVATLLGEKYDTEIVYCKARLTSEFRQKFDLLKSRTFNDLHHAKDAYLNIVCGNVYNMKFTKKWFNIDSQYSIKTRTLFTHPVICGEKTVWDGEPMLAKVKETVAKNNAHFTKYKFFKRGGLFDQNPVHAGADKTPLKKGLPTEKYGGYNKAGVMFFIPVKYTAGKKTEIIIMSVELLVGKKFLADKNFALEYSYSRLLRILGKPVDSISFPMGMTPWKVNTVLSLDGFRVCITGIGSGGKCLSAQPIMQFSDDKFWEYYLKKLEAVSEKIARNPKYVYSEYFDKVSTEKNIELYDLYLNKLKSTIYSKRINNPVAIVESGREKFVSLNIRDQVLTLLNLHTVFGRMTGGCDLSCIGGSKKTAATVNFSSTVSNWKKYYSDVRIIDQSASGLWEKKSKNLLDLL

SEQ ID NO: 4620 - protein, 1341 aa, unidentified
  REGION 1..1341: note = Description of Unknown: Cas Enzyme sequence
MSRREYGDYYLGLDIGTESVGWAVTNPDYQLMKFGKKTMWGVRLFPEAQTAAERRLFRVSRRRLERRAQRLALLQELFAEEIKKVDPGFFMRLQEGALHEEDKTVPQPNNLFCDAVLTDKKYHCLYPTIYHLRRSLISSDSPHDIRLVYLAIHHIIKYRGHFLFGGKLDEVPALDAILSEISDEAVDCFGFSLPCGSMASFAEVLTDRSLRMGVKQKKLYELLEADSPRARAFIRAMTGGKVNLSDLFDVPEAVEQEKIKIAFGTDEYEALQPELEELLGEQFYYLDKIRAIHDWAALESIVGGGRTLSDAKVAAYEEHRRDLKLLKRVVKRYLPAEYGRVFHRADEKNNYTSYIGMTRKKGRKIPVTARCSQADFHKFVAGLLKGVPEDDPDIIELQERLATGQLMPRAVTKANSIIPNQLHYIELKAILQKAGNYHPFLNQKDGEGLTVTDKILQILTFRIPYYVGPLNNRDPRAENTWVVRRTQERILPWNFDRVVDKEASAAEFITRMTSCCTYLRDQKVLPRHSVLYSRFTVLNELNNLKLDGDPIPVALKQDIYTQLFLQRRRVTRKSLVDFLNSKGLAVDRDSVSGIDQDFHSSMASLLDMQKMLGAHYTEETAEEIIRLSTIFGEDRNMLHARLANVFGKVLPAETLRRASTLRFRGWGNLSAAFLTGIKSPDSQTGELLSIMDLLWHTNNNLMQLLSRDYGFAGQVAQHNRLLEEGEGFSYRMVEDLYVSPAVRRAIWQALLVTREIRKIMGHDPMRLFIEVARGEEKKERKESRKKRLGELYKACGEEAAHLAASLEARDERELRRDRLYLYYTQMGRCMYSGEPVDVDRLFDEQVYDIDHIFPQSKVKDDSLSNRVLVRRAENMKKGDAYPISQSVRQSQAPFWRMLLQKGLISKQKYERLARSTPLQPDELLGFIARQLVETRQSTKAAAEILGRLMPRTDIVYVKAGLVSDFRKKTDLLKCREVNDLHHAGDAYLNVVVGNVYHTKFTQDPRKFFAQPEPDRHYNLRTLFDYDVRRGGVTAWRAGEGGSIRRVKDMMRRYNALVTWMPFEQGGQLFDTQLVRKGAWQLPQSMARECFRDSAKYGGYNKVKGSYFMLVEHDEGKKDRARSLIDMPLHLAGAVRDEEALQAMLEGEKGLKNPVVILPKIRMNALFDIDGFRMRITGRTGNNVVYAPAMQLVVGYPREKYIRDVLKFAQRSAEYRRENRQKDLQAEASDGIDRDRNLALYDIFLMKLRDTVYKVRLGAQADNLERARDRFMALDAGAQCDVLKEILNIFACNRSTADLKALGLGGQLGIVSTSRTLSRYGRAWLVHQSVTGLFEQQADLLA

SEQ ID NO: 4621 - protein, 1412 aa, unidentified
  REGION 1..1412: note = Description of Unknown: Cas Enzyme sequence
MEKKDYYIGLDMGTSSVGWAVTDEQYHLMRAKGKDMWGVRLFSEAKTAADRRSHRTARRNLNRRNARIGFLKEIFEEDILKVDPGFYERLRESKYHLEDKSSGSPFVLFADSGYTDREYYDDYPTVFHLINELASDEGKKPHDVRLVFLACLNIFKHRGHFLNDNLAGDGVEDINELCKDFIERLGDYYHNNDLDENTEEIQFDSSVMADCFKEVLCNKHLSNSSKKNEILSKLGIGNKNKAVVEMVALTCGLTATVSKIFPQEVDDEEQKKQTLSFKSTKLDEDLPKIEIMLTAEEYEIICLLKKIHDWSVVSVIMGDHTSISAARVESYEKHQNDLKKLKYLYKTYAKDCYDSMFRDMSDNNYSAYVGKTSSDKVSKSGNHKTRMQRRGAKCSQEELYKKIKKDLEKAPASAMEEILLDMDTNSFLPKQLTNENGVIPYQLHKAELVKILDNASNYLDFLNVKDDDGLSNKDKIIRLFEFRIPYYVGPLYKDESKDTNAWVVRKGDGKVYPWNFDEMIDKKASAEVFIERMVRHCTYLNDESALPKNSLKYERFRVLNELNNLCINGERVSPEIKQRIYNELFKKSKKRISKSKLCSYLYSNGLADKDVEVSGFDGTFANALLSYGKFCEVFDVETLTDKQEEIAENIIMWSTVYGDSKKFLREKINECYGPESDNPILNNKQIDRVIGYKFTEWGKLSKSFLNLRGADNDTGEILPLITRMWEENYNLMELLSNRFTYREEVEKKTSTLEKTLYDIEYDDLEDLYISAPVKRMTWQTLLILKEIYQVMGYAPKKVFVEMARDEEEKRNGVGQRKSSRKKRLEELYKNCKVDSDDMAKSLKDCDEARLRSKKLYLYYMQKGRCMYSGKVINIESLFTNDYDIDHIYPQSVIKDDSLDNNMVLVEKNYNNKKSDNYPIFSDWQNKMKGFWDILRDEGFLNDEKYRRLTRTEEFSDNELADFVNRQLVETRQATKTVAELIKNSLFDREEKSSRVVYVKARNVSEFRHSFSMKYDRETGKSKVIHPELVKCRIINDFHHANDAYLNIVVGNTYDVKFTQNPYNYIKEYRKNQRDQDNPQEGVERYHMDKVFSYDVKRGNEIAWVAKGDNKSLETVLSVMRKNTPLVTRMNYIEKGQIADLTIYSADDAASKKGIGYISIKSSDEKMSTLKYGGYKKVKGACFFLVEHTEKEKRVRTLEALPLYLLGNMTSKDKLEAWCSDSRDGLGLIDPDVRLTRVKMYSKIRIDGFDYYLTGRTGNNLLTSNAVQLKLGSGKRDEEESLYWRYYINQLVKYSESDSEVVTGALNNRLYELLIKYNTEGIYSKRQNPIGEKLKEGKKIFGKLSIEKQVETLLGILRIFGLDNQGADLSNIGGQAKNGTMKPHKRISDKEEVLLINQSPTGIYENVVDLLTV

SEQ ID NO: 4622 - protein, 1385 aa, unidentified
  REGION 1..1385: note = Description of Unknown: Cas Enzyme sequence
MKQDYYIGLDMGTESVGWAVTDVDYNLIKKRGQDYWGVYLFDEAQTAQGRRAFRTNRRRLARVRHRLNLLQELFDSEISAKDFGFFYRLENSKYFDEDKPEIARGKFLLFNDKDFGDKEYYKNYPTIFHLRNALRTQEIKDVRLLYLAVHHILKNRGHFLFGEQDFNVNDASDVSGEFEKINRFLSENDGAGFDREKIPEIFETLCNENLAKRERKEKILELAGNSKNKLLGEAVNAVVGLNFSLSKMFGEDRDFQGENKMSFTDSSFEEKLAKARMALDDDEADFLETLKKVQSVASLHNILHGKEFISEAKTEAYETHRRDLSELKKYVRENCPEKYALVFRRQVKKGKKNTSGADENEKDDKKVNNYAAYIGMDKGKGFEKCKKEDFYAFLKKEIGINDESLLAKIDEGIFLPKQISAENCDIPYQVHLAELKAILANAENYFPFLKQKDENCEMTVSEKIISLMKFRVPYYVGPFTDKETRFSWMIKKEGVISTQKITPWNFDDVVDRDASEQKFIKRMTNFCTYLTGEKVLPASSFLYSEYAFLNELNNLKVNGTKDLRVKNILFDFAKTNKKLTLKKCCEQLVKNGLLPEGSKARDVFSGTDGDFKNSLSSYIDFKRIIGDKADLYRDMCEEIILWITVISDKKRLEKLIKSNYGTVLSDEEIKGLKALNYTKWGRLSKKLLDGIFETDSEGEVGNVSIIEKMRTDTENFMELLSNRHNYKRAIDLANSESVEDKKVTYRAVEELYCSPAVKRSIWSALKIVREIVKVQGYSPKKIFVETTREKPDGARKGQRTVSRKQRLLDVYRKNLRNEKELIKKIEETEDSKFNSDEDKLFFYFTQMGKDAYTGEKIELDDLSKTEIYDIDHIYPRSKIKDDSLDNRVLVRRKINQSVKKDSYPLPAEIRNKMEGLWRQLKDKKLISEEKFYRLTRSTPLTEEECGDFINAQLVATSQSAKAAIQLLKRMLPESEIVYSKAVNVNEFKNRLKFVKIRELNDLHHAKDAYFNIVVGNVFNTKFNHNAAVFLRNNGTGNYDLKRLYDFDITNAWKAGDENRIRSVAEKNTCRVVRFSKTEKGQFYKVTICPAGKNDKLAPIKGKAPLNDTSKYGGYNKETTAYFMLVKSRDKKKKDKTLLSLECVTVLADKNFRTAEDKLKYCETRLKLEKPEILIEKIKLNTLFKINGSYAWIRGKTNDRLELCNANQLWLDNGSAKELKKISNHFRDVKKYKDLPVREEEISKEQNLALYDLFTEKLGGKIYAGLSIKGQIENLEKGRDKFEALELKDQLFVLMEILKFMQCNSMTSNIKLIGGAENAGKNRISKLIQDSDVKMISCSPPAIFAKSWTSSGSYELAGCSGKGALQVGIQAGISRLSRRRSQKVVS

SEQ ID NO: 4623 - protein, 1343 aa, unidentified
  REGION 1..1343: note = Description of Unknown: Cas Enzyme sequence
MTKFNKDYYVGLDVGTDSCGWAVTDTDYNLVKTAGHDFWGSYMFENAQTAEERRLNRTARRRTARVHERLMLLQELFADEICKADPLFFIRINNSQLFIGDKDKALSSANILFDDKHYSDKDYFYEYKTIYHLRSELIDNPVTDIRLLYLAVHHIVKNRGHFLFEGQTFDVNDRKNVLTKFEEINNYLSDNDMPVLELTNINEVLDCIKDNNLGKKAKTTKLKELFGITKDKQQLAIINALSGCNFSVNNLYCTDEDYEIEKISFDDSLYDDKFLKIENEVGADNAVLVSNLKAIYDWAILSNIVGDSKFISQAKVKIYEEHKSDLAYLKTYIRNNYDIDTYRKIFRYHKGIPNYSAYIGMDKQKGYSKCSKTDFYAFLKNTIKINDDYILKKIEDGNFLPKQVSSANGVIPYQLNYAELKAILNNAEKYFPFLSKEQDGLTVSQKILMLMRFKIPYYVGPLNDNNKKFAWVKKYDGMQNIKITPWNFDKIVDLDGSEDAFIRKMTNKCTYIQTEDVLPANSLLYSQFAFLNELNNLKINGVKDMRARDIIFEYAKSHKKVTLKACLNLLQKNAIISNNSTTDIFSGTDGDFKCSLAPFVDLKFLGDKLYTKPQMCEEIILWITLISDKDRLAKRIKEKYGKYLTEEEIKKLKGLNYTKWGRLSKKLLCEIKSPYCVDENGECLSIIQAMFATGENFMQLLSGKYGFADSIKEYNESISQSTAVTYKTVKELYCSPSVKRAIWRSLDIVKEIEKIIGKPPKKIFIEMAREVDDKSKKGKRTTSRKEQIKLLYKDIKDNERDWKEEIEETVDSKFNSDKLVLYYMQKGICMYTGKPIRLQDVFNTNICDIDHIYPQSKIKDDSLDNRVLVYKTENSAKNDVYPISSEIRRNMSAYWKELLKGDFISEKKYARLIRNTPLTIEECTDFINRQLVETRQSTKCLAQILRQYFGDKCEVVYSKAGNVDRFKQDNKIIKIRELNDLHHAKDAYLNIVVGNVYNTKFNHDASVYFKKNDVNSYNFTKLYEKDIEGAWKVDDRQRIIDTVNKNTCRIVRMTESGKGALFNVNPVSPNGQEADKLQNWIPRKLRLTNTDNTAIADVAKYGGYTGINTAYYMLVKSVDKKDYKLSFVAYPLYLEKLYNGALENKLKYCLEAFDLKEPQIVLDYIKKYSLINVNGNYYYLVGGATPTVKSVEFNNAYQLYLENKEMQILKLVLKSLDKNDSKNINKVIVNENVNKDDNIQLYKTFVNKLSLNVYCKIPNIQNVIKSLNDEENTFEQMDLKKQCIVLSQMLNILCGRAADLSLLGIKSVSERIRFTVSKQDNIKIIYQSPTGYHRKIINVKDLL

SEQ ID NO: 4624 - protein, 1347 aa, unidentified
  REGION 1..1347: note = Description of Unknown: Cas Enzyme sequence
MNAKNFKDYYVGLDVGTDSCGWAVTDDTYDLVKAGGHELWGSYMFENAQTAEERRMARTSRRRTARAHERLMLLQELFADEISKVDPLFFIRLNNSQLFLEDKDKSLSSANILFDDKQYADKDYFKDYKTIYHLRSELIDKPITDIRFLYLAVHHIIKNRGHFLYDGQTFDVNDKQNVLSKFEEVNNFLSVNDMPTLELVNINDVLTCLKDKHLGKKAKTAKLKELFGVTKDKQHLAIINALSGCNFSIDDLYSTDEEFDPHSLLFDDSGYDEKYLKIENQIGVDDCVLIRDLKAIYDWAILSNIIGDYKFISQAKVKVFKDHQNDLEDLKTYLRNNYDKETYKKVFRYKKGVPNYAAYIGMDKQKSYAKCSKDEFYSFLKNKINIKDEAILKRINDGDFMPKQVSSANGVIPYQLNYAELEAILNNAQKYFPFLAQEQEGLTVSQRILMLMRFKIPYYVGPLNDKDKKFAWVKKFDGMQNVKVTPWNFDKIVDLDASEDQFFSKMTNKCTYLPTEDVLPANSLLYSTFAFLNELNNLKINGVKSRQARDLIFEYAKSHKKVTQKACLNLLEKNAIIPNDSTTEIFSGIDGDFKCSLAPFIDLKFLGDKLYTMPDMCEEIILWITCNSDKNRLAKRIKEKYGKYLTDEEIKRFKGFTYSKWGRLSKTLLCGIKSPRCTDENGECLSIIQAMFATGENFMQLLSDKYGFADSIKEYREANKQSTAVTYKTVKELYCSPSVKRAIWRSLDIVKEIEKIMGKSPKKIFIEMAREPADDARKGKRTISRKEQIKFLYKDIKDNERDWKEEIEETPDSKFNSDRLVLYYMQKGVCMYTGKRISLQDVFNTNICDIDHIYPQSKIKDDSLDNRVLVLKTANSEKTDEYPIKEEIRHKMCGYWKELLNGKFITEKKYSRLMRNTPLTVEECTDFINRQLVETRQSTKCLAQILREYFDDTCEVVYSKADNVNRFKQENKIIKIRELNDLHHAKDAYLNIVVGNVYNTKFNHDARVYFANHDINSYNMNNLFDRDMKGAWVVDDRKRVVDIANKNTCRVVRMTESGKGKLFDVKPVSSKGQKADKLVNWIPRKLRLPNTNNSAITDVAKYGGYTGINTAYYMLVKSEAKKGHTNITFVAYPLYLQKIYNGDYDNKIKYCIEKFGLKEPQILVDEIKKNTLIYINGVGYYLTGGATPSETRIKICNTYQLNLESAELKILKEVVKSINSKKKYNKMILSSDLTKTDAIQLYDGFIQKLSVKPYVNLPTIENISAQLKEKKSYFEELSLPEQCEVLYQILHLMQCNKILSNLTLLGLNNNCGEMRMTNNFTFDNDIKIIYQSPTGYYKKVINVKDLI

SEQ ID NO: 4625 - protein, 1330 aa, unidentified
  REGION 1..1330: note = Description of Unknown: Cas Enzyme sequence
MKEEYFVGLDIGTDSVGWAATDKNYKLLKARGQDMWGSYLFDTAETAAQRRNFRASRRRLVRVRHRLSLLQSLFSEEINKIDPTFFIRLNDSKLLPEDKDERISVRYVLFGDANYTDKNYFKDYPTIFHLRNALRENEIRDIRLLYLAIHHIIKHRGHFLFEGQRINVNSSEIVKNSINHINTFLYERDSATLDLQNIDECLNIIKNRSIDKKSKQKQLKELFSAGSDKQLNTIIAAMTGGKVGINELYKIDADNPFKFSFEEANFEENILPKIQTQIEDDEIELILKAKSVYDWSLLSSILHGHSFISQAKIEIYDKHRNDLMLLKKYVKENCPEKYGLVFRHKKDVDNYAAYAGMDKHRGYKKTTKEKFYQFLKKTIDFEDSAILKEIESGTFLPKQITNANGVIPYQVNLAELEAILENAKKYFPFLIGSDNSLTVADKIKALMTFRIPYYVGPLNTSSRYAWAVRNRGAEKTSVTPWNFDEIIDKDASEEKFIARMTTKCTYLPSEDVLPANSLLYKKFVFLNELNNLTVFEEKNERVRNIAKKYAETHRKITVESLLKTLIKEGIVPAGTNKTDVFGGIDGDFKSNLSSYYDLKRIINAKVDTESEMCEEIIKWITLISDKNRLYARIKKTYSSKLSEAEIKSICALNYSGWGRLSKKLLTGITSTRFCDPSTGEMLNIIDAMDISGKNLMQLLSNELGYVDAIKEYNSEFNMDERVTYSTINNLYCSPSVKRAIWRTITLVREIIKIQGAPPKKIAIEMSRGATEQQKNRRTIPRKQQLLNLYKSIKDEARDWSREIAAISDEKFNSDKVFLYYLQMGRCMYTGQPIFFNDLFVKNTYDIDHIYPQAKIKDDSLDNRVLVNKQDNASKTDVYPIDQAVRAKMLPFWKILKGKGLLASTKYARLVRNAPLSIEEMADFIQRQLVETRQSTKLVASILKSMYPSTEIVYSKARNAADFKNELELVKVRELNNLHHAKDAYINIVVGNVLTSKYGNNPIVFFRSRNEKDYNIRKPFSKDIPGAWSVSMKNDIIHTYNKNTCSVVRFSSEESGALFNATIKSAGENDNLIPLKASGPIANTDKYGGYDSATTAYFALVKSEGKKRLPLLSLECVPVYIEKIIGGDKTELTKYFAEKQGLVNPEIIIDKIKINTLFKINGSYAYLRGRTGNRVVWCNANELILDLKSTKYLKHITSYFDGIKKLGKEIPVDPIYDKITAEENIMLYNTLLEKLSSKTYSGLPSSRQHDFLSSKTDAFAALNLTDQCKIIIQVLKLMQTNSALSDFRLLNGVANAGANFTSKYIQDLDLQIIYRSPTGYYTKILDVNKLK

SEQ ID NO: 4626 - protein, 1344 aa, unidentified
  REGION 1..1344: note = Description of Unknown: Cas Enzyme sequence
MDKNYYIGFDIGTDSIGWATTDVEYNLLKARGQDFWGVYLFDEAQTAESRRANRTSRRRTARKRQRIKLLQELFAQEIAKVDFCFFERLNNSKYYVKDKNDNVSYRDCLFHDEAFTDKDYFKKYHTIYHLRAALVDKQQSKEITDIRLLYLAVAHIIKNRGHFLFEGQQFSVGNKDIVLDAFSKINEILTTLDENAKTLSLSDIDKALEVLCDNKHTKSDRERQLKLLFETDNDKTCGAIIKAIVGLQVNVKNLFGEGDPQIKSFCFDDAGFEIEKLKDAFNEDEYSLICEAKAIYDWAVLSQILGNFEYLSQAMCAKYDAHNDDLKLLKTYVRETFGKEKYDEVFRKRQNINNYAAYVGKDRNKAFSHVSKDEFYKYLRTFVKDESILKRMEEGVFLEKQRSNANGVIPYQVQLAELKQILGNASEHFTFLNYVSGGMSIKEKICSLLTFRIPYYVGPLNTAHSDKGFAWVKKYDGMENVKITPWNFDAVVDRQASEDEFINRMTSKCTYLLGEDVLPKQSLLYSEFAFLNELNNVTFKGRRLDKQARDSILEFAKANNKKITVKVIADVLAKAGLIEQNEKAKENFAGVDGEIKSGFSTLRFFKRLFGDDFDTDMCETIVKWFTVMGDKSDAAERAKRKYGLDNETTKQLKGLNCSGWGRLSKEFLDGNEITTIDENGEILTIIQAMRATGCNLMELMSAKFGFVDAVNRFNAQYSDTDKVTYKTVEDLYCSPSVKRAIWRTVCLAKEIEKVQHCAPSRIFIEMARGADKSKKGVRTKSRKEQLLELYKTCKSDVSQWVSQEFIDKLENTEDAKLLSDKLYLYYIQMGRCAYTGKAISLEEVFNTNVCDIDHIYPQSKIKDDSIINNKVLCYKTSNSTKSDDYPIAHDIREKMLPIWTVWYNKQFIGAEKFKRLTRSTPLTTDELADFINRQLVETRQSTKAVAQILKKLYPNADIVYSKASNVVDFKNRVNKNRQIPAIVKVREINDLHHAKDAYLNIVVGNVYYTKFNRNAAIYFKNNNIDSYNMKRLFEDSLKNAWEPSYKQKVVATVNRNICKVVRFTSEGEGKLFDATIKTKGTNDKLIPLKRNCPLENISKYGGYDKATTAYFSLVRSVDKKGKIQLTIEAIPVYVDLLGKDRIFDYLKNTVGLTQPQILVEKIKINSLLKLNGAYVWLRGKTNNQLTICNANQLVLDTNIVAYAKNVVSFLDKKKKNKDARVDVVYDKIDKTGNLMLYNALLQKLQTQPYINLSALKAQIGFLEESRCNFEILSIEEQCTLLSEVLHLLQCNSTFANLKLLGGVPSAGVLTCNKKLSETGECLLITQSPTGYYKNIVNLTAFYQQ

SEQ ID NO: 4627 - protein, 1329 aa, unidentified
  REGION 1..1329: note = Description of Unknown: Cas Enzyme sequence
MKNYYVGIDMGTNSVGWAATDCEYHLLKARGQDLWGSYLFDEAEGAQKRRSFRTARRRTARTRQRLLLLQSLFQEEMAKKDPLFFIRLNNSPLVLKDKNESLKTSDSLFADQSFTDKNYFKKYPTIYHLRASLINDKVTDVRLLYLAVHHIIKNRGHFLFESQNFNVANEEVVKDKFFAINAFLSDREMPTLNLERLHEVLQVLKQTKSSKRDKQKTLGELLGVSKEKPLTSIVKALIGGTVSLKDLYSAESDFDDIKSFCFDKASFEDSDLPAIKSAVGEDDAELVLLLKSVYDWTVLCGIMGDEEYISFAKVKIYNKHKSDLVWLKNYVRQNFSKETYNEVFRRKDKKNNYAAYIGMDKQKGFSKCKQEDFYAFLKKRLNITDETVLAEMDKGQFLPKQVIKTNGVVPYQLHLLELKAILRNAQKYFSFLSEKQEGVTVAEKIVSLMTFRIPYYVGPLNTASKKYAWAVRRPGYENVSITPWNFHQIVDSDASEEQFIRRMTNKCTYLVGQDVLPANSLLYSEYVFLNELNNLRINGEKNNKARQLIFHYAKQHKRVTLKNCLALLVRNGLLPADSSTDVFSGLDGDFKTSLSTWYDFRFLGDRLQTQREMCEQIILWITLISDKNRLEKRIRTAYGQYLSDEEIKRIKGFNYSKWGRLSKILLDGIVSERCFDENGELLTIIEAMRQKGENFMQLLSDKYGFQDAIERYNQENSPSDDKVSYQTVEDLYCSPSVKRAIWRTVEIVREIVKIQGCAPQKLFLETARETKDNGKAGKRTVSRKQQLLDLYKDIHLQQHDWIKEIESLPDSKFNSDRLVLYYRQLGRSMYSGKPIKLEEVFDRNICDIDHIYPQSKIKDDSLDNRVLVYKDENSVKSDKYPISSEVRNAMRPFWQSLWVQGLISERKYQRLIRSTPLTVDELADFINRQLVITRQSTKATAQILKQMLPDTEIVYTKAANANEFKDKNNLLKVRELNDLHHAKDAYINIVVGNVYNTKFNHNAAVFFRNNSIDSYNFNKLYESDIPGAWRVAQKADVLATFQKNTCKVVRMTVNGHGALFDVNPVVAGKNADLVPLKKHGAIADTSRYGGYNSAKTAYFVLVRSDGKAGKQLLSLEQWPLWMEKQTGGSTEAKLNYFSQKLTNPQICIDRIKQNTLLCVNGSYAWLKGKTGNAISLCNANQLFLDGENVQTLKLISNYMRDRKTFNNPQMPANEKITAENNLRLYDALVQKLSSSLYAGLAICGQVPFLKEKRPVFASLSVEKQCCVLWEVLRLMQCNVGLSDFTLLGGVANAGVTTINKFIQDKNIKLIFQSPTGYYRTVVDVGRFLK

SEQ ID NO: 4628 - protein, 1360 aa, unidentified
  REGION 1..1360: note = Description of Unknown: Cas Enzyme sequence
MENEYYLGLDVGTNSVGYAVTDKEYKLIKFKGEPMWGSHVFEEGKNSNERRGFRTARRRLGRRKQRVNLVNEIFAPEIAQIDKRFFIRLREAALWRDDVAATDKHILFCDKDFTDKDYFHQYPTIHHLICELMSSDAPHDVRLVYLAVVWLVAHRGHFLNEMNKDDVDAVLRFDSIYADVRQYMQQNDIQPWQEEKSAELQNILPKRQNISNKEKALLDILYEGKKPKSSEDDFIDMALSVKLLAGGTVKAAKLFPQGGYDDSIKLCFTDKEETFLEAIAQLGDEVKWVSLLRRMYDWALLKDAIKDGDSVSAGKVKVYEQHRRDLRGLKQFVRKYAPEKYGKIFRQVQTDNNYVAYSYNVKSVKGNIFKLKKAKAADFCDYLRKELKDITVESVDQEFYDDMLARLDTKTFMPKQVNDENRVIPYQLYYHELLCLLNRAEKYLLFLQEKDKDGYTNKEKLLSIFTFRIPYFVGPLNDKSTYGWIERKAVGKIRPWNFKEQVDLDKSEEAFIRRMTNKCTYLPGEDVLPLNSLLYQRYMVLNEINPLKVNGNPIDVAAKQAVYELFERKRRVTSKAIAECLQHNGYMDKGDTLSGVDKNLHSSLKAYHDFHSLMERKVLTENEVEQIIERLTYAEDKKRIYSYLSRAYPQLEENDRKYITKLKYDDFGRLSKKLLAGIKGIDKQTGETANIIDFLWETNDNLMQILAGDKYTFKENIDALRKEYYVRDDKNLTEMLDDMRIANSVRRSIYRTLDIVKDVCKAKGCPPQKIFLEMARGGGEKGARTISRRDKILELYKSVDKEYANDVRILSAKLDNVSDNRLQSEVLYLYFMQLGRSMYSGEPINIDNIKDATLYNVDHIYPQCFVKDDSLDNKVLVTSNENGAKGDSYPIKSEIRKTMAGLWKKYFQCGLISEKKYNRLMRSTRFSDEERMGFIQRQLVETRQSTKALAGIFKSMYPDTELVYVKAGLVSDFRHEFDMLKCRSINDLHHAKDAYLNIVVGNVYNVRFNRQWFKPQESYSIKTKVLFGHEVKQGKLVVWHGGEDIDRIRQVMRKNNIHYTRYAFERRGGLFKQNPRKKGSGLVPRKVGLDTEKYGGYNKTTGSYYVLVRYVLAGKKPQADVMFVPITLLADSQIKSKKISMNNYLQQTIAEIIGKDSRLVSEISLPLGNRHIKINTMLEVDGFYICITAKFNKGDYFKWESMMSLIVSDEWCLYIRRLDSFIEKYQNNKYLQIDTKYDDICKEKNIELYDVILKKIEGSPYNNIKVFSNQVPTLHNGREIFVNCNVIDQISALKNIISIFKVGRSSSCDLSIIGGKKNEASCILQSSIKKLSNVAQSIRIVDVSPSGLYVNKSPNLLEFL

SEQ ID NO: 4629 - protein, 1366 aa, unidentified
  REGION 1..1366: note = Description of Unknown: Cas Enzyme sequence
VNSSDAKDYFLGLDCGTESVGWAVTDLEYNVLKFHNKYMWGSHLFSEAHTAQDRRVNRCARRRLERRKQRILWAQELFAKEIAKVDHDFFIRLKESAYLSDDKHYVQKNSLFNDVGFNDKDFFKKYPTIYHLRLALMNGTAEPDIRLVYLAVHHILKNRGHFLFTMGDDFSSVMDLSAVLDSFSSAFRSVFEGGDMNCSKVKDTEMALQKTKRSEKADLLNQAFTCHDDKLKKMVIKMMVGYKVAPATLFCNEDYKELPAVEFTKTSFEEIDLPILESGLSEDEFSFVLYTKSLFDWSMLARVLAGQTSLSAGKVNLFNENHKDLIVLKRALKKNCSKTDYHDFFHKDNKKNGNYSNYIGEINNNKKHKAVKRCSTELFYKRINSLIEKAPESDSDIKYIKDKIENGTFLNLLVSFRNGVVPYQVNLMELKLILKKASHCFPFLNEKDDSGLSVTEKLVDILKFRIPYYVGPLGFNSNNSTRNHWIERKWNEKITPWNFSDVVDEESSAEAFIKRMTNKCVYMPEEDVIPKNSLLYSKFMVLNEINNLKVNGLKITVVQKQGIYNDLFKGRDHVTQKQIITYMYAQGWYPKKQKLIISGIDGNPKSSLASYRVFKTYIDSKRLSWSDCEKIIYFITVFPEGGKVLHSRLNNEFGAKLAEDDISRIETLNFSGWGTMSEKFLAKLEGFSKETGEVRSIISTLWETNDNLMEILSSKYSFREELNNKPAIGKLSYEVVDDLFVSPSVKRQIWQTLKIVQEVHKVMGHAPKKVFIEVTRNSGKKKRTVSRKDDLLEKYHNLSKDDKQLILSLGGDNADKVKMSLEKQSQEIITKRDRLYLYYSQMGRCMYSGEPIDLENLGNATLYDIDHIFPYSKSGDDSLTNKVLVKSALNREKSQDYPIQDGIRSRMESFWSMLKKTNLINSEKYERLIRPTQLTDKDLEGFVNRQLVETSQSTKATAEILRRYYGDESKIVYSKASKVSDFRKEFEIWKCRAINNLHHAKDAYLNIVVGNIIDSKYSCFPLRSSFSAENNLSKPFDYDVPSASWKAHKNGTIQTVYSFVTNEKMEKTILCTVQPITGKGPLFDLQIRNDKEEMLPVKSSDPILAGRLEKTKDEKAELQAWTKQYGGYNSLSTSHFALVKSFEKSKPCVSIIPISIVDKDKYSTDGALLDYCRIELKLINPEVIRLKVHINALFRINKYPLRIKGKSNGGKVITMDSGLPLILANADVYKYKKVEKVLEKLANDKSYIITEEYDCISKESNEKLFSELMKRLECNIYKQRLGNQTKILRDKSAIFDKLSIENQCRLLYSIVQYFGMGNGQCDLSLIEGSKQAGTITCGAKIMILEKSVEIVDQSVTGLFEKVHRMV

SEQ ID NO: 4630 - protein, 1191 aa, unidentified
  REGION 1..1191: note = Description of Unknown: Cas Enzyme sequence
MKKYLGLDVGTESIGWALTDENYELLTRKKSPMWGVHLFTPADNSDERRKYRCTRRQVRRRKWRIRILQELFNEEISKVDEGFFARLKLQKEGLFTEGDKEYFSAYPTIHHLIRHLQTTKEKPDIRHIYLACSYYMKHRGHFYSNIKVDASFEELLKLDDTFAEFATCAEERLGIVLQYDIGLIEYALQEGTATKTKSALSKALTATSDDEDKLNHVIKLLSNATVNVGDLFSLEDNDKKIKLKDADFETDTIHELRLELGDDFELLEKAKQVMDWVVLRSILKDEKSVNTQRLSLYNYVKSDKELRGAKLDEFMKERHKENRVIPYQLQWADFRKVLDNIARFYPALDTVKIGELFKHKIPYYVGPLKKGGDFAWVEKRGDEKIYPWNFDDIIDKEKTREAFIGRMTAKCTYLVGEDVLARDSLLYAKFVILNQLNNLRLNGEKLDIGVKQRLYHAMYIDQNGTVSIAKIGKWLRSENLIEANAAISGVDTILQGNLKAYHNFKSFFEANKLTPKEAEEIIYRLTVFGGEKGELKNWLCSSFEKLDDGDIKRILRFNYKEYGRLSLKLLEGVCHEDRSIIQMMWETNNNFMELLSDKFTFTDKINEMNDEKESPNRDLNEWLDEHYISNRVKRTIFRSLDIIDEIIEMEGKPDKVFIEMARGEEEKKRTRSRKKELEELLTGNKELLEELSQYDDASLRQKKLFLYFMQKGRCMYTGETISLSTLLSDNWDIDHIWPRAKVKDDSIRNNLVLVDKTANGEKGDSYPLPPDIRDNMRGFWEELKAKGNISEEKYIRLVRATAFSEDEMVNFINRQLVETRQSTKALAQLLKEKYDIKPIYVKAGLVTEFRQQYEYFKCREINDYHHAKDAYLNIVCGNVHDLLFSNVRVFVRKRDNFSVKPEVLYSKRDWLKNDWKENTHGIIRQTMQNNKVKYTEFAFENRGGLWGKTLGLVPRKGEVDGAGKPYELSTCFFALISYRLKGQMLTRLVPIYNYKLEEFDKDKANYFENVYPQLNEKFVGENVKFIRTVKLRSVVTEKGVRYRVTGNTNMSHTYQLVLSSDMEEHLRKLLKAVEKNDYRNIEVGKNHMLFKSFKDKLSSSVYSKISSIAMQIECFDEDEFVGLDIEKQTTFLKNALNLFTANKVFADLTLMGGVKLAGAMRIPSAVDIDYIIDQSPTGFHERKFKVGGQDS

SEQ ID NO: 4631 - protein, 1380 aa, unidentified
  REGION 1..1380: note = Description of Unknown: Cas Enzyme sequence
MNLRHAENYNIGLDIGTGSVGWAVTNENGELYHFKKQPTWGSRLFPSADPAASARTYRGQRRRYDRRRQRLDLLQEFFIDEMEKLDPDFFVRLRQSRLLPEDRAEGTANYRWPLFNASDFTESDYYAKFPTIYHLRVWLMETPEKADLRFVYLALHNIVKVRGNFLHQDNPTLSAKNANMADSIERVCEAVEQWCVERDYACACDSDNIRATLEDTTLSRATKRDATIPLFGMGTEGKPRAKEMAGAILGYIVDFGKVFDITGDGLKFSLGNDEAIDAFYGICPDESLELFEALREAYSAHILLGILKGADGRTISYCKREEYDRYKSDLILLKSLVREYVPTKYDSFFRGAHYADQRWRKDYDPAKAQGYTRYNLGTSKLSYDDFAKDVRKLFKDTQAVADARYIAMDESFKEGTFLRRLKTSDNGSIPYQLHLEEMRAIIENQGKYYPFLLEHQRELESLVTFRIPYYVGPLTLKNAPVKGEGESVKYRFAWSERLPGAENTPIRPWNWDEVIDKDKSAENFIRRMTGTCTYLQGEPVLPRCSLLYEKFCVLNELNGSSWTCDGDKFYRFDADFRLRIYEDLFENAARHALVSYKSVEGWLARNGCPNAHVRGGQGESKYESKLSSYHFFCDVLGVESLSEDAERMVEELILWNTLFEDRDILREKITRAYGDRLNADQIKKICKKRFTGWGRLSKRLLTGLKANTANGPMSIMDILIEGNPEGKHVGSAMVLQEVLHDGNFGFQEIIDQANTKKAELDGGFSLDDLPGSPALRRSINQALRIVDEIVGITGKPPANIFIEVTRDEDERKKGRRTTRRYDGLEAALAELKETGSDILKELKKLSPDQLDDALSLYFMQNAKCMYCGKPLDINQVMSGDHAYQIDHIIPQSYVKDDSFENRVLVHSECNQRKTDALLIDPAIRQKMRGHWGALRDAKLIGEKKFNNLMRDHISEKQMRGFINRQLVETSQIVKHVRLVLAARYPETSVESIKASLSHQLREAQGYVKCREANDFHHAHDALLAAEIGRFIQLRHGKLFDQPIAAQHAMRAFIRSQSEYFKRHHRMPGSASFIVGSFLTSGFDKETGEVFKDAWDAEAECEKIRRYLNYKQCFISRMPEVTSGAFWDANPISPKQGKKALELPLKKGLDPKKYGSFTTGKIAYFFMYAAQDKKGRQKAFFAGVPLYLAGYIGEDKQRLLGYAQSIAPAGFSNVRILRHRINKYQLIEYGNDRYYLPALDVVYSSREIALDQRFMHIVSEIELAQQKNPPVNVPEQDLVDLYWELVHRLSDTCSRFGGIQQTLTINVDGFLEASNQEQQSLILGLLRLIRSARARVDLRLVKGSPNAGGITNGFITNNVEDVVFIDQSVTGMFERRQRLEL

SEQ ID NO: 4632 - protein, 1397 aa, unidentified
  REGION 1..1397: note = Description of Unknown: Cas Enzyme sequence
MGRAIMNLRNFDGRYSIGLDMGTGSVGWSVVDENGKLLHFKKQPTWGSRLFDSAQPASEARVHRGQRRRYVRRRWRLDLLQGLFKAEMDQVDPEFFTRLNMSRLVEGDPIFNGTDFTVDDYYKRFPTIYHLRKWLMETDEKADLRLVYLAIHNIVKHRGNFLRQEEKNLKSKDANPTAAAKAFYAALKDWCVSRGMENVPADKSSQLAKLLVNEEELNRSSLAQQIQPLVTIPAPDELDPKKASKALANAMVGLAAEFRDVFGDFACEKTKVSLGSEEDLDALKEACPDDCATLLEALCGVYSAYVLQGLLSYAPGESISANMIKKYEQYDRDLETLKKLFRDYLDKDQFEEFFRGPTYHELDPDDPSKDYSYDKAKGYTAYNLHKLGYDDLKKEVEKRFKGTGAEGDERYVDMMERFGQQRFLRRLKTSDNGAIYYQLHLEELKAILENQGRFYPFLKRDAAKIESLVSFRIPYYVGPLTAKNAPKDAHGKNRFQWSERKPGMEDAVVTPWNWDQVIDKNKSAEKFIMRMTGDCTYLAGEKTLPKCSLLYEEFCVLNELNGVRWSEDGDDWHRLDAAQREGIITDLFHRKRRVTYKNIGDWLVQQGEATHPHVRGGQGESALESKLASYILFTKDIFPGAEVEPGSKLYKDIETIILWNTLFEDRAILKEKLEDEFGATGSGLLDVAQIKAICKKRLTGWGRLSKKFLCGIKVEAQNGRRVSIMDVLREGNPNSTRRNGETMVMMEALRDEDLGFQKAVDAANRAYYAKEGSELGVNDLPGSPAIRRSLNQAIRIVDEIAGIAGHAPANVFIEVTRDEDEKNKNKRTKRRYDQLKEALEAFKKEDPKVWEELKATSPNDLDERLTLYFMQRGRCLYSGRPIDINQLSNAGLYEVDHIIPRAYIKDDSLENKALVYREENQRKTDELLLDESIRRKMSSEWRDLHDAHLIGDKKFKNLTRSHITEGAMKGFVARQLVETSQMVKLAQSLLEARYAGEGTKIVPVKASMSHNLREAAGFVKCREANDFHHAHDAYLACRIGLFIQMRHPGIYDNPIGYTHVIKNYVSSQAKQFNHTHHMPGSAGFVVNSFGTSGFDKETGEVFHDTWDAEAELEGMRRALNYRQCYISRMPQEDTGAFWNATIYSPRNPKMGPKLALPVKQGLDPKQFGGFSSQQFAYFFIYEAKKKGKPCFQFAEVPVWLAERVGSRPEALAEYASGLADDAGLEFVRVVRPRILKKQLIELNGERFFITGKKAMANNREIAFSILEEAALERRVLQRKGLSYSGIKEYADIDSILLHLSAESEIRESRLYSQISLNDLIPKIAELEEFEALETILRVLLLVNGTVGMADLTAVGGSKFAGYLQPNYSKLLNDPKTDFYIIDQSVTGMFERRIRVGL

SEQ ID NO: 4633 - protein, 1195 aa, unidentified
  REGION 1..1195: note = Description of Unknown: Cas Enzyme sequence
AKNANMKESVDRLCDALQAWCDELELECDPKRAKIRQVLEDSSLQRSGKREQMMPLLGLGAEGKQRAKEIAGSVLGYKVDFGKIFDIEGENLKFDFGNDELIDAFYTVCPDAGVELFEALMSAYSAHILAGILKGANGQTISYCKVGEYERYGRDLKLLKDLVREYVPAEYDRFFRGPHYDDSRWKKDYDPQKASGYTLYNLGTSKLSYENFAKEVKKLFAQTAAESDARYLQLKDSLDEGVFLRRLKTSDNGSIPYQLHLEEMRAIIKNQGRHYPFLLEQQEKIESLVTFRIPYYVGPLTTKNARRKGDQNDGEMRFAWSVRQEGKEKTPIRPWNWEEIIDKDKSAENFIRRMTGTCTYLQGEPVLPRCSLLYEKFCVLNELNGSSWTQDGDKAHRFSAGDRIAIIDDLFKKGTVTYKKVEDWLVQHNRSHPHVRGGQGEAKYESKLSSHVFFCKTLGVEDIDETLEPMVEELILWNTLFEDRDILREKVKRSYGDRLTDEQIKAICKKRFTGWGRLSKKLLCELKAETSNGPMSIMDILVEGNPEGKHVGSAMVLMEVLHDEHFGFGKIIDEANLAKAKGKGGLALDELPGSPALRRGVNQAMRIVEEIVGIAGKPPASIFIEVTRDEDKRKKGKRTTRRYDGLKEALAALEAEGAHSLGELMDIVPEQLDDALSLYFMQNAKCMYCGKALDIRHVMSGDHAYQIDHVIPQSYVKDDSFENRVLVHSDCNQRKADDLLIDSAIRRKMSGFWRALHDAKLIGDKKFNNLMRDHITDKQMQGFINRQLVETSQIVKFVRLMLEDAYPETRVESIKASLSHQLRDEQGFVKCREANNFHHAHDALIAAEIGRFIQLRHPGLFDNPIGATHAMREFIRSRSEYYRNRHRMPGSATFVIGSFLTSGFDKETGEVYKDAWDAEAECDRIRRYLNYKQCYISRMPEITSGAFWKATIYSPKSGKAKMTLPLKGGLDPRKYGSYTEEQFAHFIVYKAAKKGKEQFVFAPIPVSVFGGSDEKIAGFARAHADGQGMEYLSIVRPKVSKYQLVELNGDRLYITGLKKARNACEMAFSDKESSELQALVRGDELSDSEYHSLYNRMACFCSEHAKKLAGMLNLQDLAGNFAKAPSSEKTRALLGILKLITGSDRMADLSGIGGSKCEGCIQPSFTKELNSRASTLVFIDQSATGMFEKRQRLEL

SEQ ID NO: 4634 - protein, 1407 aa, unidentified
  REGION 1..1407: note = Description of Unknown: Cas Enzyme sequence
MKGLVDVNLRNYPGEYNIGLDMGTGSVGWAVTDEQGALLHFKKKPTWGSRLFDSAQPASEARTHRGQRRRYIRRRWRLDLLQKIFEPAMSEVDPDFFMRLNQSRLNQSRIIEGDPIFTKGFTKADYYDRFPTIYHLRAYLMDTDKKVDLRLIYLAIHNIVKHRGNFLRQGEKLSAKTAKTSDALKALNESLKAWCESREYEFSKIDEKKAAEILAEKMTNRSKKAEGIKDLIKVDTSDASANGKLAKGISNAIVGLKCEFVDVFGEFEGEATKFELSDDEKLEALNAVCPDDCVELLEAICGVYSAYVLQGLLTYAEGKTISHNMIAKYDCYKRDLETLKSLVRDYAPESYGNFFRGATYHDSNADDPSHDYDVSKAKGYTAYDLHKLSYDDFAKATGKLLAGTGVEADERHTQMMDAFKEQRFLRRLKTSDNGAIYYQLHLEELQAILKNQSSYYPFLKNDEAKIESLVTFRIPYYVGPLTSKNAAQDHHANNRFQWSERKPGMEDAVITPWNWESVIDKNKSAENFIMRMTGDCTYLAGEKVLPKQSLLYEEFCVLNELNGVRWTTDGDDWRRLDAAQREGIIHDLFHCNRRVTYKMIADWLVREGDATNPLVAGGQGESGLESKMASYIFFAKDIFGVDELDSSDYPVIEKIILWNTLFEDRSILREKLQEEFGPAGNGMLNVEQIKKICRKRMTGWGRLSQKFLCGIKVDTQAARRVSIMDMLREGNPNTTRRQGETMVMMEILHDDTLGFQEKIDEHNRKYYMENEKGMGVNELPGSPAIRRSLNQAIRIVDEITKIAGHAPANVFVEVTHDKDASKKGKRTKKRWDNIEAALNAFKAQGGNLEVMSDFEELKAANIDLDERLTLYLMQNGKCLYSGKAIDLHGLLAGSGQYEVDHIIPRAYIKDDSLDNKALVCRTENQRKTDQLLIDESIRRKMANTWRSLHSAKMMSDKKFRNLMRSDISKNAMKGFIARQLVETSQIVKMAQALLEARYAEEGTKIVPVKASMSHNLRDAARLVKCREANDFHHAHDAYLACRLGLFIQMRHPGMYKNPKDYSHVVKKYVREQSELFKKTHKMPGSAGFVVNSFMTAGFDPESGEIFDDAWDEDDDVKHHRGKYLPDAWNAAAEVEGIRRALNYRQCYISRMPYIESGAFWNTNPISKRKNPKLARKRKLKPSVYGGYDSKKAAYFFIFEAIDEKGSATCFISQMPIYLKKALENSKRDFEDYCHQLVSGTRYEFKSIVVPRLLKWQLIEISGSLLYVNAEEEVKTGSQLAFSQEELVDIASLNEEAFYDSSSLKRIYSSISRALRRSRCQMLADNLNLEQHSDSFCSLRPKEQKDLLITLLRLCRGNKKSVSINLSSIGGPKSAGRLRPMRNKVPDPIFIIDQSVTGMFERKTRVGL

SEQ ID NO: 4635 - protein, 1401 aa, unidentified
  REGION 1..1401: note = Description of Unknown: Cas Enzyme sequence
MNLRNYSGDYNIGLDMGTGSVGWAVTDAQGKLLHFKKQPTWGSRLFDSAQPASEARVHRGQRRRYVRRRWRLDLLQKLFEPAMSEVDPGFFMRLNQSRTIEGDPIFTKDFTKTDYYDRFPTIYHLRAYLMDTDEQADLRLVYLAIHNIVKHRGNFLRQGEKLTAKTAKTSDALERLNDSLQTWCESREYDVTKINKSAVAKLLADERSSRSQKAKDIQALVKVDTADAAANKKLAKALSNAVVGLQCEFKDVFGDFECEATKLALSDDEKLEALQAACPDDCVELLEAICGVYSAYVLQGLLSYAEGQTISVNMIEKYNCYANDLDRLKTLVREYAPGSYESFFRGATYHDSNSDDPSRDYDASKAQGYTAYDLHKLSYDDFAKSVRKLFAGTGAETDERYIAMMDAFDKQRFLRRLKTSDNGAIYYQLHLEELQAILKNQGRFYPVLKDEAAKIESLVTFRIPYYVGPLTPKNAAQDKHGNHRFQWSERKPGMEDATITPWNWDTVIDKNKSAENFIMRMTGDCTYLAGEKVLPKQSLLYEEFCVLNELNGVRWSEDGDDWQRLDAAQREGIVHELFHKKRRVTYKMIADWLVKEGDATNPVVRGGQGESGLESKMGSYIFFAKDIFGVDELSRAEYPVIEKIILWNTLFEDRSILREKLQDEFGPSGNGMLDAEQIKKICKKRLTGWGRLSEKFLTGIRIDTQAGRSMSIIDVLREGNPSSERRLGETMVMMEILHDNTLGFQEKVDEHNRKYYAEHEKSLGVNELPGSPAIRRSLNQAIRIVDEIAKIAGHAPANVFVEVTRDEDEKKKGKRTTKRWDAIEDALKAFKAEGGDLAVMGDFKELKAANVDLDERLTLYLMQNGKCLYSGRAIDLNKLMAGSGEYEVDHIIPRAYIKDDSLENKALVYREENQHKTDQLLIDKSIRWKMGETWKQLHQAKLIGDKKYRNLRRPSINENAMKGFVARQLVETSQMVKMAQALLEARYADEGTKIVPVKASVSHNLREAAGLVKCREANDFHHAHDAYLACRLGLFIQMRHPGMYENPIGYSHVIKKYVREQSELFKKTHRMPGSAGFVVNSFMTAGFDPETGEVFDDAWTEDDEVKRYRGKYLPDGWNAAAEVESIRRALNYRQCYISRMPQEDTGAFWKATIYSPRDPKMGAKLELSTKQGLDAKQYGGFSSQQFAYFFIYEAKKKGKPVFRFSQVPVWLAARIEGDSAALGEYARGLAEKEGLEYVGITRSKIYKKQLIEVDGDRLIITGAKEVRSGSQLAFSQDEMLLLNMSKKDEKLSVLPLLEGLVHKIGCAADATCGKLSRQLKLSQLSSVSVLNAPQQRELAFGLIRIENGADRVVDLSGIGGPAKAGAMVTDISKLINDSAIPFFIVDQSVTGMFERRTRVGL

SEQ ID NO: 4636 - protein, 1396 aa, unidentified
  REGION 1..1396: note = Description of Unknown: Cas Enzyme sequence
MNLRNYSGDYNIGLDMGTGSVGWAVTDAQGKLLHFKKQPTWGSRLFDSAQPASEARVHRGQRRRYVRRRWRLDLLQKLFEPAMSEIDPGFFMRLNQSRTIEGDPIFTKDFTKADYYDRFPTIYHLRAYLMDTDEQADLRLVYLAIHNIVKHRGNFLRQGEKLTAKTAKTSDALERLNDSLQGWCESREYEVAKINKSAVAKILADERSSRSQKAKDIQALVKVTTGDAAADKKLAKGLSNAVVGLQCEFKDVFGEFECEATKLALSDDEKLETLQAACPDDCVELLESVCGVYSAYVLQGLLSYAEGQTISINMIKKYEQYAEDLALLKLLVRKYALDSYEPFFRGATYHDSNSDDPSRDYDASKATGYTAYDLHKLSYDDFAKSVKKLFAGTGAETDERYIAMMDAFDKQRFLRRLKTSDNGAIYYQLHLEELQAILKNQGRFYPFLKDEAAKIESLVTFRIPYYVGPLTSKNAAQDKHGKPRFQWSERKPGMEDATITPWNWDAVIDKNKSAENFILRMTGDCTYLAGEKVLPKQSLLYEEFCVLNELNGVRWSEDGDNWQRLDAAQREGIIHELFHKKRRVTYKMIADWLVKEGDATNPVVRGGQRESGLESKMGSYIFFAKDIFGVDELSRAEYPVIEKIILWNTLFEDRSILKEKLQDEFGPSGNGMLDAEQIKKICKKRLTGWGRLSEKFLTGIRIDTQAGRSMSIMDVLREGNPSSEHRLGETMVMMEILHDNTLGFQEKVDEHNRKYYAEHEKSLGVNELPGSPAIRRSLNQAIRIVDEIAKIAGHAPANVFVEVTRDEDEKKKGKRTTKRWDAIEDALKAFKAEGGDLAVVDDFKELRAANVDLDERLTLYLMQNGKCLYSGRAIDLNKLMAGSGEYEVDHIIPRAYIKDDSLENKALVYREENQHKTDQLLIDKSIRWKMGETWKQLHQAKLIGDKKYRNLLRSSINENAMKGFVARQLVETSQMVKMAQALLEARYADEGTKIVPVKASVSHNLREAAGLVKCREANDFHHAHDAYLACRLGLFIQMRHPGMYENPIGYSHVIKKYVREQSELFKKTHRMPGFAGFVVNSFMTAGFDPETGEVFDDAWTEDDEVKRYRGKYLPDGWNAAAEVESIRRALNYRQCYISRMPQEDTGAFWKATIYSPRDPKMGAKLELSTKQGLDAKRYGGFSSQQFAYFFIYEAKKKGKPVFRFSQVPVWLAARIEGDSAALGEYARGLAEKEGLEYVGITRPKIYKKQLIEVDGERFFITGKKEMRNATQLAFSNEQMKLLAGDTCSEDAIKLLDMFNPAASSVSGRLLRQLKIEAIIEKCATVDAEDVVAVVKRLLALVNGTMNMVDLSPAGGSKFSGCIQPNYSKLLSDSNVTVFLIDQSVTGMFERRTRVGL

SEQ ID NO: 4637 - protein, 1348 aa, unidentified
  REGION 1..1348: note = Description of Unknown: Cas Enzyme sequence
MHRGQRRRYVRRRWRLNLLQALFTEEMEKVDPGFFMRLNHSRTVEGDPIFTKDFTKKDYYKRFPTIYHLRAHLMETDDPADLRLVYLAIHNIVKHRGNFLRQEEKLTAKIANTSEALGKLSVSLKEWCDSRGYSVGKVDEEAIAAVLADERISRSQKAKNVTLLISVDTGDSKANAKLAKALANAIVGLQAEFKDLFGDFECEATKLNLSEEEKLEALQAACPDDSAELLEAVCGAYSAYVLQGLLSYAEGQTISHNMIKKYDCYAEDLECLKALVRDYLPKTKGDDGLKPFDRFFRGVTYHDLDKSDPSRDYDASKAKGYTAYNLHKLSYDEFRKEVEKLLKGTGAQDDERYITMMDAFEKQRFLRRLKTSDNGAIYYQLHLEELQAILENQGRFYPFLKQEASKIESLVTFRIPYYVGPLTSKNAAKDVHNKNRFQWSERKPGMEDTVITPWNWESVIDKNRSAENFIMRMTGDCTYLAGEKVLPRHSLLYEEFCVLNELNGVRFTNDGDNWHRLDSEQRAGIIRDLFHKKRSVKYADIAAWLVRMGYLERTPQVRGGQGESGLESKMSSYLLFAKDVFGVDELDEALFPAIEQIILWNTLFEDRSIFEEKLRDEFGPNGNGMLNNEQIKKCKKRLSGWGRLSEKFLTGIRVVTQGGRQMSIMNVLREGSPNPDRRQGEALVMMEVLHDNTLGFQKKIDEVNRAYYAQNAKAMGVNELPGSPGIRRSINQAIRIVDEIVKIAGHAPDNIFIEVTRDEDEKKKGKRTVKRWDRIEAALNAFKAEGGDLAVMSDFKRLKNTEADLDERLTLYLLQNGKCLYSGRAIDLDALMAGSGEYEVDHIIPRAYIKDDSLDNKALVYRSENQRKTDQLLIDENVRQKMGETWKQLHDAKMISDKKYNNLMRLTVTEGAMKGFIARQLVETSQIVKMTKALLEARYGDAGTRIVPVKASMSHNLREVAGLVKCREANDFHHAHDAYLACRMGLFIQKRYPGIYENPIGYAHAMKKYVLEQSELFKKTHRMPGSAGLIVNSFMTAGFDPETGEMFEDAWTGNDEIKHCKKKHYDDAWNAAAEVEGIRRALNYRQCYVSRMPYEDSGKFWDANPISKRSNPKLALKNTLDPACFGGYNTKTAAYFFIYEVADKKGKTGLRIAQMPIFMKVKCESDNAAFEKYCQDLESESRVSFTRIVIPRLLKWQLVEIDGNLLRINAEEEMKSASQLAFSQEELERILLVCTDGYLDADVNRSVYMAIAKALDRAKCPMLTNDLDLISRFDAFCGLAVADQKDLLKKILLLCRGNKQSSPINLSSVGGKKKAGYLRPARSKVPDGMVLIDQSVTGMFERRTRVGV

SEQ ID NO: 4638 - protein, 1360 aa, unidentified
  REGION 1..1360: note = Description of Unknown: Cas Enzyme sequence
  MOD_RES 280..283: note = Any amino acid
MGKMYYLGLDIGTNSVGYAVTDPSYHLLKFKGEPMWGAHVFAAGNQSAERRSFRTSRRRLDRRQQRVKLVQEIFAPVISPIDPRFFIRLHESALWRDDVAETDKHIFFNDPTYTDKEYYSDYPTIHHLIVDLMESSEKHDPRLVYLAVAWLVAHRGHFLNEVDKDNIGDVLSFDAFYPEFLAFLSDNGVSPWVCESKALQATLLSRNSVNDKYKALKSLIFGSQKPEDNFDANISEDGLIQLLAGKKVKVNKLFPQESNDASFTLNDKEDAIEEILGTLXXXXDECEWIAHIRRLFDWAIMKHALKDGRTISESKVKLYEQHHHDLTQLKYFVKTYLAKEYDDIFRNVDSETTKNYVAYSYHVKEVKGTLPKNKATQEEFCKYVLGKVKNIECSEADKVDFDEMIQRLTDNSFMPKQVSGENRVIPYQLYYYELKTILNKAASYLPFLTQCGKDAISNQDKLLSIMTFRIPYFVGPLRKDNSEHAWLERKAGKIYPWNFNDKVDLDKSEEAFIRRMTNTCTYYPGEDVLPLDSLIYEKFMILNEINNIRIDGYPISVDVKQQVFGLFEKKRRVTVKDIQNLLLSLGALDKHGKLTGIDTTIHSNYNTYHHFKSLMERGVLTRDDVERIVERMTYSDDTKRVRLWLNNNYGTLTADDVKHISRLRKHDFGRLSKMFLTGLKGVHKETGERASILDFMWNTNDNLMQLLSECYTFSDEITKLQEAYYAKAQLSLNDFLDSMYISNAVKRPIYRTLAVVNDIRKACGTAPKRIFIEMARDGESKKKRSVTRREQIKNLYRSIRKDFQQEVDFLEKILENKSDGQLQSDALYLYFAQLGRDMYTGDPIKLEHIKDQSFYNIDHIYPQSMVKDDSLDNKVLVQSEINGEKSSRYPLDAAIRNKMKPLWDAYYNHGLISLKKYQRLTRSTPFTDDEKWDFINRQLVETRQSTKALAILLKRKFPDTEIVYSKAGLSSDFRHEFGLVKSRNINDLHHAKDAFLAIVTGNVYHERFNRRWFMVNQPYSVKTKTLFTHSIKNGNFVAWNGEEDLGRIVKMLKQNKNNIHFTRFSFDRKEGLFDIQPLKASTGLVPRKAGLDVVKYGGYDKSTAAYYLLVRFTLEDKKTQHKLMMIPVEGLYKARIDHDKEFLTDYAQTTISEILQKDKQKVINIMFPMGTRHIKLNSMISIDGFYLSIGGKSSKGKSVLCHAMVPLIVPHKIECYIKAMESFARKFKENNKLRIVEKFDKITVEDNLNLYELFLQKLQHNPYNKFFSTQFDVLTNGRSTFTKLSPEEQVQTLLNILSIFKTCRSSGCDLKSINGSAQAARIMISADLTGLSKKYSDIRLVEQSASGLFVSKSQNLLEYL

SEQ ID NO: 4639 - protein, 1342 aa, unidentified
  REGION 1..1342: note = Description of Unknown: Cas Enzyme sequence
MRYFMGLDMGTSSVGWAVTDEHYQLLRRKGKDMWGIREFEEAATAVERRTHRASRRRRQRQVARIGLLQEYFHDAIHQVDPNFYQRLKNSKYHEEDKDEIVRGSNGIFNDVEYTDKEYFKEFPTIFHLRQELIKSKEPHDVRLVYLALLNMFKHRGHFLNATLSADGESRKIKDIYTDFVDKVAEQLGVSFATDIRYEELENYLSSNDLSRKRKGELIAELLHVTRKDKQQYALIECMLGLDKSVKLMFGDTLPEDFDKTIKVNFSDIAFEEKATEISEAIGEEKYDLILIMKEIYDAAILNRIMNGYTYLSDARVAEYEKHKSDLACLKHYIKEYGTKQQFDFLFRGTEKGSYSAYVHSVNSHEKQRRNMAGNKKEDLYSALKKMLKDMPENEEKTYIMMQIELDNFLPKQLTASNGVIPNQIHLKEMKKILANAENYLPFLKEKDESGYTVSERIQKLFAFQIPYYIGPTTEKSAEFGGNGWVVRKEEGKVLPWNIDQKIDMKKTSEEFISRMVRRCTYMNDEQVLPKESLEYESFCVLNELNNIKVYGEKLPVDIKQDIYRTLCEKGKRITKKSLMQYLVGRGVIKTEDEEQLTGLMDGLNNTLKSFAKFKAIFGDAIYEDSCKKMVEQIIFWCTVYGDSKHFLKEQLLEKYGEVLTDAQIKRILGIKFRDWGNLSKKFLELQGCSKETGEVNSLIRMLWETNDNLMELLAQDSYTFKEELENMQESTYKVLTELQPEDLDHMYFSAPVKRMIWQTILIIKEVTKVMGCQPERLFIEMTREHGQKNDIKDSRAKKFYELYSKIKDEDKDWRKVIEDADKDGRIRSKKMYLYLTQMGRCMYTGRPIDLDQLFNNNLYDIDHIYPRHYVKDDNLENNMVLVEKQSNAHKSDVYPLESGIYEKQVNWWRELHRKNLINDEKLKRLTGRNPFTDEQKAGFIARQLVETSQGTKGVATILQEALPDTTLVYAKARNVSEFRSDNDLLKSRIVNDFHHAHDAYLNIVIGNVYYVKFTKNPINFIREHGTYNLGKMYAKDVKRGDEIAWVAQSGNGQTATMETIRRTMARNTPLLTRMSYEVTGGLANQTLYSANTAKEGIYIPLKSSDEKMHDITKYGGFTSVKGAYFILVEHDDKKGKRIRTIESVPIMWKGRIEKNPAELERYCVEVLKLHNPEIKIRKILYKSLIRENGYYMYISSNEEGRLCMMNAVSLCLKQDWINYIHKLEKLNFENISREKNIKLYQILCDKHKNTIYINRPNSLGKLFDECKENFFDLTLNDQVTVLLEMLKTTQISLATANFSILNKGKNIGKMRMNKKISNEKDILLINQSVTGLYEQKVNLLTV

SEQ ID NO: 4640 - protein, 1358 aa, unidentified
  REGION 1..1358: note = Description of Unknown: Cas Enzyme sequence
MEKKSKKIYLGLDIGTDSVGYAVTDDQYNLLRVHGDDAWGSVIFDAASLSDERRSHRSARRRLDRRQQRINLLQEIFAKEISKVDDRFFIRLSESYRWREDVQDRYVFFNDEEYTDVQYMGEYPTIHHLICELMNNKNPHDVRLIYLACAWLITHRGHFLNNLNVEKLDEIMDISSVYQNFINYFTENGYRRPWGEIDVSALAEVLKQKTGVTAKNKELQNILLEGKKPEKSGTEEFPFSQDSIIRLLAGGQCKLKDVFCKEEYLDLGSVSLGMDEEKFGEISGNIGEDYDLLIALRGLYDWSVLADILNGHSETISMAKVQIYEQHGKDLQILKYFVRKYVPDKYNEVFRKAKADNYVAYTGHMDKDTASQIKKKAKAEDFSKYVLKLMRLIKPEKTDLQSYEDMCERLNLNSFLPKQKNTDNRVIPHQLYEYELIRILKNASLYLPFLNEVRNGISEMDKVVSIFRYKLPYYVGPLNKKSDFAWISRKAGKITPWNYKVMIDEDASENSFIKRMTNKCTYLPGEDVLPKDSLCYQKFMVLNELNNLKIDGRKVPVEVKQGIYHELFEKKKKVRRKDIEEYLISNNYLAKGSTELISGIDEQVHSCLSSYYAFRNLLSREILSENDVEKIIERASYAEDKSRVKKWLRKEYPDLSQDDVRYITKIKIKEFGKLSRKFLTELKGCNKQDGEMTTILRIMWETNDNLMEILSDKYTFREAVEMFTQEYYTGKNQSLKERLDEMRVSNSVRRPVYRTLAVVKDIEKAFGKPDKIFVEMTRGGLSDQKGKRTKSRKQQILELYAKCREEDVRDLKQQLESMGERVDSRLQGEHLFLYFMQFGKCAYSGMPIELEKLMSGSKEYDIDHIYPQAYVKDDSIINNKVLVLSKINGTKGNVYPISPEIRNRMQGQWNWWHHIGVISDEKYKRLIRSTPFTDDEKYGFINRQLTETSQSTKLIAGLLKERFQNIDIVYVKAGLVSDFRHEFDLPKSRTYNDLHHAVDAYLNIVAGNVYNMRFSKRWFSVDSKYSIKTKTVFSHPVNCQGTIVWDGASMLAKVKKIAKKNTAHFVKFATFKTGGLFDQNPVKKGTGLIPLKAGLPTEKYGGYNKAGIMFLMPVKYKIRKKCAIIIMPVELLHGKHFLEDETFAREYTFNRLESILGKKVDEISFPLGMRPWKINTMLSLDGFRVCITGTGGKGKCLVAQSIMQFSSEDCWKGYMKKLEKFIEKFKKNPDFIYDKEYDKVSVEENQKLYELYIEKLQNTIYSKRINSPVQILMDGQEWFEKLNIKEQCVVLMNIQTVFGRMTSGCDLSLIGGSPNSGATVNFSSTISNWRKNYSDVRIIDQSPSGIWEKRSENILELL

SEQ ID NO: 4641 - protein, 1373 aa, unidentified
  REGION 1..1373: note = Description of Unknown: Cas Enzyme sequence
MSNYSIGLDIGTNSVGWAVVDENNNIVKKNNFNMWGVRMFEEANDASERRSYRASRRRLARRNQRIKLLRNLFNDEINKTDQNFFQRLDDSFFKVEDKENLNKYTFFDDEMTDKEYFEKYPTIYHLRNDLMTTNEKKDIRLVYLAIHHIIKYRGNFLQDGEVFNKNDKEKLIDDFKKINELLINIREEFEDDSDYFDTIDKVDCENFLFDLESIINEKNGKREKKENLIKFFNCEKTSFVNEFIVPLLVNSPINASALKVIKDLKYDKVEIDLTSEELDSKIEEAKKNIVELSSLFDIAYFVKDINDYFYLVKLLGTNNSLSEAMVEIYENHQNDLKLLKKFIKTYCKTYYNECFRMHNDKDNYCSYIGMVSTNGEIKRFKHCAKEKFYAYIKSIIEKVSDKEAEVLKNEILNKIDNNEFLLRQNSGQNSSIPMQLHLIELRKILEKQSKYYPFLNEVSDNYSTKEKIELIFKFKIPYYVGPLNNKSNKSWVIRSKEKIYPWNFDNIVNIDESAKKFIERMQNKCTYLHGIDDYCLPKKSLIFSEYNCLQYLNKITIDNKTLDYKTKMDLFNNIFCSTNRPTRKRIEEYLKTNYGVSCDRFTSKIDDVTCDMSSYITFKNIFGKDFNNKKEIIEEIIKDITIFEDKKILVKRLKEVYKLDDDKISQIKSLNYKGYGSLCKKLLTELTYVNPKTGEVFGPIIQIMRDTNMNLQEILYNQEHPFINVIDKYNKGINDKNTKLSIEEYIDEYLYISPNFKRPMIQAYKIIEEVETILKTKISKFYVECTRTNKAEKVKKLSRYESVKELLKNCKIYSSQLNTYNIDINHLNTILESNKESLRSDKIYLYLTQLGKDLYTMENIDLDQVISGTYDIDHIYPQSLIKDDSLSNRVLVNKHFNEKVKSNKFLYEVSSSLPKNRIGFYQLLLDSKLITKEKFRRLTENEITKDKLDTFVNRQLVATNQAVKGIITLLKEYKGIDSNDIIYSKSENISDFRKEYDINKSRTANNYHHAHDAYLNVVVGGALDNYYKNFRFNNYSDYVRLKAYNASTNPMIILSKDRIYNNKVIWKKEETVKLLKENIFNNFDIHETTRTYTPNVMFSKVSILPAPNGTVSIKNDKRGNIEKYGGITSGAYSKYVIVKGLTKKGKTEYILEAILKNNANNLKVYLDNLYKEKYTEYEIINDCIKVNQVIEKDKLKYCITGVESGGASYLLKNQKDRNLDKECIRIIKNIDKYFLLKKYNVDIDYFEDRVVLSRKTEKGNEVSILLKDCDYLKNYIIQLYNKDVFKYGVTQSILTNIDKINNLGLVDRISVLYNILGLLKTNERNLADLTLIGLAKKSGKLSMTKNLKEGTKFISQSITGYYKKVIFKVPNVI

SEQ ID NO: 4642 - protein, 1383 aa, unidentified
  REGION 1..1383: note = Description of Unknown: Cas Enzyme sequence
MEHYSLGLDIGTDSVGWALVDENNDVIKKNGKHLWGVRMFDEASSAQNRRTFRNSRRRLNRRRQRIVLLQKIFFDEINKKDKTFFERLDDSFFKIEDKRNKNVNTLFCDKNYTDRDYKKEYPTIYHLRDALIKTDEPKDIRFIYLAFHHMIKYRGNFLKEGEEFEPSDISLIENFFAELNEELENRALALDEDNMAHDNYYQTIDTSKENFYTDLQNILLAKKGKKETKEDLIHLFGCNKKTFVQEAIAPLLSGSSVNLAKLTIVKEENHKKTEIDLSKEEYLANIEAACQNIPELSSLISLFEGVKMVRDHYELVSILGNHKFLSEAMKEIYESHNKDLAELKKLIKNYLPEDYNYCFRRRTQTVIKKGKEHIEPINNYVNYIGFNDYRGKKERFGKIRQEDFYKFIKAELDKIKADEAQETIRNILDKIDKQTYMRKQNSASNGCFPMQLNLMEMDAIIKKQSEHYPFLSEEKDKILSILKFKLPYYVGPLNTSSKYSWVIKKTQDKIYPWNLDKVVDLDETAQKFIRRMQRKCTYLHGENDYCLPQESMIYSAYKCFSYLNKIYVNYKPIQISTKEKVFKDVFLKEKKPTKKSITVAIKAIEGTKEIAITHTEGKELEEVNCNMKSYILFSNLFGEKFEENKEMIEDIISDITLFEDKSILEKRLREKYHLDEAKIKEIKGYNFKDYGRLSKQLLVGFELTNNSTGEVFSNVIELMEKTTLNLQEILYNTEYNLMAEIDKYNKSVNADEATNDFKSYIDNYLYLSPIAKRSLIQSYEIIEELEKIIKHPIERYYVECTRTNQAKKNRVDSRYDKLKKLYTEVKNDADSFNVDMNKLKKQLDDNKDNLRSDKLYFYFTQLGKCMYSLKPIDLDKLISSNDTYDIDHIFPQSLIKDDSLSNRVLTEKSINNNRKSDKFLFETDILEPKCYKFYDMLLKKELISKEKYRRLTLKEISKNELDGFVNRQLVSTNQSVKGLIEVLKACKVNNTADIIYSKAEVVSDFRKDFDLPKSRLANNFHHAHDAYLNVVCGRVVDQYFKAHNYRDIKDYYHLKDQKITTNPQTIFKYDRYVNGSPLWKKEETIAKIKHYLYETFDVFETTRAYIGNELYSKVTIQPAGKGSYPVKVKENDPRKDTEKYGGFSDPSYTFYCVIKCKKKKNQIEYHYVSIPALYKNNIDAYLESKNYKDYEIVLNNLKINTVFKVGKLKFCVTGNTKGSYYIKNLLDRRFDYHSIVTIKKIEKYFDMVKRGNYLKREEDKIILSPARNEKCKEIALENQELEKLYQTIKTMFSKEIYSFSNIVNICGKLPECLNHLNIDDKVYTLNELLRLLKTNERGTADLTTINMSSTCGTLLFNGTIQPGTQIIAESVTGYYTKVLFEVK

SEQ ID NO: 4643 - protein, 1369 aa, unidentified
  REGION 1..1369: note = Description of Unknown: Cas Enzyme sequence
MKKYTLGLDVGTNSIGWAVIDENNEIVKKNGFALWGVRMMDEAEDAKDRREHRCSRRRGTKRGQRIKWLQDEFFDEIQRIDPLFFQRLNDSFYKIEDKQNNNKYTFFDDVLTDKEYFNTFPTIYHLRKHLLIVDEPIDLRMLYLAAHHIVKYRGHFLNEGTDYDKGNHFQIENNFNTINELLAEARVKFEDNEDYFEEIQMDNNFLNELENIFLKVSTKNDQKLKLKQLFGVEKKTFVNEFVIQLLVGSSVNISKLTLLQEQHYEKCEIDLENEELLEKIETSKKLVVDLAQLLDAALLLKEIRDTYYLLELIGESNYLSEAMVKQYDKHQEDLKKLKFFFKNYLPQSYNECFRKYDKKLYNYPHYIGMNSTKKQLVRFSHCARDEFYDYLKKQLKKVDKEEAVELKNEILKSIEQGTYLLRQNSGHNTVIPMQLNLIELKKILNNQAKYYPFLLVKDGEYTRIERIVSIFKYHLPYYVGPLNNKSPYSWVKRTNEKITPWNYERVIDLDTTAKQFIEKMQNKCTYLHGDNDYCLPKKSLLFSEYNCLQYLNRLRINGQLIDKKIKEDLYNNIFLKYNKPTRKKIEEYLKANYNYESTSFTSKIEEITCDMTSYIKFKEIFGDEFYQNKDTIEEIIKDITIFEDKKILEKRLREIYYLDNEKVEKIKQLNYKGYATISKKLLAELVSINESTGEVYGPIIQIMRDTNLNLQQILFDDKYNFIKIIDEYNKNQMKGEEEGISEFIDNHIYVSPIMKRPLIQTYKLIDEIETILKQKIDYYCIECTRTNKAIKKTTSSRYKQLKEFYNECQKQADLLNKFHINVNKLSVSLEKYKDRLRQEKVYLYFTQLGKSLYTLEDIDLEKLSGKTYDVDHIYPQSLIKDDSLSNKVLVESHINQYIKKDEFICNIPNFLPKNADRFYTKLLELKLITKEKFRRLTQKEIKPEELNGFVNRQLVVTNQAVKGLIETLKLYKQIDESHIIYSKAENISDFRQNYDLLKSRTVNNYHHAHDAYLNAVIGMALNKYYKVYHFNNQYDLEKMKNNSCSINPEIILSKDRIVKDRVIWKKEETLKLIRKNLQQRFDIHETIRSYCSNKMFAKTSIIQNGTVPIKTKDKRCNLEKYGGITSYAYSKYCIVELIDKNQKKSYILEAIPKVFENSIEKYIHQIINSEEYISFKIVHNCIKTNAIIMDEKKKYCITGKSNNVYGIKNMLDRNFSYRFVKIIKNIDKYNNQVQMEIPMEKMEDKIIVSTSSNKKADIMISTDDCIYVLDEIKKAYSKSIYSYKIIEKIVNKLNSITKLTIKEYIQLITELLKLLKTNTRETADLRIIDMKEKTGLLTMGKTLKPGMKFVSESITGYYCKILFEVPSGV

SEQ ID NO: 4644 - protein, 1114 aa, unidentified
  REGION 1..1114: note = Description of Unknown: Cas Enzyme sequence
MRKYSIGLDLGINNVGWAIYDLDEQQIIDKGVVRYEKASAAQDRRKVRGSRRLTKRRRHRVERLAQYLYQIGFWTQRSYEPNLLQKRIKGLKEELTEQEITNILYYFSIHRGYIPFDEEKLDREVHQCIDGELPCFYIQSYYEKYQKYRGQCELILMKDNMRELETLLKTQKQYHSKINDEVIQNIMNIVQSKRQFWEGPGGSKDNQLTPYGRYATIEDLEELAKDPTYHKYLYEVLIGKCELSIDKTGHMNPVAPACNYFAEAFNFYNDFINMSVKEPSKMDEAFQDKVKTNNGKFTEETIEEFKTYILCNKTVNFDKMIQKVLGLKEEDIQGYRIDKNRKPEFTKFEFYKYVKEQMTKKGLHPDWLEEKDRITYNKVVYVLTVAPSTYAIEDMLIDRISNISFSKAEIEILQEIKRKKNDQLRYHALSESILKKALNDIKKYHCEFNFMQIMKRLEYEKEMKEYFQNHYSTKAKAPFLMEEKYIDDIIANPQVKKTLRKAIKVINAIMQQQKDYPDTIIVESAKEMNGKEAKQKIEKEQAIYRKLNEEAEKILIENGYPVQSKNIDKVILWEETNHKCAYCGENIPLAMLLQTDIEHILPKSKTMDSSSNNLTCSCPKCNTEKSNRTPYEYLLSQNKYQKFKDRVLKEFTNMPEPKKNNLLFEGSIDKYSIKFINRNLRDTAYGTVALIEELEKYNTYLAGKIGYQINVISAPGQLTSRIRKNLELSIKNRDYLYHHAIDAMILAGLCDTPIGQVLIQSQNDSKYWLSVNDKQHYESVYQMIAGVHLLCGKQIKAFNEACDNQPLDDKEGLLKRSYEVLKNPIRQFSDTNYAKFIKRGDTYYQICQIDNIYSYDEKKDKKLLDRLFNPDDHTVELLCYEKDKTLYHKLKQIYDSYPEEGNPFRKECIYKNGLEEGTEKFEYLLHGIHRSDDKKSSIVVKLRYMQKVNYPYLKQQVGPKKKNQYGEFINMPMKEKTNIGLTSLSQQSTQILYAIEDKKFIFLPIPSICYQNGKLNTNHSYYTETYNRLVGKKKVIEFASIYCGEWIGVIKKNGEYKEGRYSTYNKANNKLILDTNGLKSVPETGITANDQAIIIYTTDILGNRYVRLDSRKIL

SEQ ID NO: 4645 - protein, 1404 aa, unidentified
  REGION 1..1404: note = Description of Unknown: Cas Enzyme sequence
MKELNLGLDIGTNSIGWALVDENGEIVRKNNFRFWGVRMFDEALTAKDRRTNRSSRRRLRRRRQRIEWLQDEFREEIEKVDVNFFQRLNDSFFKIEDKMHKNKYTFFDDDYTDQMYFKEHKTIYHLRHYLMTTTEKADIRMLYLAIHHIIKYRGHFLNEGEEFNPSDSQIVKEVFEQFNTELANYANSNEDEDEYFKEIDMNDSSFFEKLQEIMLEKSSKSEKENKIRKLMNVDKKTLVSEFLIKLLIYGKVKPESFTVVKDQKYKSKEIKLNDEEIQEAIDENKKIIGELSDIFDYVENIKMVVDYYYLLALLGVNNETKKNNQSLSAAMINLYNKHKEDLNKLKYLIGKYLHNKYKECFRIYDKKINNYVSYVGKLSTGGKTTRFAHCKKEDFETYIKKLLNEIKEKIKEIKDDEKVDEDNKTIDEILTKIENNEYMPIQNSGQNTTIPMQLNLNELKIILANQAKHYPFLNEIKENKTTIERIISIFEYHIPYYVGPLSNVNNNQFSWIERKPGQIRPWNFDDLVDKEASAKRFIERMQNKCTYLKGPTDYCLPKMSLLFTEYNCLQYLNKLRIDGVLISKEFKEKIFNEFFLNKDNTNPTRKKLTDFIYKETGKECTGIPEINCNMSSYIKMKEIFGDEFEKRKDDGTIEEIIKDITIFEDKNLLTKRFKDLYHLSDEQIKKLKGLNYKGYGALCRRLLDELRCENEMTGEVSPTIIELLRDTNMNLQEIIFSNEYPFQKAIDDYNKNLNRTDKMDFRTFIDENLYVSPMMKRALIQSYKLIEEIERIFKRPINKYYIECSRSNQQKKERTISRYQKLVDLYKKCREDAEKLNLSYSELNKLEEELEHNKDKLSVESIYLYFTQLGKCVYTLNPINLDDIIRGVYDIDHIYPQSLVKDDSFSNIVLVNKVYNQSKKGNKFLCDTTIRTEKHYAFYDLLSKMNLITKEKYRRLTEKEVDDSILDGFVNRQLVSTNQAVKGVITLLKLFKNVKTTDIIYSKAENVSDFRKEFDFLKSRTANNFHHAHDAYLNVVIGRAIHTYYEVNRLLTSSDVKKIQNEQKTLNPNKVLKRKIYDLKGNLVWDISLYKSKIEKYLYHVFDIHETTKTCISNKLLSKVTICPAGEGTVLIKSSVDKMAIEKYGGITSYAYCKYCIVETINKKEKKEYFLEAIPTAYKDKVNDYIAEIYSSELYLKKYNSFSIINDSIPTNVIITNGRLKYMITGKSDDSYLIQNASDRRFSKNAIRIIRAIDKYNEQVKFKTEKEEIDKKIIVSPSKKLKNGEITKEIAITKDDCLMLIQEIKELYSKDIFSFSPIITLVNTLNEINDFSPYNISELIKIISQMLLLLKTNERKIVDLLLIKLAKNFGKITIGKKLKEGIKFIAESITGYFTEVIFEVTSGI

SEQ ID NO: 4646 - protein, 1380 aa, unidentified
  REGION 1..1380: note = Description of Unknown: Cas Enzyme sequence
MGKYNLGLDIGTNSVGWAVVDENNQIVKKGGKALWGVRMFDEAQSAKETRIYRNSRRRIVRRNQRLLLLQKEFYDEIIKVDQTFFQRLKDSFFKKEDKLNKNNYTFFDDDITDREYFKKFPTIYHLRSHLLYNDEKIDIRMLYLALHHIVKYRGHFLDSGEVNESNFSKIKDVLDTFNNKMSEMSLEFEDNEDYFCKIEFDENFENKLKDIMLSQLSKKEKRQELIDLFKVDKKSLVNELLIELLVNKKVKLNSLSITNGKKYEVCEIDFEKEELFEKLEDAKKIITELFDILDEIVNIKKIVDYYYVLKIIGDNEYLSEAMVKKYDKHDKDLRELKSFIKTYCPNKYYECFRKTSNPNLCNYPKYVGINSVNKKIERFAHCKKEEFYKYLKSLFNTIKDENAKLKIDLFQKDMENDDFLNRQNSNHNSSIPMQLNFCELKKILENQSKYYPFLMLKNSDGYSTSDRIIAIFKYKIPYYVGPLNKNSKYSWLVKKSNENITPWNYEKVIDLDASAKEFIQRMQNKCTYLKGENDYCLPKKSILFSEYNCLQYLNRLIINGALIENKLKNEIYENIFLCYKKPTKKSIVEYLKTNYNYDETTLKSNILEVNCDMSSYIQFKEIYGEDFEQNLNIVEDIIKDITIFEDKKILEKRLREIYHLSEDKVQKIKGLNYKGYATLSKHFLNNFYSVNEETGEIYGPIIQIMRDTNYNLQQVIYNDRYNFMKAIDKYNKKNLDTEKKLNVSDFIDEYIYVSPIMKRSLIQSYNIIQELEKILGESISKYYIECARVRSNSKDVINSRYRQLSELYKDCEHQVSDISKNYININKLKKQLEDNKNELRADKLYLYFTQFGKCMYTLKDIDLDDVFLGKYDIDHIYPQSLIKDDSLNNRVLASKEKNGKKDNQFIFNIPEFLPKNAELFYKKLLECKLITKEKYRRLTMKKIDDDELDIFVNRQLVATNQSVKGLVDVLKIYKGVKPTNIVYSKAVNISDFRNNYNLYKSRTANNYHHAHDAYLNVVIGKALDVYYQCNYFQNYKDVIKLKDRNITINPEIILSKNRYVNRNGEKKVIWDLDNTLKLIKNNLYNRFDITETIMTRKSNKMFSKSSISPAKNSKNLIPIKTSDPRCNVLKYGGIKSNSYNFYCIVELYDKKGKKSYILEAIPKTHSDKLEEYIKNSIDEKNVSNFKIINKNIKSNIIIEYKKLRYVITGKSGKYYLIKNFKDRNFSYNAIKTIKYIEKYNYQKKYEIPFEETKEKIILAPKKKDTKEISLTLDNCQALLDEIISLFKKDIYNYDIIYKITSKLEENKQNLTLTNLIKVLTEILILLKTNERGTADLTLIDMSKDTGTLCISKTLKPGMKFISESPTGYYRKIIFEVPNGI

SEQ ID NO: 4647 - protein, 1393 aa, unidentified
  REGION 1..1393: note = Description of Unknown: Cas Enzyme sequence
MKNNEETLKKLRLGLDIGTNSVGYALLDENNKLIKKNGHTFWGVRMFDEAETAKDRGSYRKSRRRLLRRKERMEILRSFFTKEICDIDPTFFERLDDSFYYKEDKKNKNTYNLFTSEYTDKDFYLEYPTIYHLRKAMQEEDKKFDIRMVYLAIAHIIKYRGNFLYPGEEFSTSEYTSIKQFFLDFNDILDELSNELEDNEDYSAEYFDKIENINDDFLEKLKVILMEIKGISNKKKELLDLFNVNKKSIYNELVIPFISGSAKVNISSLSVIKNSKYPKTEISLGSEELEGQVEEAISVAPEIKSVLEMIIKIKEISDFYFINKILSDSKTISESMVKMYDEHNEDLKKLKGFFKKYAEDQYNEIFKIRDEKLANYVAYVGFNKLRKNKVERFKHASREEFYGYLKQKLNNIKYAEAQEEIKYFIDKIDNNEFLLKQNSNQNGAFPMQLHLKELKTILNNQEKYYPFLSEGNDGYSIKEKIILTFKYKIPYYVGPLNKESKYSWVVREDEKIYPWNFDKVVKLDETAEKFILRMQNKCTYLKGDNDYCLPKNSLIFSEYSCLSYLNKLSINGKPIDPIMKSKIFNEVFLIKKQPTKKDIIEFIKTNYNADALTTTEKELPEATCNMASYIKMKEIFGKDFNDNKEMIENIIKDITIFEDKSILGNRLKELYKLNNDRIKQIKGLNYKGYSRLSKNLLVGLQIVDNQTGEIKGNVIEVMRKTNLNLQEILYLDGYRLIDAIDEYNRKNSLNDSYLCARDYIAENLVISPSFKRALIQTCSIIQEIERIFHKKIDEFYVEVTRTNKDKNKGKTTSSRYDKIKKIYSSCQELAMAYNFDMKRLKNELESNKDNLKSDILYFYFTQLGKCMYSLEDIDISDLTNNYHYDIDHIYPQSIIKDDSLSNRVLVDKKKNAAKTDKFLFEAKVLNPKAQQFYKKLLSLELISKEKYRRLTQKEISKDELEGFVNRQLVSTNQSVMGLIKLLKEYYKVDEKNIIYSKGENVSDFRHTFDLVKSRTANNFHHAHDAYLNVVVGGILNKYYTSRRFYQFSDIARIENEGESLNPSRIFTKRDILKANGKVIWDKKEDIKRIEKDLYHRFDITETIRTYNPNKMYSKVTILPKGEGESAVPFQTTTPRVDVEKYGGITSNKFSRYVIIEAHGKKGLDTILEAIPKTACGDNNKIEKDIDNYIASLDEYQKYTSYKVVNYNIKANVVIQEGSFKYIITGKSGNQYVLQNVQDRFFSKKAMITIKNIDKYLNNKKLGIIMAKDNEKIIVSPARGKNNEEIFLGKTELVNLLKEIKTMYSKDIYSFSAIQNIVNNIDCSIDYSIDDFIIICNNLLQILKTNERKNADLRLIHLSGNSGTLYLGKKLKSGMKFIWQSITGYYEEILYEVK

SEQ ID NO: 4648 - protein, 1375 aa, unidentified
  REGION 1..1375: note = Description of Unknown: Cas Enzyme sequence
MSKNYSLGLDIGTNSVGWAVVDENNKIVRKNGFSMWGVRMFDDAESASERRSFRSNRRRIARRKQRINLLQKEFENEITKVDSNFFQRLNDSFFKIEDKKLNNTYTLFDGEYTDKDYFKTYPTIYHLRQKLIKTDEKIDIRMLYLALHHIIKYRGNFLKEGEDFNKIDSTDLKYKFERINMVLDDYKANEEYEDDEQYFQSINIDADLNTLKEIINSNKTIKDKTNELLELFSVSKNSLVGELFIKLLLGSSVNISKLKYNKEQSKDKIEINFERENWEENLEKAKTEFHNFARIYDLIPLIKDISDSYYLDKILGNYGFISDYFVDMYNEHEKQLKEFKKLTKKYNLKKECFSAKNLNNYPKYIGMNSCGKKITRFSHCSIDEFYSFIETKILSKIEEQNPSEEDKSKIEKIRSLMNAHEFLCRQNSGHNTIIPMQLNLKELKLILEKQSKYYPFLNEIADGFTRKDRIIGIFRFIVPYYVGPLNNKSNYAWLTKNDGKENEKIYPWNFHEVINVDETAKEFIKRMQRKCTYLHGNNDYCLPKKSLLFSEFTCLQYLNKLKIDGQSISLELKNELYNEIFLKNKKPTRKAILSYLKTNHGYDLNSTENQSGLPEVTCNMSSYIVFKEIYGSEFESKYDEIEEIIKDITVFEDKKILEKRLKELYSLTDDKIKRIKSLDYKEYGNISRNLLNLTKTNKETGEVYGPIIQIMRETNLNLQQIIDGEEYYFREAIDEYNNNIGQEENLSFQDYIEENVYASPIMKRALIQAYTIIEEVEKILKQPISKFYVECSRHDDKNKRVPNSRYKKLSELYSECRKISKELEEYHIDIKSLKDSLDKHQDKLRSDKIYLYFTQLGKCMYTLEDINIEDVISGKFDIDHIYPQSLIKDDSLTNRVLVNKSFNEYKKKDSFLFEVNDFHLSKVKHFYDLLLEKGLINKDKYRRLIEKDISNDKLETFISRQLVTTDQAVIGLIDLLKNYKHVSSNDIIYSKATNISDFRHKYDIVKSRLANNYHHAHDAYLNVVVGRAINEYYKAHFILSKNYDYSAIRNSKHTINPERILEKDRYFKNRVIWKKDETIKLIKKYIYERYDIHETLRTFNSSKMFNKTTVLPASQSDKLVPIKRNLPTNKYGGGTSNSYHHYALIKNVNSKNKVSYILEPIPFTYKNNINEYLKNVYDNFEVVVDSIKSNVIIEMPYNENSIKAYITGVSGNMFLLKNKIDRNFNEKAIQIIKKVEKYKNNLTNKIKMDTTKDGLCLANNMYLTYDDCNYLLNDGIIPLFDKPIYSYSVISKINKSLKAFNINSLGIFEYANLLSELLELLKTNERKVSNLTRIGLKESSGTLCLNHVLKPGMKLLAESVTGYYSKVIFEVPNGI

SEQ ID NO: 4649 - protein, 1388 aa, unidentified
  REGION 1..1388: note = Description of Unknown: Cas Enzyme sequence
MKYSIGLDLGTNSVGWAVVDESRHLVKKRGHGLWGVRMFDEAKTSSDRRSYRSNRRRLGRRKFRVKLLRDIFADEIAKVDPTFYQRLDESFFKKEDKSDLDFVNLFNSSSDLTDSEFFNKFPTFFHLRKYLVNSDKKEDIRFIFLACNHIIKYRGNFLTGGEAFETSDISRIKEIFEQFNDICANYANDNEDDEIFFSQININVPNFFEKFGEILLGSKYKKDKIADLISLFGVEKKTLAAEGFIPFLVGSDFNLSNISYVKDNKYDKVSIDLSSEELVSQIEEAKNTIKELAEFIDFIPNIKIIIDHYYLVKLLGESDANISDAMVNQYEKHNADLKLLKKLIRDYGTHEMYDNVFKTVNDKVNNYPSYIGMNQSNNVKERFKHCTRDEFYKFIKKEVIEVIRKKFDGTNNDVFSILNKIESYIDANNFLLRQDSDLNGAIPMQLHLKELKLILNNQRKYYPFLDEITSDNITNYDKIISIFKFKIPYYVGPLANISSNNENAKEKAEFAWVTRTNKKILPWNFDKVIDKDETQKTFIRRMQNKCTYLRGDEDYCLPKFSILYQKYACLTYLNKLVIHGEKISVELKKDIFNNVFLKNNQPTKQNIVDYLKANKGVTDVTTTEINEINVNMKSYIKFKEIFGDSFDSNLDMIENIILDLSIFEDKAALDGRLRKLYKLDDTKVKAIKGLNYKGYGRLSKKLLNGLIVADPITGELDDKHGTVIDIMWNTNMNLQEILYDDKYDLLGVINEYNKEFMPDLQSLTFNEYVEDYLYVNPSMKRSMIQAYSIIEEVEKILGQKLDKYYIECDRTNQDKRKESHSRYDSLKDYLSKCSDEFCSFGIDIKEIKEQLELNKDNLKSDMLYLYFTQLGRDMYTLEPIDFDNLLKKGIYDIDHIYPQAIIKDDSISNRVLTKKANNTRKTDAFIFEIPNFLPKNAYAFYQLLLDKGLITKEKFRRLTKHELSKEELDGFINRQLVATSQAEKALIEALQEYKGVARENIVWSKAENISDFRHKYDIYKSRTANNFHHAHDAYLNAVVGGAIDDYYRLNSIVNYKDYQRLKNDKKTINPLTIVSIDRYFNGKLIWKHEDMLKEIKKNIFKRFDIYETTRTFIGNNMFAKTTVLPAGKGNIPVKSEGPLLNTDKYGGITSPQYSKYVLIENISKKKTEYVLLPIPRTEVNRINQYILSLGYSNYKILLHDLRSNTVIEEGNLKYCVTGVTNKSYWIKNLNDRFFNEKLIKVIHDIDKYINNLKNKVVMINDDNHVVVSKTKNDDCKEIIIKNEDLNELVKNILNKFTNKKYSFGTIEGLNTNIDINKILNLTITDKIYVINELLQLLKTNSKGSADLSLIGLAKNSGSLKISRNIKSGMKIIAESVTGYYSKVLFEVK

SEQ ID NO: 4650 - protein, 1353 aa, unidentified
  REGION 1..1353: note = Description of Unknown: Cas Enzyme sequence
MKSKYFIGLDIGTNSVGWAVTNEEYDILRIKGKTAWGARIFKEAENCKSRRMFRSNRRRLQRRKYRIQLLNEVFAEELNKVDDTFLLRLDNSSFWLDDKDKKIGTKSLLFKSKKEETEFYKLYPTIWHLREKLALGDSKSLSDIRNIYLALHHVIKYRGNFLKEGEIKVGSTITDALKRINSFFKEKEESDEEKEYISLNYDNKISEILRDDSNKATRQKKIKELFGDIGKSFENLVNMFASLVTGGEYSLSKINKGATLKISFVSNFDNIANDVMNEVGEDYELIDCAKEIFDAVTIQELMGNHKYISSAMVEVYKNHKTDLKLLKDLVIYIDKKNNVKTETDRLYYKIFKKHSKTEDKEKLDNYAAFVHVNSEQKRPEISEFNKFIKDTLNPFLNGLTEQEKEKFHVDELMKKVDNNTLLQIIANVSTSRIPHQLHLNELDSILDNASKKYKFIAENKVKIRSIFLYKLKYYYGPLNTNSEYSNVVKNNDEVIRPWNIDKVINDKDTRQKFMDRLTNYCSYIYGEKVMPRASLLYEEYQILDRLNVMRINGNTLNKSDKDEIYKFILGRNKTTIADIKSFLAKTKGINLLEITITNINSDIPFVASSHKAFNKLFDLEKDRKVIENYIKLATVYAEEKLSLKTILSDLDKDKQQVILNLKINGWAPLSKELLNSSEISYTKEDGEILSIIDLMREENKNFQMILNDPEYKIKERIDEYNRETVGDKTIDEQIQEQLEQVPAKSRRSIHQSLLIINDIVKATKAVPKKIFIEVTREDDDKKKGKETDSRYDELKHFIKSLKKEVEDFNVDKQELENELIRFKDKLKSKHIYLYFKQMGLNMYTGEKINIEDIINSNQYDVDHIIPQHLKKDDSLDNLVLTDRKSNQNIKKGYYPLPIQIRQNKKVLDVWNYLYKTKNISEKKYGNLMRETPFTLDEEEEFVNSQLNAINYANIQLRNILKLRYPTSEIVFSKAQYPSHIRKELSLVKVRELNDTHHAVDAYLNVIAANTLTTTFTREYIERTYKNYRVEQLGQNVEEKNKSFNMNNKLDNILWQKNDEKKDLTDLGKKIDKTCLRHDFLMTYKNDFAEGKLFDQTLYANDKQTLIPTHFNSPHEKTNRYGGYSGLTQSYMFAVEFKLNGKSQKYIYRVPTLYAKMIKDETELVKHIVKENNGKQFDKISDIKLIRKIYNNQKIKIGKNTFLIYTNNSGQNKYKYIDQIFLNDKELLNYLSKLYKNLDQINSDKDDQVFDVNRKGDELVISKTKNLYLFYYLKQIIKHIVDQANSKLFPLSEIEKNESVFMSKNLKQQVASIIEIISKFTRQNGVRKTSNITNQDIVIIHESPTGLFVRKEKI

SEQ ID NO: 4651 - protein, 1331 aa, unidentified
  REGION 1..1331: note = Description of Unknown: Cas Enzyme sequence
MSKDWYLGLDIGTNSIGWAATDTEYKVLRKSKRKLIGVELFDAADTAEERRLARNSRRVLGKRKWRLSLLKSLFEDEIKKVDSDFFLRLEESKYHLEDKRVNSKYLLFNDKNYTDVEYNKEYPTVFHLRAALMTEENPDLRKIYLAIHNIMKSRGHFLFEGLSTEDVSFEDVLESLLSKLGVSGLDTTKIKAICTSKGNTTAKVKEFKELTNDVRVQEIFRLIFGGSVALEKIYGIEEYKELESNVKTISFKNKVYDEVRSDYEVILGTDIDLLDSIKRVYDSLILMGIKQEGMSLSQSKVYVYNKHKKDKALLKEVIRLDSKLSVDAKKKLIEKVFTLDEKGLDNYVSYTRNSSINKSCSGEAFRKFVDKVLDELQETEVIKGIKEEFALGLFLPLQKVKDNAVIPNQLHREELVAILENASKYNSFFTDEVIAKVIELFDFKVPYFVGPLNSTSKYAWAVRNEGYENVKVTPWNYKEVINESKSAAKFIDNLVGKCTYLEGELVLPDNSLLYSEYKVLNELNALKVDGNKVDIETRNLIIEELYLNSIGVVTKAKIKKLLVSKGIIDKAAELTGISNVLGSKLKSRVDFTNILGVNFDEVDVEKMIYWLTVYGDAKYLIQDRIIEAFGNKYTEQEITAILKLNYKDWGRLSEKFLKGIYSKCFVDKTTGEMLNIVDIMRSQTIILMEILGNAYDLTEAVNTHNAKVVGVVSEITPALVENLYVSPSVKRAIWQTIKLVERLKKLIGCEPKKIFIETTRTNQAPKVETDSRYKALVKKYAALKSKDFEKFDIDVENLYEMLKNEDPSALKSKRLYHYYSQLGKCLYTGKTIERSQVDSIALYDLDHIYPQSKVKDDSLDNMVLVCRVANGYKSDTYPLNEDIQNEHKELWSVLKANKMISDTKYERLVRVDGFTVDELTGFIARQLVETSQSVKTISKLLGKLNTTSRVVYSKAENVDQFKHNFGKIKDENRKSTSKEKILKVRELNDLHHAYDAYLNIVVGNVYDVRFTSNPRNFVSNKENRNYSLNTLFYYDVKGAWVMGETVKMVESVINNPYVQINKMAVRKTGKLYDATIYKANKAKPESYHPLKTKDGRMLDVTKYGGYSSVSISHYVFVGYTLVKPKESIASTYLVPIRICDVVKLNTDLDILDYAKKVIPCKAKESIEDLYIIRDNITTYTKAKLGNTPVYLGGKTGNYITYRSALQIRFDVESTEYMKTLTNYNGWRIANRSCEVWDSITLEKNLKFYDKILEKMQLGVIHELYPKKFDALTDNKYRELFAALDLLDQTKVLLELVNLMTQRLVPNADVLKLIEFKASVGRISLANPGIKV

SEQ ID NO: 4652 - protein, 1063 aa, unidentified
  REGION 1..1063: note = Description of Unknown: Cas Enzyme sequence
MASGEKSQLGIHLDVGHDSIGWCVTRTMPGDEKFLAIPGTGVVLFPADDCLANQRRAFRRQRRHIRATRQRIERMKSVLLDMGVMTEGELKRNLTAAPWKLAAQVLTTGKTLSWPELWAVLRWYAHNRGYDGNVLASLRSGRMVSAEDIEKNAAARELMAKYGTASMAETMCHYMKIEPDGKIIASRERFKGLGVSFDRSCVEKEVRQILLVHKGVLKGVDDAFVHLLMASPVTEPHYLRTVEKLPFHVPNRYWGGVLFGQLAPRFDNRLIGACPVTGEKLPGKATSEFLRFRFAMMLAHVRVGSDSRPLTADERGRIYKAATMCGGFQKGSFKKIVDEVTGEDVTNIDALLTAPEADKSLVLYPGLFSLTKKGLDAFIESQALRTLANKLFRGKRMTVGDVIAQIPADKQEDAKAALAKNTRKGKKAFDPLSDAIVAELPSGRAPYARSVLVKAAEAVLRGEDPTEKGGILYRDATKEDVLKEEDIDRETNNHLVRHRVKILLRLLRDIVHDYAENNPAQVAQVTIEMARDLKELSGMTNKQIVSEMYLKTAHHRNAAKKLAELLHCDAAAVSAGLVRKMRIAEDLDFKCPYTGWKFDPMDVVHKNVDLDHILPRSQRATDSLDSMVLTFTEVNRMKGARTGLEFVREFGGQRVNGRDNLEVFDEKRYRDFVDKLRIDRYPDDKKRQKRRQEKLLKLHSEDVGMTEGMLTRTSYITTLATKAIRGFFANCGRMPRIISVPGRVTAELRKQWDILGLLAESDPRVVDENGRLRLKQEIRGITHMHHAVDAITLGLAATLLPTDGTFWAMMCKRRVKEEEKRLLASTGAFQFTAQNEPRLIELPPYLRQAISGALAEQRVVVHQPQERAGLKVQQNTWGIEKIENGMVYIRQRSRDEKTGKIAVKHDSVTIDKAFGIKPTNGNGKLQAIKGVLLPDVNFGVALLKDPKFVRHQRVWNELAIVKDENEGRLPCLVRRGGLIRVATGNFSGVWRVASVKDNTSGIALDIVRPNAVKVQNGVDYAKINVKLSSLVKAGLDVVKQTYTGVALCPITSLTSRQTGSRSQ

SEQ ID NO: 4653 - protein, 1331 aa, unidentified
  REGION 1..1331: note = Description of Unknown: Cas Enzyme sequence
MKKEWYLGLDIGTNSIGWAATDTDYKVLRKSKRKLIGVELFDAADTAEERRLARNSRRVLGKRKWRLSLLKGLFEDEIKKTDSDFFLRLEESKYHLEDKRVNSKYVLFNDRNYTDVEYNKQYPTIFHLRAALMTEENPDIRMIYLAIHNIMKSRGHFLFDGLSVDTGSFDGALGTLLTKLGVSGLDTTKVKAICTSKGNTTTKTKEFKELTNDVRVQEIFRLIFGGSVALEKIYGVEEYKELDSNVKTISFKNKVYDEVRSDYEAVLGTDIELLDNIKRVYDSLILMGIKQEGLSLSQSKMVVYDKHKSDKALLKEVICLDSKLSDKDKKELIVKVFSKDEKGLDNYVAYTRNSDINKSCSGDAFRTFVNKVLDELQETETIKSIKEELTLGLFLPLQKVKDNSVIPNQLHREELIAILENASKYNNFFTDDLKTKIIELFDFKVPYFVGPLNSTSKYAWAVRNEGYENVKVTPWNYKEVINESKSAAKFIDNLVGKCTYLEGELVLPDNSLLYSEYKVLNELNALKIDGDRVGIETRNLIIEELYLNSVGVVTKAKIKKLLVSKGIIDKDAELTGISNVLGSKLKSRVDFTNILGANFDEDDVEKMIYWLTVYGDAKYLIRDRIIEAFGSKYTEQEITAILKLNYKDWGRLSEKFLKSIYSKCFIDTTTGEMLNIIDIMRSQTIILMEILGNAYDLTEAVEAHNSKVVGDVIEITPALVENLYVSPSVKRAIWQTIKLVERLKKLIGCEPKKIFIETTRTNQAPKVETDSRYKVLVKKYSALKSKDFEKFDIDVESLYEMLKNEDPSALKSKRLYHYYSQLGKCLYTGKTIERSQVDSIALYDLDHIYPQSKVKDDSLDNMVLVCRVANGYKSDTYPLSEDVQKEHKELWSKLKANKMISDTKYERLVRVDGFTTDELTGFIARQLVETSQSVKTISKLLGKLNKTSRVVYSKAENVDQFKHNFGKIKDGNRKSISKEKILKVRELNDLHHAYDAYLNIVVGNVYDVRFTSNPRNFISNKENRNYSLNTLFYYDVKGAWVMGVTVKMVESVINNPYVQINKMAVRKTGKLYDATIYKANKAKPESYHPLKTKDGRMLDVTKYGGYSSVSISHYVFVGYTLVKPKESISSTYLVPIRICDVDKLKTEVDLLEYVKKVIPCKAKESIEDLHIIKDNITTYTKVKLGKIPVYLGGKTGNYITYRSALQIRFDDESTEYMKTLTNYNGWRIANRSCEVWKSVTLEKNLKFYDRIIEKMQVGVIHELNPKKFDALLDIKYRELFAALDLLDQTKVLLELVNLMTQRLVPNADVLKLIDFKASVGKISLANPGIEV

SEQ ID NO: 4654 - protein, 1410 aa, unidentified
  REGION 1..1410: note = Description of Unknown: Cas Enzyme sequence
MDNSKKIYLGLDLGTSSVGWAVTDTDYKLVKKKGKNLWGVRLFEEGKAAADRRVFRANRRRLARQKMRVQWLQEIFGPEIEKVDSEFFLRLNNSAFWLEDKETNSKYSLFSDEKYCDTQHFKKYPTIYHLQKELIENKNKTYDIRLVYLALHHLVKHRGHFLLENMTFSTSEQEEYGVKLFREVDDVLSELNDDTSRFFSDKVSYQTLSILADKANRGVTRKIEKFKELFPECDKTHAAIFKLLSGGTEKIANILQDVELEELEKQSICFDDSKFEEEVLPVLEGTLGDSFSLIEKLHTLYGYILYKDVIGENAFLCEAKIKQYHKHHQELAELKRFFKKYYPNFYNAMFRQFAEDNNFKLANAPLCPYTNYIGSTKVRNNKRNFFINNKKRGKAEKCDHAIFLKGLKTFLTKTTPMNEDDAFIEHKNRIVELIDQGDYLKKLSIKDNASIPYQVNYVEMEKILDNASNYLPFLKDVTSDNLSNRDKILQIMKYRIPYYVGPLNDAHANLQNGFAWVVRKEKGAVNPYNFQQKIDEASSQQRFIRRMTNKCTYLYGQDVLPASSLLYCEYDLLNKLNVLKLNGELINQELKSRLINELFKKRKSVKIKDIATYLKQQGIKGECTFSELDLENVVFPKSNYVDFYAILGSDVEKNINIIETIIVWLSIFTNSNTIEELIYNNFANYFSDKQIKQLSRVKLVNPKWGRLSREFLNGPHFVLTTRQGEVKTIIEIMRETNLNFMQILNTEEYDALNAIENFNNLARGQVTSIEDVIDEEIANSYVSPAVKRSYYQAMKVVDEITHVLGKSPKRIFVEVTRASDEKKKGKKTSSRHAQLQSLYKEALKTIPEIKSLSGELDVAIDDKLQSDRLFLYFLQLGKCMYTGKPIDIQRIMTKDYDIDHIYPQSFVKDDSFDNRVLITKDANMKKGNIFPVHKDIQKEMKDYWEMLSNSKFISKEKKDRLTRTLPFTDDERKTFINRQLVTTAQSVLLVINILKKKFGSNTEVVYSKAKNVSEFRQKFDFYKVRDINDLHHAKDAYLNIVVGNAYHEKYTANHSYYYGDKQSNQLSSMFEIDIKNAWNTENSTSIKLVRKIMGQNDILVSRKVKQINNGGLFDQQLVSYHNESSNLAPIKEKGPLSNTKHYGGFNSISIAYFAVFASKDKKGKPIVSIESIPTLLLNKIKRKEIDLQYIAEDYFNLREPQLVYAPIYPGNKLKIENGFYYISGKTSNSYALTNATQLILPLYLEKYVGTMIKINKIYESFSKEKKAEILDDLTISDWKLSKNENSHDNRTISKEGNLLLLNIIEEKMTMNKFNLLRTKKYIENIKEFFTKLSLIRQVKVLLAIIDTIVCAPNSVKFNDLFPNDEEYKKAKIIVGRIMVGKNITKSNISLIHESSTGLFQQEIVINKKDN

SEQ ID NO: 4655 - protein, 1411 aa, unidentified
  REGION 1..1411: note = Description of Unknown: Cas Enzyme sequence
MENNNKQFYLGLDIGTSSVGWAVTDTNYKLIKKKGKNLWGVRLFEEGKSAADRRVFRTNRRRLERQKQRVQWLQEIFGPEIEKVDPEFFIRLNNSAFWLEDKEIDSKYSLFSDETYCDIQHFKKYPTIYHLQKELIDNKKPAYDIRLVYLALHHLVKHRGHFLLENMTLSTNGKEEYGVKLFQEIDDILSELNDDISTFFSEKVSYQILSILADKANRGSTRKIEKFKELFPESDKTHVAIFKLLSGGTEKIANILHDVQLDELEKPSICFGDSKFEEEVLSVLEETLGDSFSLIEKLYTLYGYILYKNVIGENAFLCEAKIKQYHKHHQELAELKQFFKKYYPSFYNAMFRQFAEDNNFKLANAPFCPYTNYIGSTKVRNNKRNFSINNKKRGKAEKCDHAIFLKSLKGFLTKTTPMNEDDAFIEHKNKIMELIDQGDYLKKLSMKDNASIPYQVNYVEMEKILDNASNYLPFLKDVTSDDLSNRDKILQIMKYRIPYYVGPLNDAHSNLQNAFAWVVRKEKGAVNPYNFQQKIDEASSQQRFIRRMTNKCTYLYGQDVLPASSLLYCEYDLLNKLNVLKLNGEPINQKLKSQLINELFKKRKSVKIKDIDTYLKQQGIKGECTFSEIDLDNTIFPKSNYADFSAILGADMDRNINIIETIIVWLSIFTNSNTIEELIYKNYANSFSDQRIKQLSRVKLVNPKWGRLSRELLNGPHFVLTTRQGEVKTIIEIMRETNLNFMQILNTEEYDALNAIENFNNLARGQVTSIEDVIDEEIENSYVSPAVKRSYYQAMKVVDEITHVLGNSPKRIFVEVTRASDEKKKGKKTSSRHTQLESLYKEAVKTIPEIKSLSVDLDVAIDDKLQSDRLFLYFLQLGKCMYTGKPIDIQRIMTKDYDIDHIYPQSYVKDDSLDNRVLVTKDANMKKGAIFPINNDVQVKMKDQWKSLKDSKFISEEKYQRLTRTLPFTDDERKAFINRQLVTTAQSVLSVINILKKKFDVDTEIVYSKARNVSEFRQKFDFYKIRDINDLHHAKDAYLNIVVGNAYHEKYTVNRSFYSENQKSNQLSNMFETNIKNAWNTENNASIKLVRKIMGQNDIIVSKKVKQIYNGGLFDQQLVSYHNESSNLAPIKEKGPLSNTKHYGGFNSISIAYFAAFASKDKKGKSIVTIESIPTMFLNKMKRKEIDLQSMAEDYFNLRDPQLVYAPIYPGSKLKIENGFYYISGKTGSRYALTNATQLILPSYLEKYVGTMIKINKIYEGFSKEKKKEYLDDLTISDWKLSKNENSHDERLISKEENLILLNFIDEKITNNIFNLLLTKNYIQDVKCVFSQLSLIRQVKVFLGIINTIICAPNTVKFIDLFPNDEEYKKVKKEIGRITIGKNITQSNISLIHESPTGLFHQEIVLNRKDN

SEQ ID NO: 4656 - protein, 1253 aa, unidentified
  REGION 1..1253: note = Description of Unknown: Cas Enzyme sequence
MKVNISSNANPFLTGLVFGFDVGTGSIGYAVRQGRDFKDVGVLICDSEGSELEGRRNLRRQRRTIRSRKSRREWFAEELKKIGLLKQVPPPNDPITLRLRALNGDVLKPEELHAALTHLFKRRGYSKVPWANVEAVRKDGEKAKKEEGDTQKAISELEEEMKNAGCEYPCQLLDQRRKQLGERPQTKWGRNFPWGRAMLEKEFWKIVEAQKEHFPKLAKNAEQLLHGNTHEVTRIIDGQKRKFHVYFKTDKAHRAGILGVRWPKFENRSPGLDALEPFRKDPKTGAWIPQHTMRRDNLLFKEWQLEVSLKNFRVKRRLISTGRSKKEKFEFIPPPPPALAALRKLWNERGHIWAEDLREWIKAYEGQFELHYPDRDLTPRNNFAGRARFSKTGMAAIRVVIDEARARHDAAYEAWEQKFKEKNKEAKEEDIVNGYARFLTQQSNAPVLAEGAADNSYARTVAPPPVLILPNETPEAAFQRYLNAIRDPQVRHRVELFGRELRRLMKLHSQNQAPDFIVIEMARDLMMNQEQKDAKEAKDKERRKERDEAAQILRDMGFAPDADNIKKFLLAQEAGWRCPFTLKPFCQSDFSQLTVTQLIQAENKPRFVKQASSVFDQLEIEHLVPRTPVVCNEWFNLTVTLHSTNAQKRKRTPFQWLFADKDGLPADLDWERICKNAVERFGENSLKYQVFTSADGAKLVEDNAKKSIQQTAYIARCLREACLIIFGKEWLDWTDGAGRDPRLLTDNRTSKNYLTTNGAITSRLRGAWHLNEVLWPKPERLNDAEWDKLTDDEKILLKAKYKEDRELRALKNRQDHRHHAIDAMVISCAMPWQTCKTRMGSQQPDDGLCEVDAETGAITKIWNPVFNDYGYGIKQAAEVKSALLLKFSSERQVDLLRHHKSNNRNAQAFDTTIYGRREKFCGEILPQTLFVARKRLLDLKVSHLDPRGTGGFIFSQLLREHIAKEWKAFSGDGKNWLRVQSDWMTRFETEVTKLRSTGKDDHKTRAGIRAKEVRIYKLRQMESAKDWDELLIFVDKELGAQQPQPRFPSQFIAALRHPIYDTPISSVKVTAQSKDDDSFLLVRKPDSDTARSGAYVMRKQENKYREMRVYKLPKAGRSGIYACWLLLPWYEQLDAHGKRFKKLATKFMPAVCRDAEFKRAFRRDEIVCFENNHLSSKGIKQGESWRIVRTDAKGDYLATIGLLPAHQVRETNHPITDEKIKIEPIAVALNDFMKALEPKPPGDELPHSPSVKP

SEQ ID NO: 4657 - protein, 1043 aa, unidentified
  REGION 1..1043: note = Description of Unknown: Cas Enzyme sequence
MKDYVLKDANQSPSGKDFFLNGLVFGFDVGTGSIGYAVRQGSEFKDVGVLICDSEGSDLSGRRSLRRQRRTLRSKKYRRQWLAKELIKLGLLKPENPPNDPISLRLRALNGDKLTPGELHAALTHLFKRRGYSKVPWANVEKPAKENAKPKKDDKEGEIKKAVESIRKEMDEMKCEFPCQLLDVRRKEIGVSPAKDWARKIYWPRELLQKEFEAITKAQKNNFQKLAEKTDWLLYGDSQPKKKGEETYHVFFKTTEARNPGVLGLRWPRFDNRGPALDSLQPVDEQGRLLHVVRKTKDAFTKAQWELAVMNFRVIDRATGKLVTPDNKSLARLREIWESGKRKKKKDAPSNAEEADTVKISEPVLKRWAKDFAAQYKLVDGQQPLTPQTGAGRARYASPTLKKIIAGERFDPPQPLLRRKNETPEQALNRYLADIKHPLVRHRLVLFQRLLKKLVSQFGKPDMVVLEAVRSLALGKDKKRELIQRIHDNREEREGIRKELSKDGFSSSKNSILRYRLFKEAKGRCPFCLCPFCLQQVVFKEAEIEHIVPRSRVDCNEFYNLTVAHADCNKKKDNRTPWEAFGQTADWEALRKNAEECFGLGSMKYKLFTNPDAQDLVEEKSDLQHTAYIARVIRQAALIQLGWLGEDGRDPTGLKDPQKTAWKFQVTNGQLTSRLRKAWGLNQILHPLPADKKWDDLSEQEQQQFTEKNRGDLRHHALDAMVIACTLPWLAHRTYGATDEFGRHGWWTQDEKHRSRAVNRIFPNEGQMHEVVKSKIETVVVQHHESRSNHQQAYATTVYGKLAPDTYAARERLTDLKQSDFRDVHPKELGVYLDAAWERFREETSGLDVLLKKTNSKLPATFVEKLCFSHFQKWREDEAPAFTWPKTVKIPIRNVKLIAPVNDDSVLRFAPGTPGFVKRKTFKEVHIYLNADKKGFVPVFVPYWKGDKPVGIDQILPGSKPVAVLRKRSIIKTIKPLSTGHPPGNYCLYELGQVQPYLLPPHIAKKEEAIESFGIKKSGIKPRWPDLIRALGYELPHPPPVKP

SEQ ID NO: 4658 - protein, 1023 aa, unidentified
  REGION 1..1023: note = Description of Unknown: Cas Enzyme sequence
MKEYVLKTASGDSFLSGLVFGFDVGTGSIGYAVRRGSNFLDVGVLICDSEGSDLSGRRSLRRQRRTLRSKKARRNWFASELAKLGVFKPQAIVDDPISLRLRALNGDKLKPEELHAALTHLFKRRGYSKVPWANAEKAVKENAKAKKDDEEGIIKEAVKEITVKLAGKHPCQFLAEEKIRVGKSPTANWARKIYWPRELLQKEFEAIIAAQAKNFPQLVEKKDWLLYGDTKEIKGHHVYFKTTEARNPGVLGLRWPRFDNRGPALDSLQPVDEQGRPLHVVRKNKEAFTKAQWELALMNFRVLDAKTRQKIDPRIQFPIFIENLRNEWNKKGKVTEARLKKLAEPFAEKFLLIEDQKPLTPETGTGRARYSSPTLALIQKEISEGRRIDPPQPILKRKGENAEDALNRYLADIKHPLVRHRLVLFRGILRQLVKDYGQPDVIVLEAIRSLALGQKAKNELNKRNEIFRKERENAREQLASNNESFSRKAIQRYRLWQEAKGRCPFCLQTIERTDLGHGADIEHLVPRSIVDCNEFYNLTVAHLKCNRELKGDRTPFAAFSGTSLWPDIKDHAEKTFSGRKLEIFLNPNAEELIEQKSDLQHTAYIARVIRHISLIQLGWLNDRGRDPTPDKQNPALRFQVTNGQLTSRLRKAWGLNQILHPLPPGKRWDELTDEEQKQFTEKNRGDLRHHAMDAMVIVSTLPWLAHRTYGATDELGRHGWWTQDEKQRSKAANPIFGEQMHDVVKEQIEKVVVRHHISGSNHQQAYATTLYAKKAKDTYVAREVFTTLTPKNLGSIWPETFASYCEAAWQRYSDEATDVDAELKKTKGCVPESFTKKLCFAHFQKWRADDCPEFCWPKEIKIPIRNVRLISVKDDTAVVPFSPGTHAYVKRTGFKEVQVFIAEDGRSFVPVFVPYWKNDKISPEKPIKQNSKPITVIRRGMVIETKKPFSAGQPVGKYRVLATSQNQLRLLPHHVANKEEAIISFGLGKKGLQPYWPDFIRALGYELPHPPSVKPQPESPHQA

SEQ ID NO: 4659 - protein, 1028 aa, unidentified
  REGION 1..1028: note = Description of Unknown: Cas Enzyme sequence
MRANHNSNSSQTDFLTGLVFGFDVGTGSIGYAVRKGNTFKDVGVLICDSEGSDLRKRRDLRRQRRTLRSKKYRRLWFAKELTKLGLPKPGNPPNDPITLRVRALSGEPLKPEELHAALTNLFKRRGYSKVPWANIEKVAKESARPKEDEDDEGVKEKVEVIRARLGSKHPCQFLAEERVRVGNSPTDKWARKIYWPREVLQKEFEAIAEAQKENFPVLADKAGWLLYGDSQLKKKGEETFHVFFKTTKAHNPGVMGLRWPRFDNRGPALDSLQPVDERGRPLHVVRKNKEAFTKAQWELALMNFRVIDIETRQKRDPRTNFPVFIENVRNEWNKKGKVTEARLKKLAEPFKEKFLLIENQKPLSPETGGGRARYSSPTLELIRKEIGEGRRVDPPQPILRRKGESAEQALNRYLADIKHPLVRHRLVLFRRLLSRLVSQYGQPDLIVLEAVRSLALGQKAKNELNKRNEGFRKERELAREQLLSNSESISRKSIQRYRLWLEAKGRCPFCQQTIERTDLGHGADIEHLVPRAIVDCNEFYNLTVAHIKCNRELKGDRTPSAAFSATSQWDGIKANAENCFSGRKLEIFLSPNAEDLIEQKSDLQHTAYIARVIRHIIMIQLGWMSDAGRDPTPDRQNSALSFQVTNGQLTSRLRKAWGLNQILHPLPPGKRWDDLTDQEQNQFSEKNRGDLRHHALDAMVIACTLPWLAHRTHGAKDEFGRHGWWTQDEKRRSKAANPIFPQDGQMYDVVKDEIERVVVRHHVSRSNHKRGYDTTIYGKNAKDIYTAREKLTDLKEKDFTNIYPENLGIYISAAWGRFKDKTAGMEEILKSTKGKLPTAFVQRLCFSHFQQWREEKSGHFEWPKQVKIPIRSVKYIGVHDDKAVSPASPGTHGFVARGGFKEVRIFRASDGKSWVPVFVPYWKGDRLIHDQPYQAGKPNQVIRIGDLVALANGYGPNNPPGIYRVVSTMQKQIQLLPPHIADTKEALKASGYLENGVNLRWPAFFKATGYELPHPPFVKSQSESPHQA

SEQ ID NO: 4660 - protein, 1278 aa, unidentified
  REGION 1..1278: note = Description of Unknown: Cas Enzyme sequence
MLSPILQGDLTMPTTRTAPASVNDAFLNGTVFGFDIGTASIGYAVRHGKKFLDVGVWICPEEIADLKGRRGLRRSRRTLRSKKYRRQWLATELEKLGLPKPRQPLHNPIELRCKATKGEKLSPEELHTAIYHLWKRRGYTEVPWANRENKKDSADELGKVRKSISELREQLKKEKCTYLCEFLAKHPQEQRDRPLPRDLLESEFAAIVSKQPTDSPLKRIVKRKFSQSHGDSVEREIPAADWLLYGDTQLKKKNGNVYRVYFKSTESQNPGVLGLRWPRFDNRGPGLDALEPHRRDSQEKKWMPQHTLRRDSLLFKEWQLEVRLQNFTVIRRFPPSGRRKKERIEKFSPPPPAMATLRKMWNERGHLWAEDIREWAKNYECQFELRDPEENLTPKDLSGRARFSRHGMAAIRSAIAKARTNHDAAYEAWEAKFRAKNKNASEEEVANGYARFLSQESAINDGDTDNSYARTIAPPPVLMLPDETKEDALRRYIYSIRDPKVRHRVELFTRELSRLMGLHREGKAPDFIVVELGRALMMNEEQKAKKEEADKKRKQERDNAAQMLRDMGYAPSQENIKKFLLAQEAGWKCPFTLQPFTQSDFSNLTITQLVSAENKPRFVQEASSVFGDLEIEHLVPRTPIVCNEWFNLTVTLRTINAAKRKRTPFQWLSQDRDSVPSDLSWELICRNAAERFGGPTKENPDGSLKYQVFCRHDAASLIEKNAKRSIQQNAYIARCLREASLIIFGKDWLDWTDGVGRDPRLLKENRASNYFLATNGMLTSRLREAWNLNELLHPRLPKDEWEKLTDDEKRDEREKRALKNRQDHRHHAIDAMVISCTLPWAANLTTWAGGWCNLDSENSSITSIRCPVFGENDYGQGIYAAAKEKAALLLQYSAERKTDLLRHHKPHLRRKQAFDTNPYGRREKFGKDEIPQGVVYVARKRLLDLKMSHLNPSSTGGFIFSPLLREHIAKAWKTFCADANNWRKVQLDWLNRFETEKAELETKKDALEAEGKKFMKELKAIRARAARLHQLHEMEKARDWDELLKFIDKEVNPGAEPQPRFPAQFVATLRHPIYNTPIESVKVTAQSKDDASFLKIRCGLCGKKDCQCSASEAAKARSATFVMRKQKDKYREMRVYRLAKPSRAGAYVCWLVLPWYDKLDSRSRRFKKVALKYLPDACKKAAYLQVFRKNDVVCFANDSLSRKGIKTGESWLIERTDAKGDALANIGLLPAHQVSETKHPITGEKVKIESVTVALNDFMRALEKPTTNEPPHPPSAQP

SEQ ID NO: 4661 - protein, 1074 aa, unidentified
  REGION 1..1074: note = Description of Unknown: Cas Enzyme sequence
MNSSRSPVTRFSTGLVFGFDVGTGSIGWAVRNGTEFLDVGVLVCPEETAKLDSRRGLRRQRRTLRSKKYRRQWFARELAGLLGLTLIRQGQSELPLPETAWEQNAKGGWVPKPGFESLRDPVALRVAAAEGEPLRPEELFTALVHLFRLRGYLADVPWANREVEAKESDAKKEEGEIRARMSALQAEMQAAGCELPCQLLALRANNGQRQRKEVWPRELVEKEFRAIVAAQATRHPTLAEKADWLLFGDCREVKSHRVFFKTTESRNPGVLGLKWPRFDNRGPALDALRPIDELGRPLHVVRKNKEAFSKAQWELAVMNFRVIDRQTGALVPPDARALARLREMWESSSRKRRAKKEAMSGTPAGSPETTPRVEIKVALLEKWAAEFANRYKLVEGQQSLTPQTGAGRARYSTPTLELIREQFERGIRFDPPQPVLRRPGESPQRALDRYLADIKHPLVRHRLLLFSRLLDKLVKQHGEPDLIVLEAVRSLALGEKNKRELLKRNKANRDQRESIRQELASRNASTSRNAILRYRLWKEALSTCPFCGDKITQEQLLRGEADIEHLVPRSVVDCNEFYNLTVGHVRCNRELKGDRTPFQAFGHTEKWPQLRDNAEKCFKGRKLEIFLSDNAEQLIEQKADLQHTAYIARIVRHVALIRLGWTGDDGRDPTIIKGNKPSSSFQVTNGQLTSRLRQAWGLNHILHPLPEGKRWDDLTDAEKEQMQQKNRGDLRHHALDAMVIACTLPWLAHRTVGATDPETGEHGWWQLDERTRRSLALNPVFPTEGQMRRVAEEWMQKVVVRHHVSRSPHQSAYATTIYGKKAPNTYVAREVFTTLTPKNLGSIWPPDFAAYCEAAWARYVEESPDIEAELKRSKGCVPESFTARLCFAHFQQWRELMKRGENVEFTWPETVKIPIRSVRLISVKDDTAVMRFAPGTPGYVKRTGFKEVRIHVSADGNSFVPVFVPYWKGDAIPPETPIKTGTRPVAVIRKGQVVGLKKPLAAGASAGHYRVIVLGQSQVSILPPHVANKDEAKLALGIPRTGIKPYWPEFIRALGYELPHPPSAQSPPPGALPT

SEQ ID NO: 4662 - protein, 1325 aa, unidentified
  REGION 1..1325: note = Description of Unknown: Cas Enzyme sequence
MKDYTIQPSSITDFLNGRVFGFDLGTVGTAHAVRDKQVISETGVLECPNETAALAGRRKLRNGRRVMDHRQDRRDWFAQSLAAVLNLELHQDSRLPKTSWQSVGGGLWKPTQLQVGDPLPLRVAALAGESLSPEKLFAALTHLVKRRGPARPPWADSLTDEKDEGDEEAPDPSRISPDETKSRFEKARAESQQPAGFHPCHYLRILRETKQRQRNHAWPRELMRAEAAAIMAAQSVHYPAFKREREVIDVTGETIRMTTAEWLLRGNAALLTRTVGEGGETFDVFYRNHRNRERAPFTFQAARIHNRGPGLDLIHPRSEDGRQNYVMSRSREDYRAWQVEVALINFKVVDLTSRAKKKSLRKPPAEAIQQLRDIIQRTHQLSLEDLQAWVAPYETAGHFKLVEGQTDLVGKGEGRGRFGKHGLAEAMKIVRQLQEDAEAQDKLKPKTKKEISKNKNDEDKAASYILKQQPEYVNMAAKLRFKQFKDGKPTSEMEPLPRALKRFIDEIRDPVVQHRVRLFDRLLDELVSRHGTPTHVVVECVRELGDDPERAARASERRKTDREENKLARETLKAMGVESNEKNIRKFRLLQECKWRCPYNPEERFMQSDFDDLVLQRLIPPADDGRRAAYLSAAKRALNETEIEHMVPQSNLVCDEWFNVTVTRRATNDDKGTSTPYEFVLRDANEAAREIIIKNARDIFGEDSLKFKIFTSPDARSLIDSSANLTRTAYIARCVRYVCLLKFGWLTDDGRDPLQEPGHEVNHRYLVSNGGITHRLRKAWQLDELLHDDKMSDEAWKALTDEEKDELIAQRRQKNRQDLRHHALDAMVLSCTLPWAASSPAYAGGWCHLDPQDGSVSSVACPIFGDKDHGQKIKELAAEKLLALKQSDPQNKDNHDRIQHYRSNGKHAGVFDTQFYGRRERFGGKEFKEPVFVIRKPLAELTPDCLQAPRPDPILDQVKDDVRLANDASLWGRRLAQTQEELRNEIAQFDAESKEAALLTKRLSKTEGWQKKKPTAKRWEELERFLYPSASGNVIFSPKLREHIRKAWTAYTAEAENWQRVLKIALDVQQQNLQEAKANPKTKPTTVRAIEKRIWRLNQWQQNEEPDLEDWDELQTFLHRESGAQQAKPVFPADFIQGLWHPDFTDAPLRRVKVTQQTKDEGNYVPMRAGTYLKYKGGFKSMKVYDAPPGSSRGTDFICWLVRPFYPNPDKLRNQDLLEKNKPKDCKGRKLRATFKIGDVVRFEHAIPTKSVEAGTNWMLCESMAAGENNARLTLVPAHKALKVRDPLDPKKTLDLKKTDKLDIRLNDFIRALDYEPAHHPSAKS

SEQ ID NO: 4663 - protein, 1351 aa, unidentified
  REGION 1..1351: note = Description of Unknown: Cas Enzyme sequence
MRKEYSIGLDIGTHSVGYAVIYHDFTVPAKKMKVLGNTDKKHIKKNLIGSVTFDEGRTASDRRLSRGARRRYTRRAYRLNTLQRFFDEPLSAVDPNFLARLKESFLVEGDKQYAKHPIFANEAQEKAYHEKFPTIYHLRKFLANTKEQADLRFVYLALAHIIKYRGHFLIDGQLNADNTSVKTIFNQFAHAYNEAFALSQDFVAISEEQGMKVEEILTDVKLSKSGKVEKTLELFEGQARNGRLKQFLSLIVGNQGNFKGHLPIEEDAKLQFSSEKYDEDLESLLATVGNDFSDIFALAHNVYDAMLLSGILSGVDSETKAKLSESMVKRYETHQQDLDDFQAFMRLRCTDKEYKDMFKNREVTGYAQYIEGTLPSKSGYTKCASRADFYTYVKKVIEGREGAEPFLEKISQDRFLLKQRTFENGAIPHQIQLKELEEIIDNQGQYYPFLLENRDKLKAILTFRIPYYVGPLAKHKKYSDFAWLERKSDQAITPWNIHEVIDVDQTEEKFIERMTNFDTYLPTESVLPKHSLIYEQYMIFNELTKVRYVSDQGRKVFLNSREKALVFDELFKKHRKVTRKRLETFLSLEFNIEGVKVEGIEDSFNASYSTYHDLKKVEGMAEFMDDESYFGQIEQIIKILTIFEDRSSIERQLSQFDFLPEKTRKKLSRKKYTGWGSLSKKLLVGIRDRVTHKTILDYLKDDEHEGRPLNRNLMQLINEEGLSFKEYIATNQPEIGETSLQDIVAKIPGSPAIKKGILNSLKIVDELVGIMGYQPSNIVVEMARENQTTKRGKTLPREKGLKEAIDKLGSAILKEFPTDNKSLQNDRLYLYYLQNGKDMYTGNPLDIHRLSDYDIDHIIPQSYLKDDSIDNKVLTSREANRGKLDDVPSREVAEARIGFWTSLLKSGLISQRKFDNLTRGLRGGLTEEAKQGFIHRQLVETRQITKHVARILHQRFNQENMPEVNIISLKSRMVSTFRKSFGLYKVRDINDYHHAHDAYLNAVVSLSVLKVYPQISRDLIYGQFGKHQRVKGIQATKEFYLYKNILKFFDKENVIVESTGEVLWNQATVIPRVKKVLYKSQINFVKKAEIQRGEFYKASIVSKSDSDVLIPRKKGWDTKKYGGVMYPKVAYAVAIQYEDAKGKTKNEFIGINLTERQLFESNPKEYFKVLGIENIKGAIKLPKYTLIELSDGRRRMTSSEKELQKGNQLVLKEEWVNIIYHLGQAANIEKSESRLYCEENMNKIEGMFSEIFLFIDKNIKMPKVLSDLRSIYEKADNKRVADYIEAVNGLLKFCRVGAFPKFRYFSKEIGQKRYQSLTECWNGQVIYQSITGLYETRVKLEDLSSWDGAQL

SEQ ID NO: 4664 - protein, 1298 aa, unidentified
  REGION 1..1298: note = Description of Unknown: Cas Enzyme sequence
MSTHKQLELPFEEFAATGSVPPTAGEHAEQQQEKVTAPAAAAEMNIHGSGTKKILGLDLGVSSIGWALIKEVNDKPSEIIVMGVRIIPLDTDESDEFTTGNSITKNQKRTARRTSRKGYYRYVLRRKALTAELKKHDMFDETLFHLPQLKLWELRAKAVTEKISLKELGRVLYHLNQKRGYKSSRSEDNADKKDTEYVAEVKNRYQKLKEEGKTIGQKFFEELSKNPRYRTKQQVFPREAYIEEFNAILKKQQEFYPDVLTEEFIRHLRDDIIYFQRKLKSQKGLVSICEFEGFHVKNKDGKEIFTGPQVAHRSNPLFQVEKIWESINNITINDRQNNIFPITLEHKHKIFEYLDNNEKLTQSELFNILGIKDKSGWFGNKMLKKGLQGNLTKMAIKNALKNENLEKIWLQFNLTVRSTGTKTYQYHPDSGEVINEAEGKIVSEDCINQPLYQLWHTIYSIPEIEECKNALIRKFGFDEATAERLAKIDFSRLGYGNKSVKAIRKILPYLMEGYKYSDAASLAGYNHSFSLTKEQTEARKLLDKIPLLKKNALRQPVVEKILNQMIHIVNDIIDENRGWVTKEERDKGLFEIRVELARELKQTKEERNKTFKNINKIERENKEIEKILQDMGVRANRKNIIKYRLFNEINGDDKKVNAMCIYTGKPFSLSDALNGNEVDVEHIIPKSLLFDDSQSNKTLTFRWVNQEKGDRTAYDYMASKGEAELNAYIERVNKLYKDGIINKAKRDKLLMPADKIPQDFIERQLRESQYIARKSREILSQIAKNVWSTSGSVTEYLRRLWGWDDVLMNLHMQRIREIIPDPLAEGITEIVEWETHDGQKHKKEVIKGWTKRDDHRHHAIDALVVACTKQGFIQRLNTLSAKATRDELYKEVSARKEEFRESLSLLDKYFISQRPFTTRQVENKVAEIIVSFKPGKKVATWGKRFIKKNGKRIKVQDRILVPRGPLSEESVYGKIKTIEKNKPVKYLFENPHLIFKPYIKELVEQRLAEHGGDVKKALASLKKNPIYLDDKKTIPLEYGTCYKEEYVIKYPLQSLKLKDVPYIVDKKARDLIAARLKQFNDNPKEAFKEPVFLDEAKTIPIRSVRLFTGLAAVEPIMYDDKGNPIGYVKPGNNHHIAIYMDDQGNKIPHLCTFWHAVERKKYGLPVIIENPAMVWETILRKPEKYPQLFVEKLPQANWNFLISLSENELFLLNLDEEYYQDLLRQRNYRELSKYIYRLQKLSLFDIYFRHHLETSVDDSDNKDVIVKTRKRIRIQSIKALFDAKVRKIKVNRLGEIIE

SEQ ID NO: 4665 - protein, 1379 aa, unidentified
  REGION 1..1379: note = Description of Unknown: Cas Enzyme sequence
MQYKCMAKKSQYYTKNMEGNYTKNMEENMKMRKEEYYIGLDIGTNSVGYAVTDGNYRILSYKNKSMWGVRLFDEAITAADRRVSRGTRRRFGRRRWRIELLQEIFAEEIFKVDPGFFQRIKESRLWIEDKTVKQRFSLFNDNEYNDIDFYKKYATIYHLRKALLTEDKKFDIRLIYIALHHLIKHRGHFLFNGTIEKVTSFSTVYDLFVDTLRDELNINIECQSTTEFENILKNRMLSKKDKNNKIMQILSCPKSDKALKSVIGLICGMKIKLADLFNDDTLKEIEKSSLSFADDDLSELREMFEIDLQERCRVIDVLKTVYDWVVMADILSDGEYQGSSYLSVAKVKVYEKHKQDLQLLKKVILQAGREVYNDFFQKDGNANYCAYIGYTIRDGKKKKVKSKCSYEEFKKEIISIITKKIEESSDTKKILEELEVGSFLPKQVSKDNGVIPYQINKIEICKILNNISKYYEFILAKDSEGITAFDKIIKIFEFRVPYFVGPLNNYQNQNAWAVRKEDGKITPWNIESKIDYQETARCFIRRMTNKCTYLIGKDVIPQNSLLYSEFMVWNEINNIKIGGEKIPVALKAKLFETLYKRKKKVKLKDIREFFVSEGYDLNNQSFSGVDNQLKSSLKSYHDFRKIFGDRINTYKVQVMAEKIINWITIYNGDEKMIKNMIRREYNEELISDQELSKITKLNYQGWGRFSKEFLNGILGENKDNGENGSIIFMLRNTQDNLMQLLSSKYTFIDKVEQENSMNEIDKQTFSYENLLGNVVASPAIKRAVWQTLLIVKEIIKVMGGEPKKIFVEMAREAGEKQRTVSRKAKLLDLYKSIKDEERDWVKEIDDRNEGEFRSIKLYLYYTQMGRCMYSGNPIDLAHLSDANIYDRDHIYPRSLTQDNSLDNLVLVERTLNAKKDNDIISPDIQKNMCKFWKCLKEKKLISEEKYNRLMRKTPLTEEELAGFINRQLVETRQSAKLVTQIMKSYFDQSSIVYVKAGIASQLRQDKLNEKKIRSLNDYHHAKDAYLNIVAGNVYYEKFTNNPLNWLKTSKNKEYSLNHMYDYDLTRKGQLIWKKGKTGSIRTVQEQMAKNDILYTRYATTNKHGQNGGFFNQLPVSAGDNPSVPLKKGLSMEKYGGYKSLTPAYFALIESEDKKGKKIRSIEMVPLYLSKQFESGKLSYEEYCKNNLGLNNPIVILPKIKKDTLLVVDKYPMHLRGLGGKQLLLQGAVQLRVSHECEIYLKKLEKWIQRNTEYKGKGFLEITEWDGLTKEKNIDIYNMLHDKLKNTIYQYRPNNPIKVLEESYNKFQELTCEEQCYILNEIMWFFRCKPNTVANLGLLGKGKNIGKIALNKIISKYDSAYIINQSVTGLYEKKIDLLKI

SEQ ID NO: 4666 - protein, 1342 aa, unidentified
  REGION 1..1342: note = Description of Unknown: Cas Enzyme sequence
MEKKKQFGKYYIGLDIGTDSIGWAVTDTNYELQKFNQKSMWGSRLFPEAQTAVDRRVNRVARRRIQRRNQRLALLQDLFKDEVCKNDPQFFARLSESMLHAEDKTVGGKNSLFGDSVIDDKAYHKKYPTIYHLRSELIHSDKPHDVRLVYLAIHHIMKYRGHFLFEGSLDTESTFDNIMKSFCEEVEDSLGIPFDCSELPVIKEVLCNRGITRTEKQKKLFSLFDCKSNSQTAALLKMINGSVVKLKDVFPVGEESEEEIKIEFGSDSYDQLIPKLEVLLADDYSILSKAKAIHDWALLEGILHGKEYLSDAKKDIYDQHAKDLRLLKKLIRRYCPNEYDSLFKDPSDDRNYCAYVGVAKVKGKKVPVVKSCTQADFCKRVKSTLEKIKADDPELEEARARLSSENFMPKLRTKDNSVVPNQLHLKELKKILQNAEKYLPFLKSADQDGTTVEEKILQILTFRIPYYVGPLNDRDPKAQNTWVVRRSHEKIYPWNFDEIVDREMSAAAFITRMTAQCTYLNDHTVLPQNSLLYTRFMVLNELNNLKIDGEPISVSLKQDIYRDCFETHSKVSMNVLLKYLKTRGMLIEKDQVTGIDGDFKGSLKVWREMRDLLGDCFTIEIAEEIVRLSTLLGEDRKMFCEKLRKEFRQELPEEVIIRASGKRYTGWGRLSKEFLTCIHDDHYDPETAEYPNIITALWESNENLMQLLGGSHGFAEAVRKYNETNSQDYGFSYQTVKDLYLSPSIRRSVWQTLRIVKEIRGITGHDPEKVFVEMARGGGEKNKRTQSRKSKLLELYRSCKDETRDWMLELNAREDSDYRSDRLYLYYTQMGRCMYTGESIDLDHLFDANVYDVDHIFPQSKVKDDSIDNRVLVKRVVNAEKTDVYPIDKKIRNNMHSTWSMLLQKGFISKKKYDRLLRGTKLTDDELSDFVSRQLVETRQSTKAVADILGHLLPDTEVVYVKASLVSDFRKEYDLLKCREVNDLHHGKDAYLNIVVGNVYNTKFTKDPRNFFREQDHTYSLNKMYQFPVRRGETVAWQPGESGSITVIKSMMRKNNVLVTQMVVEKKGQLFDLNPVRKNHWQLPLKKGMACLADPSKYGGYNNVKGAYFMMVESIEKGKARRSIVDMPIHLAGIDPEDPAVIEMLVRDKGLNEPRILVPHIGINSIIEIDGCRMYLTGRTGTNLDYALAHQLILGYENELYLRNILKYCDRDMEYSHTHRNEELKISEYDGLSAEENLKLYDLFVSKLENTVYRVRLSAQAENLKKARGRFEELSVEKQCKCLKQALNLFTCNKVKADLSIIGLGSQLGSIRTARCISNYESVWMINQSVTGLFESRSNLLS

SEQ ID NO: 4667 - protein, 1077 aa, unidentified
  REGION 1..1077: note = Description of Unknown: Cas Enzyme sequence
MKKNHELSFGIDLGIASVGWSVFNLKENEILDKGVYLFSEAEKAEDRRVSRSVRRRKKRKLHRIERLNILFKANGIVEKNTYDSNLLKKRLLGIKEKITMQDIVNIIIYFARHRGYIPFKDEDERKSNIVDELRKQGLLACQIQEKIFKDNFKYRGDEYLIQHSDYVKELKTMLYEQKKYHKEINEKFINGVIEIINSKRKFWEGPGGPRENQLNKYGRYRNLEDLEKYNEDKNYNKYLFESLIGNCNVYANEKKASAWNFYAESFNFFNDMTNLKINIQDLDETNRIYFEKVEKETYKLKNTAIATLKDNVLNSSSVSYPKLFKKLFLVDFSKIYGYKKDKNGNAELAKFEQIRKLKNKLEDAQLIEELLSNMDAYNKAMYLIQVSPDKQTRYEILKDNLEEFYSDRLIELLANCSLENRYHSFSEKALKTYLELMEENNQNSSYIERNFADEINATREKELINNYKSENIEEGNLKYINSKGVDDIIASPTTKKSLRKAISIINKLFSKYGYPGYICIENTRELLSADKQKEYENKTLDNNRKRETAKKKLEEAGYEVSDVNIDKYLLLNETNHKCAYCNKDITVSNCEIEHILPRSKTANDTFLNKTVSCTQCNGLKSNRTPYEFLTSQNMYEDFKNRVQKNSKFDDKKKSNLLFEGNIDKYEKSFKNRNLNDTAYATNELANQIELFKKAYIRHNYGEILDTKVLKIPGQFTGIIRRKAKLDKNRELKYHHAVDASIIASMPYLRVAKLIDMVQNESNKYWQINNLSEYRDNLYEELYLNKTLKEELQKSDYSNTRFAQEIQKKKNGQLFDANISKVVMKNNEYYKVEQIDNIYDLDYKEIEKYFTNSKTKKYFLCKDNDSKLYKKIYDIIEMYLGQKVNPFVEYCKENNMCENDKFDYKKYGIRKNENSPVVARLRFLTKVNTPYLMKNDKLIISKKQNKKVPMVMFDSLKQYCTRIYRDKESGKLLFMPILRIFVDNNSGEIRTDSDYYKVLFDTYVGKDEQDVEKYMDLFNNEYVRFYKNGEILGEGLISGFHKTHNIIIIKNCNVSINKKVDKIEKIKSDILGLYNLNI

SEQ ID NO: 4668 - protein, 1316 aa, unidentified
  REGION 1..1316: note = Description of Unknown: Cas Enzyme sequence
MKKYDIGIDIGTSSIGWAVINSTTNKVIKKFNKRLWGVLLFDEAQTAEDRRLFRATRRRYDRRRKRIKLLRQEFQEEINKQDSSFYQKMNEFYLYKEDKSKYLEDDNFFRNYSKKYPTIFHLRKELIDNPLKKDIRLVYLAIHHIIKYRGNFLYENENFKIENLDMDSKMEKILDLFLELRPELIINRPNESLTEIISNRDECEIRLKKYFKYIFGNNGNDWANLILGKKGDIFKIFDVENESNIKKISFKDDDYDEILENLAKIIGDRIEILEEIKELYNMKVLKGILSEGKYISDVMVKNYEKHKADLKLLKKVLAKVDDKYRREILNGKDCLYEKYIKNRILDIEFLGKLKKIISQIDDDSDELKQIKELLDNNNFMPKITSKENSELPYQIHNIELVKIIENQGKYYPFLLQKTENGNYRIQEILKFRIPYYVGPLNDTTMDKNKKNPNAWACRKNNETITPFNFDEVINKDASAAKFIERMISHCTYLLEEKVLPANSILYSKFKVWNELKQIKVNGERISHKLQQNIMKDLFEIKGKISGKDLEAYLKQTGECDMYDTLEITGYSADNKFANNMQSYVDFFGDNGIFKNKNYSLEDAEQIIQWITVFEDKKILERKIKEIYPELSDKLSQIKSKKYSGWGNLSKKFLTEVYFENDCGEFKSIMDLMEETKDNFMQIYNSSKYGFQKKVNEINSQKTSNYINYSLVENLATSPANKKGIYQALKIIDEIIHLMGYYPQNISIEMARGEGKKGRIPERKKQLENIYKKYTAEIENFSDYSRLYSELEHSEKLDSEKIYLYFIQEGKSLYTGEPIRIDELEKYEVDHIIPQSLIKDNSWDNKALVEKRKNQEKADNLVLPKEYRNYKNKAWWKHLQKIGLISQKKFYNLCREEFREEDINGFIERQLVETRQICKHVANIIETVYKDVNVIYLHADLSSNYREKFELFKFREINDFHHAHDAYLAAVLGNYQKSHLKRLTSTLELRDMKKYIPDEDERKKRLKFGYVVNSLDPVFQLYDTETGELLFDINTFNQTIADTLYQNDIIINRKTEIKTGKFFKDTKKTKKDKVSNPILLKQNLNPDKYGKYSSIKYAYVLLVKYFQKNKEKQKLIGVPIMYAESNNNKAFTKYLRNILKLSDTDTFKIVPKIIPFNTLINWDGKLGYITGASIELQNATELKIEKDMMKKWKYTLNRLLNGRIKEGLDDLVYGEQLTEIFDYLINKIEKYYKIYNSELKIILEKFKISDEFYLLSLEEKELFLKQIFLMLSCNGKNANLKSFGLKDGFGRVSKESIEHGKIITKSITGIKERYYEF

SEQ ID NO: 4669 - protein, 1112 aa, unidentified
  REGION 1..1112: note = Description of Unknown: Cas Enzyme sequence
MNKKVLGLDLGVTSCGYSVLNQSDINQYTLIDYGVVMRDNPNESGTQSDWKSHIQQRKLKDAKKQRVELIKQIFNSCNFIFDEKGYSNLWEIRVKDVFERKLNTSELFAIYRYLAKHRGYKSLKMEDLIAEIEAQTRIGDCESNEVIEPDSEKFTETLAYLDALKCKYKEKTVAQIIWDIESEKKNPSFRNHNNYKYMIRREDVENEIKKIVEAQEKFGFFESKEKANEFKESIISIIIPQDPVVLNPNLINNCLIYKEEKSAPIYSYTFDIFNFYKHINDLKIGKENATKEQKEILINDFETKLANLKNIGSYTIKEVKSLLVINEDIKISGLRESKIIKGKPVNNHLVKFNFLAHLAKFDKSIIQSLQKDKAHFDMIASIFHININPNALIEEFINYFKQNGLSFEKEQIKDFALSLHKHKIKGTTSYSFKALNDLLEYMKNGKNESDAKEILGVSKSEDYGVFKKGIKYLKPVKENGIFQYEIDENSISNHVVKSLISWACRVIIDLHDKYGSFDIIKLESTRELSQPDDVKRQIKSANDKSQKEWQEIKERYKSHFEALGLNMDNNKEYLLKIKLWEQQGKIGIYSGQSIGISEILSDKIEIEHIVPRECGGANAEYNKAIDTKHENALKARRLPLDYLTGDKREVFLQNIDELKKSYKINFKKWLNLKAESLDKTFKEAKDDVSMHSTSYMEKLLGEILKRYYPFQSKEKENQKVMHISGRATSYLRKILSIDNKSRDTNFHHVEDAILIGCMSKSYLQNISTNFEKNYELDKVNAKENFKKIVPLIDRASPNEVFAKLREEYEQDIETNPFYKNMVDRTIRVPAFWVSKKPIGTKAHNETIQSKKNLSYRVSVDSLLERVKPNHKMGAEKFIEQYNKEILNKLQIFKDNPKDFTAQAFIQKRDNIVKILQEANFITTKDEQANIDKQIRNEMRKSILDVNGNIIRRVKRVGEDATIEVRKGLAYTAPSLVCLRCSFDEPKLKLQRLDIRSYVQKKSKNDMQMDIFNNDLVEIYIVKSKKVEYKAVGLLKGFTESKGGRVNLRNPKYPLLKEKQPKLYKGEFSIGSTCGIKKYKIDASGKVLGFYYLGRVLENEKELFSKVIVYRKI

SEQ ID NO: 4670 - protein, 1128 aa, unidentified
  REGION 1..1128: note = Description of Unknown: Cas Enzyme sequence
MEKNMTKILSLDLGITSCGYAVMQEVEDNSYLLLDYGVVMRDNPNEGGTQKERREKKQSRELLDKKKNRVKQIQQLFELHGLAYQDTKHYDIWKLRSIDAFERKLNKDELFALFRFMAKHRGYKSLKIEDLIAEIDAKEKIGDCESTEINMPTDLEKFSETLAYLDALKCKHKDKTAAQIIWKLESQKENPTFRNHGNYRYMIRREDIKKEIEKIIEAQQALHFFHNEQHAKEFADKAIEIIVPQEAVTLNPDNINRCLIYKNTICAPLFSYSFDMFQVYKLVADLKIGGMNASIEQKELLLQHLLDDIKNFKCKNIYSVKDFKKILEIDDDSVKINNFQEFKTVKGKKESNNLIKFNFLPSLKKLHSDKKLDANMLDFLFAHEQSIEIFDAIATEIHLNVNPEKLLKNIQELFTRYEFEFSEDAVRDFTLALHKNKVSGTSSYSFKALKDLTLLMQEGKNESDAKEILGVSKSEDYSRFSRGIAYLKPQNKEGQLRYEMDENRISNHVVKSLINWALRVVIDLHAKHGTFDVVKLESTRELSQPDDVKRDIKAANDKNEKEWLGLIEKYQKHFEAKGLNLQNNKEYLLKLKLWEQQKGFGIYSHKVLSIDEVLSDKTEIEHVVPRACGGSNAEYNKALDIKDENAQKGNKLPLDYLNGEKREVYINFVKELKESHAINFKKFKNFMAEELKDAFKEARDDVSLHATSYTETLLGEILKRYYPFSDALKENQRVMHISGRATSYLRRILGIDNKSRDTNFHHAEDAILLGVMSRSYLQNISTNFEKNYELTLQNAKENFKKIVPTIEGASPHQIFAHIRESYMEDIENTPFYKALDGTLKTPAFWVSKKPIGTKAHNETIQSKKNMAYYVPVSSLLDKVKPSHKMGADEFYKKFNQEVYEKIQVVQDNPKDFTSQAFARKRDEVVALLNKSAFVSTKDEKTELDKELRDLMAKPLYDVNGNEIRRVRRVGEKVSIPVRKGYAGNAPSMLAMRCSVETQTRLFTDRIDFKDSILLKKNDGSYIDIFNNDLVKIFTYEKKQVVLKLTGLLRTFVINAKEDKMLKVKNPKYPIREEAQPKQYNSYVAVKKMCGIKKYKTDASGKILGFYYLGTILDDEKELFAKVLSYKAL

SEQ ID NO: 4671 - protein, 1133 aa, unidentified
  REGION 1..1133: note = Description of Unknown: Cas Enzyme sequence
LKKILSLDMGITSLGFAILEVVDDNSYKVVDNAVIMRDAPFDIKSGESTQSQRRMHKSMRALNEKRKRRVKEVARIFERFGLLSFQECMKVQKENKIIDKWELRAKDALQRPLSHEELFAILAHMAKHRGYKSIATDDLLYELELEFGLVDSIVEKVESKEDEKRQVYAALNRVEELKRVYPSETIAQVINRAVKERKLNSYRNHDNYEKMIRREDIEDEIERILIKQCELEGIALSEEECKHLIEDLHKAITEQVMPENNPELFGKCSCYTEEIAAPKYSYLFDLYRLYKILSDVRINNIALNEEQKERIVVYVQEKIAKGKNLKKLTYKDIRKILSLKPNQKIYGKEDEIVIKGKKSQRDLIKFFFISEIGKFSTLMAEVIKHPDHLNILARIAEALQLHKTPQESFRAIDALLKERQIRVAPDEIIALIKGFKPGTQNISHKFIIDALPHFMDGKSEDEVKEILGIRTSEDYGCYPKSLKHLHLGKENLFEKYVRPDINNHAVKSLVSWALRRIADLSWRYGSFDEIIIESTRDALPKSIQDDIDKAMREREKELDKIIDTYKKEFPSIDRKMARKIKIWKSQKEMDIYTGKIINISDLMEGRADIEHIVPRSLGGLSAEYNLVIAHRDANMQKGNRLPMDWLGEDKEYINLVEMLFNEHRISWKKRKNLLAKSYDEIYNEVKDSKALRATSYLEALVAQNLKMFYPFPDEEHRKNGAAVRNVPGKTTSKARQILGIKSKSRDTNWHHAEDALILATLSRGWQNRLHRTLRDNYGKSEEELQKIWQRFTPHLDGMTVSDYIKESFERFMSFGEDSLWYRDMFGSIRSVSYWVNRKPLSVSSHKDTVYSAKHAVPTLRKSLLAAFGGLNVITDRHKLTAESFMEKYDKEIRSKLWLHHIGNDNDPVMRAIDARAEAIAGVLKAYEMQDTKKDKELDETFKESLNTILSAPIEMDGKIVQKTRFVYSKLKGMDRKVRKGFVETDKNMLGIFVTKGSKKLEIVRMDVNNINDLQKEKEGIRVYLNEMIYLFNEKKVLHYGCLRSYLENAQGAKMIALFNSRFPANPKSQPKMFSTGSQIKQVSIGSTTGIVKVHLDINGSVKSYEKFGFIPKELEEEFKLECGYGGVEDDTHY

SEQ ID NO: 4672 - protein, 1115 aa, unidentified
  REGION 1..1115: note = Description of Unknown: Cas Enzyme sequence
MKILSLDLGVTSYGYSVMQELGNNSYSLLDYGVVMRDNPHDGGTQQERREKKQSRNLLDKKKKRIKEIKQLFASYNLIYQEKNIYDIWKLRAVDAFARKLDNDELFSIFRFMAKHRGYKSLKIEDLIAELEAKEKIGDCESDEVQVPKDLEKFSETLAYLDALKCKHKEKTATQIIWELESQKENPTFRNHGNYRYMIRREDIKKEIEKILEAQQKFDFFKSDELVTKFVNEVINIIIPQEAVTLNPDNINKCLIYKDEISAPLFSYSFDIFQLYKLVGDLKIDGADATLEQKEQLREALLEDINSLKCKNSYSVRDFKKILGIDNEYVKINNFQEYKMLKGKKEANTLVKFNFLPSFKKLNNDILNTLLREELVMEIFDAIATEIHLNVNPEKLLANIEILFKKYNLEFSKDEIRDFALALHKNKVSGTSNYSLKALKDLTALIQDGKNESGAKEILGISKSEDYSHFLKGIRYLKPQSKDGKIQYEIDENRISNHVVKSLVSWSLRVVIDLHEKHGPFDIIKLESTRELSQPDDVKNDIRRANQKNEKGWQDLIEKYTKHFEAKGLNPQNNKEYLLKLKLWEQQKELGIYSHKSLSIDEVLSDKTEIEHIVPRACGGSNAEYNKALDLKDENAKKGNKLPLDYLSGEKREIYIDFVEELKKNYKINMKKKINLLAENLDKTFKEVKDDVSLHATSYTEKLLGEILKRYYPFTDKLKENQRVMSISGRATSYLRRILRVDNKSRDTNFHHAEDAILLGLMSKSYLQNISTNFEKNYELTEQNAKENFKKIVPLIEGTSPNHIIAHIRESYMQDIEVSPFYNALDGTLKTPAFWVSKKPIGTKAHNETIQSKKNLAYYVPFNSLLDKVKPSHKMNSDEFYQKFNKEVYEKIQVVQDNPKDFTAKAFVQKRDAIVNILNQSAFASTKDEKAELDKKLRDVMSEPLCDVNGNEIRRVKRVGEDASIEVRGGLAYTAPSLVCLRCSFVDDKKLKLQRIDIRSYVKNKVSQHNQIDVFNNDLVEIFIEKSKVLESKTIGLLKGFTESKGGRVNLRHPKYPLLKEKQPYVFQNEFSIGSACGIKKYKTDATGKVLGFYYLGRVLDDEKELFAKVLSYKAL

SEQ ID NO: 4673 - protein, 1091 aa, unidentified
  REGION 1..1091: note = Description of Unknown: Cas Enzyme sequence
MKYIIGLDLGINNVGWSVVNAETTEIKSYGVKKFSTSNGASDRRNFRNSRRRLKRKDTRKEDVLKILNGINFPNNLTIDTKLIETRCKGLNEKISKQDITNILAYMAVHRGYIPFGNEEVSFVDLKGKYPCEYYRDKLLNSINNKYRAQRETVKNKDNEKEIRKILKTQQEYYPEITNDIIEKLIETLNRKRKFWEGPGGLNSLTSFGRFKTDEDVIKYKEQKDKNPDYEKYIFEDLIGKCEVDPDEKCASTGNFYAEKFNLLNDFINVSFLSIDEINNKEDFYLTDNKTYKLKETGLNKVFEYCLEKENITIKGLLKDLFATSVNNMSGFRQKDHDPNKPDMSTMNIYRSVKKIFAKNNANMDIFKLDNIDKYNDIINYLMLVPGNVELINMISSMVMSLTENDENALKEAFKSKGKDLRYHALCEKILKRACNDMQSLQKNYMQVYKLKDYGKKSRELFIRKYEEQNKDKLLLNSSFIDDIVASPQVKKTLRQAEKVINEIVKDMKSLPYAIAVESTKEELSGNDKRNMYIAMNKKNKELHDKAEETLKSLGYDINQITKKKITKIMLYEEFNGLCPYCGKSININSLINGSDEIEHILPRSDSFNDSLDNRTISCADCNSKKGNKTPLQYLTGSDKESFINRIKSNKNISELKKSNFLFDGDISKYRTRFFNRNLRDTAYATKELIKQINIFNNYLEFKSNSKKILTMSTPGQLTHDIRERYNLEKERDAGQKPFHHAVDASIVALLPTTSIGKKILNFQNNDNFFISQDSKKIMQDIGTELKYYDTKKDKIEYDDYIKDLKTISDTNPKFMYSPEVNKEPNKQLFNANMYKLIKKEDKYYKIEQIDNIYEPKLDLALLEKLFDDSKNETLLCQAQHQDFYSKLKKIYFEYKDSNISPFEAYQREVNNLSKEDKFDYLIHGIKMSQNGPVVKKLRYYTPISEPYLIDKKSINKKNNTYLAYDGLAQAGIEVYYNIDKNTLVFVPIPSIAVNLKNRAINYQHPVLVKYCKKYLNDCNAKRIVTLFNGNTIEVYKSKGNIVKGEVSSFDKNSNRIRLRDGSSFVTSDRGFSVIDYSPIGKSQKRLTFMIK

SEQ ID NO: 4674 - protein, 1091 aa, unidentified
  REGION 1..1091: note = Description of Unknown: Cas Enzyme sequence
MKYIIGLDLGINNVGWSVVNAETTEIKSYGVKKFSTSNGASDRRNFRNSRRRLKRKDTRKEDVLKILNGINFPNNLTIDTKLIETRCKGLNEKISKQDITNILAYMAVHRGYIPFGNEEVSFVDLKGKYPCEYYRDKLLNSINNKYRAQRETVKNKDNEKEIRKILKTQQEYYPEITNDIIEKLVETLNRKRKFWEGPGGLNSLTSFGRFKTDEDVIKYKEQKDKNPDYEKYIFEDLIGKCEVDPDEKCASTGNFYAEKFNLLNDFINVSFLSIDEINNKEDFYLTDNKTYKLKETGLNKVFEYCLEKENITIKGLLKDLFATSVNNISGFRQKDHDPNKPDMSTMNIYRSVKKIFAKNNANMDIFKLDNIDKYNDIINYLMLVPGNVELINMISSMVMSLTENDENALKEAFKSKGKDLRYHALCEKILKRACNDMQSLQKNYMQVYKLKDYGKKSRELFIRKYEEQNKDKLLLNSSFIDDIVASPQVKKTLRQAEKVINEIVKDMKSLPYAIAVESTKEELSGNDKRNMYIVMNKKNKELHDKAEETLKSLEYDINQITKKKITKIMLYEEFNGLCPYCGKSININSLINGSDEIEHILPRSDSFNDSLDNRTISCADCNSKKGNKTPLQYLTGSDKEIFINRIKSNKNISELKKNNFLFDGDISKYRTRFFNRNLRDTAYATKELIKQINIFNNYLEFKSNSKKILTMSTPGQLTHDIRERYNLEKDRDAGQKPFHHAVDASIVALLPTTSIGKKILNFQNNDNFFISQDSKKIMQDIGTELKYYDTKKDKIEYDDYIKDLKTISDTNPKFMYSPEVNKEPNKKLFNANLYKVIKKEDKYYKIEQIDNIYDPKLDLKLLEKLFDDSKNETLLCQAQHQDFYSKLKKIYFEYKDSNISPFEAYQREVNNLSKEDKFDYLIHGIKMSQNGPVVKKLRYYTPISEPYLIDKKSINKKNTTYLAYDGLAQAGIEVYYVTDKKCFAFVPILCVCFNFKTCKVNKEHPEYIKYFKKNIGNQNIEYKATLYNGNFIEINKKDGKTIKGEVSCYHKTYDRIDLKNGGLFTKSDQGFSIIDYSPTGKAQKRLTFMIK

SEQ ID NO: 4675 - protein, 1091 aa, unidentified
  REGION 1..1091: note = Description of Unknown: Cas Enzyme sequence
MKYIIGLDLGINNVGWSVVNAETNEIKSYGVKKFSISNGASDRRNFRNSRRRLKRKDTRKEDILKILNSINFPNNLTIDTKLIETRCKGLNEKISKQDITNILTYMAVHRGYIPYGDEEVSFVDLKGKYPCEYYRDKFLNSINNKYRAQRETVTSKDNEKEIRKVLKTQQEYYPEITEDVIERIIQTLNRKRKFWEGPGGLNSLTNFGRFKTEEDVTKYKEQKDINPEYEKYIFEDLIGRCEVDPDEKCASTDNFYAEKFNLLNDFINVSFLNIDEINNKEDFYLTNNKTYKLKESGLNRVFKYCLDKENVTIKGLLKDLFATTVNNMSGYRQKDHDSNKPDMSTMNTYRSIKKIFAKNNANMEIFKLENIDKYNEIINYFMLVPGNVELINMISSMVMPLYENDKDALKETFKSKRKKLRYHALCEKVLKRACNDMLSLQKNYMQVYKLKDYGKKSREIFIERYEKQNKGKLILNSSFIDDIVASPQVKKTLRQAEKVINEIVKDMKSLPYAIAIESAKEELSGNDKRNMYISMNKKNKELHDKAEKTLKSLGYDINQITKKKITKIMLYEEFNGLCPYCNKSININYLINGSDEIEHILPRSDSFNDSLDNRTISCADCNSKKENRTPLQYLNGSDKESFINRIKSNKNISELKKENFLFYGDLSKYKTRFFNRNLRDTAYATKELVRQINIFNNYLEFKNNGKKILTMSTPGQLTHDIRERYNLEKDRDAGERPFHHAVDASILALLPTTSIGKKIMKFQNDANFFIQDNSKKIMQDIGIELKYYNTKDDKIEYDDYIKDLKEISDTNPKFMYSPEVNKDPNKKLFNANLYKVIKKEDKYYKIEQINDIYDYKVDLNLLEKLFDDSKNETLLCQSQHKEFYNKLKKIYEIYKDSDISPFEAYQREINNLSKEDEFDYITHGIRMSENGPVVKKLRYYTPINEPYLVNKKTINKKDTTYLAYDSLAQAGIEVYYNIDKNCFVFVPIPCTCYNFKTGKVNKKNNEYIKYYQKNIGTYNVQYKTTLYNGNTIEINKKDGSIIKGEVSYYHKTLDKIVLKSEQAFTKSDLGFSIIDYSPIGKCQKRLTFMIK

SEQ ID NO: 4676 - protein, 1170 aa, unidentified
  REGION 1..1170: note = Description of Unknown: Cas Enzyme sequence
MKKILGLDLGTNSIGFALNQVEEKDGAIVFEELTSNSIIFSEYVMATDRRAFRSGRRRNERAGRRKENIRKLFCYFNLASKDILDNPINYFNNLTKLYKEPYHLREEAIKGKELSKDEFVYALYTIVTRRGYTNLFAKEEDDKEAKESERINSAILTNKNLYKSNNYILPSKVLTVKKDKLVKDGFINIAIRNKKNDYSNSLDRKLWQEETELLLESQKNNKELFESLKTYEDFKNKLLNGINENSMGAFEQRDLKSVEDMVGYCSFYNFYSNDPQKRVINAHIKAIEFVLRQRIENSILGNLIINKKTGEFVQLSKEDIESTIDFWLKTPNVQTITAKNIFKNAGFKDVEIKISDKQDDTVQDISVHKSILEIIDFETIFKNEEFYTKILEVLHYYVGTNQIKDEIKKLNKENILNDEQIEKISNLNKAKSSYLSFSLKFINQILDKMKKGTLYHTALEELGYFKRYTKMEAYDYLPPLNPSKEDIKWLEKNIKNFKADELFYQPLVSPNVKRVISILRRLVNELISRYGKIDKIIIETARELNSKKDEEKIKKSQEQSKKEIKDAQTLLKSENKELNGKNTLRARLLKEQKAKCLYSGETLTLEDALDENITEVEHFIPRSRIWIDSYKNKILVLKKYNQNKSNQHPVSFLKSIGEWENFIGRIDEFLSNKDKKYWLTNEENIQRIWDNEKLEDRFLNDTRSTTKIVANYLEHYLFPKQNEYGKGETNDNVIRVTGKAINELKRLWGIHEAQPTDDDGKKDRDTNYHHTIDAIVISLLNNSSKKALNDFFKQKENKFKTKAILENLKTKFPVTKDGKPLFEFVKNKVEKYENNELYVCPYMKKRENIRGFKDGNIKLLWDEELNNFAQINKIEISKNLLYDNFGKELKDEEVSKRFNDIKERLNLPKQNNIKEALEEYEQRLLKTKESINNIVVDIKNEQSKLPRDKKAIDTAEILEIKSKIEKLEQNKKELIKELEIPCFFYTKDGKKQIVRNLKLKSSSVTKADSIIITDKKQKNRVQRLDFEVYQNLKENKTPFVAKLNDNTLSVDLYNTQKGQVIGLNYFSSIKNDILPKIDEGKIKLISNYDDKITISKNDIIEINDFKNGTKNYYTCNGGGEIGKGKNVIKVDNINKKNKSVIPIQIANYRIVRKVNINFFGEIFYEEFKKS

SEQ ID NO: 4677 - protein, 974 aa, unidentified
  REGION 1..974: note = Description of Unknown: Cas Enzyme sequence
MFRNDSEKLKGYYNYINRSSKAPVDEFYKYVNKCIENVDTPEAKQIRDDIELENFLLKQNSRTNGAVPYQMQLDEMIKIIDNQAKYYPVLKEKRDQLLSILTFRIPYYFGPLNETSEHAWIKRLEGKENQRILPWNYQDIVDVDATAEGFIKKMTNYCTYFPDAEVLPKNSLIVSKYEVYNELNKIRVNDRLLEIDAKNAIIRELFMKYKSVTEKKLKKWLVNNQYCNEDAEIRGFQKKEKFSTSLTPWIDFTKIFGKIDYTNFALIEKIIYDLTIFTDKKIMRRRLKKLYGFSDDITNQIMMLKYKSWSRLSERLLNGITADNRFGSSVTVLDVLEMSHLNLMEIINDKNLGYLEQIEESYVKPKDGKFTYKEVAELAGSPALKKGIWQSLQIVEEITKVMQCRPKYIYIEFERSEKEKERTKTQVENLKELYKDLDKQIKEDEKYRHVFEELNNFDKSKKLDSDRVYLYFTQLGKCMYSKEPLYLDQLSSYEIDHIRPKSLVADDSLDNRVLVKSKENQRKLDDAVIPSDIRMKMFSFWKLLYDKKLITPKKYYALIKSQITERDKEKFTNRQLVETRQITKRVTQIIRDHYSTTKVAAIRAELPHYFRKKYGIYKNRDINDYHHAHDAYIVALIGGFMRDRYPKIHDSNAVYSEYMKTLKRDEKNQKKWNGGLIINSMKYPYEVDGKRVWDPNFIGEIKKYFYYKDCYCTTKLEQKSGKLFDINIISMNNSKGKPRIPVNKDRKNIEKYGGFGKIQYIIVAIEGYKKGSNKTEPVRKLTGIPLYTKEVSIQEKVNYLEKKEGLKDIKIIKDNIPLNQLVIINGGEYLLTAPMECVNSKQLVLNEKQCELVNRIYIAIGKENYASLDDQELVNLYVELTKKMELLYPYYKSTAQKFMGMLEDFCGETLKNKSYIIKKLIILMHRGPHQEKIIYENYKFSNCVGRIEKKAFYLDDIEFVSQSPTGIYFKKYKL

SEQ ID NO: 4678 - protein, 347 aa, unidentified
  REGION 1..347: note = Description of Unknown: Cas Enzyme sequence
MSQNIVDYCIGLDLGTGSVGWAVVDMNHRLMKRNGKHLWGSRLFSNAETAAKRRTSRSTRRRYNKRRERIRLLRAILQDMVLENDPTFFIRLEHTSFLDEEDKANYLGADYKDNYNLFIDEDFNDYTYYHKYPTIYHLRKALCESTEKADPRLIYLALHHIVKYRGNFLYEGQKFNMDASNMEDKLSDVFVQFADFNNIPYEDDEKKDLEILDILKKPVSKKDKIDEIMALIAPKSVYKNAYKALVTGIVGNKMNVTKMILCESIKRDGEDIKLKFSDANYDDQFSEVENDLGEYVEFIDSLHNIYSWVQLQKIMGSAHTDNPSISEAMVARYDKHHDDLKLLKKVH

SEQ ID NO: 4679 - protein, 1337 aa, unidentified
  REGION 1..1337: note = Description of Unknown: Cas Enzyme sequence
MKKYSIGLDIGTTSVGWAVVEDGTQKIMRKGKKALWGVRLFEEAQTAAERRGYRSTRRRYDRRRNRIKLLQEEFNSEINKVDPDFFIKLKESKYLEKDEKNKTIKLTKEEKRAVKQYYDKYPTIYHLRKELMNQQEKMDIRLIYLAIHHMIKYRGNFLYGNTSFNANNLNIKDCLVQTFDTLQNNIPELEIPDNYNEVIDFDQFSKILLNPSKNDIKVEVKKLLSDTCNKQFVAELIKLLVGNKFNVNKLFVIENAENKIELNFNGSDFDDKYAEIEQLLGDKIESLQELKNLYDTVFLKKLFKGGDHVSLSELMVERYQQHQKDLRFLKDLFGKNRKLYNRLLRSTKKEQCLYEKYTSNNLSREDFIKELNKLISLLLDSGVEIDQKYIEQVQNDVKKRMDNGDFLPRITDTENGKYPYQLNKDELIKIIENQGQYYPFLLDKTNDGVYKLVKLLEFKIPYYVGPLVSSQKSQFAWMKRKQEHVKITPYNFDEVIDKEQTAEKFILRKISHCTFLLNEYALPNNSIYYSRYKILNELKQIRVNDQRLSNEQQQYIIKELFEKISGNITNSKFVSFLHSWNEMSMYDEIQVRGYSADNKFANNLQSYYDFFGPNGIFENTDYSEDEADQIIEWITIFDDKDILETKVRREFPKLSDAQIKKILTKKYSGWGNLCRELLSTKYYKDKETNTYKSIMDLMNETDENFMQIINNDKYKFQKMIQEKNSTTETASLSYKVVEPLATSPATKRGIYQALKIVKEIVDYIGYEPARIMIEMARSEEKKQRTLDRKKYIETLYSKCKNEIENYKKLKDELSHHEINTQKLFLYFIQEGKCLYSGKPLNIEDLDTYEIDHIIPRTLIKDDSIDNKALVYRECNQEKAASYVLPSSYRKNMYKWWEHLKKNGLMSAKKFHNLIRSNYKDEDIQGFINRQLVETRQITKHVANILNNYYKKTKVVYLKANLSHNYRERYDLFKFREINDYHHAHDAYLAAVLGEYKEKYMKKEVDFHMVKEMNDRFRKLGQKNKLKYGYVINSLDEEASDIVNEISKNLIDEETGEVKFDAHSFNQRVEDTLYRNDILISRKTELNQGKFFKETIYQAGKGSVPIKENMPVKLYGGYSNVNTSYLCLVKFKNKVKMVGIPIQIDIKMKQNKITMEQFIKEHLKLKDNDIIEIIKYKIPFQSEIKYKGQSVYIKGYSIKNKVCELSNAYQLKITKEHMKKWKYALDFLENNNKKFEFEAQKYVNQILHYLLDQKRIFPLFDKELNTIENDLNVLNLNLLEKKKIINEIFKMLHCNSVNANLKEFGLGDRMGRLSGCNVTEGTLIHKSVTGIKEQKYEF

SEQ ID NO: 4680 - protein, 1331 aa, unidentified
  REGION 1..1331: note = Description of Unknown: Cas Enzyme sequence
MNKVYNIGLDIGTTSVGWAVVDKETSKVMRKGKKALWGVRLFDEATTASGRRSFRSTRRRYDRRRERISLLQKQFQSEMDKVDKNFFFKLKESFYLEEDVDLKQHPLTQEEKEVIKKYHEKYPTIYHLRKALLENEEQLDIRLVYIALHHIIKYRGNFLYEGNDFNVKDLDISARLKEALESMANCEEIGLENYVVENIDCKVLETILLNPSKNDRKLELEKYLAPFFNSSKELKTSLKEFIKLVIGYKFSISKLFNIELEKDISISLDGSDFDDKYDELEKELSTKIETLSSMKNLYDALFLKTLFGNSKHTSISSKMVEYYENHKEDLAYLKKILKYDRKEYRKVFKTTEKNVCLYDKYIHNAITYEEFKKELLKSLEKVIDVLDTDLSNQYVSIYRDKIEQGNFLPRITSTSNGKYPYQLNKSELKTIIENQEKYYPFLKEKVKDDYKLIKLLSFKIPYYVGPLVNENKSEFAWMKRNQGYENIKITPYNFDEVIDKESSAENFITRMLGHCSYLLKEPAMPNNSILYSEYKVLNELKQIRVNNERLSKEFQHRIMEEFFRKEIGTLTDKKFKNYLIHSREFDMYSGDLTVTGYSADGKFANTMSSYIDFYGDEGFFKGTNLKIEDAENIIKWITIFEDKDILATKIEKEYPILKSIMPKIIKKKYTGWSSLSQKLLTTPYYYDEETSTKKSIMDLMWETDKNFMQIITDEKYKFQDMIAEENTEKVSSKLNYSLVDNLSTSPATKRGIWQALKVVEEIVDYMGYEPNAISIEMARGDEKKVRKDDKKKYLSNLYEKAKETTDDYNRLKKELNSQEKIDSEKLFLYFIQEGKSLYSATPLDINRLSEYEVDHILPRTLIKNDSIDNKALVLKEENQNKAASLTLPEEFQKNKTWWEHLKKNGLISAYKFHNLIRKKYTEEDIQGFINRQLVETRQITKHVANILQQLHKDSKVVYLPANLSHNYREKFELYKFRDLNDYHHAHDAYLAAVLGEYKNHCNLKFNYEDLKELNKELYNSGRYKELKYGFIINSIDSAFTHFNAKTGEVFDIEKFKETVENTLYRNDILISRKTEIRTGQYFKEKILPKGKGNVSIKEGLSPEKYGGYTSIFPSYLSLIHYKKKDKLIGIPIVVDEKAKKNSQLKSDFIGSHLNIKEYSEEKSQIPFEVLIIHKNHPVYIKGYSTSHKNCELSNANELKIPRNKMLKWKYVLNKILNNKAIPKDKSVDEDNLLNISNEILTFLLDEKKNYPLFQNEIEKIQNKICYPKLSQEQIEKIIIEILKIYSCSSTNANLSDFGLGDRMGRLSGFNIDSGTIINKSVTGLRTRKYEF

SEQ ID NO: 4681 - protein, 1336 aa, unidentified
  REGION 1..1336: note = Description of Unknown: Cas Enzyme sequence
MKNNGSYNIGLDIGTNSVGWAVTDENSQLLKFKKKNMWGVRLFDEGMTAAATRNYRSNRRRLQRRKNRIALLQSLIGDEVLKVDDTFFIRMKESFFVKEEKPHRNDYILFNDKNYTDQQYYDEYPTIYHLRYKLITCREKMDIRLVYLALHHIIKYRGNFLYEGQNFTLNDVPITEEIVTLLELLRDRAEIEFFDVARVTESIIHMLEDKKTSTTDKVKRVLSDIQMPAEDKKKFKEVLNAIVGLQVDLSKIFELEEPLKIRLSEELEEEKLNVLQDYMDVIEKVQKIYSFGVLQGMLNGKTFISEAMIAKYEKHKQDLAVLKKLFKAHFPNEYNNMFRKYFDNAGKPLFNYVNYIGNQYIDKKIAKEDLYKTIKKILDTKKELAETCKEYQYCLDAIKNDDFLNLQNSRDNGAIPYQLHKEELIRIIDNQSSYYPVLQRERGNLIQLLEFRIPFYVGPLSSNPRGRQFAWVERKVKGEKVYPWNFEEVIDIEATAEKFIQRMTNKCTYLLGEDVLPKYSLLYSEFEVLNEINKIRVNGRLLSVSEKKNLLNTLFKTEKIIKEKRFKEWLVENQICRDFNVKVEGFQKEGQFSTSLTSYIDFKRIFGEVNERNYQMIEDIILWVTLFTEKDIIERKIKKTYAQVTDEQIREIKKLRDSDWGRLSRKLLAGIIVTDNYNNPRTIMDYLRDTNMNLMQIISSDKLGFKKIIEKDTRFFDDADNLEEVVNGLPGSPAIKRGILQTMKVLEEIVKVKGRMPDNIFVEFAREDQESKRTQSRMDNLMKLYQKMKEESHSFFNEIAHLELQKKNLENNKLDTLKLFLYFIQNGKCMYTGEPLDIHNLSLYEVDHILPRSYIKDDSIDNLALVLKKENQRKADDMLLKREIIDRQRTWWNYLLECGLISKKKFDNLTRDHIDPDTMKGFIQRQLVETRQITKHVVKLIKACYPYSNIVSVKAQLCSDFRQQFNLYKCRTVNDFHHAHDAYLVSVIGNYILRRFPKLSEEFNYGQYRKIARDNASKYKFGFVISSMTSYSKTIDYNTGEVFEWNPDFEIGRIKKVLDYKDCFVSRKKEELTGEFYKQTIYGKNDARASIPLKKGLDVRIYGGYTGEQKAFYSVVEYKKKNKIHHAIVGIPIYIAKLAEQNETELIRYLLQAGYEDVKILKKKILKYQLIKYDGGLFYMVSDSEIINAKQLLVDQKYLEVINAIERGDISDINVELLHELYFHLVDKIKTHYHFYNDIADRLIDSANLFCDLSLENKAKFVEEMLKITQVNSTNANFKRFGFPGLGDRVGRMAGKNLVVDKIEFIDTSVTGMFETRQKGSELWDSEQLSLPTRVS

SEQ ID NO: 4682 - protein, 1350 aa, unidentified
  REGION 1..1350: note = Description of Unknown: Cas Enzyme sequence
  MOD_RES 1067..1076: note = Any amino acid
  MOD_RES 1276..1281: note = Any amino acid
MINKKEYNIGLDIGTTSVGWSVVEANNQKIMRKGNKQLWGVRLFEEANTASERRNYRSARRRYNRRKERIKLLREIFADEINKVDRNFYQKLEETKFDEKDTINKTILLTDKEKEEITKYKNVYKTIYHLREELINNSEKKDIRLVYLAIHHIIKYRGNFLYQGSDFNLNNLDIEEKLNDLFLLLSRDIPNLEIPEEYEDLIEFKKIEEDLLLESKNDTKVLLQKDLESVTDKNFATEFGKLLTGNSANINKLLMLETDEKINMSFSSIDYDDNCDKYQSILEEKIEILDVLKQIYDAVFLKKIFNGENNLSISSLMINYYNQHGKDLSLIKQVFRNYRKPYNKIFRSSKDKSKMCFYDQYISNKITSDEFKREISKLLDELISSYELTTEQDEILNLKSRINSNDFLPRITTTDNGRFPYQLNEIELIKIIENQGKYYPFLLEKLDSNETYKIVKLLEFKIPYYVGPLVSDEKSKFAWLERKVNDVKITPYNFDEVVDKEKTAEKFIKRMISHCTYLLDEPALTNNSILYSKFKVLNELKQIKVNDRKIELDLQQKIIEELFKKVSGQISERKFKKYLISSHQYDMEKDLRITGYSAENKFANTMQSYIDFFGESGIFENTNYNEEDAEQIIEWITIFEDKDILENKIRNSYKELNENQVQKILSKKYKGWGKLSKKLLTTKYYKDKETELYKSILDLMEETNENFMQIINNDKYNFQKMIQEFNNVKYEDELNYKVVNELVTSPATKRGIYQSLKIVKELVDYIGYEPKNIVIEMSRGDEQKIRKDNKKDYLKKIYDSCKGSIDNYKKLRHELDSHEITNQKLFLYFIQEGKCLYSGEPLNIEDIENQSLYEVDHIIPKTLIKDDSIDNKALVIRKCNQDKSANYVLPKQYRTDYQKAWWKHLKDCKLISAKKFHNLIRDKYSEEEINGFINRQLVETRQITKHVVNILKKYYKNSNVIGLKSSLSHNYRERYELFKFRDINDYHHAHDAYLAAVLGEYKENFMNKKINYDMIKELNKEILNNAKIDNRNLKYGYVINSLDENLTDIALKLSESMSDQNTGELLXXXXXXXXXXNKKVENTLYRNDILLSKKTEVRTGKFYNDTIRKKNVGTIPIKLNMPTETYGGYSGMETKNLILVKYNENDKKIIGIPIVLTLRNNSREIDEFIKTQIKLKDNESYTIVKSLIPFGTEIIYKNQNVFISGYAVRAKTCEVFNATQLKLGKSQMIKWKRALQYLLNDVDKYIEDANNNVDDIYAFLVNQDLYPLFATSIDKXXXXXXNIKFEDLDMVQKKKIIKEIFKMYHCNPVNANLSMFNLGERIGRLSGNNITSGIIISKSITGIRESRYEF

SEQ ID NO: 4683 - protein, 1345 aa, unidentified
  REGION 1..1345: note = Description of Unknown: Cas Enzyme sequence
MENYNIGLDIGTTSVGWAVVNDATNKVMRKGGKALWGVRLFDPAVTAEDRRAKRGTRRRYDRRRERIKLLQDEFKDEINKVDSNFFLKLEESKYNSKDIKNKTVLISMEEEKAIKKYNQEYPTIYHLRQKLMNSNEQVDIRLVYLAIHHIIKYRGNFIYEGNSFSVNNLNIDNKLKEIFLSFSEDVDELDISEECINNINYKQLANIFNEQSKNDLKVKLTSELASYSLNKNFISEFCKLIIGNKFSAKKLFNLETDNDVSLSFDGTDFEDKAGDLESLLNDYLEVLEQLKELYDMVFLKKIFGGSKETTISGLMVERYNQHKKDLKLLKDTFSSDRKIYNKIFRSKKDIKDDKDMCLYDLYIHNKLETTDFLKEIKKYINTDNFIITDEDFLKRLENNEVLPRITSKENGKYPYQLNKDELVSIIEHQGKHYPFLLNKTDDGIYKLVRLLEFKIPYFVGPLVSKDMSENAWMLRNEGKQGVHITPYNFEVVNLDKTAEIFIKRMISHCTYLLDEEALPNNSILYSEFKVLNELKQIKVNGEHLTQDEQHKIIEELFMKTSGTITENKFREFLLNTLDYNFYENELKITGYSADGKFANNMQSYIDFFGENGIFEGTSYNTNDAEKIIEWITIFDDKDILKRKVENEYPELKKNNQVKNILNKKYSGWGRLSRKLLLDLKVADKKTNILKSIMDLMYETDENFMQIINDDKYNFQKLIAKENKIEETTNELSYDVVENLATSPATKRGIYQALKVVKEITTYMGYEPKNIMVEMARGDEKKIRKDDRKKYLQKLYDNIKDEVDSNYKNLKKELAKEEKIDTDKLYLYYLQEGKCLYCGKPINVDDLNTKNSLYEIDHILPRTLIKDNSWDNRVLVCRSCNQKKAASLVLPKEFRNDYTKSIWIRLKNNKLMSNKKFYNLTRKSYSEEDIKGFINRQLVETRQITKHVANILNCFYPKTKIVYLKANISHSYRDKYDLFKFRDINDYHHAHDAYLAATLGSYQEKYLHYDLDYNKINEFNEKLIKNEDYKRLHYGIVVNSLDEEFQSAFAEIAPRLINEETGELLFNAKKFNDLVEDTLYRNDILISRKTEIRTGKLYKETIYKRGKGNIKIKENMPTETYGGYSNMETSYLTLVKYGNKTKLIGIPMSIANNKDVKVKLDFIKEHLDLKSLDNIVILKDNIPYDVSINYKNQDVYVKGYSTANKNCELSNAHQLKIKKDMMKKCKYVLNKVYKNKYDDITNMDIENAITFINYLFEIKIEFPLFSKEITKIQDNINLTECSFEQLANIIKQLLIIYHCNSKNGNLKEFGLSDRIGRLSGANVTGGDFIFTSVTGLKEKTASYDGE

SEQ ID NO: 4684 - protein, 1345 aa, unidentified
  REGION 1..1345: note = Description of Unknown: Cas Enzyme sequence
MVTKKEYNIGLDIGTNSVGWSVVETNNQKVMRKGNKALWGVRLFDKAESAELRRMQRSTRRRYDRRRERIRLLQEEFRNEIDKVDKTFFEKLQESKYQEKDRTNKSIVLTNEEKKLLKDYQNKYKTIYHLREELITNPEKKDIRLVYLAIHHIIKYRGNFLYQNSNFNINNLDIKEQLKTIFTLLFNNIQALGIPEDYLQMIDFDKIERDLLNNSKNDVKKLLQDDLEDIVNRNFAIEFGKLMVGNNGNLKKMLLLESDNKIDISFSGNDYDDKYNEYQNVLGENIEILDTLKQLYDCIFLKKLFKENQNIYISSLMVKYYNQHREDLNFLKDLFKSNRGLYNKLFRSGKDLCIYDKYITNKIDSEEFKKEINKLLVDLFDSDEKNINQNLIDEYTLNVKEKIENGEFLPKITTTDNGKYPYQLNKVELIKIIENQGKYYPFLLEQINDNKTYKIVKLLEFKIPYYVGPLVSSKRSNNAWLERKIDDVKITPYNFDEVVNKEDTAEKFIRRMISHCSYLLNEYALANNSILYSKFKVMNELKQIRINDRKIELPFQQILLNEFFNKTTGTITEKKFKNFLMSSGQYNMDNGELRITGYSAENKFANNMQSYIDFFGENGIFENTNYTIEDAENIIEWITIFEDKDILEKKVRDNYKLLNENQIKQILTKKYTGWGSLSKKFLTTKYYKDRETELYKSILDLMEETDENFMQIINNDKYDFQQMIQEYNIIDENKKLNYELVEGLATSPANKRGIYQSLKVVEEIVNYIGYEPKNIVIEMAKNDEEKVRKYTRKEYIKKLYDGCKNSIDNYKKLKHELDSHEITSQKLFLYFIQEGKCLYSGEPLNIEDIENQSLYEVDHIIPRTLIKDDSIDNKALVKRECNQNKKANYVLPIEYRNNEQKKWWKHLKDNGLMSAKKFHNLIREKYSDEDISGFINRQLVETRQITKHVANILKNYHKNSNVIYLKADLSHNYREKYDLFKFRDINDYHHAHDAYLAAVLGEYKEKFMKKKINFEIIKELNNKIVEMDEGKKKNLKYGFIINCLDENLSDIVCKMSESLMDKETGEILFDAHKFNKKIEDTLYRNDILISRKTEIRTGKFYKETIYKKGKGIINIKSNMPAKIYGGYSNTNTKYLMLIKYNDNQKKIVGMPMVVAVRNNLEEIDDFIKSQIHLKKNSSYEIIRNVIPFETEILYKNQNVFIKGYSVGKKNCEISNALQLKINKSQMSKWKYALQYILNNKKEYLSDAEIYANEIIDFLVNQNIYPLFNKEVDKIKNNFIFDNLDLDKKKKIIRELFNMYHCNSVNANLSEFGLGDRIGRLSGNNITSGAIIFKSITGIWESKYEF

SEQ ID NO: 4685 - protein, 1343 aa, unidentified
  REGION 1..1343: note = Description of Unknown: Cas Enzyme sequence
MAKRYNIGLDIGTSSVGWAVVEVDTQKIIKKGKNKKSLWGVRLFDGAETAESRRQSRSTRRRYDRRRQRIQLLQEEFKNEIDKVDVNFYTKLKESKYNKSDKINKTIIISKDEQKLINEYNKKYPTIYHLRNKLVTSDEREDIRLVYLAMHHIIKYRGNFIYQGENFSVNDLNVKDKLICLLENLTELYPELEIDEDFSDKITDDIIQDSLLNPSKNDMKVNTNELLSEITSNSKFISEFIKLLNGNKFSIKKLFGIEELEEDIQISFSNSDFDDNSEKLEQAVPDKIETLNIMKELYDMIFLKKLFVGSDLTNLSALMVERYNQHKDDLKFLKSIFSIDRKTYNKIFRNGISKCLYTKYITNEISNDEFIKEIEKNLPNEYEGSDEKLRMDNGIFLPRITSTENGKYPYQLNEDELIKIIEKQGKYYNFLLDKIDDKYKIVKLLEFKIPYYVGPLNKNSQFAWLEKNSNEKITPYNFDKIVDKESTAEKFIKRMISHCTYLNDKADENGNIIEENYALPNCSILYSEFKVRNELKQIKINGDSITNENQQKIFEELFKKTNGTITEKKFKDYLKVCPDYYPFEGNFNITGYSADGRFANNMQSYVDFFGETGIFDGTNYTLDDAEQIIEWVTIFEDKDILKSKVLNNYDKLSNEAVKKILIKKYSGWGGLSKKLLCGIVTKDKKSGVGKTIMDYMIDTKENFMQILNNDEYNFQKLISEYNMGNNHIKLNYGLVENLATSPSTKRGIYQALKVVDELTKYIGYAPEKIMIEMAREDEKKVRKDDRKTYLEKLYKDNKIKIDNYNKLYSELDNQDKIDSEKLYLYFIQEGKCLYTGEPINIDELNNDKYEVDHIIPRTLIKDDSIDNKALVLRRCNQDKKDSFVLPKEYRTKRMLDWWSHLKNVKLMTAKKFHSLTRSEYTDDDIQGFINRQLVETRQITKHVADILGSLYPKTNIVYLKANISHNYRERYELFKFREINDYHHAHDAYLAAVLGEYKEKYMNDKIDFESVKELNKKFYENGDYKKLKYGFVINCLDENEFATVSKITKNFVDDKTGKVLFDVSIFNRTIENTLYRNDILVSKKTEIRTGKFYDETKKKKCNDGIKLKGNMPIEMYGAYTSVKPSYAVMVEHNCKKGKNRKMVGMPIYLKTEEEKVNYLKMKLGLNEDDSLEILSKPIPFYAYLNWDNQLCYLVGASDKVEVVNAKEFNYDKEFYINHKYTLFKLFNNKNYEIEDSKYSQELSEIIKYIVDKIEKEYELFKNLITDLKLITKYNENFDFSVENKEKIIIQLTKLLNCKSDNANFKFLSDSYSSAFGKKNGRTIEHCSYVSKSVTSIHEAINEL

SEQ ID NO: 4686 - protein, 1369 aa, unidentified
  REGION 1..1369: note = Description of Unknown: Cas Enzyme sequence
MNNEKMNTKNYSIGLDIGTSSVGWAVVNSDNFKVIRKGNKALWGVRLFEEAKTAVDRRIARGSRRRFDRRRKRIKLLQQLFRDEINEIDPLFFQRMKESFYSEKDTVNKKIPLTKEEHELISEYYNKYPTIYHVRKAVMEGTETDIRLIYLAIHHMIKYRGNFLYEGDFKVQDLNIVTKIHDVFETLEENNETLEYINLEFTNEELLESALKEESRIDRTKKISEALNQIVPKNFISEFSKAMLGNVFSVVKLFNLDSEDLKTNFKGSSFEDNYNEIEKVTGNYCDVLNQMKELYDSLFLTDLFKGKTNTSLSALMVERYNKHKEDLKETKKLLKPNKLIYKNIFRTPKNAKVNDFCSYDKYIHNMITLDEFQKLIQKSLIELYGEEQYQDKYSNWLENDDFMPRITDSDNGKYPFQLNKEELLTIIKVQGKNYPFLLEKIENNYLKEKEDDLYKLVKILSFRIPYYVGPLNTSTSNTDVTNEHAWIKYQDKGISHLITPYNFNELIDLDASAEEFIKRMISHCTYLLKEKAMPTNSILYSKFKVLNELKQISINDHRIDHDLQMKIYHELFLKVGNVTDKKLVNYLKQQPDMSMYNQEIVVRGYSADKKFANNMQSYIDFFGSDGIFIDTKYGIEDAEQIIEWITIFEDKGMLERKIRKNYSDLSDIKIKSCINKRYKGWSSLSKKLLTGIYTEEGKTIMDLLAEKNPDPNKRNQNFMQILNDPDYQFQEKIAEENEIDTSDDKIRYSVVDELATSPANKRGIYQALKIVEEIVDYMGKEPQNICVEMARGDDKKKSRKDNRKKYLQNLYEKYSKNIEEYKKLKHILDSQDEQSFNNEKVFLYFIQQGKSLYSGKAIDIDQLEQCEVDHIIPRTLIKDDSIENKALVYRNENQLKAASLVVPSEFRTPERIRWWKLLFDRRLISKKKFKALTRKEYSEKDIEGFVQRQLVETRQITKHVANILKAYHKDSNVIYLNAGLSHQYRDRFEMFKFRELNDYHHAHDAYLATVLGIYQKKIFRQSIDIEALKTMTKELYEKRNYKELGYGLIINSLNNEFLKYDKQTGEVKTDFDADLFNKIVTDTLYRNDILISKKPNIKSGKFYKETIHSKDEKGYSLSIKSNLPCKLYGSYQDIEVSYLKLIEYTKKDKTLRKLIGIPTIYTVINNEEQLNTYICEQLNLTAKDSYTILKDKIPFDTLLFYNGQLTYIRGYSVAKKTCELANAYELKINRCNMTKYKYLLKMIFSKKQKTVIPSESSDSDFKDNEKDTFLRTEDLITLLIEFGKENYPLFQGVLKKLSNYRENSSHSLEENKEIIRQLCIMYKADSVNGNFAFASNMTSREGRLSGKNVTTGKLIFKSITGIYEEEYEF

SEQ ID NO: 4687 - protein, 1337 aa, unidentified
  REGION 1..1337: note = Description of Unknown: Cas Enzyme sequence
MENNKKYNIGLDIGTNSVGWAVVESGQQKIIKKGGKALWGVRLFDTASTAKDRRLKRSTRRRYDRRRQRIKLLQDEFANEINKVDSEFYKKLQDSFLSSNDKNNTKTELTDFDKYNIFSNNIRKKINNISEEKKYPTIYHLRNDLVNSKDKKDIRLVYLAIHHIIKYRGNFLYENSNFNVNNINLKEKIEETFNHYIEECMTGEFNVTIDYEKIADILLKDSKNEIKDLLKEELLVIDTYNKGFSSEFVKMIVGNKFKVEKLIPVSNEEKSVSVSFNGNDFDEEYDKLVELLGKNIEILEEFKELYDNVFLKRLFKGSEFNNISSLMINIYDEHKKDLKMLKKLFKINKKIYNELFKNENCKYEEYIHNKITQEDFCKIILNSYEKLGINEESIDFYNKNLKSKIENNSLLPRISEPSNGKYPFQLNRDELIKIIDNQKLYYNFLGEKINDKYKLVKLLEFKIPYYVGPLVSSDKSCFAWMERNNNKKITPYNFDEVVNKELTAEKFIKRMISHCTYFINEPALPSNSLLYNKFKVLNELKQIKVNDRKMTLEQQQNAIKDLFEKTSGTITEKKFINYLKQTKEWDMYSEINIKGYSADKKFANNMQTYVDFFGKNGIFDNTNYNEENAEEIIEWITIFNDKEILESKVRNTYPDLTDNQVTKILRKKYSGWGELSKKLLTLPYYKDKETEVYKSIIDLMFETKENFMQILNNDEYKFQNMIKENNKITNTKKLNYKDTVSELATSPAVKRGIFQSLKIIEEIVDYMGYEPESVSIEMSRGDDKKERKPDRKKYLTELYKKSKDSIENYNKLNKQLGEKEIDSQKLFLYFIQEGKCMYCGKSLNVEDMISYEIDHIIPRTLIKDDSIDNKVLVHGKCNQNKAASFVLPPYYRSEYNKKWWTRLKNIGLMSNKKYNNLVREKYSEDDINGFINRQLVETRQIIKHVANIIENYYDTKVIYLKANLSHNYRERYELFKFRELNDYHHAHDAYLAAVLGEYKEKYMKYNITYDLVRTLNNEIKEKGQTEKLKYGFIINSLDSDVSSVIDGLNKNKINKETGEIIFSPNAFNKTIENNLYRNDILISYKTEYNTGEFYNQTIYGKGKGNIRLKDNLPTEIYGGYSGVNVSYFMLVEYKGKRKIIGIPTFLTTDMNKINEFIVSQINCIDYRILKNRIPLNNELLFNNQRVLISGYSIAHKGNELRNFVELKVSKEKCIRWKYALNRLLNNKKDVINDLEYRQDLVEFLKFLISLRGEYPLVDGDLSKIKDYFDNNIHSLELEKIEYLTKQVLLIFNSSKKSASLSNYGLKNEMGRLADKKLTQGTIIYKSITGIREKKYEF

SEQ ID NO: 4688 - protein, 1353 aa, unidentified
  REGION 1..1353: note = Description of Unknown: Cas Enzyme sequence
LEVKNIAYNIGLDIGTTSVGYAVVNRYTNKIIRKNGKSFWGVRLFETANTAEARRLARGTRRRFDRRRKRIKLLQEEFKNEINQVDINFFQTLKEFGLHEEDRSINDNKEFFKNYNKKYPTIYHLRKELIEETKQIDIRLVYLAIHHIIKYRGNFLYSQNNLDINEINITDKLKEIFEHLNEVCPEIILDEMIFENFDFNLLENILYEESKKDREIKLKNLLKVYFKKDFCLELTKLLIGNKFNVCKLFDIEDDKITISFKDSTYEDKYSELESLLENKIDILDELYDLYTALFLKSLFKGKETTSLSSFMFDKYIKHKEDLKKLKLIFTDNRDIYNKIFRTDKKIGERCLYEQYIHNIKLNKEIYTSEEFYKDILEYFKVINDDTKKELIEECKKEIDLDHFIPRITDTENGKYPYQLNKSDLIKIIENQGKYYPFLLNKIDDGSTYRILSLLEFRIPYYVGPLNDTTNSKEKNPNAWMICKGQKQIITPYNFNQVVDLESSAEIFIKRMISHCTYLLDEYALPNNSILYCEYKVRNELKQIKVNEERLSLDFQNKIFEELFLKNDKNITNKMFVDYLRYSGKYGNEELIITGYSADGKFANNMIPYFDFLGNEGIFAGTNYKLADAEEIIQWITIFEDKDILKSKVSANYSLSDQSIKKILGKKYKGWGNLSETLLTTKYYYDKSDSTYKSIMDLLKSTQANFMQIIFDEAYNFQKMIQENNNIQESNKIDYSSVNKLATSPANKKGIYQALQVVSEIVQYMGYNPNSISIEMARGDEEKKRKDTRKNDLIRKYDKHKSEINNYNKLVKELKNTNKIDSEKLFLYFIQEGKCLYTGTPLDVDNLEIYEVDHILPRSLIKDDSIENKALVIRSANQNKSDKLILPKEYRTDQNRSWWIHLKKVGLITLKKYNNLCRNFFSDEEINHFINRQLVETRQITKHVANILQSYYKKTEVIYLHANLSHNYRLKYELFKYRDLNDFHHAHDAYLAAVLGEYQKNYINNINFEQLREISQELHEKKLYSDLRYGYVINSIDKRVQTYHQKTGEIFDAEKFNKIVENTIYQNDIMVSRKTEIKTGEFYNQTKNSKNAKVNEKAIFPLKDNLDTKKYGSYGSSNCAYIILLNVIKKGKEKQIMIGIPIIIHEKAKNNSKIREEFIRNYLDISENDEVKIIKDYIPFNTLINYEGQSVRIKGYSLSKKGFELNNAMQLKLEKKLAQEWKYTLNYLFNNKNIPRKKDSDGKWIEDSIITDDEFNQQLNQIFIYLIEKIKKYYPLYKNVANSFGKFVFDEYDWDTKKYLILELFKLLHANASNANLKKIGLGEAAGRLNEKKIKHGKIIYQSVTGIKEKDYEF

SEQ ID NO: 4689 - protein, 1144 aa, unidentified
  REGION 1..1144: note = Description of Unknown: Cas Enzyme sequence
MDNNMSKKILSLDLGITSIGYSILEEFKNDRYSLVDYGVSMFDKATDKDGNSKKLLHSASASTTKLYHLRKERKKALSQLFEEFGFGKKKYFLYQEKQNKYKNKWELRAKKAFEEKLKIEELFTILYTLAKHRGYKSLDSDDLLEELCSKLNIIMDEKKAKKADDEKGQIKKALLTIEELRKDSDKTVAQIIYELEMQKENPTFRNHDNYKYMIRREYIDEEIENIILSQVTFGLFSDTFDSDEFIEKLKKIITFQNPSTNDMSLFAPCEYFDEFKSAHQYSIISDIFKMYQSVSNINFNKEKTPITKEQIKLISDDFFMKIKKGKNIPDIKYKDIRKTLKLSDDIKIFNKDDEKLTITKFHFLCSLGKIDNTFIVEALEKKNGYEILKGIFEVLQLSKDPKDIYEQLKEKIDDQTIINLIKNKTGNSLNISAEAMIQFIPYFEDGFTMDKIKGKLNLNRNENYSEFKKGIKYLNIKQFEYDDKLEINNHPVKYVVSATLRVIKHLHTTHGIFDEIRVESTRELSLPTKEQVSKAKKSGKPLSKKQKTRESIDNVNKKNEAKYLAVLNNTVYIDTSNKYNKNIQKYKERLVIYEEQKRRDIYTWKGIELEDIFKDKLEIDHIVPQSLGGLSVKHNKVLCFKSSNAEKSNRLPMNYIKDTESFIKNVKYLYSKGCINGKKLKNLLATNLDETFKDTFQSKSLRATSYIEALTAQILKRYYPFKNEKKQKDGSSVRHIQGRATSNIRKVLKVKTKVRDTNIHHAIDAILVGVTNQSWLQKLSNTFRENMGVIDDKARENIKKDMPLFEMIIDDEVQYLEPKELIEMIEDRYNEFGEDSIFYKDVWGKTKAVNFWVSKKPMVSKIHKDTIYSKKQDGIYTVRENIINQFINLKTTISTTSVKFEESFKKNILNKMYLFKTNPNDVICKVVMKRAEDIKVLLDSFVDIDTKDKELVSQSKQKLDELIHKDIKDNNRNVVRKVKFYQTNLTGFNIRGGLATKEKTFIGFKASLEDEKLHYTRIDVSNFDKIRKENDNSFQVFKNDLVFFIYPDGSFRGGKIVSFLEDKKIASFSNPKFPSASEFQPISFCKIGKDSNNNPKKSGAKQQGINASIGIIKLNLDITGNIKSYQKIGRCESELLEFTKDIKV

SEQ ID NO: 4690 - protein, 1118 aa, unidentified
  REGION 1..1118: note = Description of Unknown: Cas Enzyme sequence
MNKKILSLDLGITSIGYSVLKEFENDKYSLIDYGVSMFDKATDKDGNSKKLLYSASASASNLVNLRKERKKNLAKVFEEFGFGEKEYFLYQEKQNIYKNKWDLRAKKAFEEKLKIEELFSIFYVLAKHRGYKSLDSGDLIEELCIELNIPFEEEKTTKKDDEKGKIKSALKKIENLKLEYPSKTVASIIYEEELKKENPTFRNHDNYKYMIRREDINDEIKKIIFSQEKFGLFSDDFNSKEFILQVTKTIDDQKESSNDMSLFAPCEFYKEYKVSHQYSLIADIFKMYQSVSNITFNKKTDKITKEQIKNIADDFFDKIKKGKNIADIKYKDIRKILNLDDCVKIFNKEDAKLTIIKFHFVNNLSKIDNSFILKAFEKENPYQELKEIFDTLGWEKSPKSIYEKLKGKVDDKTIIELIRNKAGSSLRTSSYAMVQFIPYFKEGLTLDEIKQKLELNRSENYSEFKKGIKYLSLTQFEKDDNLPINNHPVKYVVSATLRLIKHLHTTYGAFDEIRVESTRELSLNEEAKKEIDKANRALEKKIDDIVANKEYQKIAEYYGKNLRKYARKILMYEEQNRRDIYTGEGIEFEDIFTNAVDLDHIVPQSLGGLSVKHNFVLVHRDSNMQKSNQLPMNFIKDKGDFKNRVEDLFKEHKINWKKKINLLATNLDETFKDTFESKSLRATSYIEALTAQVLKRYYPFANETKQKDGSSVRHIQGRATSNIRKILQVKTKTRDTNIHHAIDAILIGLTNHSWLQKLSNTFRQNLGVIDDEARANIKKDIPLIEGIEPKELAEMIEDRYNEFGEDSVFYKDIWGKTKAVNFWVSKKPMVSKVHKDTIYSKKENGIYTVRENITNQFVGLKLTTTTKADEFMKKFEKDILHKMYLYKTNPNDVICKIVQNRANEIVELLKEFVWIDAKDKEAMSEAKTKLDELIHLPLIDNNGNEIRKVKFYQTNLTGFEIRGGLATKEKTFIGFKANLENNTLKYERIDVSNFQKIQKENDNSFSLKGYISIKVFKNDLVFFIYPDGSYRGGKIVSFLDDKVITAFQNPRFPSTSEFQPESFCKMDKGKKSGSKQQNINKATGIIKLNLDILGNIKSYQAIGEVQSELLESLKKIKS

SEQ ID NO: 4691 - protein, 1138 aa, unidentified
  REGION 1..1138: note = Description of Unknown: Cas Enzyme sequence
MVKYKIENLERKMSKKILSLDLGITSVGYSVLEELEKDKYSLIDYGVSMFDKPIDKDGKSKKLLHSSIKSTTKLYNLRKQRVKKLAHLFEKYNLGLATELLNQEKENRYPNKWRLRAKKVFEQKLTVGELFTILYLIAKHRGYKSLDSDDLLEELLLELGFEIEEKKSKKDDEKGKIKKALKTIEELIVKNPHKTVAQIIYEEEIIKDNPTFRNHDNYNYMIRRQHIKEEIEKIVVAQYEFGLFENDFEVKSFIKELIESIDDQKDSSNDLSLFGNCQYYPEFKVAHQYSLLSDIFKMYESVSNITLNKTKITKEQIEMVANWFFKKIEQGKNFSEIKYQDIRVVLKLSDEVKIFGKEDYYLDKKGKRVHHTITKFHFLSSLGKIDNGFIKVLFQKANSLEILDEIFDILKTEKSPKTIYSKLTDTFLRYDLIEDKKIRDETVINLIKNKSGKSLNISAYAMRKFIPYFKDGLSTDEIKEKLNLNRDENYANFKKWIKYLHIKNYEKDDNLEINNHPVKYVVSATIRVIKHLHSTYGVFDEIRVESTRELSQNEETKKAIEKANKENEKKFKEILENKEYQKIASDYGKNLKKYARKIILWEEQDKLDIYSGKVIDFDDIFSNRVDIDHIIPQSLGGLSVKHNLVLAHRDENVKKSNQLPMNFIKNKDDFVKRVEYLFSEHKINWKKRKNLLATTLDEAYQDTFESKSLRATSYIEALTAQMLKRYYPFPSKNKQRDGSAVRHIQGRATSNIRKLLGIKSKVRNTNIHHAIDAILIGLTNHSWLQKLSNTFRENIGVIDDEARAKIKKQIPIIEGIEPKELVELIESVYNIYGEESIFYKDIFGNTKSINFWVSKKPMSSKIHKDTIYAKKPNGIFTVREDIIKQFVGLKVTVKTEPKKFIESFEKKIANKIYVCKINPKDIICQIIKERAKEIELLLKSFVTLNHKDKEQISQAKEKLDTLIHKPLIDNNGNIIRKVKFYQTNLTGFDIRGGLAVTEKTFIGFKAIKGDKKIEYKRVDASNFQKIKKENDGSFKVYKNDIVFFIFSDATYKGGRVVSFLEDKKIVAFSNPRFAPNAKSQPISFVTIFKGEPYSHKQHSINKAIGIIKINLDILGNIKSYQKFGEVSKEIEAKILHME

SEQ ID NO: 4692 - protein, 1120 aa, unidentified
  REGION 1..1120: note = Description of Unknown: Cas Enzyme sequence
MSKKILSLDLGITSIGYSVLENISLNQYKLLDYGVSMFDKPTDKDGNSKKLLHSASVSQTKLYNNRKIRKQNLALLFEEFSLGTKDDLLKTQKENTIINKWELRGKTVFERVLSTEELFAILYLISKHRGYKSLDSGDLLEELCEELHLESSNPKEKEKKDDEKGKVKQALKTVEHLKQTNPSKTVAQIIYEVESSSQIPTFRNHDNYKYMIRREYINEEIEKIVNAQKDFGFFTSTFDTNLFFKRLKETIDDQKESTNDLSLFGQCEFYPEFKVAHQYSLITDIFKMYQSVANITFNQNIKITKEQIKLISDDFFTKIKQGKNISDIKYKDIRKILNLQDEIKIFNKDDERNDKGKKVPNTLIKFHFVNNLSKFGDVFGEILDKPNKYEILKEIFDTLKLEKSPKNIYLKLKNILDEKTIIELIKNKSGSSMYTSHEAMIQFIPYFEDGLNLTEIKEKLNLSTEEDYSKFPKGIKYLLTSQFEKDNNLNLNNHPVKSTVSAVLRVVKHLHTTYGAFDEIKVESTRELSLNDEAKKEIEKANRENEAKFQAIVENKEYQAIANQYGKNIKKYARKILMWESQEFLDMYSGKAISVEDIFTNVVDIDHIVPQSLGGLSVKHNLVLAHRDTNLQKSNTLPLNFIQEKQSFINRVEKLFNEHKINFKKRKNLLATNLDEIYKDSFESKSLRATSYIEALTAQILKRYYPFQASFKNVNNVSHIQGRATSNVRKVLKVKTKTRESNIHHAIDAILIGLIDKSWLQKLSNTFRENFGKIDDEARENIKKVIPLIEGIEPKELVDMIEAKYTEFGEDNIFYKDIFDKTKAVNFWVSKKPMSSKIHNETINGIREGGFFTNRKAIIPAFIGLKLSISTTPQKFEELFKKEILEKLYLFQTNPKDVICQIIINRANEISSLLETFQTIDMKDKETLSEAKAKLENLIHSPLIDQNGNIVRKVQFAQTNLTGFSIRGGIATKEKTFIGFSAKLLGGKLEYSRIDMANLSKIKAQNDNSFKVYKNEVVFFIGKDGRYKGGKIVSFLEDKVIASFQNPKFPAIIEMQPESFCTIKTGKDGKPEKGSTKQHYQATAKGIIKLNLDILGNIISYQSIGNVESELLEFLKNIKR

SEQ ID NO: 4693 - protein, 1116 aa, unidentified
  REGION 1..1116: note = Description of Unknown: Cas Enzyme sequence
MKKILSLDLGITSIGFSILEELENDKYFLIDYGVSMFDKSTDKDGNSKKLLHSASASASKLVSLRKERKRNLAKLFEEFGFGENEYFLYQEKQNIYKNKWELRAKKAFSEKLKIEELFSIFYAIAKHRGYKSLDSTDLLEELCKEKDIPFNEDKKSKKDDEKGKIKAALKNIENLKIEYPNKTVSTIIYEEELKKDTPTFRNHDNYKYMIRREDINDEIKKIIKSQEKFGLFDKYFKTDNFISKLIQTIDDQKESSNDMSLFAPCEFYKEYKVSHQYSLIADIYKMYQAVSNITFNKKPTIKISKEQIKLIANDFFSKIKKGKNIKDIKYKDIRKILKLSDDMKIFNKEDTYLNKGKKQDNTIIKFHFVSNLSKIDNNFILKALEKENPYQELKEIFDTLGFEKSPKTIYEKLKDKVDDKTIIELIKNKTGSSLRTSSYAMIKFIPYFEKGYTLDEIKEKLELNRCENYSGFKKGIKYLNVSQFEKDDNLPINNHPVKYVVSATLRLIKHLHTTYGAFDEIRVESTRELSLSDDAKKEIEKANRALEKQIDKIVGNKEYQKIAEHYGKNLRKYARKILMYEEQNRRDIYTGEGIEFEDIFKNAVDLDHIVPQSVGGLSVKHNFVLVHRDSNLQKSNQLPMNFIKNKEDFKNRVEDLFKEHKINWKKKINLLATNLDEVFKDTFESKSLRATSYIEALSAQVLKRYYPFPNETKQKDGSSVRHIQGRATSNIRKVLKVKTKIRDTNIHHAIDAILIGLTNQSWLQKLSNTFRENLGKIDDEARKNIKKDIPLIEGIEPKELVEMIEDRYNEFGEDSVFYKDIWGKTKAVNFWVSKKPMVSKVHKDTIYAKKENGIYTVRENITNKFVGLKLTTTIKTDDFIKKFEKDILNKMYLYKTNPNDVICKIIKNRANEIVELLKKFSTIDTKDKEAMSEAKTKLDNLIHFPLIDNNGNTIRKVKFYQTNLTGFEIRGGLATKEKTFIGFKAYLENQKLNYERIDVSNYQQIKKENDNSFKVYKNDIVFFIYPDGSFRGGKIVSFLAEKNIGAFLNPKFPSSLKLQPDYFCKDKAHTGAKQHSLNKAIGIIKLNLDILGNIKSYQKIGSCDSEHLDFIKNIKS

SEQ ID NO: 4694 - protein, 1117 aa, unidentified
  REGION 1..1117: note = Description of Unknown: Cas Enzyme sequence
MLKRVLSLDLGITSIGYSILDEMAEDRYSLIDYGVSMFDKPTDKDGNSKKLLHSASSSASNLHNLRKQRKRNLAQVFENFNLGKKEDFLNQEKLNIYINKWEIRAIKAFEKKLDINELFTIFYALAKHRGYKSLDSGDLLEELCGDLGLHVETEKLEKDDEKGQIKQALQTIERLREQYPAKTVARIIYEIEINKKNPTFRNHDNYNYMIRREYINDEITKIVLAQREFGLLSDNIDIQNFIEKLISTIDDQKDSTNDMSLFGSCEYCIGEKVAHQYSLLSDIFKMYQSVSNISFNQNIKITKDQIKLVADDFFAKISMGKNIASITYKDIRKILKLKDSIKIFDKEDSYVSKSKRTDNSITKFHFVSNLSKINNAFILKAFEQENKYELLKEIFDVLEFQKAPHTIYEQLKGKVDDKTIIALIKNKSGNSLNISANAMIKFIPYFEQGLTTDEIKKKLNLERNEDYSEFKKGIKYLHVNTYEKDDALKINNHPVKYIVSATLRVIKYLHVRYGPFNEIRVESTRELSQNEETKREIDKANRALEKQIDEIVANIEYQKIAEHYGKNLRKYARKILLWEEQERFDVYTGKSIGFEDIFTNSVDLDHIVPQSLGGLSVKHNFVLTHRDTNMQKSNQLPLNYIADKQAFRNRVEHLFSEHKIHWKKKTNLLAENLDEIFQDRVESKSLKATSYVEALTAQILKQYYPFPDEKKQKNGSSVRHIQGRATSNIRKLLHVKTKVRDTNIHHAIDAILIGLTSHSWLQKLSNTFRDNVGVIDDEARAKIKKKLPLIDGIEPKELVGMIEDKYNEFGEDSIFYKDIWGKIKAVNFWVSKKPMSSKIHKDTVYAKKPDNMYTVRENIINKFVGLKVTNTTNTDKFMESFKKEILNKMYLYKTNPKDSVCKIVEQRAGEISKLLQSFVELDTKDKEKMGEAKAKLDRLIHSDLIDNNGKMIRKVKFYQTNLTGFEIRGGLATKEKTFIGFKSWMDNGKLSYERIDVANFQSIKKENDNSFKVYKNDLVFFIYPDGTLKGGRIVSFLEDKKMGAFSNPKFPASIGFQPHSFLTLFNGKANSHKQHSLSKARGIIKINLDIIGNIKSHQTIGDVNGKLIEFLKDMNNG

SEQ ID NO: 4695 - protein, 1107 aa, unidentified
  REGION 1..1107: note = Description of Unknown: Cas Enzyme sequence
VNILSLDLGITSIGYSILEKKENNRYSLIDYGVSMFDAPFDKDGKSKKLLHSTNTSMSNLYAKRKQRKKALANLFEKFGLAKAQKLLQQEKQNIYKNKWQLRCKDVFERKLNIGEFFTILYFIAKHRGYKSLDTNELLEELCEELKLDCGLKSSQKDDEKGKIKQALKRVEELKQNTNKTVAQIIYEIESKKQTPTFRNHDNYNYMIRREYIEDELKKLVESQVKFGLFGNTFDKEKFINELKEIIVKQKESSNDLNLFANCEYYKEHKVANQYSVVADIFKMYESVINIKLNKEKITKEQIQLIADDFFTKIKKGKNIPDIKYKDIRKILKLSDDIKIFDKKDSYVRKGKTIHHTITKFHFLNNLSKFDNSFIVENLKNLENLAEIFEVLNKEKSPKTIFEQLKGKVDEKTIIELIKYKNGKSLNISHYAMLKFIPYFQEGLTTDEIKKKLDLNRNEDYSKYKKGIKYLHVNQFEKDDNLEINNHPVKYIVSAVMRVVKHLHTLYGPFDEIKVESTRELSLPKKVKDKIDKVNKDNEAKYLAVLKNEAYLSAAKYHNKNIQKYKEQLVLYEEQEGRDIYTWQGIEIDDIFKDKLEVDHIVPQSLGGLSVKHNKVLCFKNSNATKGNRLPMNYIKDTESFRKNIEYLYTKKVINGKKLKNLLATNLDEIYKDTFESKSLRATSYVEALTAQMLKRYYPFADKQKQKDGNAVMYIQGRATANIRKLLHVKAKTRGTNIHHAIDALIIGVTSHSWLKKISNTFRENYGVIDDKARENIKKELPLIEGVSVAELVAHIEENYNFDGEESVFYRDIFGNVKVVPFWVSKKSMVSKIHKDTIYAKKPDGIFTVREKILDKFIALKITPTTSPDEFMKKFQKEILEKMYLYKTNPKDKICQIIQQRAFDIAQLLDNLQLEDTTDKEMLSETKKYLDEFIHQDLKDHNSNVIRKVQFYQTNLTGFEIRGGLATKEKTFIGFSATLNGDKIEYKRIDVANFETIKKDAGFKVYKNDIVFFIYPDGSFKGGKIVSFLEEKNVASFSNLRYPANINLQPHSFVTLFKGKANSHKQHSINKAIGIIKLHLDIIGNIKSFSSLGEVDSELLSFLKKLKD

SEQ ID NO: 4696 - protein, 1117 aa, unidentified
  REGION 1..1117: note = Description of Unknown: Cas Enzyme sequence
MAHMKKILSLDLGITSIGYSILDELENDRYSLLDYGVSMFDKPTDKDGNSKKLLHSASMSQTNLYNLRKKRKENLAQLFEEFSFGKKEDFLQQERENLHVNKWELRAKKAFQEKLEVSELFSILYLLAKHRGYKSLDSDDLLEELCQKLELHVDITKKKKDDERGKIKAALVNIEHLREQYPHKTVAQIIYEVEKSKQNPTFRNHDNYNYMIRREYINDEIKKIIKAQESFGLFNFTTDEFIAKLIATIDDQKEATIDPSLFGNCEYYPQEKVAHQYSLLSDIFKMYQSVANITFNKEKVKITPQQIHLVANDFFSKLKKGGKNIVDIKYKDIRKVLKLDENIKIFNKDDSYLNRGKKQEHTITKFHFVANLSKMDNTFIIEILEKANPYEIFREIFDVLAYEKAPQTIYDKLKDTIDDETIVSLIKYKNGKSLNISHYAMTRFLPFFEQGLSTDEIKKKLNLERKEDYSQYKKGIKYLHVKSFEHDENLEINNHPVKYVVSAVLRLIKHLHVNHGPFDEIRVESTRELSQNEQTKKDIVKANRALEKEIDVIIANEEYQKIAQHYGKNLRKYARKILMWEEQERFDIYSGKSIGFEDIFTNVVDLDHIVPRSVGGLSVKHNFVLAHRDINVQKSNRLPLDFVVDTEAFINRVEHLFAEHKINWKKKKNLLATTLDETFKDTFESKDLRATSYIEALSAQILKCYYPFTDKKKQHDGSAVRHIQGRATSNIRKLLHVKTKVRDTNIHHAIDAILIGLTNRSWLQKLSNTFRDNLGVIDDEARAKIKKEMPLIEGIEPKELVTMIEDAYNFYGEDSVFYKDVWGKIKVVNFWVSKKPMVSKIHKDTIYAKKEDGIYTVRESIIDKFAELKTTTTTDADTFMKSFEKNVLHKMYLHKTNPKDFTCKAVTNRADAIYELLKSFDSLDKKDKALMSEAKAKLDDLIHRDILDNNTNVIRKVKFFQTNLTGFNIRGGLATKEKTFIGFKAELKDDKLCYERIDVANFNTIKKENDKSFKAYKNDVIFFMYGDGSFRGGKIVSFLEDKKIAAFSNPKFPVSYKFQPDSFCKDKAHTGAKQHALNKAIGIIKLNLDITGKIKSYQSIGTIESELLQFIKEAIHG

SEQ ID NO: 4697 - protein, 1131 aa, unidentified
  REGION 1..1131: note = Description of Unknown: Cas Enzyme sequence
MSHNKILSLDLGVTSCGFAVLSETNTNQYQLIDYGIFMRDNPHGDTKSPKAQRSEYISKRKILKKRKNRIRQIKTLLHNYHLYQPQFDEIQNIDIWSLRGKEAYERKLEPYEFFALMRFLAKNRGYKSLKIDDLIKEIMFKQQLKIDCEGNDDIEVPTEIEDFTKTLAYMDALQCKHPDKTLAQIIYKLQENKPVKTFRNHDNYRFMIRRENVRKEIEKIIDTQKVLGLFESTIDHEKLKKEIIEIIIPQNPIRLNPDLINNCSLVKEHKCAPVYAYTYDMFKLYKLINDLRIDDLPATREQKEILTEYVLEKINNRQNISHLSIKEIKKTLNLYNPDTKINNKTEYHIVKGKKELTKLLSFRWFSKLDTFDKEILEEIDTHSDKLDIYDKIATVIQLKIDPNDFLDSVQDIFSHYQIGTNHNDDRIRDFALSLFDQKPKQKGTGEYSFAAIRKLLPLMQEGISESDAIEQLKLGTKSENYLSYPKGIKYFHLSQYEKDENPLSNHTVKSIVSGALRLIKDLHAKYGPFDMIKIESTRELSLPQDAKNAIKKAQDENEKVWNDLKKRYHNHAPQSGLGKTALLKLKLYELQYQRGIYSGKSMGIDDVLSERTEIEHIVPRACGGSSAEYNLVLDFKDENAKKGNRLPLDYLTGEQRIVFIDFVQKLKDEGKINYKKWKNLLAQDLDKTFKEIRDDTSLHATSYAEKLLGTMLKMYYPFEDLTKRKHGTGVMHVSGRATTHLRRILGIANKSRNTNFHHAEDAIILALMSRNYLNRLSRTFRENYNQETKTAKTNLKNIFPTIEGATPAEIIALLRTRYEENLETSPFYKDHQNNTRTVFYWVSKKPIGTQAHNETIQSPTNYAYRVPLKNLFNDIKPAPSHKTKPEKFLDEFNKKVYNRLLIAQENPKDHTAKAIKQRGDEIVSLLTKYQFVTTKEEKQAADKAIRHLFHAPIYDVNGCEIRRVKRIDPKAGGINVGRGIAKVGNSFQCIKFTKLDNAKFQLQKYDIRSPKEKYQCTGAHEMVLYRHDLIDLFVKNKDETELKNSGILGTFFINAANAKYILFNNPKFPLMPQENQPSNYGNKQYAIAKTCGIIKYDVDITGRIKGRYRLGNVIIDGVLKNSNHVIYEPVT

SEQ ID NO: 4698 - protein, 1324 aa, unidentified
  REGION 1..1324: note = Description of Unknown: Cas Enzyme sequence
MKDYYVGFDIGTESVGWAVSDFYYNLCKFHGKSMWGYELFDECNTAVDRRTFRNSRKRIDRKKQRIAWLQMLFNEEISKVDIAFFQRLKESNLYLEDKSTNVPYAVYADKNYTDVDYHNAYPTIYHLRKDLIEREDPHDIRLVYLALHHLIKNRGHFLFDNLNSDYDSDSSFDFLYDDLVTYLSEEMGIVLECSDSSNVADVLKDKSKSRSVKKKELSNYFQITKKNNPQEVEIITLLCGLKGTLSTIFSDKTLDDAEKNKIVFDNSFDENEDDYIAILQDRYELIEKVKAIYDWAVLADILNGESYISFAKVKTYEEHKNDLRMLKDYVKERCFDKYDEIFRVSSDIPNYTSYSGKYKENGKTGVLARKNKATQEEFCSYLLKSFKNLDHSGYEDMFLKIENNTFMPKIVVKDNGVIPMQVNEKEVKMILNNASKYLPFLSEKDCDGISVSDKILKIFQFRIPYYVGPLNTHSDNSWLIRGKEKIYPWNFDKVVDVEKSAEAFITNLTSKCTYLFDRDVIPKNSILYSKFMVLNELNNLRLDGEKPDVQFKQDIFNDLFMHHKKVTRKSLVNYIKSKTGETPDITGIDGDFKTSMRSAIELSSYDLDLEEKEMIISSITIFGDDKKLLKKRLKKNFADKLSDDDIKKISKLKYKDWGRFSKDLLTEIYDFDENTGEVKDNIINSLWNTNDNFMELLGSKYNFQKSIENANREIQNSTSIRKMVEALYVSPKIKRPIYQSLLIMKEIEKIQKSQPKKIFVEMTRSDGVKGDKGRKHSRKKRLEELYKNCKEDSGELWESLEKTPDNEFQQDKLYLYYTQFGKCMYTGESIDISDLFNQNIYDIDHIFPRSKVKDDSLDNRVLVKRTVNSHKDNDYPLDKSIRDKMKSFWYVLYSKELISKKKFERLTRSTSLTDSELSDFIARQLVETSQSTKAVADILKILYPNTEIVYVKARYASEFRKKYDMLKCRTVNDMHHAKDAYLNIVVGNVYNERFTHNRINFIKGLQTKKYSMNKMFSYDVKNAWIAEDNYSLNIVKKTMNKNNPIYRRYSFVQHGALFKVLPLKKSKGQAPLKGNSPLSNINKYGGYDKPTSSYFSYVEFEGKKGKKSRQFVPIDSYLRKEYEGNPIQYLTERLGLVNPKILIPIVKYNACIEIDGFRMNISSKSNGGKTIVYKSAMLLVLGYKGELYVRNITKLLESPEDHTITEFDGVSFDENIDLFDSLVNKMCNTILKVKYSDMGKKINQKRDVFLSLDIRTQCFVLNEILKILHCNVLMGDLSKIGLAKKSGALTSNSVLTEIKNVKSIYLVNQSVTGLFEKKIDLLNM

SEQ ID NO: 4699 - protein, 1326 aa, unidentified
  REGION 1..1326: note = Description of Unknown: Cas Enzyme sequence
MKDYYVGFDIGTESVGWAVSDFYYNLCKFHGKSMWGYELFDECNTAVDRRTFRNSRKRIDRKKQRIAWLQMLFNEEISKVDIAFFQRLKESNLYLEDKSTNVPYAVFADKDYTDVDYHKNYPTIYHLRKELIESEDPHDVRLVYLALHHLIKNRGHFLFDNLNSDYDSDSSFDFLYDDLVTYLKEEMGIILECIDSSKVADILKDKSKSRSDKRKELSNYFQITKKYNPQEFEIITLLCGLKGTLSTIFSDKTLDEAEKNKIVFDNSFDENEDDYIAILQDRYELIEKVKAIYDWAVLADILNGESYISFAKVKTYEEHKNDLKMLKDYVKERCFDMYDEIFRVSSDIPNYTSYSGKYKEDGKTGVLPRKSKATQEEFCSYLLKSFKNFDHSGYEDMFLKIENNTFMPKIVVKDNGVIPMQVNEKEVKMILKNASKYLPFLSEKDCDGVTVIDKILMIFQFRIPYYVGPLNTHSDKSWLIRGKEKIYPWNFDKVVDVEKSAEAFITNLTSKCTYLFDKDVIPKNSILYSKFMVLNELNNLRLDGEKPDVQFKQDIFNDLFMHHKKVTRKSLVNYIKAKTGETPDITGIDGDFKTSMRSAIELSSYDLSLEEKEVIISSITIFGDDKKLLKKRLKKNFVDKLSNDDIKKISKLKYKDWGRFSKELLTEIYDFDENTGEVKDNIINSLWNTNDNFMELLGSKYNFQKSIESANKGIQQGNSIRKMVEALYVSPKIKRPIYQSLLIMKEIEKIQKSQPKKIFVEMTRSDGVKGDKGRKHSRKKRLEELYKNCKEDSGELWESLEKTPDNEFQQDKLYLYYTQFGKCMYTGESIDISDLFNKNIYDIDHIFPRSKVKDDSLDNRVLVKRTVNSHKDNDYPLDKSIRDKMKSFWYVLYSKELISKKKFERLTRSTSLTDSELSDFIARQLVETSQSTKAVANILKVLYPNTEIVYVKARYVSDIRNKQEYKMLKCRTVNDMHHAKDSYLNIVVGNVYNERFTHNKINFIKGLQTKKYSMNKMFSYDVKNAWIAEDNYSLNIVKKTMNKNNPIYRRYAFVQHGALFKVLPLKKGKGQAPLKGNSPLSDINKYGGYDKPTSSYFSYVEYEGKKGKKSRQLVPIDSYLRKEYEDNPIQYLTERLGLVNPKILIPVVKYNACIEIDGFRMNISSKSNGGKTIVYKSAMPLVLGYQGELYVRNITKLLESPEEHTITEFDGVSIDENIALFDTLVNKMCNTILKVKYSDMGKKINQKRDVFVSLDLRTQCFVLNEILKILHCNVLMGDLSKIGLAKKSGALTSNSVLTDIKNVKSIYLVNQSVTGLFENKIDLLNM

SEQ ID NO: 4700 - protein, 1169 aa, unidentified
  REGION 1..1169: note = Description of Unknown: Cas Enzyme sequence
MLKVLGLDLGTNSIGFALLELEEKNEITIFNELASNSIIFSEYVLAEERRNFRSGRRRNERASRRKENIRKIFTYFNLASKEILNKPIEYFNNLTNKFKEPYILREKAINGVQLSKDEFIFALYTIISRRGYSNLFATQDSDNEAKESELINSAIINNKKIYKNNNYKLPSKVLTMKKEEIEKEGFINVAIRNKKDNYNNSLDRKLWQEEIELLIDSQKENIDLFKDIKIYEDFKDKILNGINENSYGVFEQRDLKSVEDMVGFCSFYNDYHKDKQKRVINAHIKAIEFILRQRIENSNLGNLIINKKTGEFQQISKDEIETTINFWLKTPNVQKITAKNIFKNAGIKDIEIQTSHMQDDTVQDISVHKALLEIVDFETLTKNKDFYSKLLETLHYYVSKEQIKNEIKKLNNNLLSDEQIEKIANINKATSSYLSFSLKFVNEILEKMKKNINYQTSLEELGYFKRYTNMKAYDYLPPLNASEDDINWFKKHIPNFNSEELFYQPLISPNVKRVISILRRLINELISKYGKIDKIIIETARELNSKKDEEKIKKSQEQNKKDIKDAETTLKSNNKELSQKNILRVRLLHEQKLKCLYSGEALTIDEALDENITEIEHFIPRSKIWIDSYKNKILVLKKYNQNKSNQHPITFLKSIGEWEKFVGRVNEFISNINKKDWLTNEKNIEKIYNDEKLEDRFLNDTRSATKIVANYLEHYLFPKQNEYGKGESNDKIIRVTGKAINELKKLWGINETQPTNQDGKKDRDTNYHHTIDAIVISLLNNSSKKALNDFFKQKENKYKTKAILENLKNRFPISKNGKTLFEFVKDKVEKYEKNELYICPFMKKRENIRGFKDVNIKLFWDEELNNFAQIDKIEISKKLLLNDFGRDLKDDEVKTKFDKIKEKLNLPKQNNIKEALEEYEKRLLETRKNLNNINEEIKQEQNKLPRDKKAIETLQIVELKEKIEKLKQTQKEFIEELETPCYFLTKDGKKQIVRNLNIKSTSTTKADSVIITDKKQKNRVQRLTKEVYENLKNNKTPFVAKLNDNTLSVDLYNTLKGQVIGLNYFSSIKNDILPKINEKKKELITNFENKITISKNDILEIIDEKNNTKEYFVFNGGGNISGSKNQIELKSINKKEEKRLFITLNSNIIINPIKINFFGEIFYEDFKKN

SEQ ID NO: 4701 - protein, 1170 aa, unidentified
  REGION 1..1170: note = Description of Unknown: Cas Enzyme sequence
MRKILGLDIGTNSIGFSLNEINIKNEQTTFNELISNSIIFSEYIKAEDRRKFRSGRRRNERNNRRKQIVRKLLFDFNLADNIILTQPIKYFNKLSQNQNPYILRKLAVNGKSLTKDEFTFALYSIISRRGYSNQFKTEDSKDDGVITEPIKKNKTIYLEDKLAVPSLVLLNKKTELEKDGFINVAIRNKKDNYNNSLGRELWQEELEILLDSQKNNLELFEDIDKYETFKHKLLKGVNKNSLGIFEQRPLKSMEGMVGYCSFYNLYHENPQKRVSKSHISSIEFTLRQRIENSILGNLIFNDKTGEFYNPTQEEINNTIELWLKKPPIQTINTKNIFDKAGLKNIKIKIAEKQDDTILDIKLHKQILEIFIDTNIDIFEKHRDLYTKILEKIHYFVNKDQIVKEIKKVDIQNILDDETIDKLSKVDKGNKESYASFSLLFVDELLAKMKEGKSYQDSLTEIGYFRKYLDIKPYDYLPPLNPSLNDIKWLKKNVKNFKVEHLFYQPLVSPNVKRVISILRKLVNDLTKKHGKIDQIIIETARELNSKKEEDKIKESQANSRKEIKEAEKLLKANKYEITNKNIERVRLFTEQKAKCLYSGNPMTIEDALDETVSEVEHFIPRSKIWINSYKNKILVFKKYNQNKSDKHPIIYLRSKNTWEDFIERVKENITNKSKIFWLTDEENINKNWERENLEDRFLNDTRSATKIIANYLEHYLYPKQNEHGKDETNSNIIRVTGKAINELKRLWGVNKVQPKNENDKKDRTTNYHHTIDAIVISLLNSSAKKALNDFFKQNEDGFKTKAILENLSSRFPKTKNGVSLVDFVKEKVTKYENNELYICPMIKKRDNIVGFKDGNIKLYWDEKKKEFCQLDKHEISIKSILFKKEGQNEKERSDNEVEKFVDELVNKLDLQKQNNIKEAILNYKENLLLTRTKIKSLEEHIKGLKGNLPNKKDYIDTPETLDIKEQMKVLDKEKQTQNEIQNEPCYFLTNKRQKQIIRNIKIKTKEASKVDSIIITDKAKTSRVQRLTKDIYDELKSNDTPFVAKLNDTTLNVDLYNTIKGQVIGLNYFSSIKNDMSPKIYKTKIPLIKDFEDKITIQKGDLIEIENLKDNTKKYYVFNGGGKISAGNNKLVLKSINTKDEFQITLNKDTIAKKVFINYQGDISYEEFKK

SEQ ID NO: 4702 - protein, 1167 aa, unidentified
  REGION 1..1167: note = Description of Unknown: Cas Enzyme sequence
MRKILGLDIGTNSIGFSLNEVSIEKDQTTFNELISNSIIFSEYIKAEDRRKFRSGRRRNERNSRRKQIVRKLLYNFSFANNTILTQPIKYFNKLSNNQNPYILRQEAVNGKNLTKDEFTFALYTIVTRRGYSNQFKTEESKDDGVINGAISKNKELYLKNNFAIPSLVLSSKKIELGKEGFINTNIRNKKDNYNNSLDRELWQEELEILLKSQKNNIELFENNNKYELFKNKLINGIRENSLGIFEQRPLKSMESMVGFCSFYNLHHQNPQKRVSRSHISSIEFTLRQRIENSILGNLIFNSKTGEVCTPTKEEITNTIEVWLRKPPTQVINTKNIFDKAGLKNIKIKTAEKQGDTILDIKLHKQILEIFKNTKIEIFEKDRDLYTKILEKIHYFVNKEQIVKELNKLNTRQLLDDETIDKLSKIDKGTKESYASFSLLFINALLIKMKEGKNYQDSLTELGYFRKYLNIKPYDYLPPLNPSKDDIKWLEKNVKNFNREYLFYQPLISPNVKRVISILRKLINDLIKKHGKIDQIIIETARELNSKKEEEQIKDAQKQNTKEINEAKKSLVNDYDITNKNILRARLLIEQKAKCLYSGNPMTLEEALDETQTEVEHFIPRSKIWINSYKNKILVFKKYNQNKGNQHPITYLKSKNTWEDFKDRIEENLTNKNKVFWLTNEDNINKNWERENLEDRFLNDTRSATKIIANYLQHYLYPKENEHGRGERNTNVIRVTGKAINELKHLWGIDKVQPKNEHDKKDRNTNYHHTIDAIVISLLNNSAKKALNDFFKQNENGFKTKVILENLSSRFPKTKAGSSLVNFVKDKVKKYENNEFHVCPMMKKRDNIVGFKDGNIKLYFDKNKEEFHQIDKKPIDKNLLFDQNGKDVNDSEVEKRVLELVKSLDLPKQNNIKEAIFIYKENLLHTRAEIKSIELQIKDIKGNLPNKKDYIDTPVTIDIKEQIEVLEKEKQAQINIQNQPCFLLTSKGQKQIVRNIKVKTKSASKVDSIIITDKTKTSRVQRLTKDIYDELKSNQIPFVAKLNDTTLNVDLYNTEKGQVIGLNYFSSIRNNILPKIYKSKIPLIKDFEDKITIQKSDLIEIVDFKENTKKYYVFNGGGNIAAANNKIELKSINKKDEKRLFVTLNKDTIAKKVFINFQGDISYEDFKK

SEQ ID NO: 4703 - protein, 1174 aa, unidentified
  REGION 1..1174: note = Description of Unknown: Cas Enzyme sequence
MKKIVLGLDLGTNSIGFSLNEIFVEKEQTIFNELTSNSIIFSEYIKAEDRRKFRSSRRRNERKSRRNKNIRKLLHIFDFANKSIISEPIKYFNNLSKNQNPYTLRKDAVNGKKLSKNEFTFALYSIITRRGYSNQFKTEESKDDGVINSSISKNKEFYLKNKLSIPSLVLVDKKLKLEKDGYVNVAIRNKKDNYNNSLDRELWQEELEKLLESQKDNLELFDNITTFKLFKSKVINGVNENSLGIFEQRPLKSMEDMVGFCSFYNKYHENKQKRVSKSHISSIELTLRQRIENSILGNLIFNSKTGEIFTPSKEEIDNTVELWLKKPPTKTINAKNIFDKAGLKNIKIKTADKQDETVLDISLHFQLLEIFKATKLDIFGKDKNLYTNILEKIHYYVNKEQIFRKIEEIDDKNCLTTEIIDKLSKINKGTKDSYSSFSLLFIEQILAKMKEGKSYHDSLSDLGYFKKYLDVEAYEYLPPLNPSNDDIKWLEKNIENFKREHLFYQPLVSPNVKRVISILRRLINDLIKKYGKIDKIIIETARELNSEKEEKRIKESQAKSRKDIREAEQLLESNNYKLTNKNIERARLLIEQKSKCLYSGKSLTIEDALDETETEVEHFIPRSKIWINSYKNKILVLKKYNQDKGNSHPITFLKSKNQWEDFKERVKENINNKNKIVWLIDEKIINKNWEKENLEDRFLNDTRTATKIVTNYLEHYLFPKKNEYGKGESNDNVISVTGRAINELKRLWGVDKVQPQKEDKKKDRQTNYHHTVDAIVISLLNSSSKKALNDFFKQNENGFKTKEIIEKIKSRFPKTKNGQNLCDFIKEKVRQYENNEIYICPMMKKRDNVVGFKDGNIKLLWDEDKKDFYQLDKKTVDKNLLFDNNGKNVKDEEVNKRVDTLIDSLDLPKQNNIQKAILEYKNKLLETRTHIKNIELQIKDLKGNLPNKKDYEETSEILKIKERIETLNQKKEKQISIQDEPCFFLTKKGQKQIVRNIKVKTSSTTKADSIIITDKTHKNRVKRLTKEVYDELKQNNTPFVAKLNDTTLNVDLFNTEKGQIIGLNYFSSIANDIVPKINEKKAKFIKNYNDKVTIQKGDLLEIEYLKEEKRKYFVFNGGGNISLTKTGGAMNLLEVRTINSKNEKRLFVTLNNDTIAKKVNIDYQGNIFYEDFKK

SEQ ID NO: 4704 - protein, 1029 aa, unidentified
  REGION 1..1029: note = Description of Unknown: Cas Enzyme sequence
VKNLDALTSNWRGHEFYSSAVVLGLDIGLGGIGLWLRKGPALVWARTYEVEIPESAPLRSRRLKRSARRSRQAEKRRDRKLKAFCARFALPWLESNTNPFKLRLRAITTRLASKEALVLCLRHIIRHRGYDYHLTNDATFPWGDELDARKALAWAKETYCTRQVADGLLYEVAGTFKEADQAKFKAEIDAAVERLAGDPMRSMLEKHFAQKSNVRPAARNHNFPREVVWAHMQEICERHADLLGGPDRLKEALEELQAILNDHRKEPGALAERRVKRCLISKQLFGGKVEKCGINAEPAVRNFKLLEFIATRTFVSKDGARRLANPETIQWLLDEVARDRQAVEAKTERPSQRNLRKEFSAKAGYKLAADKGSHNKDFFDQLRDLLVPRITLLKQRASLSTAAAAALFTLATKDGLVPESIQQNLKLYYQVRRDPETGFGIYPQVEFLLGRRGKAGQQAVPGKLRQLFGRQEVQQALGGQQTPDYVVIEVIGDIPRNDNQKREFQAEQKRRREFKEELFARYELHADANESDRKRVLLFDQQRGLCPYTGASLGKNPLSPDLQIDHIFPRSQGGVSEMVNLVLTQAATNATKGERSPWQCYQSTWSALVERLATMQWNKAKREVFLWQLAECPPWQNLTRTAQLARQLREEAAQWLGIKGRPDEMARRIGTPSGYQTALCRGSWAENLPAKNRGNKRHHLWDAAVVAHIPPGPGMNHVRYGGIFYDLRPDRAGDIAVRALPLGPDMLAFERAHQNECLVEKPRQVKSKRARTKETIYGIDAADHLWARDLVSKDDAPVKNAEKLLEQAGFPAGKLTTGIVQDWATASSFQPLRLSDKTRVERVPMQANNESPTTLVAHRNAEGAIIGYKLLTETYLRCEIWRAPDGTYQRRLIPHPRGLHALRSRNINWNQKPTGKAETLRQNVCGKLAPFSKKVGEFSKGDLLRLPLDAQGDICLPPIEPICHLWYRISSIYSDGRVEMKLAEYADKQATPLAMCLKKIESQQPSSAKLLAALMQLRDRHDQSPDPVD

SEQ ID NO: 4705 - protein, 1333 aa, unidentified
  REGION 1..1333: note = Description of Unknown: Cas Enzyme sequence
MSQNIVDYCIGLDLGTGSVGWAVVDMNHRLMKRNGKHLWGSRLFSNAETAANRRASRSIRRRYNKRRERIRLLRAILQDMVLENDPTFFIRLEHTSFLDEEDKANYLGADYKDNYNLFIDEDFNDYTYYHKYPTIYHLRKALCESTEKADPRLIYLALHHIVKYRGNFLYEGQKFNMDASNIEDRLSDVFTQFADFNNIPYEDDEKKNLEILEILKKPLSKKAKVDEVMALIAPEKDFKSAYKELVTGIAGNKMNVTKMILCEPIKQGDSEIKLKFSDSNYDDQFSEVENDLGEYVEFIDSLHNIYSWVELQTIMGATHTDNASISEAMVSRYNKHHEDLQLLKKCIKDNVPKKYFDMFRNDNEKLKGYYNYINHPSKAPVDEFYKYVKKCIEKVDTPEAKQILHDIELENFLLKQNSRTNGSVPYQMQLDEMIKIIDNQAKYYPVLKEKREQLLSILTFRIPYYFGPLNESSEHAWIKRLEGKENQRILPWNYQDIVDVDATAEGFIKRMRSYCTYFPDEQVLPKNSLIVSKYEVYNELNKIRVDDKLLEVDIKNDIYNELFMNNKTVTEKKLKNWLVNNQCCNKNAEIKGFQKENQFSTSLTPLIDFTNIFGKIDQSNFELIENIIYDLTVFEDKKIVKRRLKKKYALSNDKIKQILKLKYRDWSRLSKKLLDGIVADNRFGSSVTILDVLEMSRLNLMEIINDKELGYSQMIEEAASSPKDGKFTYKEVEKLAGSPALKRGIWQALQIVEEITKVMKCKPKYIYIEFERSEEAKERTESKIKKLENVYKDLDEQTKKEYKRALDELKKFDNTKKISSDSLFLYFTQLGKCMYSGKDLDIDSLDKCQIDHIVPQSLVKDDSFDNRVLVIPNENQRKLDDLVVPSDIRVKMYSFWKLLFDHELISPKKFYSLIKTEYTERDQERFINRQLVETRQITKNVTQIIEDHYSTTTVAAIRANLSHEFRVKNHIYKNRDINDYHHAHDAYIVALIGGFMRNRYPNMHDSKAVYSEYMKMFRKNKNDKKRWKDGFVINSMNYPYEVDGEVIWNPDIINEIRKCFYYKDCYCTTKLDQKSGQMFNLTVLPNDAHSAKGTTEAVVPVNKARSNVNKYGGFSGLQYIIVAIEGKKKRGKKFVEVRTLAGVPLHLKAASLDEKIKYIEEKKGLSDVKIIKDNIPVNQMIEMDGGEYLLTSPTEYVNGRQLVLNEKQCALIEDIYNAMHKGDYDNLEDVLMIQLYIELTKKMKALYPAYVNIAERFENMNEDYVAVSKEEKANIIKQMLFIMHRGPQKGNIVYDDFKISGEVGRLRSKNHNLNNITFVSQSPTGIYFKKYKL

SEQ ID NO: 4706 - protein, 1427 aa, unidentified
  REGION 1..1427: note = Description of Unknown: Cas Enzyme sequence
MNKKKYTIGLDIGTTSVGWAVIDDGFNLVQGKKKIVEIDVDGNKKKRMSRTNLWGVRLFDEGKVAADTRLKRSGRRRLTRRKKRLNYLREIFHDEITKFDESFFIRMDESFYQNADDIKSIKTQYPFFNGITGSGETYSNEKDYYENYPTIYHLRQRLIENPEQADLRLIYLAMHHILKFRGHFVNQGQNFDLKNINVADSLNRLLEKFNDLSDFDFQFNPENEAKSNDILTNRNLSKSKKAFDLVNLYSVLENEQNFEKYDQGTKAKTEKFLKTKDASQKALYTAVVGNSINLATIFQKDEYKEKDAPQTVKLKYSDETFDDKLFELEPHLTVEEFEIIGLGKKIYEAIVLSNILTKDTLAASMVEKYELHKEQLSELKKFTKSISYDFYVKFFKEEGIYTKFIEGIGNPQKRTPRENFYKEIKKEFESAFKGLKFPDVGKEFDFSKVENLTDEQRKFFKEIAKKMEFENYLPKQRMSDNGAIPYQVHEHELIEIIKNQGIYYPFLAQKVTVDADEKQEDEYKIQTLMKFRIPYYVGPLIEATIGTDGNKESDKSCFAWMQKKDGKSGEKITPWNFNQIVDKEASAVEFIERMTSFCTYLPDKKVLPKNSLLYQEFTIYNELIIGGWYHGSTKCYFPAELRQKIVDKLFKKSKKVTAKAMIDFLNAEENLNLESPKQLFGIDTFVKAPSYNTTYSTFIDLINAGISEQMIEDNRKKFEQIIKWQTVFEDNKVLKKRITIANDEWGGLLTTDQIKKLAKKHYTGWGRLSKELLNGVKAINGKTIIENLKEEKFNNFMRLIEDEKIAQTIKDAQVGNADTDELHYDMVRDLAGSPAIKKGIWQSLKIITELEEYLGKENVSKIVVEMARENSSGRTRTRARQIEDFYKTFNEKTGNPLSAELEKERTNTDSNSFDNERVFLYFLQNGKCLYSGRDLSLSELSNYEVDHIIPQTYIKDDSFDNKVLVLRIENQNKGGDVPSKEIIWKMSNYWELLANNGQISPRKLANLKKGNIGLGDKEKAGFINRQLVETRQITKHVANILANYFKENKTEILTPKSSLTSQFREGVVYIPKEEFSAEETMNANMTYEVAGEKILPTGEVKDSKYSNSNFIKVHFHNGFKKNRDINDYHHAHDAYLNAVVANYIYATRPDLKNMWVYGEYQRKSTQETGKRGSQRKNFFRQLLTGMIDPDWFVLETGEILWNRDEVLAKISKNLRLRGINIVKKTEVQKGAFSKEGNMKKGNGSLVRKNNLSIERYGGSNANSTNIAVLEQDKKGNIIVESVFLNDAAKIVNKSSIIKNFQLYQTAKGKYRYLTAPKESQKAVQYAGCINNFEELITFAIDNELINKSKITEQTKALYDNLEQEDKEKVLKDLLKLCRRGTSRGLNTLKQIGMPTDVRYTSKSDLISNNTTLVYQSSTGLYETRRKL

SEQ ID NO: 4707 - protein, 1153 aa, unidentified
  REGION 1..1153: note = Description of Unknown: Cas Enzyme sequence
SDIGRKKKHEELQELFGVVKKDKSVNELLKCLCGLSVNAKLIFDEKTEEKVPLCFHDFSYTDKIAELMEQLTEEEYAIIEQLKSIYDYAVLAGTLKGYDYLSCARVELYEKHCKDLKLLKMLFRKYKTKEEYDMMFRSNSDGTYSAYVNSLNSTDAIAESNKYRRNMKGRKADDIYSTIKKAFKDITDDEDIQYVMEKIEKEQFLPKQLTGANGVIPNQVHKKEMERILKNAENYLPFLKEKDESGLTVSERIIQLFTFQIPYYVGPLGVNSKTGWMVRKEEGAVLPWNINDKVDMIATSEAFIGNLIRTCTYIQGEKVMPKASLAYERYCVLNEINNLCIDGERLDTKLKQQIYKDCFMKGKRITKKQLCDYLVAQNAIQSEDQVTGIDKTINNSLASYGKMYAIFGERLKEDAVLAVAEDIIYWGTVFGDSKKMLKERLAKYVEQGVIDENQLKRILGYKFKDWGRFSKAMLTLSGCDKSTGEIMSLGQAMWEYSLNFMELINSDDFTFKEELEKQSTAAMKSLSEFTYEDLQDSYFSVPVKRMIWQTLLVVREIEQVMGCAPKRIFVEMTRTEEEKGDKGRKDSRGNQLLELYKSIKNTENHNWKQELSEANESGKLRSKKLFLYYMQMGRDMYTGEEIDLGRLYDDNLYDIDHIYPRHYVKDDSIMNNLVLVNRQANQHIKKDLYPVPEQIKANPKVQELWNTLHRQKLITDEKYTRLISNSSFTEKQLGDFIARQLVETGQGTKGIADLLEQLFTDTDIVYAKATNVSDFRRDNGFLKSRLVNDFHHAQDAYLNIVVGNVYHTKFTKNPWNFIQKDYEKDREKNRYNLAKMFEWNVIRGSETAWIAERKDEKGTIATVRRMMQKNTPLMTRMNFEQHGEIANATLYSAKKAKPENYLPLKTSDSRMKDVTKYGGFTSATIAYYFIVHHKEGKKENVTIEGLPLYCKDKVERETNGLERYCEEVLGYGEVNILRRKLKIQSLIELNGYRFHLSGKTGNQLILRNAMSLYMSENWTAYIKKLEKAVTWQILEDKITTEQNNRLYDILADKHANSIYAKRPNAYGQKLLDAKEKFVVLELKQQCEALLQILQLSKIGITETNLELIGESGHAGKMRISKNLTEADRPAVISQSATGLYEKKERIFTEKADR

SEQ ID NO: 4708 - protein, 1363 aa, unidentified
  REGION 1..1363: note = Description of Unknown: Cas Enzyme sequence
MENTEYYLGLDMGTSSVGWAVTDTHYRLLRAKGKDMWGIREFDRADTSVDRRTHRISRRRRQRELARIGMLKDYFHDAISNVDPYFYQRLDNSKYYVEDKEENVRNKNGIFHDENYSDVDYYNEYPTIFHLRKELIENSQPHDVRLVYLALLNMFKHRGHFLNAGLSQGTDTQSMESAYQQLLMLLETTFIDNQDLVVFPDAPDYRTIEDILSNRDYSRTRKSEELAAFFKIEKKDKTAFAYVKAICGLKVDAKLLFPNIEDEEKKIDICFSEYGFEDKIQEISDAVGEENYQIVEALKAIYDIGSLAGIMKGYSYLSEARVAEYEKHKSDLARLKSVIRKYKTPEEYDKMFRQKEPGSYSAYVNSVNADGQQVFGRRNMKERKREDLYKTIRQLLKDVPQNEDVTYILNEIEKENFLPKQLTASNGIIPNQVHTREMAKILQNAENYLPFLNEKDESGLTVSQRILKLFTFQIPYYVGPVSPKSEQNGGNGWVVRKADGKVLPWNINEKIDLKATSERFIERLIRNCTYISDEKVLPKASLEYEAFCVLNEINNLKIDGEKISVELKQEIYRELFQRGKKVTKKQLVNFLSCKGILKEEAQLSGIDNEINNSLSTYGKFKAIFGEKLEEDECRHMVEDIVRWCTIYGDSKSFLKEQLEERYADKISPENMKRIFGFKFKDWGRLSKEFLELSACDKSTGEKVSLIRTMWDTNYNLMELLHSENYTFDEALKEKQKKGVRLLQEMEPEDLDELYFSAPVKRMVWQTILIIREIEKVLGSSPKRLFIEMTRSDEEKGDKGRKDSRKKQLLDLYKNIKDESRDWKAEIEAADQKGWLRSKKVYLYYTQMGRCMYSGQPIDFEALMNDNIYDIDHIYPRHFVKDDNINNNLVLVDKRLNAHKSDTYPLEASIRFSTANIALWKRLLDVGLILPEKYRRLTGREAFTDEQKAGFIARQLVETSQGTKGVSDILKEMLPETEIVYSKASNVSEFRHQRGLQKSRLVNDFHHAHDAYLNIVVGNVYYVKFTKNPINFIRNEYARDAKTFNYNLSKMFDRDVARGEEIAWKAQTEEGAGTIVTVKKMLAKNTPLLTRFSFEGHGAIANETLYGASKAKKDGYIPLKSSDQRMLDVTKYGGFTSASTAYFFLVEHEVKGKNVRTLETVPVYEKDKIAQEPEELQRYCEQTLGLIHPSVRISRIKIQSLMRINGYNVHISGRTGNRITVRNAVSMCLGQNWIDYIHLLEKYREKQDMDEKITAAENIRLYDILTEKHTKAIYQKRLNPIGKKLIDAREKFEQLTVEKQSLVLLQILQATQIGIAVADLTLIGETANSGVMLFGKNITAFSECKLINQSVTGLFESSVDLLTV

SEQ ID NO: 4709 - protein, 1372 aa, unidentified
  REGION 1..1372: note = Description of Unknown: Cas Enzyme sequence
MNKNGNKVYWGLDMGTSSVGWAVTDEQYQLLRAKGKDLWGVRLFDEAETSAERRTHRIARRGRQREKARLGLLREYFADAIEAVDSNFFQRLDESKYFLEDRSEGNQQPYALFANKGYTDRDYYSKYPTIFHLRKELLESKEPHDVRLVYLALANMFKHRGHFLNTSLSAEGDCGDMESAYTALREKAEEFGIYFKELDTTKLEELLGEKGCSRRKILENVSELMQIKKTDKRAYEILGLLCGLNGKMINIFGEQVIDAEHKSLSIGFRDSDYGETEAKVCDYIGEEYFKLIETAKEVHDIGLLANIMKGQQYLTIVRVEAYEEHQKDLKLLKHVLKKYDMKAYHEMFRIMKEGNYSAYVGSVNSSDNIVRRNRGKKWKQEELYKTVGGILKELPQEDTEVQQILKKVNNETFLPKQLTAANGVIPNQVYVKEMRQILTNAEEYLPHLKEVDESGLTVSERILQIFAFHLPYYIGPLGQQYKDKPGYNVWAERIAPGKIYPWNLEKKIDTKLTAEKFINRMVRHCTYLNGEKALPKNSLLYEKFMVLNELNNLKINGEKPSVEIKQQLYKELFLKGKKVSKAQLENWFKVNGIVEKGAENFISGIDNGCNNSLASYGKFSGVMGEGADQDENREMIEKIIFWGTVYGNDKKFLRECIRETYGEKLDEAAIKRIMGFKFDGWGKLSKTFLNMNGMSKEDGKKRSFICAMWETNDNLMELMSERYTYREELNAMIMSGEKSLAEWTIEDLDGMYLSAPVKRMVWQTMKVMKELQETLQTAPDRIYVEMPREEGEKGDRKASRKQKLLALYKAIRSEEKEWKAEIENRTEAEFRSKKLYLYYLQMGRCMYTGERINLDDLFYDNLYDIDHIYPRHFVKDDSIENNLVLVRKEKNAHKSDTFPVEADIRKKQYAYWKCLMDKGFITKEKFSRLTRTTEFTEEEKAAFISRQLVETRQGTKAITQILQQAFPNATVVFSKAGLVSDFRHKFDLPKVRCVNEFHHAQDAYLNIVVGNTYYVKFTANPLNFIREAGKNPQKDQYKYNMDKIFEHTVWRGNECAWNVAADGKQDTIKIVKKIMAKNTPLITRRSYLAHGGITGKATIYGAHKAKEQGYLPVKSSDWRLQNVAKYGGVTSITIAGYSLVEYSVKGKIVRSLEAIPVYLGELEQISEVKLLEYLQKSLEMENQGKVIENLQIRKKCIRIRSLIKYNGYYYYLAGKTGRQIYLDNAVSLCLNDEDMEYIKKMDKAVITEYYEEKGKDGLTILTQEKNKKLYQCFQSKMTDTIYRNKSGSIAGTLDEGIEKFNGLDMKEQCYILRQILNWFQLANFTADLCLIDGKKNAGKGLMSKKVSDAKELILIDSSPAGLSRREIDLLTL

SEQ ID NO: 4710 - protein, 1099 aa, unidentified
  REGION 1..1099: note = Description of Unknown: Cas Enzyme sequence
MGINIGLDIGIASVGLAVVDSDTGNVLETVADLFNCAEVSENVKRREFRQARRLKRRQHTRLEDFKKLWGAEGFIIPKNINLYSLELKVRALQEKITMDELYVVLYNSLKHRGISYLDDFEESTEGGSEYQKGIQINQQELETKYPCQIQLERFKKYGAYRGQIIVEENGDKTVLSNVYTFSAYKKEIDTILEAQSKYYPELTNDFIEKYQRIFSRKRKYYEGPGTEKSRTDYGIYTTRIDKATGNYITEENIFEKLIGKCSVFPEEMRAAAASYSAQEFNLLNDLNNLTIGGRKLNEEEKRQIVETIKNSERVNVEKIVCAVSGENVETIEGARRNKDEKRIYHSFEAYRKMKKALAGIGKDIDEYERAELDEIGRILTLNTEHESIQREFINSGLGMSKDEMECLINVRKKENSLFSKWHSFSLKLINILIPEMYEQTKEQMTLLSEMKLVKSSDELYKGLKYIPEKAIIKGIYNPVVVRSAHIAVKALNAVIKKYGTPELVVIEMPRDKNDDEQKKRIKKEQSRNEKELKDIIVRIKAEYGIAITSAHFRNHKQLALKLKLWNEQDGICLYSGKNIDLNQLLTAPEVYEIDHIIPLSVSFNDTRNNKVLVYATENQAKGQTIPYKYLTMTQRNWGWNEYVAKVNELHRNKKINYKKVENLLFMKDITKIDVLKGFINRNLNDTRYASRVVLNTLQSFFKVNETGTKVSVIRGSFTSQMRKNMRLDKNREESFAHHAVDALLIVYSQMGYDAFRKLQGEFIDFETGELLNTEMWKKNMTKEVYKNCLYGQKWVEIRNNIKEAEKHVKYWHMVDKKCNRALCNQTIYGTRNLDGKVYKISKIKDIRSIDGYKKFAEMIKKEKQDSFLMAKNDPKTFTSLLEICERYKDAKNPFVQYEKETGDWVRKYAKKNNGPKIVSLKYVDGEVNSCIDISHKYGYEKNSRKVILEKLNPYRMDVYYNKNDKKYYLIGIKQSDIKFIAGKSVIDEEAYTRILQQEKMLQEGQSRADLEALGYEFKLSFYKNDIIQYEKDGEIFTERFQSRTMPAQRNYIETKPVDRAKFNKQNTVGLSKTTSIKKIRVDILGNQYIIEKETFSFEC

SEQ ID NO: 4711 - protein, 1370 aa, unidentified
  REGION 1..1370: note = Description of Unknown: Cas Enzyme sequence
MEKQEYYLGLDMGTSSVGWAVTNTKHELLRKKGKDMWGIREFDEANSAAERRTHRVDRRRRQRQLVRLGLLKSYFSEEIAKIDPDFFIRLENSKYFLEDKDERVRTKNGVFNDDDYKDVDYYRQYPTIFHLRKALLDLDHHGEKFDVRLVYLALANMFKHRGHFLLNAEGDALNTEQVDIVYQEILDRLENDYEIIIEHKSIQQVIDVLGSTDIGRKKKHEELQKLFGVGKKDKRVNEFLRCLCGLSVNAKLIFDENAEEKVTLCFNDFSYTDKISELMEQLTEEEYALIEQLKSIYDYAVLAGTLKGYDYLSCARVELYEKHKKDLKLLKALYRKYKTEEEYNRMFRSNTDGTYSAYVNSLNSTDAILNSNEVVEDSKYRRNMKKRKSEDIYATIKKAFKDITEDKDVSFVLEKIEKEQFLPKQLTGANGVIPNQVHKKEMERILQNAETYLPFLKDKDESGLTVSERIIQLFTFQLPYYVGPLGENSKTGWIVRKEKGAILPWNIHDKVDMSATSEAFIGNLIRTCTYIQGEKVMPKASLAYERYCVLNEINNLCIDGERIDTKLKQQIYKDCFMKGKRVTKKQLCSYLAAQNAIHSEEQVTGIDKNINNSLSSYGKMYAIFGERLKEDAILAAAEDIIYWGTIFGDSKKMLKQRLKKYVEEGIIDENQLKRILGYKFKDWGRFSKALLSLRGCDKSTGEIITLGQAMWEYSLNFMELINSEEFTFKEELEKHTKVAMKSLGEFTYEDLEDSYFSVPVKRMIWQTLLVVREIEQVMGCAPKRIFVEMTRTEEEKGDKGRKESRGNQLLELYKSIKNTESHNWKEEIAAADKDGKLRSKKLFLYYMQMGRDMYTGEEIDLGRLYDDNLYDIDHIYPRHYVKDDSIMNNLVLVNRRANQDIKKDLYPIPEQIKANPKVRELWNALHKQKLITDEKYARLNSNTAFTEKQLGDFIARQLVETGQGTKGVADLLEQLFKDTVIVYAKATNVSDFRRDNGFLKSRLVNDFHHAQDAYLNIVVGNVYYIKFTKNPWNFIRKDYEKDKEKNRYNLARMFDWNVVRGSETAWMAKKKDEEGTIATVRKMMQKNTPLMTRMNFEQHGSIANATLYSAKKAKSENYLPLKTADERMSDVKKYGGYTSMAVAYYFIVRHKEGKKENVTIEALPLYCKGKVEREANGLEKYCEEVLEYGEVNIIRRKLKIQSLLEFNGYKVHLSGKSEGRLLLRNAMSLCLPTEWVTYIKKLEKAVDIKIMEAVITPENNIKLYDILADKHVNTVYAKRLNTFGKKLLDGREKFILLGVEEQCEVLLQVLRLSRIGTTVANLKKIGASDGSGEMKTSKNLKASDRPAVINQSPCGLYEKKEWIFDKIVEK

SEQ ID NO: 4712 - protein, 1475 aa, unidentified
  REGION 1..1475: note = Description of Unknown: Cas Enzyme sequence
MNSKNYTIGLDIGTASVGWAVLDENFTLVQGKKKITTIAPDGTIQKKQSRTNLWGVRLFDSAEVAEYRRTNRGMRRRIARRKKRLEYLRCIFEQAILAIDDSFFIRMDESFFQNDDDANKTITTKYPLFNGKLGSGESYEDEVAYYEAYPTIYHLRKRLVEDASQADLRLVYLALHHILKFRGHFTNQGQTFNLQNIDLAKNLLELLHQYELARQDSFDFKFDDNKHAEANAILTDRTKSKSWKAFQLTNLFSVLNVDEYFSTYEQKTEKQTEKFLKNVDGQLKALFTAIVGNGIDVSKIFNKEEYKPSAERNFKKSGDFKYTNENFEKELAEIEADITPEEFEVLLTGKKVYESIILSTILTEDTLAASMVAKYELHKAQLAELKKFTKSISEKLFKHLFKENGIYSKFIQGEGNPAKKTAREDFYKEIKKAFESEFAELKFPKDEKEFDFSKTVFTPEQEAFLRSINKAMQRDTYLPKQRMSDNGAIPYQAHEHELVEIIKNQSAYYDFLGEVVESEREQEDGSFEKITEYKIQTLFKFRIPYYIGTLATARDADGQFTYAKNAWVVRKSDNKLTPWNFHDVIDKEASAANFIERMTNFCTHLPSERVLPDKSLLYQEFKIYNELISSGYYNNQTKIYFSPEFRQKIVSNLFKETKKVSAKKMIEFLNAELGLSLLHPRQLFGIDTAVNSPCYNNSFSTYHDLINAGIPPAHINDYRDRFEEIIKWQTIFEDKKLLKKTIRTKNEQEWNNFLTDTQVNKLAKQHYTGWGRLSKKLLNGIQATNGKTIIQNLKEEKFNNFMRLLEDKSIAEKLKDAQTEGMEEGQLSYHIVADLAGSPALKKGIWQSLKVIKELEDYLGKENISKIVIEIAREHKTGRTQTRQKKIENFYKTFKEKTGEELSANLQKEFKEVNDPKLFDNEKFFLYFVQNGKCMYSGTPLTSPFRLQEYEVDHIIPQTYIKDDSFDNKVLVLKKENQNKGGNVPNRSIINRMSNFWELLARNGQVSPRKLKNLKMGSITDEQKKSFINRQLVETRQITKHVAHILSEHFKDTKIEVLTPKAGLISQFRQGVVYVEKKEFKHESALATRLHFEADNKVYLPTGEIIEGHYSNANFVKVHFHAGFEKNRDLNDYHHAHDAYLAAVVANYIYGTRPDLKKAWIHGQYKRKLSRETGKFGNQRKDWHKQLLSDMKNDTWIYWDAKTGDVLQEFNRDEVLSRIRSYLELRNINVVKKTEINSGKFGDNSILKKDPTAKNSAVGLKSNLDPRRYGRAKSQNSALTVVAKDQKGIIKPFSISAMNLERYLKADDKLTFLREIDPSAKISEIVMAQIPKYTQYILPNGASRLLASDKEAQTATQLPMMELAGKDSSEEKFQSTYDILANFIKKNHLFAEAKLELLDGTIKNHFQNSDAPAKLKILSELLRVTNGSNHGLEALSKAGLGTKEQRLTSKNNTITNDTTMVHKSITGLYETRIKI

SEQ ID NO: 4713 - protein, 1107 aa, unidentified
  REGION 1..1107: note = Description of Unknown: Cas Enzyme sequence
MGYTLGLDIGIASVGFGLIDNVDGKILESGVRLFSSADPDNNQTRRSSRQARRLNRRKVHRLERVAHLLEEAGFEKGEVLAPTPYHLRVKGLTEKLSKPEVYAALYNLMKHRGISYLEDVELDEADSSSVSQNVELLKEYYPCEIQLERYEEYGQIRGIIETYNKDGEKESLVNIFPTGAYKKEAEAIILKQGQFYPELDKVFLEKFTEILTVKRPYYIGPGNKKSRTDYGIYRENGETLENLFDILIGKCTIYPQEARAAKFSYTAQLFDFLNDMNNISIAGEKLTEVQKREIYHQIMSSKTVNMMKIITKVTGCLKEEVTGYRVDSKYKAEFHSFASYRQFRNKMLDYGFDVQTLNVEMFDKLAAKLTLNTEYHQIITQLESLNLGLSKELIEKIADFRKKNRSLFSKWHSLSLKAMNEVVDELWSTSKNQMQIFSELGVFKSNIEVFKGLKYIPLDAMVDEIYNPVVRCSIRESIKIINALLKKYGALDKVVIEMPRDSNEKEEKDRITKLNKENDNKKKQAIEKARNEYGFGEEAYRQQNDLNTKLRLWYEQKQRCLYSGEIIKIFDLIKNPHLFDIDHIIPKSISYDDSLSNKVLCYATENREKGNLTPYRYFKRKASLTWNYEAYKSYVIELYKDGKGDLSRTKLELLLFEEDINKYEVRQRFINRNLVDTRYASKVVLNTLQDFMKENYPTTTVEVVRGKFTAQLRRHWGIRKNRDENHAHHAIDALIIACVPHLSLWKEQKKVFSTDEFRVDETTGEIIEQSYNQLTYQEPFSQFFYQLEKVSIDCRYSYKVDRKFNRQVADATIYSTRQGIVKQTSGDKSFTLDSNSKEHYVIAKIKNIYEDVDAKRFMDRYKKDKTQFLMYHHDPQTFSILEDVMKTYPDKKNPFQVYRLEYGPIRKYSKKGNGPQIQSIKYYDSKLGQHIELKQANQSTKKVVLQSLNPWRCDIYYNKKDKRYIAAGLKYADLSYQKGTGLYGISLQRYQQILNSEKIELSIEQIELLLEGRLNESNFEFCFSLYKNDFIQWNDENNQTFQYRFLARNLSSPNRIEVKPINKSKYDKQAEGLKTLKKGLNRFYKISVDVLGYQHFIKKEKLKLTFK

SEQ ID NO: 4714 - protein, 1345 aa, unidentified
  REGION 1..1345: note = Description of Unknown: Cas Enzyme sequence
MGKELDKKEPYSIGLDIGTGSIGWAVIDDDCKLRRYKHQNMWGAHLFKEADKAATRRSFRSSRRRLARRKRRITLLQQIFDDEIQKIDPHFYLRLSESMLHLGDKNSALELDANILFADHSFTDKSYREKYPTIYHLRSDLFHNTDRQDIRLVYLALHHIIKYRGNFLVEGGVDSVISSFDNQNLQKFMDFIGADERVAKEIKNILLDRSKSRSARKSAIDKQMQLTPSTKEAIKAVVGLKWDASKLFEDSSLDAKGEFSSKDYEEQRDAIATAIGDENYELVATLESVYRWTVFSQFIRKDSCLSDIMIERYDNYHQDLSDLKALFHKFLSKDDYKSFFHGDTAEFELYNSHKSKNSIDDLYKSIRKRLGNIAKDDLRYQRFEKRAELGEFLARQRIRDNGAIPHQIHQYELEEIIDNQAQYYPFLAQNRDKIISIFTFKLPYYIGPLKTGGNFAWSVKKKDGVIYPWNYDEMIDDEASAEKFIDRMRNHCTYLPDEEVLPKNSLLYQEYEVRNELKNITVNGERLGADVQNDIVDKLFTVVSSVTRKKLVDYLYENQIYDTDSLAIEGFSNEKGFNSSRKSYIDFTQKIGIKITPGNQQAVEEVIKWITLFEDKKILAKKIRREYGNIFNEEKISKILRLNYSGWGRLSRKLLDGITACVQGNELTVIETMRRYKHNFMQIVQSDQYEFKKVIDKILSANQCAEIIYDDIKNLAGSPGIKRALWRSVRTIDEIVDTIGCEPKLISIEMARNEGEKVSTNSRKSQLEKMYKELIGDDADYNKSVIKPQLAKYKEKLNKKKYYLYFLQNGKCAYTGKPLDIENDLRECEIDHIIPRSLTKDDSLDNTVLVIRNENQRKEDDYPVSSDIQKHMAVIWSLLKRAKLMSPTKFQRLTSKKQLSESRIASFVNRQLVETRQITKHLARMLHEKYQDSSTDIFTIRAGMGSEYRDCHDLPKSRDVNDFHHAKDAYLAVVIAQFIRRRYPKLEQKFTYGEYMKFKSKLLNSHDKHSFIIRAMDYDFTDEATGEVIWQRKTAYDVINRTMKYNDCLVTRKVEIGDNQFYDQTIYGKNSGKTMIARKIGLPVDKYGGYSGEKDAYCMAIHYLKRVRDKDVPTDEIIGIPVQVYMQDKIKPGSIINYIQNKYKQATVLIPKIPLNQKIKYDGNEQFIVSSSEVANAKQLKLPYDIEYAIAIALKLGDIPQIRVTEEQASSDDYLHYKRDRQIERKQKVIDGIEKFWDIYVDKLSNQYQQFGSIIERARLVCDKYRNLSTVDKIKLIRLALVATHANSRNANMKKDFPELNLPSDFGRMRDKTLDPTKLTFVYESITGLHCRELNGETLRLEQDS

SEQ ID NO: 4715 - protein, 1145 aa, unidentified
  REGION 1..1145: note = Description of Unknown: Cas Enzyme sequence
KSILLNQSQTRKSRKLSIIQLLQPSADNKSIISEAVGAAIGLKWNAEKLFDDKSLEIKGEFSDKNYEDQRDDIAAAIGDDRYELIETLESVYQWTIFSQFIRKDSCLSDIMIEKYDAYRQDLSDLKGLFRDFLSEKEYKSFFHGDASKFDLYNKHKIDTDDLYKSIKKHLGESAKDDVRYQRFEKRAELGEFLSRQRIRDNGAIPHQIHQYELEKIIDNQAAHYSFLAQNRDKIISIFTFKLPYYIGPLKTGGDFAWSIKKKDGVIYPWNFNEIIDDEASAEKFIERMRNKCTYLPDKDVLPKNSLLYQEYECRNELKNVTVNGKRLSPDIQNRIIDELFTKEYSVNYKKLAKYLYDNQIYDTSSLVISGTADDKSFMSSRKSYIDFTNKIGIEITPENKAAIEEVIKWITLFEDKKILAKKLQKYSDIFSKDQIDSILKLKYTGWGRLSSELLDGIAAHTRYGKMTVIEVMRQCSDNFMQIIQSDRYEFKKIIEDALLKDATPEITYDDIKNLAASPGIKRALWRSIRIIDEIVDTIGYGPKLISIEMARSEEDKVRTKNRYSQLEKMYKELYGREYNKSDIKPQLENYKDCLDKKKYYLYFLQNGKSAYSGKKLDIENGLKDCEIDHILPRSLTKDDSLDNTVLVLREENQLKLDDYPISPDVQKKMLPIWMSLKNAKFMSQLKFQRLTSQKQLSDDQIYGFINRQLVETRQITKHLARMLTEKYKDSSTEVFTIRAGMSSEYRRIHDLPKCREVNDLHHAKDAYLAATLAQYVKVRYPKLDKEFIYGEYKKFKSDKKKNNREYGSFILSSMKYDFTNTNTGEIVWQGKSSCEIIDKTMKYNDCLITKKTEIGDNQFYDQTVYGKNSGKKMIARKAHLPVNRYGGYSGRKAAYFAVINYLKQSNKKESPATEIISIPTQIYTLEKTHPGSIDKYIQDNYKDAVVLLSKVPINQKIEYDGNEQFIVGGSEVTNAKQLKLPYDVEYAIAIALKRGVPRVTISEEQADEDDKLRDKRNRQIEKRNKVIDGINRFWKVYSDKLANQYQQFGEAGNNARNAAPEYDKLSIDDKIEVVKLVLVATSAGSGRVDMKGSEKNPKFPELGLPNSFGRMSGKTINPLNITFVYESITGLHRRKLNGKSLGHKR

SEQ ID NO: 4716 - protein, 1340 aa, unidentified
  REGION 1..1340: note = Description of Unknown: Cas Enzyme sequence
MKQPYSIGLDIGTNSVGWAVINEGFDLRKYKHQNMWGAHLFDEAQKAAIRRSFRSSRRRLARRKRRITLLQQLFDDEIQKIDPHFYLRLSESMLHLGDKNSALELDANILFADHSFTDKSYREKYPTIYHLRSDLFHNSKKQDIRLVYLALHHIIKYRGNFLVEGGVDNVISSFDNQNLQKFMDFIGADESMAKKVKAILLDRSLSRSVRKSDIIKLLRPTPDNKKVVSEAIGAVIGLKWNANKLFEDDSLEAKGEFSNKNYEEQRDEIAAAIGDDRYELVETLESVYQWTIFSQFIRKDSCLSDIMVEKYDDYRQDLSDLKSLFHEFLPKESYKSFFHGDTAEFEQYNKHKYSLEDLYKSIKNHLGNVAKEDPRYQRLEKRAELGEFLARQRIRDNGAIPHQIHQYELERIIDNQAQHYPFLAQNHDKIISIFTFKLPYYIGPLKTGGDFAWSVKKKDGVIYPWNFDEMIDDEASAEKFIDRMRNNCTYLPDEEVLPKNSLLYQEYEVRNELKNVTVNGKRLSSDIQNRIVDELFNKEPSVTHKKLIKYLYDNQIYNTTSLVISGTAKEKSFASSRKSYIDFTQKVGTPITPKNQQAIEEIIKWITLFEDKKILAKKLQKYSDIFNENQLRTILKLNYSGWGRLSCKLLDGITAHTRYGEMTVIETMRRCSDNFMQIIKSDQYEFKKIIDDILSLDQRTEITYDDIKNLAGSPGIKRALWRSVRIIDEIVDTIGYEPKLISIEMARNEDEKVRTKSRYNQLEKMYKDLYGKEYNKSDIKSQLADHKDKLDRKKYYLYFLQNGKCAYTGDPLDIENDLKDCEIDHILPRSLTKDDSLDNTVLVLRKENQRKLDDYPIVPDIQNRMRPIWTSLKNTKLMSQLKFQRLTSQKQLSEDRIAGFVNRQLVETRQITKHLARMLTEKYHDSSTEVFTIRAGMSSEYRRIHDLPKCREVNDLHHAKDAYLAAVLAQYVKIRYPKLDKTFIYGEYNKFKSTKRNITDSGSFILSSMKYDFTNTETGEIIWQSETTRDVIDRTMRYNDCLITRKTKIGDDQFYDQTIYGKSSGKTMIARKANLPVGKYGGYSGEKAAYFAAINYLKQVRNKNVSVNEIISIPVQIYTLSKTKPDAIDEYIRKNYKQATILLPKIPINQKIEYEGNEQFIVGSSEVTNAKQLKLPYDIEYAVAIALKQRIPHVTITEEQAANDNELQNKRNKQIEKRDKVIDGIEKFWGIYAEKLANQYQQFGNAGNSARNTLAEYTKLSLDDKIKVIGLVLRATHAGSDRVDMKGNEKKPVFPELGLPNSFGRMAGKSLDPTTLTFVYESITGLHCRKLDGKLLEQDQ

SEQ ID NO: 4717 - protein, 343 aa, unidentified
  REGION 1..343: note = Description of Unknown: Cas Enzyme sequence
MKQPYSIGLDIGTNSVGWAVINKDFRLHRYKHQNMWGAHLFDEAQKAATRRSFRSSRRRLARRKRRITLLQRIFDNEMQKVDPHFYLRLSESMLHVGDKSSTLELDANILFADRSFTDKSYREKYPTIYHLRSDLFHNSKKQDIRLVYLALHHIIKYRGNFLVEGGVDNVVSSFDNQNLQKFMDFIGTDESMAKKVKAILLDRSLSRSARKSDIINLLQPSSDKRRAVSEAVGAVIGLKWNANKLFEDDSLEAKGEFSNKNYEEQRDEIAAAIGDDRYELVETLESVYQWTIFSQFIRKDSCLSDIMVEKYDAYRQDLSDLKSLFHEFLPKESYKSFFSRRRC

SEQ ID NO: 4718 - protein, 1015 aa, unidentified
  REGION 1..1015: note = Description of Unknown: Cas Enzyme sequence
MSSCLKKVINHFFHGDAAEFERYNKHKYSLEDLYKSIKKHLGNTVKEDPRYQRFEKRAELGEFLARQRIRDNGAIPHQIHQYELERIVDNQAQYYPFLAQNRDKIISIFTFKLPYYIGPLKTGGDFAWSVKKKDGVIYPWNFDEIIDDEASAEKFIDRMRNNCTYLPDEEVLPKNSLLYQEYEVRNELKNVTVNGERLSPDIQNRIVDELFNKEPSVTHKKLIKYLYDNQIYNTTSLIISGTAKEKSFASSRKSYIDFTQKVGVAITPKNQQAIEEVIKWITLFEDKKILAKKLLKYSNIFNESQLRTILKLNYSGWGRLSCKLLDGITAHTPYGELTVIETMCSSKDNFMQIIQSDQYEFKKIIDDILSVNQRAEITYDDINNLAGSPGIKRALWRSVRIVGEIVDTIGYEPKLISIEMARNEGEKIRTKSRYSQLEKMYKELYGKEYTKSDIKSQLANYKDKLDRKKYYLYFLQNGKCAYTGDPLDIENDLRDSEIDHILPRSLTKDDSLDNTVLVLCKENQRKLDDYPIAPDIQNHMRPIWTSLKNAKLMSQLKFQRLTSQKQLSEDRVAGFVNRQLVETRQITKHLARILTEKYHDSATEVFTIRAGMSSEYRRIHDLPKCREVNDLHHAKDAYLAAVLAQYIKIRYPKLDKAFVYGEYMKFKSKKQTNMDRSSFILASMSYDLTNTETGEIIWQSKITHDVIDRTMKYNDCLITKKTEIGDNQFYDQTIYGKNSGATMITRKANLPVDKYGGYSGRKAAYFMAIRYLKQVRNKDVFVNEIISVPTQTYTLEKTKPGSINEYLHNSYRQTTTLLPKIPINQKIEYDGNEQFVVGSSEVTNAKQLKLPYNIEYAVAVALKQGIPRITITEEQAASDDELQNKRNKQIERRDKVIDGVEKFWGIYAEKLANQYQQFGNAGPNAQSALAEYSELSLDDKIKVIGLVLRATHAGSDRVDMKGSENKPVFPELGLPNSFGRMAGKSLDPTKLTFVYESITGLHRRKLDGKSLGRDR

SEQ ID NO: 4719 - protein, 1339 aa, unidentified
  REGION 1..1339: note = Description of Unknown: Cas Enzyme sequence
MKQPYSIGLDIGTNSVGWAVINEGFDLRKYKHQNMWGAHLFDEAQKAATRRSFRSSRRWLARRKRRITLLQQIFDNEMQKVDPRFYLRLSESMLHSGDKNSALELDANILFADRSFTDKSYREKYPTIYHLRSSLFHDSKKQDIRLVYLALHHLIKYRGNFLIEGGVDNVISSFDNQSLQAFMEFIGADDSTAQKIKAILLDRSLSRSARKSDIINLLQPSSDKKRAVSEAVGAAIGLKWNANKLFEDDSLEAKGEFSNKNYEEQRDEIANAIGDDRYELVETLESVYQWTIFSQFIRKDSCLSDIMVEKYDDYRQDLSDLKALFHEFLPQKYKTFFHSDAAEFELYNNHKRNLDDLYKSIKKQLGEVAKDDPRYQRFEKRAELEEFISRQRIRDNGAIPHQIHQYELEKIIDNQAQYYPFLAQNRDKIISIFTFKLPYYIGPLKTGGDFAWSVKKKDGVIYPWNFDEIIDDEASAEKFIDRMRNNCTYLPDEEVLPKNSLLYQEYEVRNELKNVTVNGKRLGSEIQNRIVDELFTKEPSVTYKKLVKYLYDNQIYNADSLIISGTAKEKSFASSRKSYLDFTNKIGIEITPKTQKAIEEIIKWITLFEDKKILAKKLQQYSDIFNEDQLRTILKLNYSGWGRLSHKLLDGITAHTPYGELTVIDTMRSSKDNFMQIIQSDRYEFKKIIDDILSADQRTDIAYDDIKKLAGSPGIKRALWRSIRIIDEIVDTIGYEPKLISIEMARNEDEKVRTKSRYGQLEKMYKELYGKEYTKSDIKSQLADHKDKLDKKKYYLYFLQNGKCAYTGEPLDIENDLRDSEIDHILPRSLTKDDSLDNTVLVLRKENQRKLDDYPISPDIQNHMRPIWISLKNTKLMSQLKFQRLASQKQLSEDRVAGFVNRQLVETRQITKHLARMLTEKYHNSLTEVFTIRAGMSSEYRRIHDLPKCREVNDLHHAKDAYLAAVLAQYIKVRYPRLDKAFIYGEYMKFKSKKQTDADRSSFILSSMKYDFTNTETGEIIWQNKTAQDVIDRTMRYNDCLITRKTKIGDDQFYDQTIYGKSSGKTMIARKANLPVGKYGGYSGEKAAYFMAIRYLKQVRNKDVFVNEIISVPTQVYTLEKTKPGSINEYLRKNYRQVIVLVPKIPINQKIEYDGNEQFIVGSSEVTNAKQLKLPYGIEYAIAIVLKQGIPHVTISEEQAADDNKLQRKRNKQIERRDKVIDGVEKFWGIYAEKLANQYQQFGNAGNSARNTLAEYTKLSLDDKIKVIGLVLRATHAGSDRVDMKGNEKKPVFPELGLPNSFGRMAGKSLDPTKLTFVYESITGLHRRKLDGKTLGQDR

SEQ ID NO: 4720 - protein, 1342 aa, unidentified
  REGION 1..1342: note = Description of Unknown: Cas Enzyme sequence
MKQPYSVGLDIGTNSVGWAVINEGFDLRKYKHQNMWGAHLFDEAQKAATRRSFRSSRRRLARRKRRITLLQQLFDDEIQKIDPHFYLRLSESMLHLGDKNSALELDANILFADHSFTDKSYREKYPTIYHLRSDLFHNSKKQDIRLVYLALHHIIKYRGNFLVEGGVDNVISSFDNQNLQKFMDFIGADESMAKKVKAILLDRSLSRSVRKSDIIKLLRPTPDNKKVVSEAIGAVIGLKWNANKLFDDDSLEAKGEFSNKNYEEQRDEIAAVIGDDRYEIVETLESVYQWTIFSQFIRKDSCLSDIMVEKYDGYRQDLSDLKSLFREFLNENNYKSFFHGKKSSFELYNTHKKYLSENNNKITPLYKDIENILKNIAKDDPRYQRFEKRAELGEFLARQHIRDNGAIPHQIHQYELERIIDNQAQHYPFLAQNRAKIISIFTFKLPYYIGPLKTGGNFAWSVKKKDGVIYPWNFDEIIDDEASAEKFIDRMRNNCTYLPDEEVLPKNSLLYQEYEVRNELKNVTVNGERLSPDIQNRIVDELFAKEPSVTYKKLIKYLYDNQIFSTDSLVISGTAKEKSFASSRKSYIDFTQKVGVSITPKNQQAIEEVIKWITLFEDKKILTKKLQKYSDIFNENQLRTILKLSYSSWGRLSHKLLDGITAHTRYGEITVIETMRRCSDNFMQIIQSDQYEFKKIIDDILSLDQRTEITYDDIKNLAGSPGIKRALWRSVRIIDEIVDTIGYEPKLISIEMARNEDEKVRTSSRYSQLEKMYKDLYGKEYNKSDIKSQLADYKDKLDRKKYYLYFLQNGKCAYTGEPLDIENDLKNCEIDHILPRSLTKDDSLDNTVLVLRKENQRKLDDYPIAPDVQKRMRPTWILLKRAKLISDVKFQRLTDPNQLPDDKISNFIKRQLVETRQITKHLARMLTEKYHDSSTEVFTIRAGMNSEYRRTHDLPKCREINDLHHAKDAYLAAVLAQYVKIRYPKLDKAFIYGEYMKFKSKKQTDADRSSFILTSMNYDFTDTDTGEIIWQGKTTHDVIDRTMHYNDCLITRKTEIGDNQFYDQTIYGKNSGKTMIARKADLPVDKYGGYSGRKPAYFMAINYLKQVRNKDISINEIISIPVQIYTLEKTKPGSIDEYIRNNYKQATILLPKIPINQKIEYESNEQFIVGSSEVTNAKQLKLPYDIEYAVAVALKRGIPRVTISEEQTKEDDNLRDKRAKQIEKRDKVISEIERFWEVYTDKLSSQYQQFGSAVEKAKAANSEYQAMSVEDKIKAIRLVLVATHAGSGRVDMKKNFLKLGLPDGFGRMKDKNLDLTKLTFVYESITGLHRRKLDGKSLRQGQ

SEQ ID NO: 4721 - protein, 1336 aa, unidentified
  REGION 1..1336: note = Description of Unknown: Cas Enzyme sequence
MTKQPYSIGLDIGTNSVGWAVINEDFSLCKYKHQNMWGAHLFDEAQKAATRRSFRSSRRRLARRKRRITLLQQIFNDEIQKVDPHFYLRLSESMLHVGDKSSTLELDANILFADHSFTDKSYREKYPTIYHLRSSLFHNSEKQDIRLVYLALHHLIKYRGNFLIEGGVDNVISSFDSQSLQTFMEFIGADDSTAQKIKATLLDRSLSRSTRKSDIINLLQPSPDNKRAVSEAVGAAIGLKWSANKLFEDDSLEVKGEFSNKNYEEQRDEIATAIGDDRYELIETLESVYQWTVFSQFIRKDSCLSDIMIEKYDAYRQDLSDLKALFHEFLPKESYKSFFHGDAAEFERYNNHKRNLDDLYKSIKKQLGEIAKNNPRYQRFEKRAELGEFLARQRIRDNGAIPHQIHQYELEKIIDNQAQYYPFLAQNRDKIISIFTFKLPYYIGPLKTGGNFAWSAKKKDGVIYPWNFDEMIDDEASAEKFIDRMRNNCTYLPDEEVLPKNSLLYQEYEVRNELKNVTINGERLSSDIQNRIVDELFAKEPSVSYKKLIKYLYDNQIYNTDSLVISGTAKEKSFASSRKSYLDFTNKIGIEITPKTQKAIEEVIKWITLFEDKKILAKKLQKYSDIFNENQLRTILKLNYSGWGRLSHKLLDGITAHTPYGELTVIETMRSSKDNFMQIIQSDRYEFKKIIDDILSADQRTDIAYDDIKKLAGSPGIKRALWRSVRIVDEIVDTIGYEPKLISIEMARNEDEKVRTKSRYSQLEKMYKDLYGNAYTKSDIKSQLAEYKDRLDKKKYYLYFLQNGKCAYTGEPLDIENDLRDSEIDHILPRSLTKDDSLDNTVLVLRKENQRKLDDYPIAPDIQNHMRSIWTSLKNAKLMSQLKFQRLTNQKQLSEDRVAGFVNRQLVETRQITKHLARMLTEKYHNSPTEVFTIRAGMSSEYRRIHDLPKCREINDLHHAKDAYLAAVLAQYVKIRYPKLDNAFIYGEYMKFKSKKQTDTDRSSFILASMNYDLTNTETGEIIWQSKTERNVIDRTMKYNDCLITKKTEIGDNQFYDQTIYGKNSGATMIARKANLPVDKYGGYSGRKAAYFTAINYLKQVRNKDVSVNEIVSVPAQIYTLEKTRSDSINEYISNNYKQATVLLPKIPINQKIEYDGNEQFVVGSSEVTNAKQLKLPYDIEYAVAIALKRRIPRVTISEEQAKEDDNLRDKRAKQIEKRDKVISGIERFWEVYTDKLSSQYQQFGNAVEKAKAASSKYQAMSVDDKIKVIGLVLVATHAGSGRVDMKKNFPKLQLPSDFGRMIGKNLDPTKLTFVYESITGLHRRKLDGKTLEQGR

SEQ ID NO: 4722 - protein, 1342 aa, unidentified
  REGION 1..1342: note = Description of Unknown: Cas Enzyme sequence
MKQPYSIGLDIGTNSVGWAVINEGFDLRKYKHQNMWGAHLFDEAQKAATRRSFRSSRRRLARRKRRITLLQQIFDNEMQKVDPHFYLRLSESMLHVGDKNSTLELDANILFADRSFTDKSYREKYPTIYHLRSSLFHDSKKQDIRLVYLALHHLIKYRGNFLIEGGVDNVISSFDNQSLQAFMEFIGADDSMVQKIKAILLDRSLSRSARKSDIINLLQPSSDNKRAVSEAVGAAIGLKWNANKLFEDGSLEAKGEFSNKNYEEQRDEIAAAIGDDRYELVEALESVYQWTIFSQFIRKDSCLSDIMVEKYDDYRQDLSDLKSLFREFLNENDYKSFFHGKKSSFELYNTHKKYLSENNNKITPLYKDIENILNNIAKDDPRYQRFEKRAELGEFLARQRIRDNGAIPHQIHQYELERIIDNQARYYPFLAQNRDKIISIFTFKLPYYIGPLKTGGDFAWSVKKKDGVIYPWNFDEMIDDEASAEQFINRMRNHCTYLPDEEVLPKNSLLYQEYEVRNELKSVTVNGERLSPDIQNRIVDELFTKELSVTYKKFIKYLYDNQIYNTDSLIISGTAKEKSFASSRKSYIDFMQKVGVSITPKNQQAIEEVIKWITLFEDKKILAKKLQKHSDIFNENQLRTILKLNYSGWGRLSRKLLDGITAHTPYGELTVIETMRSSKDNFMQIIQSNRYEFKKIIDDILSADQRTDIAYDDIKKLAGSPGIKRALWRSVRIIDEIVDTIGYEPKLISIEMARNEDEKVRTKSRYSQLEKMYKELYGKEYTKSDIKSQLADYKDKLDRKKYYLYFLQNGKCAYTGEPLDIENGLRDSEIDHILPRSLTKDDSLDNTVLVLRKENQRKLDDYPISPDIQNHMRPIWISLKNAKLMSQIKLQRLASQKQLSEDRVAGFVNRQLVETRQITKHLARMLTEKYHNSSTEVFTIRAGMSSEYRRIHDLPKCREVNDLHHAKDAYLAAVLAQYIKVRYPRLDKAFIYGEYMKFKSKKQTDADRSSFILSSMKYDFTNTETGEIIWQGKTAQDVIDRTMRYNDCLITRKTKIGDDQFYDQTIYGKSSGKTMIARKANLPVGKYGGYSGEKAAYFAAINYLKQVRNKDVSVNEIVSIPAQIYTLEKTRSDSINEYISNNYKQATVLLSKIPINQKIEYEGNEQFIVGSSEVTNAKQLKLPYDIEYTVAIALRQGIPRITISEEQAEKDNNLRNKRAKQIEKRDKVISGIERFWEVYTDKLSSQYQQFGNAVEKAKAANSNYQAMSVEDKIKVIRLVLVATHAGSGRVDMKKNFPKLQLPSDFGRMIGKNLDPTKLTFVYESITGLHRRKLDGKSLGQDQ

SEQ ID NO: 4723 - protein, 1339 aa, unidentified
  REGION 1..1339: note = Description of Unknown: Cas Enzyme sequence
MKQSYSIGLDIGTNSVGWAVINESFDLRKYKHQNMWGAHLFDEAQKAATRRSFRSSRRRLARRKRRVTLIQQIFNDEIQKIDPHFYLRLSESMLHIGDKNSALELDANILFADHSFTDKSYREKYPTIYHLRSDLFHNSAKQDIRLVYLALHHIIKYRGNFLVEGGVDNVISSFDSQNLQTFMDFISADESVAKKVKAILLNRSLSRSTRKSAIIELLQPSPDNKKTISEAVGAVIGLKWNANKLFEDDSLEAKGEFSNKNYEEQRDEIATAIGDDRYGLVETLESVYQWTIFSQFIRKDSCLSDIMIEKYDAYRQDLSDLKALFHEFIPQKYKTFFHGDAAEFELYNNHKRNLNDLYKSIKKQLGEVAKDDPRYQRFEKRAELEEFLSRQRIRDNGAIPHQIHQYELERIIYNQAQYYPLLAQNRDKIISIFTFKLPYYIGPLKTGGNFAWSVKKKDGVIYPWNFDEIIDDEASAERFIDRMRNNCTYLPDEEVLPKNSLLYQEYEVRNELKNVTVNGERLSPDIQNRIVDELFTKESSVTYKKLIKYLYDNQIYNTDSLIISGTAKEKSFASSRKSYIDFTQKVGVAITPKNQQAIEEVIKWITLFEDKKILAKKLQKHSGIFNENQLRTILKLNYSGWGRLSRKLLDGITAHTPYGELTVIETMRRCSDNFMQIIQSDQYEFKKIIDDILSVNQRADITYDDIKNLAGSPGIKRALWRSVRIVDEIVDTIGYEPKLISIEMARNEDEKVRTKSRYSQLEKMYKELYGKEYTKSDIKSQLANYKDKLDRKKYYLYFLQNGKCAYTGDPLDIENDLRDSEIDHILPRSLTKDDSLDNTVLVLRKENQRKLDDYPIAPDIQNHMRPIWTSLKNAKLMSQLKFQRLTSQKQLSEDRVAGFVNRQLVETRQITKHLARMLTEKYHDSATEVFTIRAGMSSEYRRIHDLPKCREVNDLHHAKDAYLAAVLAQYIKIRYPKLDKAFVYGEYMKFKSKKQTNMDRSSFILASMSYDLTNKETGEIIWQSKITHDVIDRTMKYNDCLITKKNEIGDNQFYDQTIYGKNSGATMITRKANLPVDKYGGYSGRKAAYFMAIRYLKQVRNKDVFVNEIISVPTQIYTLEKTKTGSINEYIRNNYKQAKVLISKIPINQKIEHEGNEQFIVGSSEVTNAKQLKLPYNIEYAVAVALKQGIPRITITEEQATSDDELQNKRNKQIERRNKVINGVEKFWGIYAEKLANQYQQFGNAGPNAQSALAEYSELSLDDKIKVIGLVLRATHAGSDRVDMKGSENKPVFPELGLPNSFGRMAGKSLDPTKLTFVYESITGLHRRKLDGKSLGRDR

SEQ ID NO: 4724 - protein, 1339 aa, unidentified
  REGION 1..1339: note = Description of Unknown: Cas Enzyme sequence
MKQPYSIGLDIGTNSVGWAVINEDFSLCKYKHQNMWGAHLFGEAQKAVTRRLFRSSRRRLARRKRRITLLQQIFDNEMQKVDPHFYLRLSESMLHVGDKSSTLELDANILFADRSFTDKSYREKYPTIYHLRSSLFHDSKKQDIRLVYLALHHLIKYRGNFLVEGGVDNVISSFDSQNLQTFMDFIGADESMAQKVKTILLDRSLSRSTRKSAIIELLQPSPDNKKTISEAVGAAIGLKWNANKLFEDDSLEAKGEFSNKNYEEQRDEVAAAIGDDRYELVETLESVYQWTIFSQFIRKDSCLSDIMVEKYDAYRQDLSDLKALFHEFLPQKYKTFFHGGAAEFELYNNHKRNLDDLYKSIKKQLGEVAKDDPCYQRFEKRAELEEFLSRQRIRDNGAIPHQIHQYELERIIDNQARYYPFLAQNRDKIISIFTFKLPYYIGPLKTGGDFAWSVKKKDGVIYPWNFDEMIDDEASAEKFIDRMRNNCTYLPDEEVLPKNSLLYQEYEVRNELKNVTVNGERLSPDIQNRIVDELFTKELSVTYKKFIKYLYDNQIYNTDSLIISGTAKEKSFASSRKSYIDFMQKVGVSITPKNQQAIEEVIKWITLFEDKKILAKKLQKHSDIFNEYQLRTILKLNYSGWGRLSHKLLDGITAHTPYGELTVIETMRSSKDNFMQIIQSDRYEFKKIIDDILSADQRTDIAYDDIKKLAGSPGIKRALWRSIRIIDEIVDTIGYEPKLISIEMARNEDEKVRTKSRYGQLEKMYKELYGKEYTKSDIKSQLADHKDKLDKKKYYLYFLQNGKCAYTGEPLDIENDLRDSEIDHILPRSLTKDDSLDNTVLVLRKENQRKLDDYPISPDIQNHMRPIWISLKNTKLMSQLKFQRLASQKQLSEDRVAGFVNRQLVETRQITKHLARMLTEKYHNSSTEVFTIRAGMSSEYRRIHDLPKCREVNDLHHAKDAYLAATLAQYIKIRYPKLDNAFIYGEYMKFKSRRQTDTDRSSFILASMNYDFTDINTGEIIWQSKTAHDVIDRTMKYNDCLTTKKTEIGDNQFYDQTIYGKDSGVTMITRKANLPVDKYGGYSGRKAAYFMAIRYLKQVRNKDVFVNEIISVPTQVYTLEKTKPGSINEYLRKNYRQVIVLVPKIPINQKIEYDGNEQFIVGSSEVTNAKQLKLPYGIEYAIAIVLKQGIPHVTISEEQAADDNKLQRKRNRQIEKRDRAISGVEKFWGIYAEKLANQYQQFGNAGNSARNTLAEYTKLSLDDKIKVIGLVLRATHAGSDRVDMKGSEKKPVFPELGLPNSFGRMAGKSLDPTKLTFVYESITGLHRRKLDGKTLGQDR

SEQ ID NO: 4725 - protein, 1334 aa, unidentified
  REGION 1..1334: note = Description of Unknown: Cas Enzyme sequence
MMKQPYSIGLDIGTNSVGWAVINEGFDLRKYKHQNMWGAHLFDEAQKAATRRSFRSSRRRLARRKRRITLLQQLFDDEIQKIDPHFYLRLSESMLHLSDKNSALELDANILFADHSFTDKSYREKYPTIYHLRSDLFHNSAKQDIRLVYLALHHIIKYRGNFLVEGGVDNVISSFDNQNLQKFMDFIDADESMAKKVKAILLDRSLSRSVRKSDIIKLLQPAPDNKRVVSEAVGAAIGLKWNANKLFDDDSLEAKGEFSNKNYEEQRDEIAAVIGDDRYEIVETLESVYQWTIFSQFIRKDSCLSDVMVEKYDAYRQDLSDLKSLFHEVLPEKDYKSFFHGNDAEFERYNKHKYSLEDLYKSIKKHLSNVAKEDPRYQRFEKRAELGEFLARQRIRDNGAIPHQIHQYELERIINNQAQYYPFLAQNRDKIISIFTFKLPYYIGPLKTGGDFAWSVKKKDGVIYPWNFDEMIDDEASAEKFIDRMRNNCTYLPDEEVLSKNSLLYQEYEVRNELKNVTVNGERLSPDIQNRIVDELFNKEPSVTHKKLIKYLYDNQIYNTTSLVISGTAKEKSFASSRKSYIDFIQKVGIPITPKNQRAIEEIIKWITLFEDKKILAKKLQKHSDIFNENQLRTILKLNYSGWGRLSRKLLDGITAHTRYGELTVLETMRRCSDNFMQIIQSDQYEFKKIIDDILSLDQRTEITYDDIKNLAGSPGIKRALWRSVRIIDEIVDTIGYEPKLISIEMARNEEEKVRTKSRYSQLEKMYKDLYGKEYNNSEIKSQLADYKDKLDRKKYYLYFLQNGKCAYTGKPLDIENNLKDCEIDHILPRSLTKDDSLDNTVLVLRKENQRKLDDYPIVPDIQNRMRPIWMSLKNANLMSQLKFQRLTSQKQLSEDRIAGFVNRQLVETRQITKHLARMLTEKYHDSSTEVFTIRAGMSSEYRRIHDLPKCREVNDLHHAKDAYLAAVLAQYVKIRYPKLDKTFIYGEYNKFKSSKQNTTDRGSFILSSMKYDFTNTETGEIIWQGKTTHDVIDRTMHYNDCLITRKTEIGDNQFYKQTIYSTNSTNPKPAIPRKANLPVNKYGGYSGENVAHFMVIRYRKKGTLVNEIISIPTQIYTLDKTKSGAIDEYIRNNYNQAAILLPKIPINQKIEYEGNEQFIVGSKEVANAKQLKLPYDIEYAVAIALKQGIPRVAISEEQAADNNKLQRKRSKQIERRGRVIDGVEKFWEIYTNKLTNQYQQFGDAGHNAQNALTEYARLSLDDKIKVINMVLKATHAGSSRVNMSKEFPQLKLSSRFGRMDNKTLDPTKLTFVYESITGLHRRKLDGKSLRQGQ

SEQ ID NO: 4726 - protein, 1125 aa, unidentified
  REGION 1..1125: note = Description of Unknown: Cas Enzyme sequence
MNGLVLGLDIGIASVGVGILDKETGEIVHVNSRIFPAATADSNVERRGFRQGRRLGRRKKHRSARLNDLFEEFGFITDFSAVPLNLNPYALRVKGLSEELTNEELFIALKNIIKRRGISYLDDASEDGETASNEYGKAVEENRKLLADKTPGQIQLERFEKYGQVRGDFTVVENGENHRLINVFSTSAYKKEAERILRRQQEFNVRISDEFIEAYLTILTGKRKYYHGPGNEKSRTDYGRFRTDGTTLDNIFGILIGKCTFYPDEYRAAKASYTAQEFNLLNDLNNLTVPTETKKLSPEQKRQIVEYARTAKTLGTPTLLKYIAKLVDGSIDDIKGYRIDKSDKPEMHTFDAYRKMRTLELVNIDALSRETLDDLAHILTLNTESEGILEAINSKMPSTFTKEQIDELIQFRKKNSAVFGKGWHNFSLKLMNELIPELYETSEEQMTILTRLGKQRSREISKRTKYIDEKELTDEIYNPVVAKSVRQAIKIINLATKKYGIFDNIVIEMARESNEDDEKKAIQNVQKANEDEKKAAMEKAADLYNGKKELPDSIFHGHKELATKIRLWHQQGERCLYTGKNISIHDLIHNPHQYEIDHILPLSLSFDDGLANKVLVLATANQEKGQRTPFQALDSMDDAWSYIEFKQYVRNSKSLSNKKKDYLLTEEDISKIEVKQKFIERNLVDTRYSSRVVLNTLQEFYKTNDFDTKISVVRGQFTSQLRRKWKIEKSRDTYHHHAVDALIIAASSQLRLWKKQNNPLISYREGQLVDPETGEILSLTDDEYKELVFRPPYDYFVDTLKSKSFEDSILFSYQVDSKYNRKISDATIYGTRKAQLGKDKQEKTYVLGKIKDIYSQKGYEDFIKRYKKDTTQFLMYHKDPQTFAKVIEEILKTYPDKELNEKGKEIPCNPFEKYRQENGPIRKYSKKGKGPEIKSLKYYDNKLGNHIDITPVNSQNQVVLQSLKPWRTDVYFNPQTSKYELMGLKYSDLRFEKGSGSYGISPEKYNKVKAKEGVDEDSEFKFTLYKNDLILIKDTETGEQQLFRYGSRNDTSKHYVELKPYEKAKFEGNQQLMNLLGTVAKGGQCLKGINKPNLSIYKVKTDVLGNKYFIKKEGDQPQLNFKKKI

SEQ ID NO: 4727 - protein, 1382 aa, unidentified
  REGION 1..1382: note = Description of Unknown: Cas Enzyme sequence
MENIQYYIGLDVGTNSVGWAVTDTSYNLLRAKGKDMWGARLFDEAKTAVERRTKRTSRRRSEREKARKAMLKELFADEINKVDPNFFIRLEESKFFLDDRSENNRQRYTLFNDVTFTDKDYYEKYKTIFHLRKALINSDEEFDVRLVFLAILNLFSHRGHFLNASLKGDGEIQGMDIFYNDLYEACEEFEIDLPQISNTDNFEKILSQKGKSRTKILEELSKEMSISKKDKTKYAILKLICGMKIKVGDIYADEDIQDEDKKKDLGFRESDYEKSSLEVKEIIGDDHFELIERAKAVHDMGLLANIIGNSKYLCEARVEAYDNHHKDLQKIKELLKKYDKKAYNDMFRKMTDKNYSAYVGSVNSNIAKERRSVDNRKIEDLYEYIKKIALKNISDDNEDKIEILKKIETGEFLKKQLTASNGVIPNQLQSRELRAILKKAESYLPFLKEKGEKNLTVSERIIQLFEFQIPYYVGPLDKNSKKDNKVNSWAKIKQGGRILPWNFEDKVDVKASAEEFIKKMVRKCTYLSDEHSLPKQSLLYEKFMVLNEINNIKIDGEKISVEAKQKIYNDLFMKGKKVSQKDIKQELISLNIMSKDSVLSGIDTLCNSYISSIAKFRGVFDEEVNNQNIINMIEDIIFWGTIYSDEKKFVKEKIEEKYGDEIDKDKIKRILGFKFSNWGNLSKSFLELEGADVGTGEVRSIIQSLWETNFNLMELLSSRFTYMDELEKRVKKLEKPLSEWTIEDLDDMYLSSPVKRMIWQSMKIVDEIQTVIGYAPKRIFVEMTRSEGEKVRTKSRKDRLKELYNNIKEDSKQWVKELDAKDESYFRSKKMYLYYLQKGRCMYSGEVIELDKLMDDNLYDIDHIYPRSFVKDDSLDNLVLVKKEINNRKQNDPITPQIQASCQGFWKVLHDQGFISNEKYSRLTRKTQEFSDEEKLSFINRQIVETGQATKCMAQILQKSMGEDVDVVFSKARLVSEFRHKFNLFKSRLINDFHHANDAYLNIVVGNSYFVKFTRNPANFIKDARKNPDNPAYKYHMDRFFERDVKSKSEVAWIGQSEGNAGTIAIVKKTMAKNSPLITKKVEEGHGKITNETIVGVKEIVFGRKKVEKSDKTPKKPNVEAYRPIKINDSRLCNILRYGGRTSISSSGYCLVEYTKKKKTIRSLEAIPVYLGRKDILREEKLLEYLKNILNNEGKDTATDIRICIPFIPINSLIKIDGYLYYLGGKTGEQIYIYNAQQLKMKKEEAEYIRKIEKAVSLSKFDEIDREKNSVLTKEKNIELYDKIQDKIGNTVYNKRLSSIEGILKEGKAKFVELDVEKQCKILNSVLNNITNTMKVDLREIGGSVNSGTCRCSKNITNYKEFKLIQQSITGLYSCEKDMMTI

SEQ ID NO: 4728 - protein, 1276 aa, unidentified
  REGION 1..1276: note = Description of Unknown: Cas Enzyme sequence
MEKLDYVLGLDLGVASIGWAVMEIDENNEPVNLVDANSVIFEPLDNDKGKLYNVDRRNARGARRILNRRKERIRRTKNLLTSSGFLSDDELSKLYSGQIEDIFEIRKRGLTEQLNKNEIARLMIFYNKNRGFKSNRKTDDLELEEELKKLEKNNGKISEKASDNKANDEKKLKPLIALNTKRLQEENLMPIELIFKLKSEEDILGFKNKEGVYKFGFKRDQIEKEIEYILERQELVSKELLEKYMNILKSQRDFSEGPAEPSKYRIDWESKTGACKYTGEKRVVAGAPSYEIFCMLQKLTDLRYIYIADETKKGKFKLEKEHLDKIYNKALKAKKVTYKDVLDILDDENVRILNIPQLEIKEYKKIKEKFQGELTEDQIKELNNKLNTERHKISIFELKQYKDLLAQFKKNDITEDNIEQLGGINLLDKVAELLTYAKTDKKLEEYHTKDRYKDIPKEIIEKIKTFKTLNKTGNLSLNLVRKLNEKMLEGNDYEKSLSSLEYSIKSNDNWDKFPTVAQIEEAFNTKITNPNVKHIMVILRKLYNTLLEKYGKPKKVHLELARDMANDFSTRIKIKKEQEKNRAYRELKSFEVYNNNLDIVGHKNKLSNDDILRFRLYDEQNGICIYSGEKIDKSKLRTSEYQVDHILPYSKSADNSFENKVLVYAKENQDKKERTPYQWLKGTQKWLQFKHRVELNTHMKDKKKNNLLFTDEVKIDEFLDRDLHATSYSSRLALQVFKSLISPDERDIKDENALYIYHRNVVAFNGSMTSQLRSFYGLNRFTHSFESEDLRISKNYRIDEIKYTKDELILVAKNEKRGLEISENRKIEYTDKSKKTFKTETDRIIFEEIIRKENIDNISNELKGKYVEDITEKDFRDILDRNENIPTELISTIYQLNSLLKQDINSKNRENHLHHALDATLLTIMNHSMQQRLTKFNQILQKMSNSPEEYVDEETGEIMTYKEAVEKLREDIDVKYIDLYNKKATQTYKIPGTNEKISLSLPYVNFIEDIKNIIFVKNENDSSFKLPYHVFKKKTSGQLHAETILGESKGLVTKRVSVFDIKDSKNLEKLFDKDGSQKEIYETLLKWLEEKSKDYPKLKNGHIIKKVKMVDENKDKLIKLGEKRYVQMGQTTVKILVLKKKDEDGYRMASIGRYNYNKMKKGEDFKIQIWEKQQTSEMINFSELEKNNYEILFELYPSELIELENKQGGKIKCKVTGFASGMFEVKSIIGDSTDLIRNGVFNNIINRYYITISTIKNIRKVKYNILGDKVCHSGKY

SEQ ID NO: 4729 - protein, 1338 aa, unidentified
  REGION 1..1338: note = Description of Unknown: Cas Enzyme sequence
MKKQFGEYYLGFDIGTDSIGWAVTDLEYNIQKLNGKALWGIRLFDAGKTAEERRLHRSARRRRQRQIQRIDLIKDLFAKEIDKVDPGFYLRLEESKFYPDDKSILQRNALFNDINYTDKTYLSEFPTIYHLRKALIENKKAYDIRLLYLAIHHIIKYRGHFLFEGQDMNNVKNVRPLFSQVNQYLTDEYETEFAFSSLEEVENILKDKSLKKRDKKKQLLNILSVQEKQQQIIVDLICGYTIKLSDLFCEDEYEDSELNKITFSDGSFDEKKDSISDLIEDKMFLVETLKAIYDWGLLAEILHGYEYISYAKVDIYEKHKKDLKLLKNVIRKYTDKSTYDSIFKSHKEQNNYCAYSAKNSSKKEEPNKKCTQEDFCSYISKILNKISVIDENLDYLKKEAENISLLPKQVTKDNSVIPCQIHLHELRKILDNATGYFPFLKDSDEKGISVYDKIISIFQYRIPYYVGPINNAHKDTGFSWVEKRVNEKVYPWNFSEVIDEESSAEKFIRRMTNKCTYIYSADVLPKNSLLYSEYQVLNEINNLRINDNPISNSLKMEMFENLFLKEKKVTIKKITSYLISNGYITHGSAISGIDIEIKSSLTSYIDFKGILGNKANDKDMVENIIKWITLFGDSRKILCEKIKSEYGSIISQEEITNLSNLKYKGWGRLSKELLCDVYDVDKETGELVNIISMMRGKNENLMQLLSSRYSYSDKISQINAKSVNRNNEISYDIVDELRLSPAVKRGIWQSLQILNELLKIMQHSPKKIFIEFARQEEKVKKRTISRKESLVELYKSCKDQYAELVSDLEVKTDSDFRDDKLYLYYTQLGRCMYTGESIDLFTLLSDTTSMVYDIDHIYPRSKIKDDSLENRVLVKKTANMQKGDNYPLPVSFMQQKALWNHLHNCKLIGDKKYNRLTSRNSLTDDELANFIERQLVETRQSTKAFAEILKTVIPESDIVYVKANNVSEFRNNFEIVKIRDINDLHHAKDAYLNIVVGNVYDVKFTRNPRNFIVNSNAKYNLRDLFKYDVRNQNCTAWKGGKEGTIITVKKTVEKNNILFTRYSYEFKGEISDQQLKRKGKGQLPIKASDKRLLNIERYGGYNKASTAYFFLVEHDKGKKRIRSIEYVPVHLAKDIEKDNSKLLRYCKEDLNLGNPDIKISKIKINTLFAYNGFLMYLKARTGDQYVCNLGFQLYLPIEYEKYIKNIYKGIDGVKSKKTSKENAGINFEKEINIKIYDYLVNKLNNTIYSIKLVEQGKFLEEARDKYIRIDEYDQAETLTKVFNIFMCNSALSDLTLIGGTKNHGRIYFSKNIGKENKISIINQSITGVFSKEVNLNTI

SEQ ID NO: 4730 - protein, 1163 aa, unidentified
  REGION 1..1163: note = Description of Unknown: Cas Enzyme sequence
PLLSQVNQYLNDEYETEFLFNSLDEAEEIIRDKSLKKRDKKKELLSILSVQEKQQQTIIDLISGYTIKLSDLFCEDVYEDSDLNRITFSDGSFDEKKDSISDLIEDRMYLIETLKAIYDWGLLAEILLGYEYISYAKVDIFEKHKSDLKLLKKVIRKHSDKQTYDSIFKSHLEKNNYCAYSAKANSKKEEFGKKCTQEEFCSYISNILKKINADDSDLEYLKKEAENLVLLPKQVTKDNSVIPCQIHLHELRKILDNASAYFPFLKDADEKSISVYDKIISIFQYKIPYYVGPINDAHKDTGFCWVEKRVNEKVYPWNFSEVIDEEKSAENFIRRMTNKCTYIYSADVLPKYSLLHSEFQVLNEINNLKINDEPISNNLKTEIFEKLFMQEKKVTRKKIASYLITNGYITSGVAISGIDIEIKNSLSSYIDFKDILGDKANDKDMVENIIKWITLFGDSKNMLINKIVKEYGDVINQEEIKKISNLKYKGWGRLSKELLCNVYDVNKETGELTNIITKMRESNNNLMQLLSSRYYYLDNITQINSNSIKKSKEISYDIVDELRLSPAVKRSIWQSLLILQELIKILHHSPKKIFIEFARQEEKAKKRTNSRKESLIELYKNCKDQHAELVSDLVIKTDADLRDDRLYLYYTQMGRCMYTGETIDLFTLLSDTTSKIYDIDHIYPRSKIKDDSLENRVLVKKTANMQKGDNYPLPNNFMQQKVLWNHLHNCKLIGDKKYSRLTSRNSLTDDELANFIERQLVETRQSTKAFAEILKGVIPESDIVYVKANNVSEFRNNFEIIKMREINDLHHAKDAYLNIVVGNVYDVKFTRNPRNFIVNSNAKYNLRSLFVNDVMNQNCIAWKGGKEGTIATVKKTVEKNNILFTRYSYEGKGEISDQQLMKKGKGQLPIKERDKRLHNIERYGGYNKASTAYFFLVEHNKGKKRIRSIEYVPVHLAKRIENDSSELIRYCKENLNLVNPDIRIPKIKINTLFSYNGFLMHIKSRTGNQYVCSLGSQLYLPAEYEKYIKNIYKGIDEVKSKLLSKELASRSCNKEINMEIYNYLNNKLRNSIYSIKLVKEGDLLKEKVEKFIALDVYEQSELLTRIFTILRCNSSLSDLRLIDGNKSHGRIYFSGSISKGEKVKIINQSITGVFSKEVDLNTI

SEQ ID NO: 4731 - protein, 1383 aa, unidentified
  REGION 1..1383: note = Description of Unknown: Cas Enzyme sequence
MMKEIRNYFIGLDMGTTSVGWAATDENYEIIKKNGKALWGIRLFDEAQTAADRRMHRIARRRIDRRSRRIDLLQELFAQEICKKDPGFYERLNESGLYEEDKTVHQKNSLFNDVDFDDKAYYKEYPTIYHLRYDLMTKDRPFDVRLVYLAVHHILKHRGHFLFDHFQVDENGVSGFEESFAAFGDAFAHIKGESFDMGKEEEMKALCRDKKLGVRHKALALAQCLGRSKDKDFKAMMTLAAGGTALLSEVFKDEGLKDFSKNKVSFSDSQFENDKPEIIAELGDRYDLIAALHGLYNWSFLAELMRGHKYISEAKIEIYDKHKEDLALLKKVLKQDRSVYNLMFKEPGDKKPINYSAYVKACKTNGKKLPLPYGKFKYEEFIKTVKFCLKNLPDSPDKKNIENKLEEGSFLLKAVSVENGAIPYQLHLQELKIILSKAEAYLPFLKVRDQYGTVSDKIISLFTFRIPYYVGPINEHAGSCWVVKKDKQGKVYPWNFTEKIDIEKSAEGFIRNLTNKCTYLIGEDVLPKNSLLYSEFTVLNELNNVRIGETMQKLPIRLKEKVMDNLFRRHKHVSRTKFIKYLVSEGIDKKEAESISGLDRDFKSSMSSLIDLTNILGNDFSREDGEQMIKDITIFGGDRKMLKSRLHREFPYLTPEQLTRLIHLSYQGWGRLSKELLVNLLPAEKSAGEVLVDKGSGEVLNIISAMEQTSYNLMELLSSRFGYAKAIEERNREKEGNGTISYQDVEDMYISPAVKRPLWQALKIVREIVKILGKEPSKIFIEMARENGEKGKRTISRKARLQELYKKCRDDSRDWAKELEGKSEEDFRSDRLYLYYTQMGRSMYTGKPIDINQLFDRNVYDIDHIYPQSLTGDDSLDNRVLVEKTVNAKKGDTYPLGSALDGCHIGGQIHIQDIQKEMRPFWRMLLEKGLISKEKYNRLLRTTPLSDTEKAAFIGRQLVETRQSTKACAELLSKAYPETRIVYTKAGNASRFRQYGGFIKVRDMNDYHHAKDAYLNIVVGNVFDTRFTSNPLHFLKGNHPVYSLNTEALYGHKVSRGGVDAWIPAEKDDEGHIMAGHEGTMGTVRKWMRKNNILFTRMPLEGKGGLFDQTIMKKGKGQVPLKGDSPVSDIEKYGGYNKASSAYFVLTSSKLKDETIYTIETIPLIIKRMIQTNKDKEDYIKRHWKDHGKKMVNPHICYGHIPVQSLLEINGFKVHLTGKSGKDFKLRNAEQLCISNDDAAVLKRVLKYNERSSSSKGKEALLITPFDNIQEVDLNRLYQVFEDKLTNQVYKVKLGKQASVLKKGEDKFNELPLEVKCRVIGEILHLFQCNAAIADLRLIGGAKNAGALTMNPRVSPEDHVYLIEQSVTGFFEKRILLAPYGEK

SEQ ID NO: 4732 - protein, 1339 aa, unidentified
  REGION 1..1339: note = Description of Unknown: Cas Enzyme sequence
MKYSIGLDIGVSSVGWACMTSGYRIPKFNGKYAMGVREFETAQTAEERRLQRGTRRRYNRRIKRIQLLQRTLAPLFLSEPDFFHVSNEQEKHFWKNSNDFENNSLSETLTYLGESKRKYPTIYHLREALIKEDKEFHPRLIYLALHHLTKFRGHFLNENMNWNSNQDENDLAINIQIYFELLEEKLEYPHVKLTKENIESIITILEDKERNNSDKRRDTLKLLHKDYREAISLLVGLSSNAYKYFHNSPQSQMYKEEEVKLDITKDDFSESYEKLLDEEKLIVDQAHVIYQEIILKDLLGKANFVSEAKVNIYNQFREDLTELQNVFNKYFDEKAYRDMFITSSKNKTIFEQTRDEKALCEFDKFLKLKSKYEEKFYRDLKKILENQVEKEKKETNQLELQNIINRLDKNQFLEKQKGQMNAAIPHQNNVYEAIAILKNQQVYHTKITDEMVERVEQIISFRIPYYVGPLVKENHQGEFGWVKRKSQDSILPWNFEETVNRSQSAEEFINRMTSTCTYLLNEKVLPRHSLMYQKYEVLNELNGIQIRSETEKRHNDFRLDKEVRMWLLDTVFMKYKTVTHKRVIDALKQKYQSIAYDANGELRKVYGTQEENRFSTNLSSYIDMWQIFGDLNKIDHKMLEELIYWISVFEDKEIIELKIKEKYPTITTKQINQLLSKSYTGWGRLSSKLLGEMPIDKVKKLTFLDIMENEPKVFMEILHEEKYDLKERIAKQNQAVDKHGIKIRYKDILELHGSPAIKKGIWQAILIVEELVDIYGEPEHIMLEFAREDQLSQRTKSRKKILTDIQKNMSNTDKGLKKFLQNELNRDEAAYRDPRLYLYITQEGKCMYSGESLKVTELQTYEVDHILPQSFVKDDSYNNLALVTKAMNQKKSGTKMPLEIMNHAQRHEQKVHWDKLLDNNLISRQKYSRLMKESFNDQDKESFFARQLVETRQITKHVKDLLDERFEDTEVHTVNANIVTNLRKNIGAYKIREMNNKHHAVDAAFTNLVVQYIINNFGSNFLNFNFKHQEARRKWKDMMFKYKKNFFLFSQIKEATDFKHFQTEEKLSGGEYLRSINDEMPWQSTKKIGTSEAAFYKETLYSPKVKDAKYKTPKISKGVYDEVKTESSYLISYKEKNKKNKEQIINAIVDLTVLEKYQTKELTQKEKAVFLAEKVANNKVIDSKIHTSILKYQNVIVNNHKFNYVSSREMHNGKQLVLNKKTLQKLYEALNNNEASIEYYQTVYKDIVEVILNNYKEIITQSNILKINESLNDVKDRKSFKELIEELFKLTSANATRSTMFGGRYTRKQNPEEIKLVHESITGLRYRKPKSYKHELWSK

SEQ ID NO: 4733 - protein, 1352 aa, unidentified
  REGION 1..1352: note = Description of Unknown: Cas Enzyme sequence
MSNKNYTISLDIGTGSVGWAVLCESKSDNLLAELAKSNRKIKIVNGDGTSYKNTRTNLWGARLFDGAETAESRRIKRGQRRRILRRKGRVNYLREIFMPYMETVDPNFFDRLDESFLQNRDGKKKFKTEKGKGFLFAGKVGDGESYALDADYYEKYPSIYHLRSHLLKATHKVDLRLVYLAMHHIIKYRGHFVNENRAINVEDFDTKDDLNNLIATCTEISIGGFGDVSEKNLTDASDILKNKKLSITGKADALVEIFGKESKDIFTAAVGGSINLEKIFINADYKYEDGGDIPKPAAFKFSLEAEKVEEKMAQAEQILEDSDKIKVLHLAKQVYSSMILSGILTKPTLLESMVDRYNTHKEHLAALKRLLSCDKSTYREIFGKNGLYEKYVHAAKDMPQDKFYKELEKFPLTKEMRDAIKQEIFLPKQRYRVNGEIPYQIHEHELCKILENQKAHYSFLGERCEIRSGKEEYKIQALMKFRIPYYVGPLAKHKKANKKHWLEKQPGMEAEKITPWNFDKVVDKDASNTNFIERMTRECSYLPYEKVLPKHSLMYQEFAIYNELMSCGYFGVDFDGTNKKIFFSSEQKQKMVDGLFKANRKVTVNKMLDFLSAEGYASGIARGQLFGVDVNVNAPKYNASYSTHIDLVQALGGENAEQLIAVHKNRFEEIIKWATIFEDKDILKRRIKKANAEKWGHFLTGKQVSKLSKLRYRGWGRLSAKLIGGIKAGNGKTILENLKEGSYKNFMRLLEDEKIEAAIKSAELIKGDLDKLDYALIESLAGSPAIKKGIWQSLKVIQELENFLGKENIGKIVVEISRDTGGQKGKRTKTRWQRLNEYYQKSGNKMMDELARYKETPKILDNERFYLYFLQNGKCMYSGEALNIGELSAYEVDHVRPRSLITDNSIDNKVLVKRIENQKKTDDVLSLATIRKMSPFWELLAKNGQVSPQKLANLKRDKITAADKQGFINRQLVETRQITKHVVNILSEHFKGDDIEVLTPRAGLTRQFADEFELPKKNRDINDYHHAHDAFLNGIVATYIYNAYPELKDLWVYGNYVRKREKTISDKELKNLIKAMKEEPWVNRESGEIIADKEKTMGMIRKVLTYRNVNIVKKTEILDGGFGDETIGTKGKDKIPVKNGLDSALYGGRTAPRSAFAVIVKNAKGGIETLSVPVASTEQYKNASNKLAFLAKLYPKKKLAEILVEKVEKYTQYRLPNGGTRLLASYQEAQNGMQMKMYKPPTENSSKDELIAAYDLLADFICANNLFAEAKKGLLKNEMRESFICSKPDVMLKAVSELARVTKGSNQGLSTLKELGLGAINQQLTASDQKITLGTTIIYRNATSLHETRVEL

SEQ ID NO: 4734 - protein, 1251 aa, unidentified
  REGION 1..1251: note = Description of Unknown: Cas Enzyme sequence
MPHIASVDPNFFNRLDESFLQNHDDAKKFITEKGKGLIFAGKIGDGESYALDADYYAKYPSIYHLRSHLLNATHKVDLRLIYLALHHIVKYRGHFVSEGRDITPENFDVKEDLKNFIAACTEIGIGGFDNVSDENILAANAVLTDKKLSATRKTDELAEIFGKKSKDVFAAATGGSINLEKIFENPDYKYEDGGDIPKPADFKFSLEAEKVEEKLAQAEQVLEDAEKIKILHDAKQVYSSMVLSGILTKPTLSASMVAKYNTHKEQLAALKKLLKSDKTTYVAIFGKGGIYEKYVHAAKDMSQDEFYKQLKKLPLTQDMFDAIERENFLPKQRYRVNGEIPYQIHEYELCKILDNQKTHYPFLDEACERIQMLMKFRIPYYVGPLAMHKNPEKNHWLEKQPGMEAKNITPWNFEQVVDKDASNTNFIERMTRECSYLPGEKVLPKHSLMYQEFAIYNELMSCGYFGTDFDGKSKKIFFTPEQKQKMLNRLFKANKKVTVKAMSEFLDSEGYVSGIAKGQLFGVDVNANAPKYNASYSTHIDLVQALGVENAEQIIEEHKTRFEEIIKWATIFEDKALLKRRIKKANAEQWGNFLTDAQVNKLFRLRYRGWGQLSAKLISGIKTDNGKTILENLKEGSYKNFMRLLEDEKIEAAIKAAELKKGDSEKLDYALVENLAGSPAIKKGIWQSLKVIRELEEFLGRENISKIVVEVARDTGGKKGRRTKTRWRRLMDFYKSKNGEATDTDALKKDLAGYEKNEKALGNERLFLYFLQNGKCMYSRESLNISELSAYEVDHVKPQSLVTDNSIDNKVLVKRIENQKKSAEVLSTATISKMSSFWEMLANNGQISPQKLANLKRDKITDADKQGFINRQLVETRQITKHVVNILTEHFKGDNIEVLTPRAGLTRQFADEFDLPKKNRDINDYHHAHDAFLNGIVATYVYNAYPGLKNLWVHGSYVRKREKTISDKELKNIIKTMKDEPWANRETGEIFADKEKTMGMIRKVVTYRNVNIVKKTEILDGGFGNETIGKKGKDKIPVKNGLDTALYGGRTAPSSAFAVVVRTAKGDIETLSVPVASAESYKNSPDKLAFLTNLYPKKKLTEIVVGKVEKYTAYRLSSGGIRLLASYQEAQNGMQMKMYKPPTEESTKNEFVATYDLLADFIYANNLFTEAKKELLKTKMRENFICSEPAVMLKAVRELARVTKGSNQGLDALKEIGLGTAAQRLKGATIIAGTTLIYRNATGLHETRVEI

SEQ ID NO: 4735 - protein, 1382 aa, unidentified
  REGION 1..1382: note = Description of Unknown: Cas Enzyme sequence
MENKQYYIGLDVGTNSVGWAVTDTSYNLLRAKGKDMWGARLFEKANTAAERRTKRTSRRRSEREKARKAMLKELFAEEINKIDPSFFIRLEESKFFLDDRSENNRQRYTLFNDATFTDKDYYSKYKTIFHLRSAIINSDEPFDVRLVFIAILNLFSHRGHFLNASLKGDGDIQGMDVFYNDLVESCENFEIDMPRITDIDNFKNILSQKGKSRTNILEELSKEMSIAKKDKVKYALLKLICGMKIKVGDIYTDEDIQDEDKKKDLGFRESDYEKSSLEVKEIVGDEYFELIERAKAVHDMGLLANIIGNSKYLCEARVEAYENHHKDLQKIKELLKKYDKKAYNDMFRKMTDKNYSAYVGSVNSNIAKEHRNVDNRTIEDLYEYIKKIALKNIPDDNQDKIEILEKIQTGEFLKKQLTASNGVIPNQLQSRELRAILKKAENYLPFLREKGEKNLTVSEMIIQLFEFQIPYYVGPLDKNPNKDKNSNSWAIIPSSGRILPWNFEEKVNVKDSAEKFIEKMVRKCTYLSQERTLPKQSLLYEKFMVLNEINNIRVNGEKISVETKQKIYNDLFIKGKKVSQKAIKQELISLNIMDKDSVISGIDTMCNASLSSIGKFRGIFDEEINNQSIINIIEDIIFWRTIYNDEKKFVKEKIEEKYEGKIDKDKMKRILGLKFSNWGNLSKSFLELEGADTDTGEVRSIIQSLWETNFNLMELLSSRFTYTQELEKRVKKLEKPLSQWTIEDLDDMYLSSPVKRMIWQSMKIVSEIQTVLGYEPKRIFVEMTRKEGEKVRTKSRKDKLKELYKKIKDDSRQWIKELDAKEESYFRSKKMYLYYLQMGRCMYSGESIDLDKLMDDNLYDIDHIYPRSFVKDDSIDNLVLVKKDINNRKQNDPITPQIQAQCQGFWKVLFDHGFMGNEKYSRLTRKIQEFSDEEKLSFINRQIVETGQATKCMTQILQKSMGEEVDVVFSKANLVSEFRHKFNLFKSRLVNDFHHANDAYLNIVVGNSYFVKFTRNPANFIKDARKNPDNPAYKYHMDRFFERDVKSKSEVAWIGQSEENAGTIAIVKKTMAKNSPLITKKVEEGHGKITNETIVGVKEIIFGRKKVENIDKSSKKPNLKAYRPIKTSDVRLCNIKRYGGRGSIKASGYCLVEYTKKKKTIRSLEAIPVYLGRKCSLSEEKLLEYLKDVLSDGGKVAISDIRICLPFIPSNSLVKIDGYLYYLGGKSNDQIQLFNAYQLKMKKEEIEYIRKIEKAVLLSKFDEIDREKNPILSKEKNIELYEIIQDKIENTVYSKRLSSFEKFLKEAKFKFININIDIQCKVLYNIIFNLANLQEVDLSDIGGTKSKGKCLCSKNITNYTEFKLIQQSITGLYSCEKDLMTI

SEQ ID NO: 4736 - protein, 1353 aa, unidentified
  REGION 1..1353: note = Description of Unknown: Cas Enzyme sequence
MEKDYYLGLDMGTDSVGWAVTDENYNLIRAKGKDLWGVREFESAKPAADRRSYRISRRRRQREQVRLGMLKSIFADAIKEKDHLFFIRLENSKYWKDDKNSKINTKNVLFDDPGYTDADYFKEFPTIFHLRLKLMNDDSGRYLSDPRFVYLACLQLFKHRGHFLSDISDETDPSDLSSTYERFKSLYCELTGYEFTAKDVAADDIMNVLSDRNLSRTAKKEKLIDVFSFSKSDSSKTECLKSICGLESDACKIFPDLKTEDIKKLSFNFSKSDYEEKSAELNESVGDEYFELISILKDIYDKGTLADILKGKKYLSEARVEDYNKHKKDLVLLKSVYRKYKTQDEYNEMFRDPTKGYGAYIGSNFTKDKKTSRRGSKSRDVFYDYLKKSLKGLEEDPDVKTIFDDIAKENFLVKQLTSSNGVIPNQVHLKELKKILSNAENYLPFLKETDESGLSASQRIISIFSFTIPYYVGPVSELSEKNGGNGWVVRKEDGKVYPWNFEDKINISETKRRFIDRLINECTYISGEKVLPKQSLIYQKFAMLNELNSVRINGERLDVEFKQKAFKELFSKGKQVTLNEFKNYLNNNGINIDEKSEISGVGKSSEMTRFNNKLSSYQVFHSVFGDKLEDKKYYDAAENIIYLGTIYADDKKTFKKAIEEKYGDFLTPDEIKRVSGLKFKDWGTLSAALFNLQGAEKSTGEVMTLIDALWNTQLNFMELINSDAFSYKEELEKYKKKGEGTIQNFKFEELNDYYFSAPVKRMIWQTVLIVREIEHVLGKPPVKMFVEVTRHDEEKEKIPPSRKDTFLSLYKNIKDESHDWKAIIEKADESGVIRSQKMYLYLSQMGRDLYTGKEIELDELFTTKYDIDHIIPQSLKKDDSILNNKVLTSKDFNNNIKQDNPLCEAIDDAHYAERKKLWDRLHNYNLINDEKYKRLTNRKGFSEEDLEGFIARQIVETSQAVLGVINIFKEIMPDTKIVFSKAKPVSDFRKDEIGWFKSRTLNDYHHAHDAYLNIVVGNVYNTKFTDNPRNFIKKERQKDLNPNYHMNKVFWYNVERGGKVAWIAGEDGTKKTVLKTLAKNSELMTRQSFEQTGGLCNQQITNKDDAGSGIGYLPVKMGEDISKYGGYAKISQSYFFLVEHTFKKKRIRTIETVPAYLKSQIESDPDALKRYCAEKLGLVDPDIRLRRINYQSLAKYNGFYVTICSKTGVRFNIANAVRLTLPKEWNNYIKKLEKTEGDEEITEEKNIELYDILTDKHLNSIFLKRPNPVGENLKNGREKFVSLSKKEQVSTLNNILLFTGFASAGKADISSIGGSKNAGAMAVSKNVNNADEFILIENSVTGIYSVRKDLKTI

SEQ ID NO: 4737 - protein, 1105 aa, unidentified
  REGION 1..1105: note = Description of Unknown: Cas Enzyme sequence
MGIRIGLDIGIASVGWAVVDDDYNIIESGANIFNEAKAASNVDRRTFRQTKRLLRRQKTRLRDFDILWINAGLDIPKEKVNKQLQFRVQGMTMELSENELYAALKNMLKHRGISYLEDALDEEQSGKSTYEKGLQVNQKALKCDKMPCEIQYERLMKYGSYRGHIEVKDESGEEMILSNIFTLDAYCKEAKKILECQKQYHSFITEAFEDDYLALLRRKRKYYEGPGNEQSRTDYGKYTTKLNPETGEYVTEENIFEKLIGKCSVYPKEMRASAASYTAQIYNMLNDLNNLTINGRKLEYEEKKSIVEEVQKASSVNMLKIIKKVINEDITTIEGARKDKNDKEIFHKMETYNKMRHYFEKNGLEFKKISTDDLDEIGNILTLNTEKEAILEAFNKSQLELSQEEKEAFIEIRKKNGSLFNKWHSFSLKIMKELIPELYLQSKNQMQLLTDMGVFKKKTEIFQNYDKIPTDVIIEDIYNPVVKRSIRITVKIVNALIKKYGYPREVVIEMPRDRNSDEEKKRIQDEQKKNDTELKKIIEKVESEYGIKITDTHFRNHKNLRMKLRLWHEQDGRCLYSGKVIDISELLNDCSKFEIDHVIPKSISFDDSRSNKVLVYSTENQKKTNQTPYQYLEGNGKEWSFDEYMNQVIELKDRKLISKAKMNKLLFREDITKIEVLKGFIARNINDTRYASRVVLNSFQKYFESKQSDTKVKVIRGSFTHQMRKKLQLSKNRDESYAHHAVDAMLICYSQMGYEAYRQLQEDLIDPDSEKIRDLGLWKETITEAKYDEVLYTAKWLENRGKIQEAEKKVKFWHKVDSKANRALCNQTIRGTRVIDGSIQKINKINIYSVDGYKTFKNMIQKGKEKDFLMYRNDRRSWDDLMKVYREYSDAKNAFAAYQEETGDYVRKYAKKHNGSKITNLKYCAKELGSCIDISHKYGLEKDSRKVILESLSPYRSDVYYNAGLKQYYIVGIKNSDLCFLKGEYFIDSKRYLQILREEGVLTEQHTLNDLAAIGTEFQFSLYENDYLEYEKNGEIKTERFLSRTKPKQKNYIETKSIDAPKIKNKKQNLVGLAKSKSIKKIRVDILGNRYYASKEKFSLMVDKF

SEQ ID NO: 4738 - protein, 1108 aa, unidentified
  REGION 1..1108: note = Description of Unknown: Cas Enzyme sequence
MKYDIGLDIGVASTGLAVVNEEGKVLESVASLYNEADAASNVDRRDFRDGRRTKRRKHTRIEDFRKLWNKYGYVIPEKLDNNVLVLRNKGLKEKISMEQLYAVLLSMLKHRGISYLDDAIDETKGSNYAKGIALNQKELQNKFPCEIQAERFKKYGKYRGDSIIKDGEEEEYHSNVFTTSAYQKEIDKLLDTQIKFDLGITPEFKEAYMSIFSRKREYYIGPGNEKSRTDYGVYTTRKTEDGKYFKEKNIFEKLIGKCSIYPEELRAAGASYTAQEFNVLNDLNNLTVNNRKLSEEEKRTIVATIKESSSVNMRSIIKKVIKEDIEQFSGARIDTKEKEIYHTFEVYRKMKKAFQTINVDINDFSREELDKFGKILTLNTEKDGIIKAFEVMEKKYSDEIINMLVDLRKKNSSLFNKWHSFSLKVMKELIPDMYVQSKEQMQLLTDNKMFKPKTSKYNGYKYIPVERVIEEIYNPVVVRSVRTTVKMINAVIKKYGYPENIVVEMPRDKNSKEEKNRIKKAQEKNEKEYENILNKIQNEYGIEITKADYRRQEKLPLKLKLWNEQSGRCLYSGKTISIESILDNPQLFEIDHIIPRSISFDDSRNNKVLVYRTENQEKGNRTPYMYLSKLDREWNFEQYKNYVLEMKKKNGISNKKVQNLLFMEDINKIDVLKGFISRNLNDTRYASRVVLNELQAFFKTKEDCNTKIKVIRGSFTHQMRVNLRLEKNRDESYSHHAVDAMLIVFSQRGYDAYRKLQETCIDFETGEILNEQKWEECLDEDKYDQILYEAKWSKIKDEIQEAEKHVKYHYKVDKKCNRGLCKQTIYGTRIKNGVPYKICYFDIYNNADYKSLIKMIKSGKESDILMYNNDSKTYQDMLKIIKEYSSEKNPFVAYNQETGDYFRKYSKKHNGPKIEKIKYYKEKVGSCIDILHKYGHEKGSRKVILGSLNPYRTDVFFNNTTGEYYLVGIKYNHIKCKGNLYVVDEESYNNLLINAGAIKEGETLQDLEKMNIAYKFSLYKNDIIQYEKNGEFYTERFLSRTKEQNRNYIETKPIDKPFLKKEGKDGKMENKQNLVGLGKTKFIGKLVTDVLGNIYEVKQEKFSLVIDN

SEQ ID NO: 4739 - protein, 1108 aa, unidentified
  REGION 1..1108: note = Description of Unknown: Cas Enzyme sequence
MKYDIGIDIGVASTGLAVVDEEGRVLEATSSLYTEADAAANVKRRDFRDGRRTKRRKHTRIEDFKNLWSDCGYIIPDKLDNNVIELRNRGIVEKISMDQLYAVLLSMLKHRGISYLDDAIDEAKGSNYAKGIALNQKELKNKLPCEIQAKRLEKYGKYRGDSTVKNGEEEEYHSNVFTTSAYRKELDKLLDTQIQFALGITSEFKEEYMKIFSRKREYYIGPGNEKSRTDYGIYTTRKDEDGKYVTEKNIFEKLIGKCSIYPDELRAAGASYSAQEFNVLNDLNNLTVNNRKLSEEEKRKIVATIKESNMVNMRSIIRKIIKEDIEQFSGARIDKKEKEIYHTFEVYRKMKKSFDAINIDINAFSREELDEFGRILTLNTEKAGIIKAFEATNQKYSDEVINVLVDLRKKNSSLFSKWHSFSLKAMIRLIPDMYVQSKEQMQLLTEMGVLKQKPSKYNDYKYIPVEKVIEEIYNPVVVRSIRTTVKMINEVIRKYGYPENIIIEMPRDKNSAEEKKKINEAQAKNEKEYEYILKKIQDEYGIEIIKADYRRQEKLPLKLKLWNEQNGKCLYSGRPISVESILNNPQLFEIDHIIPKSISFDDSRNNKVLVYRSENQEKGNQTPYMYLSRLNREWNFDSYKKYVLEMKKNNGISNKKVQNLLFMDDINKIDVLKGFISRNINDTRYASRVVLNELQAFFKAKENCTTKIKVIRGSFTHQMRVNLRLEKNRDESYSHHAVDAMLIVFSQRGYDAYRKLQETYMDFETGEILNEQKWKECLDEDKYDQILYEAKWSKIREEIQEAEKHVKYHYRVDKKCNRGLCNQTIYGTRTKNGEQYKICSFDIYNDKECKNLQKMIKAGKESDILMYHNDPKTYKDMLKIIKEYSSEKNPFVAYNKETGDYFRKYSKKHNGPKIEKIKYYKEKVVSCIDISHKYGHEKGSKKVILGSLNPYRTDVFVNKTTGEYYLVGIKYNHIKCKGDLYIIDEESYNKLLINAGAIKNGETLKDLERLNVSYRFSLYKNDIIQYEKNGKFYTERFLSRTKEQNKNYIETKPIEKPFFQKEGKNGEMENKQSLVGLGKTKFVGKLVTDVLGNVYEVKQEKFSLVIDN

SEQ ID NO: 4740 - protein, 1107 aa, unidentified
  REGION 1..1107: note = Description of Unknown: Cas Enzyme sequence
MGYTVGLDIGVASVGVAVLDENDNIVEAVSNIFDEADTSNNKVRRTLREGRRTKRRQKTRIEDFKQLWETSGYIIPHKLHLNIIELRNKGLTELLSLDELYCVLLSMLKHRGISYLEDADDGEKGNAYKKGLAFNEKQLKEKMPCEIQLERMKKYGKYHGEFIIEINDEKEYQSNVFTTKAYKKELEKIFETQRCNGNKINTKFIEKYMEIYERKREYYIGPGNEKSRTDYGIYTTRTDEEGNFIDEKNIFGKLIGKCSVYPEEYRASSASYTAQEFNLLNDLNNLKINNEKLTEFQKKEIVEIIKDASSVNMRKIIKKVIDEDIEQYSGARIDKKGKEIYHTFEIYRKLKKELKTINVDIDSFTREELDKTMDILTLNTERESIVKAFDEQKFVYEENLIKKLIEFRKNNQRLFSGWHSFSYKAMLQLIPVMYKEPKEQMQLLTEMNVFKSKKEKYVNYKYIPENEVVKEIYNPVVVKSIRTTVKILNALIKKYGYPESVVIEMPRDKNSDDEKEKIDMNQKKNQEEYEKILNKIYDEKGIEITNKDYKKQKKLVLKLKLWNEQEGLCLYSGKKIAIEDLLNHPEFFEIDHIIPKSISLDDSRSNKVLVYKTENSIKENDTPYHYLTRINGKWGFDEYKANVLELRRRGKIDDKKVNNLLCMEDITKIDVVKGFINRNLNDTRYASRVVLNEMQSFFESRKYCNTKVKVIRGSLTYQMRQDLHLKKNREESYSHHAVDAMLIAFSQKGYEAYRKIQKDCYDFETGEILDKEKWNKYIDDDEFDDILYKERMNEIRKKIIEAEEKVKYNYKIDKKCNRGLCNQTIYGTREKDGKIHKISSYNIYDDKECNSLKKMINSGKGSDLLMYNNDPKTYRDMLKILETYSSEKNPFVAYNKETGDYFRKYSKNHNGPKVEKVKYYSGQINSCIDISHKYGHAKNSKKVVLVSLNPYRTDVYYDNDTGKYYLVGVKYNHIKCVGNKYVIDSETYNELLRKEGVLNSDENLEDLNSKNITYKFSLYKNDIIQYEKGGEYYTERFLSRIKEQKNLIETKPINKPNFQRKNKKGEWENTRNQIALAKTKYVGKLVTDVLGNCYIVNMEKFSLVVDK

SEQ ID NO: 4741 - protein, 1118 aa, unidentified
  REGION 1..1118: note = Description of Unknown: Cas Enzyme sequence
MNGKVLGLDIGISSIGVGIIDKETGEIVHSNSYLFSAANAENNKERRMFRGSRRSTRRKRHRVQRVEDLFEKYGMDIDISTIPLNVNPYEIRVRGLNNELTIEELFIALKNLVKRRGISYLDDVDDSKNISAYKKALEVNKNSLESKTPGQIQLERLENYGQLRGDFTVRDSNGQEIRIMNVFPTSAYQKEAECILRRQSEWNVCINDNFISEYIEILTGKRKYYVGPGNEKSRTDYGIFRKNGETWQNLFSILIGRCSYYPDEYRAAKASYSAQEYNLLNDLNNLIVPTETKKLSTNQKREIVEFVKSKEAVGAAEVLREVAKLVGCKKDEIKGYRVDSKGSAEVHTFEVYRVMKKYLASVEVDSLEKDTFDLLAHILTINTDKESITEAIRSDLQESFNEQQIEELVAFRKNHSNIFNKGWHNFSIKLLRELIPELYATSEEQMTILTRLGKRKREKKTRKTKFIDENLIVEEIYNPVVSKSVRQAIKIIKEATKRYGIFDEIVVEMARDKNEKDAKNRVKDIQKNNRDEKEAALLEAAREYHGKDKLPTSVYHDHKNLNLKIRLWYQQEKKCAYTGKTIKIKDLIHSKHLYEIDHILPLSLTFDDSISNKVLVLKTANQEKSQRTPYQSIDTMTSAWTYHEFKEYVKNNKKFSGKKKEYLLFEEDIIKYDVRSRFISRNLVDTRYASRVVLNALQDYYREKNAQTRVSVVRGQFTAQLRRAWGITKSRDTYHHHAVDAVIVAAASQLSLWKSKSNLLYKHSENLAVDLNTGEAWQVTEQEYKELVFSPPYKRLRETLNSNEFENSILFSYQVDTKTNRKVADATIYATRQVRLGKDREVTTYTLGKVKDIYSEEGWKGFLKQYKKDKTKFLLYHKDRKTWDCVIESIMETYYSREEEKKSHSNPFEKYKIENGPVRKYSKKGHGPIIKDLKYYSDKLGSHISITPEGSRNKVALLSIKPWRTDVYFNDQSKMYEIMGLKYSDLSFEKGTGEYKISRERYKEIKERDGVSRDAEFKFSLYRNNLILIKDSQSGEEQILRFHAKNESNMHYVELKPLNKARFEGEEPLISSLGKVAKSGQCLKGIQKPNLSLYKVITDVLGNKYIIKEEGDSPKRIG

SEQ ID NO: 4742 - protein, 1130 aa, unidentified
  REGION 1..1130: note = Description of Unknown: Cas Enzyme sequence
MTNGKILGLDIGVASVGVGIIDAKTGNVIHANSRLFSAANAENNAERRGFRGARRLTRRKKHRVKRVRDLFEKYDISTDFRNLNLNPYELRVKGLSEQLTNEELFAALRTIAKRRGISYLDDAEDDSTGSSDYAKSIDENRRLLKSMTPGQIQLERLEKYGQLRGNFTVYDENGEAHRLINVFSTSDYKNEARKILETQSNYNKQITDEFIEDYIEILTQKRKYYHGPGNEKSRTDYGRFRTDGTTLENIFGILIGKCSFYPEEYRASKASYTAQEFNFLNDLNNLKVPTETGKLSTEQKEYLVDFAKNSKTLGASKLLKEIAKLVDGDVKDISGYREDSKGKPDLHTFEPYRKLKFNLTTVDIDNLSRDILDKLADILTLNTEREGIEDAINRNLPEQFTKEQISEIVQIRKSQSSAFNKGWHSFSAKLMNELIPELYATSEEQMTILTRLEKFKATKKSSKNTKTIDEKEITDEIYNPVVAKSVRQTIKIINAAVKKYGDFDKIVIEMPRDKNADDEKKFIDKKNKENKKEKDDSLKRAAYLYNGTDKLPDDVFHGNKQLATKIRLWYQQGERCLYSGKPILIQDLVHNSNNFEIDHILPLSLSFDDSLANKVLVYAWANQEKGQKTPYQVIDSMDAAWSFREMKDYVLKQKGIGKKKREYLLTTENIDKIEVKKKFIERNLVDTRYASRVVLNSLQTALKELGKDTKVSVVRGQFTSQLRRKWKIDKSRETYHHHAVDALIIAASSQLKLWQKHENLMFENYGENQVVNKETGEILSISDDEYKELVFQPPYQGFVNTISSKAFEDEILFSYQVDSKFNRKVSDATIYSTRKAKLGKDKKEETYVLGKIKDIYSQDGFDTFIKRYKKDKTQFLMYQKDPLTWENVIEVILRDYPTTKKSEDGKNDVKCNPFEEYRRENGLICKYSKKGKGTPIKSLKYYDKKLGNHISITPKESKNDVVLQSLNPWRADLYFNPDTLKYELMGLKYSDLSFEKGTGKYHISQEKYDEIKEKEGIGKNSEFKFTLYRNDLILIKDTESGEQEIYRFLSRTMPNVKHYVELKPYDKEKFNGGQELIKSLGEADKVGRCLKGLSKPGISIYKVRTDVLGNKFFVKKEGDKPKLDFKNNKK

SEQ ID NO: 4743 - protein, 1349 aa, unidentified
  REGION 1..1349: note = Description of Unknown: Cas Enzyme sequence
MKNEKKSFGEYYLGIDAGTDSVGWAVTDENYNVLKFHGKAMWGVRLFEEAQTAADRRALRTARRRQGRKVQRTKLLQELFAEEICKKDSAFFIRMADSKYYAEDKTEPQQNALFNDVDYTDKDYHKEYPTVYHLRRAFIEGKDIRDPRLLYLAVHHIINNRGHFLFEGMDLSKVVDFETPFSVLKEYLLEEDFGFDFSNIDADALKESLKTKQGITQKKKDLYKLLGKEKGTLKSVCDLLAGGSGIKLTDLFNDESLAGETPEKISLADSSIEDDRTALENILQDRIQLLDCLKAVYDWAILDEILSGSPYISFAKTQSYEKHKKDLALLKKTIKRLCPEKYKEVFKSPNTASNYCAYSGMCVINGKKTAIEKRTTASDFGKYIAKLLSSFDDPDAKDILRQIDAQTFMPKQRTGENSVLPYQVHKVELEKILGNAERNFPFLLKKDDSNLTVKDKIIKLLTFRIPYYVGPLNDKHRNSGFCWIVRKNTEDTSRILPWEFEQKVDLYASAEQFINRMTNKCSYLVGEDVLPKDSLLYSEYSVLNELNNLKLNGESLEQSDKAEIIDELYKKNNKVKIKDIANYYKRKGFEVKPDDFTGFHEELKSSLRSYNMFFNILRDRFDESAVEAAIKAIVLFGNDKKMLLQKLRSIKNGYFTEEEIKRMAGFKFSDWGRLSEKMLTVIYSVNKETGEAFNIIEALRTTDKNLMQLLSAEFDFKKQIYEENEKINGGIPEFSYDALVKDCYASPAVKRSIWQVLTIAKEIEKITGHAPKKIFMETTREDREKKATKSRKKQLVELYKKCREETSELLKTLEKREDSELRNNALYLYYTQMGKCMYSGETIELEHLFDKNVYDIDHIYPQSKTKDDSLNNKVLVKKELNGQKSDRYPVPRDVLSPGIENHWKCLRAAGLISEEKYKRLTRRTNFSDTELSGFIARQLVETNQATKAAAEILKRVYPETRLVYSRASNVDVFKKRYDILKVREVNDYHHARDAYLNIVVGNVFDVKFTMNPLNFIKGGGTYSLNENMYDSDIRRGSNVAWVAGNNGTIATVKKTCSKENILFTRYAFEQKGGLFDQQIMKKGKGQLPTKPSDPHMQGQTEQEWIDKYGGYNKLSGAYFCLVEYKDKGKIVRSIESVPLLVSAKIKNDPSDLEKYLKQALGTEELSVRIREIKFNTLFNHNGFLMHITGRQGNQLIFKPALQLKVNASDYAYIKKIVRFCEREKESKKAFTVSGFDGIEKDRNIELFDFFTKKLSSDIFMVHHAATLKSLLANRSIFVDMSVEMQARTIYQILHIFRCNRMLADLTALQGAKSAGTVLMSKKISLNDKIMIINQSPTGLFENSVDLLTV

SEQ ID NO: 4744 - protein, 1327 aa, unidentified
  REGION 1..1327: note = Description of Unknown: Cas Enzyme sequence
MKKFLDYNIGLDIGTTSVGYAVTNSNCDLFKIKGKNMWGVRLFEEADKAVNTRTLRGARRRYDRRKQRIKLLQSFFLESGELDTNFFEKMANTYVADDSKKYNLFDEPMFNDKHYFGGEEKTIYHWRKRLITTTEKEDIRIVYLALHHIVKYRGNFLYEDMKNLSAQNANIETSMAKLVDELAEKYGTNNNDETIKSVCDIINDQSMLKKEKKKELANTLSSNTETRKIIAEVFSAVFNYAFNIRLIFENCDFKKIDEKKKIKLGKEEDLELLPEFEENDAVLFDAIMDAFNSLLLQKILYFGSEANDEPHTLSDAMIYRYNKYHSDLTLLKKLYKKYLNESYKDMFVNEIKDTKNYVAYDKCNKSCSIDDLIKKIEKDFENVNPNDEDIQYFLREKEEERFLKKLNFTDNGAIPYQLHLEELSAIIDNQGKYYPFLKENKDKIMSLVSFRLPYWAGPLVNCENKFGRNFSWVVRNNSKCKITPWTFEEAINVDKTAENFISTLTNYCSYLPREKVMPKNSLLYSEYMLRNEIFSISYRTKDQNEKIFLTPYIRNELYREFLNRRGGMTQNQLKEWLLKEQKIANITEVSGFQDEKGFANNMKSYVDFKNIFGEIDEENSKMIETIIYYLTVYNDKKIIKRRLQKEFLGKGLYDDQIEDILKLKYSGWGRLSQRILDGISSEKNGRYLTVIDLMRTGKYNFMQIINMPTFKELIDEEAKSDIEGNIDDIIDSLMCSPANKKGIKQSMRVITELVNIMGYAPKNIYIEFARSDEDSKTQENRKKKLEKMYKDFSENDDYKDIIKVIKESDKKLFNDKMFYLYCMQNGKSLYSNKPLDINNLSQTCEIDHIVPRCYIKDDSFDNLALVLKSENQNKSGDLLLSSKIITTMRPIWASMRKNKFISEKKYANLTREIIDDKTKIGFINRQLVETRQITKHVANILREQYEPQGTSIVQIKAELSHNLREKLHLYKNRNINDYHHAHDAYIASILGIHIEKKYPNIFSAFDFKKAARYFTIKDKDKAKKNKYGFIVNNFESVEVDANTGEIIWDGAAQSAKIRKYLNYNDCFISKKVEEQSGPFYKQTIYKAIDNPSERIKKNMPTEIYGGFTGVNNAYAVAVKHTVKSKTKTSMYNIPIKVATISKQNPNAILEYLESIDLNNVEILGKFMMYQKLIVNGSEEYYISSGTEVHNARQLVLPSWANEVLHDASISNLNETEIEKINSKLVELYDLIIVKMENFYKGYSSIKAKLATNRNKFVAIEKINDKLSVINSILSMLHANQSNADLTKIGGTSREGRKSSYSFDFSNTEFVYTSVTGIFEQRKSFGVE

SEQ ID NO: 4745 - protein, 1330 aa, unidentified
  REGION 1..1330: note = Description of Unknown: Cas Enzyme sequence
MKQNGNDKKTGEYYLGLDVGTNSVGWAVTDPDYQVLKFHGNAMWGARLFDEAQDASGRRSSRVARRRLARRNQRLHILELLFAEEIGRVDPLFLRRMEESALWLDDKTDRSCRFSLFNDIDFTDKDYHRRYPTIYHLRQELMQSDEPHDIRLVYLALHHILKSRGHFLYASSGDDDQIIPVETVLAELQRSLEEAYSVSFSIADEKAFVSALARNDIGVGEKQKLLKAAWGGSDEDDAPVKLSSVIDLLAGKSGIKLSLLFADESLDADEISKVSLKNDLDELFDSLSASLGDRVDLLLQLKDVYDTARLTQMLKGHATLSEAKIALYEKNRADLRLFKSWVRRKLPKRYKEIFSLKKDKLNNYAAYSGYQSKSGSYSCTQDAFCKYLNSLIPAQEQGKGEMARIFREIREGSFLQKLKGSDNGVIPFQLQRQELNRILDRCGAYLPFLNAKDEDGFTIADKIRMTFEFRIPYYVGPLNSKAGAYWAVRFPGTEKTTITPWNFRDVIDTEASARAFMFNLVGRCSYTGERVLPRDSLLYSEFMLLNELNPLRVNGSPISPEVKQRLVRDLFMASRKPVTKKQIRNYLLTEGLIEARDEISGIDDRIKSTLRSYHDFRSLLEKTGDTDLVEQIIEHVLIFGEDRRMLRSWLKKIAPMLDDEELSRICRLKYREWGRLSKVFLTGLYDADPETGEARNIMDLLRSSNENLMQLLSTRYSFAEQAEEHRKEFFGCGESLDARMESLYLAPAVRRSVRQTLRIVDEIVDIRKSVPKKIFVEMARDSAKDMKGKRTESRKAKLLALYASCREESAALLPRLQEEDEGRLRSDKLYLYYSQFGKCMYSGEPIDLDALMDGRLFDVDHIFPQSRIKDNSLDNRVVVKNTLNREKTNAYPIKAEIRSQMRPFWEMLRQNGMISQKKFDRLIRQTPLTEQELSSFVVRQLVETQQSTKALTILLKERYGDATRVVFSKAGNVSDFRHDFDLLKCREVNDLHHAKDAYLNIVVGNVYCTRFTDRFFANIENENYSLNRVFDFDVPGAWDRRETIRTVKSVMAKNNPIVTRMPREVKGQLFDLQLMPAGKGQLPRKEGMDIDRYGGYNKLTGSYYFAVEHTEKKKRVRTIEPVYLYCQNLYEKEPLRYCTEILQLQDPRILCAEIRADALLEIDGSRLYISGRTGSYYVCEHAFQLAADPERERYIRSIAKYAERCAARRTELPITEHDGITAEKNADLYAFFLNKLGTAVYQKILSNMKKDLEANQQSFLEKSLYEQVLLLLEILKPFRCNAQYANLSALNGKGTVGRVQIHKKLNNAASASLIHQSVTGLYECREDLLK

SEQ ID NO: 4746 - protein, 1353 aa, unidentified
  REGION 1..1353: note = Description of Unknown: Cas Enzyme sequence
MSIQSVKKDYFLGVDMGTGSVGWALAYMDYSVVKYKNKLLWGSHLFDTAQTAVEARLNRSTRRRYARSAERVKLLQELFAEEIARVDFGFFQRMEESRLWQDDKTENQKNTLFNDVGYDDGIYHSEYKTIYHLRKALIDGGKSFDVRLVYLALHHLIKHRGHFLFGDRVLGDVRNFDTAFKAVSSVVYEVLGAELKVDDISKVGEVIKNRRDGLTKREDALKALFGVQKGDKRMQELIKLMVGSTADLKKLFMLEELENKSVKLSDNNVEDVLLNVSEELDEDYYAVVDAVKMMYDWGTLENILSGHNYICEGKIEAYEKHKSDLERLKRVVKRYFSADYNKIFRTENEAANYCSYTGVSKLPLKNGKKCTQADFCVFLKKLLVKNAACETDEDYLYIVEELEKGTFMPKQTTSQNSTIPYQVNKMELCKILENAEEYLPFLAERDENGLTVSDKIKKLFEFRIPYYIGPLNDTHQNKRVNGSCWIVKKQGKVYPWNFDAMVDTDESAERFISKMTNKCSYLLGEDVLPDKSVIYSKFKVLNELNNLTINGERSPELKQELFNELFLKQKKVRLKDIESYLRGRGYEVNAIAGISGEIKNNMSSYITFKEIIGDKADNITMCEDIIRAITLFGAEPKMLKRRIEKHYGDVLTADEIKRLCRLKYKDWGRLSYKLLCGITDEKTGTCIINAMQELGLNLQELLSSRYSYMSQIDELNNIGESVGIREEIELSALSPAVKRIAIRTLDVTGEAVKLMGYPPKKIFVEMARDVDGKNEKKTKPSRKDKLSELYKNIDDRVLAEEWKAKLDNETNDSLRRDKLFLYYSQLGKCMYSGEKIDFEQLNNDNIYDIDHIYPQSVTKDDSLENRVLVRRELNENKGDTYPISSDIRRKNYAHWKLLHDKKLIGDKKFARLTRDEELTDEELAGFIERQIVETRQSTKYVATLFKRLYPDSEVVYVKAGHVSDFRHDMDIVKVRDINDLHHAQDAYLNIVVGNVYNVKFTHDVLRYIKNNRGKRDYNLKKLFKYYTVTDRSTGEIVWKSGEGGTIADVKKQLESFNIQCTRFAVTGKGKLFDVQPIPKHKCGEGVQIPLKENDSRLSDVTRYGGYNKVKIAYFFCVEHTEKKKRIRTIEVMPIYLADRVGEDGLLDYCIDSLGLIEPKIIVKKIKLYSLVKINGYFYYLSGKQNDRFLMYNAVQLCVDKQSSEYIKKLVKTRKILSEDKEYDVAEQKINYDENMALYDLFVEKQKSGIYSKRINNALKIMENGRVRFAELSLSNQCIQLVNLLGLFTGGACNGVNTELIGGQSKGNKITTSKVISNNIEFKLIYQSPTGIYQTVIDLLKADGLAYRCYSKQG

SEQ ID NO: 4747 - protein, 1354 aa, unidentified
  REGION 1..1354: note = Description of Unknown: Cas Enzyme sequence
MEKLCGKAEDYYLGLDIGTNSIGWAVTDKDYNIIRKKGKSLWGIRLFDEAKTGEERRILRTARRRLDRRRQRLTLLQGLFETEVNKIDDKFFQRMKDSNFWEEDKTETQIYSLFNDKNFTDKEYYKEFPTIYHLRSELIKNDKPHDIRLVYLAVHHILKNRGHFLFSGNVENVTSFSTTYDTFSNTLEDELGIELECNSVLDFERILKNKNINKTQKLKELKLLCNIEKSDKQMDMILKLIIGLKADLSVVFDDETIAENEHNKISFSDSNYEEVQAFLEDEIADKIECIEAFHSVYSWFILSDILSEGEYQGTAYLSVAKTNVYDKHSKDLKLLKQFVKKYLDDEYKTFFASDGKDNYCAYVGMYKKNRRKIEVKKCTQENFYKGIKALLKKAPQDAEEKEQILQEIERKSFLPLQVSKDNGVIPYQVNKSELVKILSNAAKYLPFLNEVDEQCGKTVAEKIISVFTFRVPYYVGPLNNSSGNSWFVRNEEGEIYPWNFENKVDVETSAAKFINKMTNQCTYLTNETVLPRFSLLYSEYMVLNEINNIRISGEKISIELKQKIYEDLFKENKQVTGKKLLNYLNSFGYDLTKDALSGFDGNFKSSLSSYITLKKEIFGDEMEKYSVQQMAEEIILLVTLYGADIGMLKRIITKKYSNKLNNEQVKRICKLKFNGWGRLSKRFLCEMDGVDVHTGEKLTVIEALRNTQNNLMQLLGRNYTFAEAIEEANDKSFDLEEITYDNLVKDIAVSPAVKRAVWQTVKVTQELKEVMGKSPKRIFIEMARGEEKKERTISRKSKLLSLYEAIKKECGDGLYDEILGRDESDFKSIKLYLYYTQMGRCMYSGEKIDLSQLSNANIWDRDHIFPQSKTKDDSLDNLVLVDRRINAKKSDEMLSHEVQKKMHGYWKYLLDKGFISHKKYERLTRTAPLTDEELADFINRQLVETRQSTKVVASLLKQLYADTTIVYVKGKNVSDFRNREECQNGVKVRDMNDYHHAKDAYLNIVVGNVYYTKFTSNPLNWLKKNKDVKYNLKRMYDRDIYDGDDGVWIVGKNGTQSLVDKTLAKNDILFTRLAVCGKGGLFDMMPVKADKEKGNKLIPLKKGMDTKKYGGYNSVKSSHFMLVESKDKKGKLIRSIENVPLYKINEFKNNSRVLVDYCIDVYGLNDPKIIIPVIKKNSKIIIDGFPMHLTGNNGVQLGVQCAVQLCLNTEHQMYLKKVMKYVDENIKRSDKSKFVTINTYHGITGEENINLYDVFIDKLTNSIYRKRPANPKDKLIEKREKFLSLSLEEQCIVLNEILHLFQCKPLTADLTLIGLAKYTGKMTANHNITGTNSFKLVHQSVDGIFEYTIDLLKI

SEQ ID NO: 4748 - protein, 1381 aa, unidentified
  REGION 1..1381: note = Description of Unknown: Cas Enzyme sequence
MKEVQNDYYIGLDIGTNSVGWAVTDLQYNILRKKGKSMWGIRLFEEAKTAAERRVARTNRRRLQRQKQRIELLQEIFSEEISKVDDKFFIRLKDSSFVPEDKKENQTNSIFNDIKYKDKDYNDEFKTIYHLRKALIMGEKEYDVRLVYLAIHHMMKNRGHFLFDSNIANITSFDTTFSTFKICMEEEFGFSMEEIDEGEFEKILKNKSLSRTKKSENLLKICGVEKKDEVYRQFSEIIKLIIGLNCKVSVIFNSEAFEEIEHNKICFGSGNYDETRLALEDEIQEKAGIIDILQAVYNWTILSDILEGGEYNGKSYISIAKVGKYEKHHNDLKKLKELVKKYCTQEDYNDFFVSNEKDNYCAYIGKYMKNGKVKVENKKCSQEDFYKAVKKLLDKMNVDNDVDEAAVTSIKNDIESKTFLQKQVSKDNGVIPYQVNKIELECILENAKEYLPFLNEVDESCNLTNAEKIVKLFEYRIPYYVGPINTARGDNCWMIRNEGKEGERITPWNFNDVVDVDLSAEKFIKRMTNKCTYLSKEDVLPKYSLLYTEYMVLNEINNIKVKGVPLDDIDIKLRKGIYNELFKKEKRVSKKRIAEYIKSMGYDVAKEDISGVDVILTTSLSSYIELKKIFGDKLDTYSFKQVAEDIIKWITIYGDDQKMLKRVIKKHYESEITPEQLKQVCRLKIQGWGRLSEKLLTGLEGTNKDTDEITTIINELRNTNRNFMQIVASNDYTFAECIDDENMGYKVEEVTYDNIVKDVVASPAIKRAVWQTIQIVEEIKQVMGKAPVRIFVEMARGEEEKKRTISRKDKLLECYKEIDKECKTDWVDELNKIKDTELKSIKLFLYFTQMGKCMYTGKKIDISQLDNATIWDRDHIYPQSKVKDDSLDNLVLVARIENAKKSDGMLSPEIQYKMYGHWKYLKDKGLISEKKFNRLTRKEPFSDDELAGFISRQLVETRQSTKVVATLLNRIYGDTKVVYVKAGVTADFKNHKDSKTGERDYIHDVKVRSINDYHHAKDAYLNIVVGNVYFTKFTDNPYKWFKDRSGKRDENKYKYSLNRMFDFDLLEGENVVWKRGKDGTLKTVNEVLSRNDILYTRYAYCNKGLLFDQLPVKAPNNEEKAEKLVPAKKGRDTIKYGGYNSISPSHFMLVESKDKKGNFIRTIESVPLYLKEVFEKDNQKLIEYCINRYDLKEPRIVMPVIKKSSLLVINGFPMHLNGSTGKQLILQGAVQLCVSNEDAAYIKKLEKYADDNAKRKDKKELLKIDEYRGITKEQNKVIYEKFLEKLNNGIYTKRPANPRTKLESLEQKFEELEIEKQSILLMEVLNLFKCKPLTANMELIKDSKYLGKIQLSKNISSCKLAKLINQSPTGLYENVIDLLRV

SEQ ID NO: 4749 - protein, 1343 aa, unidentified
  REGION 1..1343: note = Description of Unknown: Cas Enzyme sequence
METEKIISTSKPYYIGLDVGTNSVGWAVTDTDYNLLRFRGKHMWGSRLFPEAETAKERRTQRTMRRRLQRRKQRLMILEALFATEIGKVDKQFFERLHESDLWQDDKKTGSRFSLFNDVSYTDKEYHKHYATIYHLRKELANSTEPHDIRLVFLAIHHLMKYRGHFLNQGESSEEIPTVELAWGALVRYLDEKYGLAFVPANSENLMAAIKSDALISAKKKAIKEAVGQIQTEEGQPSPEAICELLAGAKVRLSKLFPDLEELAGEDGKTAVLLKDDLNESEDALCDLLGRENTDLLLAMKDVFDAARLSNILGECQFISEVKVRQHEENHADLQKLKQFVKAFCPNLKHHLFSERTDKLDNFPAYSQYKSQSGDYSCNQESFCKFLEKELPGEMAEAQIPNVWQKIKDRSFFPKLRGIENGLIPYQLQMRELKAILKNASAYLPFLNAADPDGYTVAEKILKTFEFRLPYYVGPLKQDNGPKKYANHWCVRFAGKEQTKIEPWNFEEVVDLEKCAAAFMSNLVGCCKYTGAPVMPKDSLLYSEYMLRNELNALRVNGKFLPPDLREQLIDELFIHSERARTVSKRDIYNFLRRNGYFIRSKDELTGIDDKVKTVLKSHHDFARLLNRTGDYGLAEEMIHSILVFGEDKKLLRRRLKALAPDLSEADLRYFCQRKYTEWGNLSEYLLTGMKAEVEGEQKTVMDMLREKNLVLMQILSQEYPFGALAQAHLDETLGNKTSLSDKLDALYVSPAVERAIRQSLKIVDEIVGIRKAPPAKIFIEVARDVNGKNPKQRTSSRKEQLQALYNSCKEQGEALSRELEDKLAAETDDSLRNDRLFLYYRQNGKDMYTGKPMELEEVLAGKLYDRDHIFPRSKIKDDSLDNLVLVNSRDNREKTNDYPLKEEIRARMLPEWTAMRKRGQISEKTYSRLVRVEPLTEKELSDFVQRQLVETRQSTKALAEVLKERYPKPATKLVYSKAQNVSEFRRQFTLTKCREVNDLHHAKDAYLNIVVGNVYDTRFTERFFANIRSENYSIAVDTLFGELNTRGAWDKKASIITVKDMLRRNDPIVTRMPVEVGGELYNLQIMPAGKGQLEKRSGRPIARYGGYNKLTGAYFCVVEHTEKGKRVRTIEPVYLYKLQEYESNPLEYCAGTLKLTQPRIIQKQVRIDALLELNHKRLFVSSRTGDRIIMEHAYQLVLTPEQERLVKEIAVYDANCKERKKEIGVPPKSRITEDGLHQLYRAFAQKCHDGVYSGFFVSLEKHIRDSESKFIKLPISGKCSVLLQIMNAFCSNALNADLKQLCGKGTVGRISISKNLSTQASAYLIHQSVTGLYEYRTNLLKD

SEQ ID NO: 4750 - protein, 1345 aa, unidentified
  REGION 1..1345: note = Description of Unknown: Cas Enzyme sequence
MKEKTQIPYYLGIDAGSSSVGWAVTDTMYHVLKCKGKAMWGVRLFPDASTAAERRTHRAARRRLQRRKQRLDILEMLFAPALNEKDPQFLARMHESDLWQEDKSINSKYSLFSDSNFNDCDYHAQYPTTYHLRSELAHSTDSHDVRLVYLALHHLMKSRGHFLYEISETSDNDSSLRDKFDDFCTLLSDAYGLDFVPHNTDNYLNILKTPNMRVTEKAALLTEGLKKPSKNEAGISPFYISELLAGRSVALSNLFGDDRFKDAKKITLQNDLDANYNELCEVLDDHISVVTAAKDVYDAARFAEIIGTHRYLCDAKIAVYKQNNIDLRVLKDYIKAHCIERYNSIFCDKEDNLDNYAAYSQYHHKSGDYTCSQEAFCKFLKKSLPEMAESKSPVIATIYQKIVDSSFLPRLRSSENGVIPYQLQLRELDAILKNASSYLPFLVQQQSDGYTPAEKIRKTFEFRVPYYVGPLNDKAAHHWAVRSDTDSKEKIYPWNFNQLIDLDHSAEAFLVNLIGRCTYTGDPVLPKDSLLYSEYVLLNELNPLKIDGQPLSTEHKKQLIKDMFIHPVSKQKDKVTKKKIYEYLKSKGWISKATNIDSISGIDDKIKSDLRSRRDFADFLKRTGDYQLTEDIIRHILVFGEDKKMLRRWLRTHTDVLTEDDIKKICRLRYTDWGRLSKTFLTNIYTVGEYGEAKSIMDMLRDTNDNLMQILSDKYEFAAHAEAYRNEKFGNNRSLTDQLDEMYISPSARRSIRQTLRIVDEIVKLRGIPPTKIFIEMARDNRKDMKGKRTESRKEQLLALYKECQKDSRIFAQMCLSEQEIKELNQKLVSEDENHLRNERLYLYYTQFGRCMYSGEPIDLSAVMRGERYDRDHIFPRSKIKDDSLGNLVLVKNELNREKKNTYPIESSIRQKMLPFWKLLRDKDMISEKKYERLCRSTPLTTKELSDFVARQLVQTQQSTKALAVLLKERYGNQTRIVFSKAGNVSEFRQEFGIVKCREVNDLHHAKDAYLNIVVGNVYDTRFTAKFFKNIQNEDYSIKTKTLFTQLNTPCAWDKVESTKTVQHYMEKNNILVTRMPHEQKGALSNLQLLPAGKGQLRKKQGLDIQKYGGYNKRTVAYFFAVEYLYKKKRIRAIQPVFLAQKALYEKDPIAYCRIHLNLDDPLIIRKKILLDALLELDGKRLYPSARTGNNIIYEHSYQLAVNNEQMQYIKNTVKYVERCNAAKKELAVTKFDGISIQQNIQYYDWFITKFHQPIYAEFVNTMQAYLQNNRDQFIHLSLLGQSKLLLEILKAFQCGPQNPNLDALCGVKTVARISKSSNLSNYRSIFLVDQSITGLFEHKIDLLK

SEQ ID NO: 4751 - protein, 1346 aa, unidentified
  REGION 1..1346: note = Description of Unknown: Cas Enzyme sequence
MKKIYYLGFDIGTESIGWATTDSEYNLLKARGHDYWGTYLFDEAKTAEKRRLNRTSRRRVARRRQRIKLLQEIFAEEIAKKDFCFFERLNNSKYNVEDKAENVKYRDSLFHDEIFNDKEYFKKYPTVYHLRRAFLNTQSASEIKDIRLLYLAVAHIVKNRGHFLFEGQEFNAGDKNLAETAFERINLSLKEIDEDKQALSLAKIDDVFSVLLDKKKNKRDKVGEIKQLLDVNKDKTCQEIVNAIVGCKVKVANLFDDTESELKDFCFDDANFELEKLQSMLSEEEYNVVCNMKTVYDWAVLSKILGNYRYVSEAMCAKYDSHKEDLRLLKEYVKREFGQDKYKEVFRKQEKVNNYAAYVGSDRNKSFAHASKDDFYKYLKSFVKDEEILKRIEDGTFLEKQRTNANGVIPYQVHKAELERILENASVNFPFLNEISDDVKIKDKIVMLLTFRIPYYVGPLNDLHAEKKFAWVKKYDGMKNVKITPWNFDKVVDKHASEDAFIDRMTNKCTYLIGEDVLPKQSLLYSEFAFLNELNNVTFKGQRLDKTARDAIVAFAKSQRCKITLKVIGKTLEKEGLIEKGEGVAENFAGIDGEIKSSFSTYRFFNSLFGNNMDTDMCEEIIKWFTVMGDASRAAERTQRKYKLSAEQTKKLKDLNCVGWGRLSRRFLDSEDIVTVTEDGELLTIIEAMRETGCNLMELMSKKYGFSNAVDRYNSEFICEDGVSYKTIENLYCSPSVKRAIWRTVCLAKEIEKVQGCPPKRVFIEMARGEDKDKKRTKSRKQQLLELYRSCKADVRDWITQNEISDLTGQIESTDDARFLSDKLYLYYMQMGRSAYSGKSIDIEDLFGKNICDIDHIYPQSKIKDDSIINNKVLCYKTENSTKQDIYPIAADIRKNMLSIWSLWHDKGLIGDEKLKRLTRYTALTQEELSDFINRQLVETRQSTKAVAQILKRLYPDADIVYSKASNVVDFKNHINKDSDNPLIVKVRELNDLHHAKDAYLNIVVGNVYYTKFNRDASVYFKNNGIDSYNMSKLFDGNVKNAWMPSMKEKIVTVVNKNTCRVVRFTSEGKGELFNATIKSKGANGKLIPLKRNCPLENIAKYGGYDNATTAYFALVRSIDKKGKMQLSIEAIPIYVDMLGKENVFDYLKNCVSLTNPQILIDNIKINSLLKLNGAYVWLRGKTNNSLTICNANQLILDRETAIYSKRIVSYLEKRKKNKAIEIDERYDKIDRKGNQMLYNTLVEKLMSRPYANISTLRKQSDFLVEKRDTFESLTLEEQCIVLNEILHLMQCNSALSNFELLKGVSKAGSLTCNKKLSANDECLLITQSPTGYYKDVKNLTSFYKQ

SEQ ID NO: 4752 - protein, 1370 aa, unidentified
  REGION 1..1370: note = Description of Unknown: Cas Enzyme sequence
VENKKYYLGLDIGTNSVGWAVTDESYRIRKYKNNLMWGVHLFDEAQQSADRRSFRTARRRIDRRKQRIALLQEFFASEIVKKDPYFFMRLKESALLPQDSEHRSSNILFDDKDFTDKDYYDTYPTIHHLINELMENGQPHDVRLVYLACAYILAHRGHFLSEVDKNDIYKVTFFPPLYDEFIDTLKNVVEEIPFDCSGDTLKDILCSNVSVTEKAKKITILWFNGKKPKVDPSDPLKYDSLIKLIGGGRTALSDLFMNPNYKELETDSISVSSSDFTDTLDALYGSITEQQWELLSAVKKMYDWSLLVKILDGEKSISKSKIKVYEQHKKDLSILKTIIKKYLDKKTYDDVFRNKDSKENYIAFISSPKACSQETFCKFVSKYIAKIKCDNSDKDTIDYLIQRCENKSLCPKQVNTDNRVIPYQLYYYEMKCILDNASKYLPFLNEKDEDGAVADKILSIMEFRIPYYVGPLVGKEKSKFAWMKRKAEGRILPWNYEKLIDLEETENRFIRNMTSKCTYLASEDVLPKNSLLYCKYSVLNEINNITVDGNNISVDAKQKIYSELFMKKRRVTVKMIASLLQSCGEMSKEQSLGGIDTSVKSSLRSYHDFKDLINNGSLSEADVENIIERVTVTTDIKRLKLWLGQEYPNLSDENVKYIAKLRYQDYGRLSRRLLEEVYETDSSTGEVISEDNIISRLWNSNENLMQLLGSKYKYIDRINALNTEWYSDPEHNLSVSDRMKEMYVPTAVRRSINRTLDIVKDIKSIIGKDPDKIFIEMAREPDEKNKGKRTESRKEKISGLFAKAKEIVDAEHLADLEHKLALIDDGKLRSEKYYLYFMQLGRCMYTGNAIDFDKIGNDTFYNIDHIWPQARVKDDSLDNKVLVESEANGEKSDTYPIKADIRNRMHGFWQSLHGKGLISDKKYQRLTRNTSFTDDELAGFIARQLVETRQSTKAAATIIKELCPDSELVYVKAGLTSEFRQEMDMLKCREINDLHHAKDAYLNIVMGNVYNTRFTKDPLNFIKSGDRYSLKMFKKDADGKESGLLTHPVKRNGVTAWDPNESFEIVRRMMSKNSIRYVRYAYKRKGGLFDQMPVSKKNGLVPRKKGLDSEKYGGYNKKTASFFTLIKVKNDIVIVSVDLMNQTDFLNNEEKTKILVYESLKSFYSQKKLNMISHDDIEFPVGRRILKINTMLELDGYRVNLCSKDSGGQYVSVSSAMSLVVGRKEETYIKKIEAFCQKKKTDKNYKISSYLGINSEDNVKIFDLVVNKCKSKPFSGWSKFNEAGKILEMGRDFFVNEDITTQTVDLMKAVFVLKTGRVANCDLKFAGGVSAFNTTRLNSVLNMAGYKRIYIIDQSPTGLYEKKSVNLLEL

SEQ ID NO: 4753 - protein, 1382 aa, unidentified
  REGION 1..1382: note = Description of Unknown: Cas Enzyme sequence
VVDEKIFWGLDIGTDSVGWAVTNSEYKLKKYKNNLMWGVHLFDEAKQSAERRSFRTARRRLDRRKQRIILLQEFFVRAVCEKDENFFRRLKESALLPEDAEHRTNNIFFDDPDYTDKDYFEEYPTIHHLICELMESKEPHDVRLVYLACVYLLAHRGHFLLPVSEDDISKVTEFEPLYESFYKALEEKLDDEPPFDRSADDFAEILKSHKTVSAKNKDFDKLLFGGKVKTYDNENISYSALIKLLSGGTEKLSKFFANEEYTDLEKDSVCVRNADFGDTLEMLEGQIDELDFALLKSVKSLYDWSLLVDILEGKSLISEAKKDKYDEHGYDLDALKYLFREYLTKDDYNEMFKEVSGKQNYASYVYNASSDKTRDSKYKKCSQKDFCKFTKKFLSKIKPNEKDKPCLDKLLEKCEQNSLCPKQVTTDNRVIPYQLYYVELKKILENACGYLPFLNERDEYGTVADKILSIMKFRVPYYVGPLVDSKKSPNAWLVRKLDGKITPWNFTDMVNEDESENAFIRRMTCKCTYVAGQDVLPKYSLLYSKFSVLNEINNIKLNGEPISVQTKQEIYTELFERNKSRVSKKKIRDCLISHGYAADSDEVTGIDDIAKSALRSYHDFKKMLSNGILTEQQVEEIIEHITVTTDNIRLKKWLKTQFPMLADEDVKYITKLKYKDYGRLSRCFLEDVLPVDTKTGEAESDKNIITMLWETNENIMQLLSSKYRYSENIEHMNRQYYALPENHKSMSERLKDMYVPTAVRRAVTRTFDIVKELKKIQGRDPDKIFIEMARGTGETPKGKRTNSRKDQILEHWHGLDNKDINDLKKSGIWEHLDTIDDAKLRSDKYFLYFMQLGRCMYTEKPIPFEEVENEHKWNIDHIWPQAKIKDDSLDNKVLVSSNENGKKSDSYPISDDIRHSMAGLWHSLYKKGLISEKKYQRLTRSTPFTDDELSGFIARQLVETRQSTKAVATLLKEQFPNTEIVYVKAGLVSDFRQEMGMLKCREVNDLHHAKDAYLNIVLGNVYNTRFTKDPLNFVKNNEKYSIKIFQKNSDGKKTGVITRKVERGGEVAWDPETSFAIVRKMMSKNSIRYVRYAYMRKSGQNGGFFDQNPLRKGKGMVSIKHNLSIEKYGGYDNATISFFSLVSIKDFGVILLAVELLSANKFLKNISEAKEYAADKLSKELNVKIVPNDVAFPLNNRYNVVKINAVLELDGYRVMIAAKQNSSIKFVSNESLILSSQHMAYVKKITKFIEKRKQDKVCMINAFSGISIEDNIELYDVLVSKCNIKPFNIMYENLGIKLSDNRDNFIKKSVENQVLILSEMVRLFKTGRKAGVNLEEVGGRKNSGVKTLNTCLYKVKDYSNIFLVDQSPTGLIEHKSPNLLDL

SEQ ID NO: 4754 - protein, 1378 aa, unidentified
  REGION 1..1378: note = Description of Unknown: Cas Enzyme sequence
VVDEKIFWGFDIGTDSVGWAVSNSEYKLKKYKNNLMWGVHLFDEAKQSAERRLFRTARRRLDRRKQRIILLKEFFVRAVCEKDENFFRRLKESALLPEDAEHRTNNIFFDDTDYTDKDYFEEYPTIHHLICELMESKEPHDVRLVYLACVYLLAHRGHFLLPVSEDDISKVTEFEPLYESFYKALEEKLDEEPPFDRSADDFAEILKSHKTVSAKNKDFDKLLFGGKVKTYDNENISYSALIKLLSGGTEKLSKFFENEEYTDLEKDSVCVRNADFGDTLEMLEGQIDELDFALLKSVKSLYDWSLLVDILEGKSLISEAKKDKYDEHGYDLDALKYLFREYLTKDDYNEMFKEVSGKQNYASYVYNAPSDKTRDCKYKKCSQEDFCKFTKKFLSKIKPNEKDKPCLDKLLEKCEQNSLCPKQVTTDNRVIPYQLYYVELKKILENACGYLPFLNERDEYGTVADKILSIMKFRVPYYVGPLVDSKKSPNAWLVRKLDGKITPWNFTDMVNEDDSEKAFIRRMTCKCTYVVGQDVLPKYSLLYSKFSVLNEINNIKLNGEPISVQAKQEIYTELFERNKSRVSKKKIRDCLISHGYATDSDEVTGIDDIAKSVLRSYHDFKKMLSNGILTEQQVEEIIEHITVTTDNIRLKKWLKTQFPMLADEDVKYITKLKYKDYGRLSRCFLEDVLPVDTKTGEAESDKNIIMMLWETNENIMQLLSSKYRYSENIEHMNRQYYALPENHKSMSERLKDMYVPTAVRRAVTRTFDIVKELKKIQGRDPDKIFIEMARGTGETPKGKRTNSRKDQILEHWHGLDNKDINDLKKSGIWEHLDTIDDAKLRSDKYFLYFMQLGRCMYTEKTIPFEEVENEHKWNIDHIWPQAKIKDDSLDNKVLVSSNENGKKSDSYPISDDIRHSMAGLWHSLYKKGLISEKKYQRLTRSTPFTDDELSGFIARQLVETRQSTKAVATLLKEQFPNTEIVYVKAGLVSDFRQEMGMLKCREVNDLHHAKDAYLNIVLGNVYNTRFTKDPLNFVKNNEKYSIKIFQKNSDGKKTGVMTRKVERGGEVAWDPETSFAIVRKMMSKNSIRYVRYAYMRKGGLFNQMPERKKAGLVERKSGLDTGKYGGYNNTTASHFAVVKCREKSVVVVPVETMFCNRFATDIEFAKAYVAQQLAEILSQEFSSENITFPFGQRIIKVNTMFEVDGFRCNLAQKSNKGKQLVLISACSLVLDKDTYAYMKKISSFIAKKKVNKSLVINSYTGITVEDNISAFDVLVEKMQSSPFKVFFHKIGTKVANGRDKFISLSVDEQTTALFYILMLLKTGRSTGCDLTLINESGQAGVLTLNSDFSKIKDKKTIYIIDQSPTGLIERKSLNLLDL

SEQ ID NO: 4755 - protein, 1332 aa, unidentified
  REGION 1..1332: note = Description of Unknown: Cas Enzyme sequence
MGEEYYLGLDIGTDSVGWAVCDTNYKIPKFKGNAMWGIRLFEKSNSAEERRGFRSSRRRMQRKRERLKLLEMLFDEEISKIDPAFFIKLRESNLYLEDKSTKIPYCVFSDENYTDKDFHRDYPTIYHLRNELIKNNKPHDVRLVYLALHHIIKNRGHFLFDYSYKNDKSGDFMPIYNDLKNYFYDNYEIELDCSDVDEFANTLKDKSKGKTKKNAEIAELFGVSKKYDKVLYSALSLLSGSSVKLFDIFDDEALKDVEKKSVSFSSGFDDNANDFQSYLGERFELLEKLKAVYDWAVLADILDGKEYISEAKVAIYEKHKRDLRTLKKYIKIYMPEKKAEIFNISSKDNNYVAYSKHIKTSSGTGVLNSTCTQEEFCAYLKKTLGICKDASYEEMFKEIENSTFMPKQVTKDNGVVPMQVNEKELVAILDNAKEYLPFLLNDDNDGKTVYDKIKALFEYRIPYYIGPLNTHSTKSWLVRSNEKIYPWNIEDVVDFDESAEKFIENLTSKCTYLPQYDVIPKHSLLYNKFCVLNELNNLKIDGEKISVQLKQDIYNDLFKKYYKVTNKELCNYLKSRNIAFDEISGIDNDFKSSLKSYKDLVAYNLTDEQKEEIVKAITIFGDDKKLLKKRLKNEFGGCLSDDEIKKICKLKYTGWSKFSREFLTDVTAVYKETGELINIICALWETNYNLASLLYSDEFCCDDKENKTFNDKINELNSFGSDKTLNQIVEELYVSPLVKRPIYQSLLITKELEKIMKCPPKKIFVEVARGAEEKKRTVSRRNKLLDLYKSCKNDYPLLFDELQNNTTDDELKSDKLYLYFTQFGKCMYTGENIELGDLFNKNLYDIDHIYPQSKIKDDSLDNRVLVKKTTNAKKDNEYPLSSQIREKMTPRWKALLDKGLIDKKKYERLVRNYPLSDEELSQFISRQLVETRQSTKAVANILEQLYPRPDTEIVYVKAALASEFRHQYDMLKCREVNDLHHAKDAYLNIVVGNAYNVKFTHNKANFIKGLQNNDKAYTVRLDSMLKHNIDGAWIADNNESLNIVKSTMNKNNIRYTRYAFKQKGGLFDQNILKKGKGQVPIKANDKRNSIEKYGGYNRPSSSYFSLVKYFDKKGKKIIQLVPIESFEEHIYQNTPERYVSEKIGCDCEILIPCIKYNACISIDGFRMHLSSKSGGGAQIVYKPAQQLILGYDNEKMIKGIEKLLQNGINDDIVKRYDISKENNLKLYCLIVDKLSNTLFKTKYEKIGNDLINGKEKFETLDIEQQFYVINEILKILHCNVVTGDLKLIGGSGQAGAVLTNSALSNIKNVKSIKLINQSVTGLFEQEIELLNL

SEQ ID NO: 4756 - protein, 1338 aa, unidentified
  REGION 1..1338: note = Description of Unknown: Cas Enzyme sequence
MKNFNDDYYVGFDIGTDSVGYAVADTDYNLCKFKGNAMWGVDLFEESNSAAERRTLRSARRRGLRKRNRIEWLQMLFDEEISKVDNAFYQRLKESCLYLDDKSSNVPYAVFADGNYTDKEFHTDYPTIYHLKKELIKSSQPHDIRLVYLALHHIIKHRGHFLFDNMGSDFESESSFEALFDDLKLYLKEEYEIEFECNDSLRFSEILKDKTLKKTAKSSESYKLFGYSKRNNPYETALIDLMCGRKVKFSDMFGDKLFDSEEVNGITFESGYDDNENTYRDLLQEKFEPIEKAKAVYDWAILADILNGEKYNGKKYISFAKVKTYEEHSSDLKMLKKFVKERCKPLYDEIFRITKDKLDNYTAYCGKYKENGKNGVIIYRPDVDPQDKFCKYLKKKFEKLDKTGYEEMFDKIENGTFMPKIVVKDNGIIPMQVNRSELKAILKNASTYLEFLNKKDENGISVSDKIVKIFEFRIPYYVGPLNNHSLKFWLVRSDEKIYPWNFDSVVDIEQSAENFINNLTSKCTYLPTKDVIPKNSILYSAFTVLNELNNLRLDGKKPDVSLKQAIFNDLFMTHKKVRRKDLLNYLKSEKGITPDITGIDGDFKSSMRSAIEMSQFYLTNSEKEDAIKAITVFGDDKKLLRKRLKRQLGSKLSDEDIMRISKLKYKDWGRLSKEFLTEVYNVDKNTGELQFNIIHALWQTNDNLMELLGSKYGFEQSRQNYLDGIQTGQSLEKMVENLYISPAVKRPVYQSLKIMHEINKIQGHAPKKIFVEMTRKDGVKGDKGRKDSRKTKLVDLYKKCGEDSGELWESLEKTPDDEFKRDRLYFYYTQFGKCMYTGEPINLSELYNQNIYDVDHIFPRSKVKDDSLDNRVLVKKQVNAHKDNTYPLDSSIREKMKGFWHLLMDKGLISKKKYERLTRATELTDSELSDFIARQIVETSQSTKAVASLFKELYPNTEIVYVKASLVSEFRNESRGFGFLKCREVNDFHHAKDAYLNIVVGNVYNERCTHNKSIFIKGLQTKTYSLNKMFSFNTPNAWSIDDNKSIKIVRKTMNKNNIRFTRYALTRNGGLFKMNPLKKGSGQVSLKQNSPLSDISKYGGYDKPTSSYFSFVKYEGKKGKEMRRLVAIDSYIKARYEANPEKYLSETLGLKNPVVLIPVVKYNACIEIDGFRMHISSKSGGGRQIVYKPAMQLTVSYDTEKYIRNVVKLNSKPENYNITELDKVSADENLKLFDILTSKMTETILKVKFGDMGVKIASHRDAFEKLDVRKQCFVLAEILKIIHCNILEGDLTFIGGAKQSGSIKMSSAISGIKGVKSIYLVHQSVTGLFEKKIDLLHM

SEQ ID NO: 4757 - protein, 1332 aa, unidentified
  REGION 1..1332: note = Description of Unknown: Cas Enzyme sequence
MGKEYYLGLDIGTDSVGWAVCDTDYKIPKFKGNAMWGIRLFEKSNSAEERRGFRSSRRRTQRKRERLKLLEMLFDEEISKIDPAFFIKLRESNLYLEDKSTKIPNCVFSDENYTDKDFHRDYPTIYHLRNELIKNNKPHDVRLVYLALHHIIKNRGHFLFDYSYKNDKSGDFMPIYNGLKNYFYDNYEIELDCSDVDEFANTLKDKSKGKTKKNAEIAELFGVSKKDDKVLYSALSLLSGSSVKLFDIFDDEALKDVEKKSVSFSSGFDDNANDFQSYLGERFELLEKLKAVYDWAVLADILDGKEYISEAKVAIYEKHKRDLRTLKKYIKIYMPEKKAEIFNISSKDNNYVAYSKHIKTSSGTGVLNSTCTQEEFCAYLKKTLGICKDASYEEMFKEIENSTFMPKQVTKDNGVVPMQVNEKELVAILDNAKEYLPFLLNKDNDGKTVYDKIKALFEYRIPYYIGPLNTHSTKHWLVRNNEKIYPWNIKEVVDFDKSAEKFIEKLTSKCTYLPQYDVIPKHSLLYNKFCVLNELNNLKIDGEKISVQLKQDIYNDLFKKYYKVTNKKLCDYLESRNIAFDEISGIDNDFKSSLKSYKDLVAYNLTDEQKEEIVKAITIFGDDKKLLKKRLKNEFGGCLSDDEIKKICKLKYTGWSKLSREFLTDVTAVYKETGELINIICALWETNYNLTSLLYSDEFCCDDKENKTFNDKINELNSFGNDKTLNQIVEELYVSPLVKRPIYQSLLITKELEKIMKCPPKKIFVEVARGAEEKKRTVSRRNKLLDLYKSCKNDYPLLFDELQNNTTDDELKSDKLYLYFTQFGKCMYTGENIDLGDLFNKNLYDIDHIYPQSKIKDDSLDNRVLVKKTTNAKKDNEYPLSSQIREKMTPHWKALLDKGLIGKKKYERLVRNYPLSDEELSQFISRQLVETRQSTKAVANILEQLYPRPDTEIVYVKAALASEFRHQYDMLKCREVNDLHHAKDAYLNIVVGNAYNVKFTHNKANFIKGLQNNDKAYTVKLDSMLKHNIDGAWIADNNESLNIVKSTMNKNNIRYTRYAFEQKGGLFDQNILKKGKGQVPIKANDKRNSIEKYGGYNRPSSSYFSLVKYFDKKGKKIIQLVPIDSFEEHIYQNTPERYVSEKIGCDCEILIPCIKYNACISIDGFRMHLSSKSNGGATIVCKPSIQLVVGYENEKYIKGIVKSIETGFNADILKRYNINSDNNLILYDLLSYKIKNTIYKSKFEKVFICMSSGREKFILLDLDEQCYIINEILKILHCNVVTGDLKLLGGSGQSGTVTINSALSNIKNVKSIKLINQSVTGLFEQEIELLNL

SEQ ID NO: 4758 - protein, 1320 aa, unidentified
  REGION 1..1320: note = Description of Unknown: Cas Enzyme sequence
MERKEYYIGLDIGTDSIGWAVTNPAYEINKFKGNAMWGIQLFEEAKTAVEYRTARSARRRRQRAKDRVDYLEMIFNEEVSKVDIAFFQRLKESAFWQEDKSQNTKYSLFADKDFTDKDYYKKYPTVYHLQKDLIESAEKKDVRLVYLAILKIIKNRGHFLFDSLGNVESGSIKDLWTDFNRFLEENYTDEQEQGLCFDCEDVAAIENVLKNKSLGITKKKEELMRLCSVTKKQKQKEEILKAICGASVKLNVLFQDEELKNAEIASFSFKSGFEDNEDTLISILGERFELVEKLKALHDWALLSDILNGEKYLCFARVNTYHEHHNDLMLLKQYIKTYCPQKKQLILNDSTKDGYAHYSRHVSGAKPGVLSQEDFCKFLEKQLPENADEAYTEMFAKIKARTFMPKIITKDNGVIPMQVHQTELEAILNNAQKYLPFLSEKDESGITNREKIISIFTYRIPYYIGPLNKHSSRHWLERKEGKIYPWNFEQIVDLEKSAENFIQNLTSKCTYLKDKDVLPKSSLLYSKFMVLNELNNLRINGEKPSVAIKQDIYNNLFVHGSKVTQSKLRNYLFSTGIINDKNAEISGIDGDFKSTLKSHKDLAKYPLSTQQKEDIIKDITIFGDDKKLLRKRLKKNFADVLRDEDILAISKLKYKDWGRLSKEFLTDLYGNINTDTGEVLTVIDALWNTNDNLNQILYNKAYGFLQALEDYNKRFTVQSLKEEVESLYISPMVKRPVYQAMKIVNELSKIQHGAPKKIFVEVARGSDGSGRKISRKQKLIELYKACKMQSTELFQTLDKKSEQELKRDALYLYYTQFGKCMYTGKKIDLDSLMAHESLYDIDHIYPRSKIKDDSVINNKVLVFKTANALKDNDYPLAQDIRNNMKGFWHELLQKELISKEKYHRLTRATPLSDEELMSFVNRQLVSTRQSTKAVSELLQKYYPDTKVHYVKAALASEFRKEFDMLKCREVNDLHHAKDAYLNIVVGNVYYTLSARRDFAAGLQSGHYSMNQIFKRDVPGAWVMENGKSIATVRSMMNKNNVRFVRYSSKQTGGFYKQMPLKKGSGQLVPLKQNGPLNDTNKYGGYNKPISTYFALVRFTDNKGKAQRRFVPIDYYKKQEYLADTSAFMNKELGTNDAIVEIPCIKYNTLVSVDGFRMHISAKSGNQIICKPAMQLVIGYENEKYVRDILKYVADCQALNRALSTDTVTAQKNISLYECILQKLNETVLHVKFDGIAAKLESKKEIFVSLSVLEQCKTLLQILTITKCNAALGNLSILKEGPQTGRVQFSSNILRTNSIHSFKIIHQSVTGLYEQQIELLK

SEQ ID NO: 4759 - protein, 1279 aa, unidentified
  REGION 1..1279: note = Description of Unknown: Cas Enzyme sequence
MWGSRIFKEAETAEKRRIFRGTRRRIDRRRERINMLKSLIIEDVEKQYPNFFPMLRETSLDYEDKNISKQILGKKHNLFSDEKETDIDYYQKFKTIYHLRKYLINTTEKVDIRLVYLAMHHIIKYRGNFLYEGDFSENSNEITEKLEEIVEFLEDRYEITLKTNKEEILNILKQKNTSRANKKDNIISLFDFDKIDRTIITNVVNGILGYSTDINKIFGTNIEKSKISFATEIENEEEIKIELQEDANIYDCISSLYSWFILQDILKGKTYISEAMIDKYEKYQNDLEILKKVYKKYFKDEYTEMFRKEGKCNYVAYNGKSSGKKYKKCEPKEFFDQLKKKINTLPDQCEYKDIILRQIEEHNFLSKINVTDNGAIPNQLHKKELEKIVENQSKYYKTLQENKDKILRLFEFRIPYYVGPLANNKDKKYSWVIRKSEEKIRPWNFENIIDIDATAEQFIRRMTNKCTYLINEDVMPKQSILYSKYCVLNELNNIKIDNHRLGKNEKKDIVEKIFKNTKKVTEKTLRNYYKLNGYEIKTITGLTDQTNFNSNMASYIDMKNILGKVDESNIEQCEEIIYWVTIFEEKKILKRKLKQKYKELTDEQINKICKLKYTGWSRLSKKLIAGLKANDGDTIMDKLEKTNFNFMQIINEKSFGFDKKLEDLMPKTSEKIQYKDIEEIPTSPANKRAIWQSICIVREIEKIMKKQPQNIYIEFARAEDYEKKITDKRIKQLLLKYDEIENQIKDLKNYDKNVYKELKKHQNDKTLTEKMYLYCLQNGKCLYSGKKLDIENLSLYEVDHIIPRSYIKDDSLDNKALVLREENQRKTDSLLLKDDIINKQMEWWKSLLHNDMMTQSKYYKLIRRKMFETDDDREKFVKRQLVETRQITKYVTNLLKNEYKDTDIYSLRAELTHDFRDKYKIYKNRNINNYHHAQDAYIISVIGNILNNEWHGDKAEFKYGEYVKKYMKDNRDPKEKHGMIMGFIKNRVNIEQVKKCINYKDCFISRMLEEQTGQFYEQTIYSPNSNKSKLIALKNNRKVEKYGGYSGEKKAYLAIYEYINKKGQKEYELIGIPIKISYDIKNKKTDLETYIKETSLKDKEYSEFKIVRNKILINQEYLDENNENMRLCSDKEIRASKELIVSPKIQELVYIMNSEDKKITDEQKEKLQSEYVYMYEYLLEKIQKEYKIFNSIYIKLKENINKFKKLEEKDKKSTINGMIDLMATGQGNLKAMGLTDREGRKSGQSFKTDKLLKMTFIDKSVTGMYERKGKINGMENCNS

SEQ ID NO: 4760 - protein, 1309 aa, unidentified
  REGION 1..1309: note = Description of Unknown: Cas Enzyme sequence
MKYSIGLDIGTTSVGWACVNENNELLQYLNKCAFGVREFEAAQTAETTRQKRQMRRRYNRRKKRIQLLQELFIDYVPKNFFVEKTNQHFWKNENQFENRALSQVLKQLRINLKEIPTIYHLRKSLIEGPKQDIRLIYLAIHNLTKYRGHFLNTGRWTQKNQGFDFKVECSEVATSYAEMNGLELPHLDFDKIQTIFEDTETVRKDKQKKLEELSSKSFTPLWQFLLGLSVNAEKLFIESENRAHYKVINLKLVLGSEELDEARENLSELENQFVDEVYVLYQQILLKDLLQGHECVAFSKVASYEKYQEDLKWFKKMINEANDEKLYRRFFITSKSALTAYKKTPDKQNKEKLCLLDQYNFSIKDKDTVLTAMTKLLEKSAIKHHTTLIENIREGTFLARQKGTHNAAIPNQNSIYEIEKILTNQQQYYDFITEEFIEKVVEIVSFRIPYYIGPLAKNNQSKFAWLERAKENEHITPATFHDLVNESATAEQFIKRMTNKCTYLQSEDVLPKQSLLYQYFEVLNELNAIQIRPKDAVSHSKYRLPVEAKKCVIEFGFKEYKTMTHKRLIQLLKEHQFDYLLGEEYEVFGTQQEGRFTSSLKSYIDFKGLFENSSVPFDEIMIERLIEWLTIFNEKNIIKKKIKENYPKFPTVMIERVLKKNFVGWGSLSKELLDGLILNDGKTVIEKMFDSTLTFREVLGVKNSNLEELIKQKNHSKRQTKKIAYSDVQELAGSPALKRGIWQAVKVVEELTAIFGEPTHIMLEVAREEGTKKRTQSRLMKFKTVVDGLGKDEQVLKKELQPYLKQPEAKFKDNRFYLYLLQQGKCAYSGKSLNIHQLLNYEIDHIYPRSFVKDDSLDNLVLVEKSYNQQKGGFKMPLECMSASEGARMRGIWKSWFDKGFMNQNKFTRLCKPTFSELDREQFIARQLVETRQIIKNVGVLLEERFSDTTVHLVKAPIISKFRKTLEIPKLRDFNNKHHAIDALLNALLINHAINHYGENIFAFSFKDKERSKKLAQVAQKRNGFFLFNSFLSEQINSAISKTKLSSREFVEEVYYKVPWQTTKKIGNSDEMFFDETLYSPKTKQPKYESSKASKGVYDSVKNASTAVIKFTEKNKKKEVEKIELVNLTVLEEKQWSHLQDDEKAMKLICRQYPNKKIISASWVTNLFKYQKFIWQGQLFYLAAVKELHLAKQFVLPNTLLDAYLKADDQTSIEELQKIYLMIAEEMFTQYPIFAEGQMPNKVITFAEAIENLEQFKKEMLEIFKTTANNATRSDKLGSRLTRTVPATDIKLVYESITGLKVRKPKALR

SEQ ID NO: 4761 - protein, 1148 aa, unidentified
  REGION 1..1148: note = Description of Unknown: Cas Enzyme sequence
MAKKINIGLDMGIGSVGGSVVNAEEFDGKESENSAASRREKRSSRRMHRRSRLRLDTLLKKFEKYGFLKSVDDFKKIKDHQFTNMAELKQYALTNPISLEQMMLILYHGLKKRGSFNLKQDPDFIKKILEDNKIKEEDLTREELDQKVAELSKELPSEMQLKLLNENGKINGSDNRFDHKMFKKELEQIIKFQQENGKINLPDQFVIDFFKLFDAKREYWQGPSKGNVNSPSLFSWQTGEGSKKDQEVFYGRLIGKDSYDRNEPRAPKKGMYAALFNLLNDLNNLKLVGINRQSNKITKEEKETIIKSLFPKNKVENLTIKKLSKFFDCKEDEILGYRVEGTKRTPIFTKFEGLNDIFNNLKKASLDTSGLTYENINLIDQIILILTKGQDLDIVENNLKELFKENDFLFAEKMAKELSILTSKYSGSHALSNKTILKVYDLMLNEPLNSQEAFKRSNIKKEYKLNDKFNSLKDMKYIPVLEEEINNLFISPVVKRTLIQTLKVLRAIQIEFKDYEIDSIIIELAREKNSEDERKYITFIQEQNKKTNDKIAKLLGVNSINDIEGKLLAKISLLLEQDGKCIYCGRNIELDDLIEYSDKYEIDHIIPESISYNTKRDNLVLVHSSENNAKGNKTAYQYIISDKSKIKFADFLALIDDVYNKAMKADPTKIKYFQQKIINLTTSIDLENDENARLKFVNRNLVDTRYATTEIYAYLDDLRHLLKDNPLGKVKLKVLNGAHTDFIKGVIFHLPKKNRDDFRHHGIDAITIAYSDIIDQELFKSRREYGAKDATKILSDKYLELRAREKILDYPYHFSKKSNTNFNRQLTNDTLYSFKNINGEFKQMGKVNLTATDPGTMKILASMFDDNAKEHKISLLELYDSRTFEHLKKIYRSYPIGYTYKVSFKNKKNETVEKEEKIKNPFLYFKTHENQKITLQKNIKNPEKNPEIKTLRYYGDNMGKLLDVSHKYDVDTNKTKVGFTSLKPIRLDLYRHKVTKKYKIFPVNISVIKTMNEKEIIIDEFKYLEMISDKKYGYNINLNEFEKVLELFPRGTTIRITSQDLKYNKDIFEVVGSPNIGKLEINYIDHRGNDKNGDPKRIIVAVGTLSNIEKINTNILGTKNNFVEKEEFLIKDKKNLAYSEMEEYNKNV

SEQ ID NO: 4762 - protein, 1158 aa, unidentified
  REGION 1..1158: note = Description of Unknown: Cas Enzyme sequence
MDKNKSEKIKVNVGLDMGIGSVGGAVVNADHFEIIDAGVRLFPEAAKEASNSAASRREKRSSRRMHRRARLRLDTLKELFVEFNLLDDAKDFDELKNTDFPSMAALKQYALTEPISTEQMMLILYHTLKKRGSFNIKEDLLDDIIKENKANGIELTNEELNAKVEELKKKLPSEYQLENFEKNGIIKGSDNRFPHEGFEKELQQIFDKQNELGNREGSEDFQAKYFQIFNRKRDYGEGPNKPSSFSGQVPGDKRATQQEFYDRLIGMDTFNRKEPRTAKKGMYANLFNLLNDLNNLTISDEPNREQNKLTKSEKEKIVNGLFEHPKNKTRNLTLKELAKLLDCNPDHIEGYRVEGTGKSQKANFTKFDGLNDIFKSLTKAELDKTGLTYANLALIDDVIVALTTAQDVEGAQASLEKLYDANKISFSPTAGNKIAKELSILAPKYSGSHALSRKTILVVLDDMFDKPMNSQQIFKEMGIKKQYQFDFSKNEKYIPVLADEINNLFISPVVKRTLIQTLKVLREIQIEFKDYEIETISIELAREKNSDEEKKYIQFIQDLNKQNNEKIIKFLGVDSIDQVPKNALIKLSLLMEQDNKCMYCGQELDPGKVVNYPDDYEVDHIIPESISFNSKRENLVLVHNSENNAKGNMTAYQYINSPQSKLPYRKFAELVNEVYSKQIAKEPNSAKQLRQKIYYLTTDFNFGDEKNSKPKFVNRNLVDTRYATTEVYNYLNDLRQKLVDNPLNHVKLKVLNGSHTDGIKRAIFQLPPKDRNDFRHHAMDAITIAYADKIDQEFYKLTNKFGAKEAMELEKENYDGIRSQILDFDYHFSRKTNQNFNRQLSNDTLYSFKEYDGEFHQMMKANLTTNNKGEIAVLTRIFDKNSPKHLVSPLEIYDPKTFAYLQTIYQGYPIGETYMAKQFNKKTNEFYDKEAKIINPFLYFTGQLKQKIYLQKNTKNPEKNPEIKSIRYYGNTMGKVLDVSHKYSVNQNKTKIGFTSLKPLRLDLYRDKNTGVYKILSINVNFARKINDKKIEIDDYKYLEALKNSKISLENYEKVLELFPRGTTIRITSKNEKYINQEFEVVGSAHDGKIEVDYIHRKKTEEEPTQIELAVSQLSLIEKVHVNILGTKRKYISKEIFDAKKVPNSLEFKQDKSYNKSV

SEQ ID NO: 4763 - protein, 1158 aa, unidentified
  REGION 1..1158: note = Description of Unknown: Cas Enzyme sequence
MDKNKSEKIKVNVGLDMGIGSVGGAVVNADHFEIIDAGIRLFPEAAKEASNSAASRREKRSSRRMHRRARLRLDTLKDLFVEFNLLDDVKDFDKLKNTAFPSMAALKQHALKEPISAEEMMLILYHTLKKRGSFNIKEDLLDDIIKENKANGIELTNEELNAKVEELSHKLPSEYQLENFEKNGIIKGSDNRYPHEGFKKELEEIFKKQNEFGILDGSEDFQAKYFEIFKRKREYGEGPNKPSAFSGQVSGDKEATQQEFYDRLIGMDTFNRKEPRTAKKGMYANLFNLLNDLNNLTISDEPNREQNKLTRIEKEKIVNGLFEHPKNKTRNLTLKELAKLLDCNPDHIEGFRVEGTGKNQKANFTKFDGLNDIFKSLNKAGLDTTGLTYDNLSLIDDIIVALTKAQDVEGAQTSLEKLYTTDKLPFSPTAGNAIAKELSILAPNYSGSHALSKKTILIVLEDMFDEPLNSQQIFKEQGIKKEYQFDFSKNEKYIPVLATEINNLFISPVVKRTLIQTLKVLREIQIEFRDYEIETISIELARERNSDDERKYIQFIQDLNKQNNAEIIKFLGVDSIDQVPKNALIKLSLLREQDNKCMYCGQELDPGKVVNYPDDYEVDHIIPESISFNSKRENLVLVHNAENNAKGNMTAYQYVNSPKSKLSYRKFVELVNEVYSKQIAKEPNSAKQLRQKIYYLTTDFNFGDEKNSKPKFVNRNLVDTRYSTTEVYNYLNDLREKLVDNPLNHVKLKVLNGSHTDGIKRTVFQLPPKDRNDFRHHAMDAITIAYADKIDQEFYKLTNKFGAKEAMELEKENYDGVRSQILDFDYHFSRKTNQNFNRQLSNDTLYSFKEYDGEFHQMMKVNLTTNNKGEIAILTRIFDKNSPKHLVSPLEIYDPKTFTYLQTIYQSYPIGETYTAKQFNKKTNEFYDKEAKIINPFLFFTGHLNQKIYLQKNSKNPEKNPEVKAVRYYGNKMGKVLDISHKYSVNQNKIKIGFTSLKPLRLDLYRDKHTKIYKIITINANLAKKINDKTIELDEMAYLNALNENKISLEDYEKVLELFPRGTTVRLTSKNGNYINEIFEVVGSPMDGTIEVDYIHRRKYDDEAARIVLSVSQLSSIEKVHTNILGTKRKFIQKEPFNLEKNGNSIAINKAESYNKSV

SEQ ID NO: 4764 - protein, 1154 aa, unidentified
  REGION 1..1154: note = Description of Unknown: Cas Enzyme sequence
MSKKKINIGLDLGIGSVGGAVVNAEEFEIIDAGVRLFPEAGKESENSAASRREKRSSRRMHRRSRLRLDTLLKYFVKYGFLNEVNDFYKIKQHRFASIAELKQYALTNPISLNEMMILLYHSVKKRGVFNFKQDVLENKMKDKKTGEIELSSDDLEKELEEKSKKLPSELQIKNFEENGKITGSDNRFPHEMFKKELEQIISFQKENGRVKLPEEFVNDFFVLFSRKREYGEGPSRGNSQSKSLFSGQTGKGPQKDQEEFYDRLIGKDSYDRSQPRAPKKGMYAALFNLLNDLNNLNLSGINRENSKITKEEKMKVIESLFPKTKVENLTLKKLAKILECEEKEIEGYRIEGTKKVALFTKFEALNDIFNTLKKVGLDTSGLSYENRDLIDEVIVILTKSQDIVAAEDRLSIFFRENNFEFASKMAKQLSVLTSKNNGSHALSNKTILKVYDIMLNEPLNSQLVFKENNILKDYKFNFSNEAKYIPVLEEEINNLFISPVVKRTLIQALKVLRAIQIEFRDYEIDSISIELAREKNSEDERKYITLVQELNKKANDKIANLLGLENVDEIPGKLLAKLSLYLEQDSKCVYCGRAIDLEDLKGSPEKYEIDHIIPESISFNTKRDNLVLVHSTENNDKKNLTAYHYINSDKSKLNYSEFLTLINRIYDQQIQADKTKTKQLRQKIANLTNSTDFENDENSRLAFVNRNLVDTRYATSEIYAYLDELRHNLKNSPLNNVKLKVLNGSHTDFIKRSIFHLPTKNRNDFRHHGIDAITIAYSDIITQDIRKTSRKNKDENAVKLVSQKYDGARAQILDHDYHFSKKTNTNFNRQLSNDTLYSFKKYDGEFRQMMKVNLTDVDPGTMNILKNMFSNEADSKNHVVSLIELHDSETFNYLKKIYNAYPIGHPYKVQYKNSKGEISEREEKIRNPFLYFKIHENQKIYLQKNTKNPEKNPEIKSIRYYGNKIGKLLDVSEKYNVDATKTKIGFTSLKPIRLDLYQNKLTNKYKIFPVNARVIKAVNEKEIIIDDFKYRDMVSSKSEGFNINLNEFEKVLELFPRGTTVRITSQDLKYDNEVFEVVGSGHIGKIELDFINKRKDPADKIRIEVAVGTLTKIEKVHTNILGTKRKYITKENFPNRKIQKSIEVINEKEYNKNV

SEQ ID NO: 4765 - protein, 993 aa, unidentified
  REGION 1..993: note = Description of Unknown: Cas Enzyme sequence
VKKSKDDSFFKALKTHLDKIQEGDYGYEETKAILKIEKIEDLLPLQRSKANGVIPNQINKAELIKILDNAETYLSFLKEKDSEGISNKDKIISIFDFRIPYFVGPLSDRHRAQGSHNWMVRKEGKDGKIYPWNIEAIVDYEKSNEAFIKRMTNKCTYLIGEDVIPKNALLYSKYMVLNELNNLKVRGNKINVETKQNIFRDLFQNRAKVTGEAVLEYLRRELPELQKEDLSGFDNDFNTSLKSYMDFKKQIFGDEIEKKEIQNMVEDIIQWITIYGDDSKMIKNVIEKEYPNKLTEEQLKKVCRLRYSGWGNFSKKFLRGVEGTDKETGETFNLIEAMWQTNNNLMQLLSGSFTFAEKIKEENSKVTETIEKVSYEELVDKMYVSPATKRAIWQTVQISEEIKKAMGCVPKKIFVEMARGGGEKNKRTISRKKVLEELYKSCEADVRYLADVRHLTNELERFSERDLNSMKLYLYFTQMGQCMYTGEKIDLDELMQKNSKWDRDHIYPQSKIKDDSIDNLVLVNKNINAKKSNEVLSGEIQRKMQGVWRGLLNQKFMSKKKYDRLTKRGEFSDEELAGFINRQIVETRQSSKATSELLGRINENTEIVYVKAALVSEFRKKPLNMLKSRHINDYHHGKDAYLNIVVGDVYHAKFTSNPLLWFKKNRNTPYSINKVFNFDVKRGDKVIWEKCTEDENGIGYDGTIDRVRAIMQRDNLLYTEYTYCSKGELFNATLQKKGKKNVNIPLKSGLDIEKYGGYQGASTSYFAQVEFDGKKGESVKNIIGVPIYIVNRLSQNPLAFEEYCRDVKGMTNVKILVPKIKKNTLMIINGFAMRIRGESGSRDLSFKAAKQLHLDDESLELVRRIEKYVEKNRAYKINKDIDKITDEAINRLYDILLNKLKGTYKYRPSNPKTIIEESRTAFCTTIEIEKKVDVIYEMLKLFRCDNNASADLTILGGSKHTGVLAINKNTVGKNEVEIVNQSITGLFENRMKI

SEQ ID NO: 4766 - protein, 372 aa, unidentified
  REGION 1..372: note = Description of Unknown: Cas Enzyme sequence
MSTNYYLGLDIGTNSVGWAVTDENYNLCRFRGKDMWGIRLFEGAETAQDRRLKRNGRRRLRRRVQRIKLLQEIFAEEIGKIDKSFFIRMNESRLHLEDKSVKEKHPLFIDKDYSDIEYYKQYPTIYHLRKELIENANYHDPRLVYLALHHIIKARGHFLIEGSLGDAKDFNLVFDKLCCTLQEEMDWMADTANNKEAIKEILTSKNKAKTEKAKAIKELLKITDETSKEEEKRQNTITEIVFKLIAGNKGDIEKLFDLEKKSLTKGSFSFAEANYDEDVRPDMESEIPDYIHIIDLIKGVYDWSVLVEILQGENDISNAKVNQYETHKKNLKMLKTIVAKNFDRKTYKSLFIDQNDKSYASYIGAANKNGKK

SEQ ID NO: 4767 - protein, 1365 aa, unidentified
  REGION 1..1365: note = Description of Unknown: Cas Enzyme sequence
MNKNYYLGLDIGTNSVGWAVTDENYNLCRFRGKDMWGIRLFESAEPASDRRLKRSGRRRLRRRNQRIKLLQEIFAKEISNIDETFFIRLNESKLHMDDKSVKEKHPLFIDEAYNDVHYYGEYPTIYHLRKELIVNEEPHDARLVYLAIHHILKTRGHFLIEGNLGEAKDFNIAFDKLCYALKEDLGWENNAENAKEQIKNILTDKNKVKSDKVKEIKECLNTNDSILSKTEIKRQNIITDIIFKLIVGNKGDIEKLFALEKKSLTKGSFSFAESNYEEDVRPDMEAEIPNFIHIIDLIKGVYDWRVLVEILQGEDYISNAKVSQYEKHKNNLKNIKKLIHENFGREVYKNLFVDNNNKSYSGYIGAANKNCKKITVKKNSKDDFFKELRKKLEEIEEDGYGYVMAQELLEAEKIEDILPLQRSKSNGVIPNQIHKAELVKILDNAAKYMPFLNEKDSDGISNKEKIISIFEFRIPYFIGPLSDRHRKQGSHNWMVRKDGENGRIYPWNIKKIVDYNKSNEAFIQRMTNKCTYLVGEDVLPKNSLLYSKYMVLNELNNLKIRGNKVSVKIKQNLYNDLFKNRAKVTGKMVLEYLKKDLPDLQKEDLSGFDSDFHTSLKSYMDFKKQIFPEGLDKSETQNMVEDIIRWITIYGDDSKMIKRVIEKEYPDKLTEEQLKKVCRFRYSGWGNFSKKFLKGIEGTDVDTGETFNLISAMWQTNENLMQLLSGRFTFTEEIERENNKVTEKIEKISYEELVDTMYVSPITKRAIWQTIQISEEIKKVIGCPPEKIFVEMARGGGEKGNRTVSRKKTLAELYKSCKADVRYLAEKLNEFEDRDLNSMKLYLYFTQLGKCMYTGEAIDLDELMKKNSRWDRDHIYPQSKIKDDSIDNLVLVNKTVNSHKSNDILDGEIQNKMVGYWKSLLEKGFISKKKYDRLTRKGEFSEEELAGFISRQIVETRQSSKAVAELLKRINEDAEIVYVKAALASNFRKKPLNMLKSRRLNDYHHGKDAYLNIVVGNVYNAKFTSNPIHWFKRNKNTNYSLNKIFNFDIKRGDKVIWEKCTEDEDGIGHGGTIDRVREIMGQDNLLYTEYTFCGKGEIFNANPISKDNKNINISLKSGLDPRKYGGYNGAGTSYFAQIEFDGKKGERVKNIIGVPIYIANQLSHNRKAFEDYCKEVKGFKNVKILVPKIKKNTLMLIDGFPMRIRGENEKNLEFRGGIQLILDTTNMETLRVIEKYLEKSKGDKEHRINEKLDKISHESINKLYDALLDKLSGIYAKRPANPISTLRKNREKIIDLKEGLYDKVILVNEVVNLLRCDSENKANLSFVGGSKLAGSMTVNKNTVGKSKLEIINQSVTGLFENRKEI

SEQ ID NO: 4768 - protein, 1150 aa, unidentified
  REGION 1..1150: note = Description of Unknown: Cas Enzyme sequence
MYSIGLDLGISSVGWSVIDERTGNVIDLGVRLFSAKNSEKNLERRTNRGGRRLIRRKTNRLKDAKKILAAVGFYEDKSLKNSCPYQLRVKGLTEPLSKGEIYKVTLHILKKRGISYLDEDDTEAAKESQDYKEQVRENAQLLTKYTPGQIQLQRLKENNRVKTGINAQGNYQLNVFKVSAYANELATILKTQQAFYPNELTDDWIALFVQPGIAEEAGLIYRKRPYYHGPGNEANNSPYGRWSDFKKTGQPATNIFDKLIGKDFQGELRASGLSLSAQQYNLLNDLTNLKIDGEIPLSLEQKEYILAELMTKEFTRFGVNDVVKLLGVKKERLSGWRLDKKGKPEIHTLKAYRNWRKIFAEAGIDLATLPTETIDCLAKVLTLNTEREGIENTLAFELPKLAEPVKSLVLDHYKELSQSISTQAWHRFSLKTLHLLIPELMNATSEQNTLLEQFQLKSGVRTRYSEYNKLPTKDVLAEIYNPTVNKTVSQAFKVMDALLEKYGKEQIRYITIEMPRDDNEEDEKKRIKELHAKNSQRKNDSQSYFMQKSGWSQEKFQTTIQKNRRFLAKLLYYYEQDGICAYTGLSISPELLVSDSTEIDHIIPISISLDDSINNKVLVLSKANQVKGQQTPYDAWMDGSFKKTNGKFSNWDDYQKWVESRHFSHKKENNLLETRNIFDSEQVEKFLARNLNDTRYASRLVLNTLQSFFANQETKVRVVNGSFTHTLRKKWGADLDKTRETHHHHAVDATLCAVTPFVKVSRYHYAVKEETGEKVMREIDFETGEIVDEMSYQEFKKSKKYERKTYQVKWPNFREQLKPVNLHPRIKFSHQVDRKANRKLSDATIYSVREKTEVKTLKSGKQKITTDEYTIGKIKDIYTVDGWEAFKKKQDKLLMKDLDEKTYERLLSIAETTPDFQEVEEKNGKVKRVKRSPFAVYCEENDIPAIRKYAKKNNGPLIRSLKYYDGKLNKHINITKDSQGRPVEKTKNGRKVTLQSLKPYRYDIYQDLETKAYYTVQLYYSDLRFVEGKYGITEKEYMKKVAEQTKGQVVRFCFSLQKNDGLEIEWKDSQRYDVRFYNFQSANSINFKGLEQEMMPAENQFKQKPYNNGAINLNIAKYGKEGKKLRKFNTDILGKKHYLYYEKEPKNIIK

SEQ ID NO: 4769 - protein, 1136 aa, unidentified
  REGION 1..1136: note = Description of Unknown: Cas Enzyme sequence
MYSIGLDVGIASVGYSVIDSKTGHIIELGSRLFSSRNSDDNSIRRDKRGTRRLLRRRVTRLSDAKKILFDNGFNFDANLENKCPYELRVKGLREEISKEEIYKIVLHILKKRGVSYLASEDIDSENESKDFRFQVLNNQKLLKDLTPGEIQFSRLNEGGRVRSGINKKGEFKLNIFSVDSYADELNRIFDEQKNHHQEITKEFIDLFTKKGHRTNAGLIYRKRPYYDGPGNEKQNSPYGRWAEYRENGKPAENIFDQLIGKDIKGKIRASNLGPSAQRYNLLNDLNNLRVISRENERLTTVEKQKIIDKLETNRPKSYGPSNIASDLGLKLEEIKGWRIDKKEKPLIHSMKEFSKWRNIFEEHALNIHDAPVEVLENVASLVTLNTEKEAFELSLDDEMDRELKGLFVENFHELRQAKPTNSWHSFSAHTLQLLIPELLNTSDEQNTILERFDLKVAFKSKYKDKKSLPATKILEEIYNPTVRKSVRQSINVLNALVKKYGKKNIDYLTIEMPRDKNEDEQKKTIKNIQKNFETKNKESRAYFLTKSGWTESQFESKLRSSKRFASKLYYYYEQDGLCAYSGQQIHPEELTTEKVEIDHIIPLSISIDDSRNNKVLVRAFANQEKGQRSPLQAFREDAKFGRDVEEFKAWVISRKYKKYKRDLLLEENNIFDPEIKKKFVARNLNDTRYSSRILLNAIQSFFYNSRTKLRVVNGSYTHTLRKKWTDYLKDRDTHHHHAVDATLVAVSPFVKLDRFEYRYNEEENKPYMVDTKTGEIVSYSEYKRKDYYDKHSYTPEFNDFIEQLLPAKLYSKIKFSHQVDRKFNRKLSDETIYSTRDVTTLKGKGKNQKEITETYVIGYISDIYTPEGYSQFAKKRNSLLLKEIDPKTFEKLVEIETEFNDYVEVENQRGEIKRVNKSPFQQYREKYNVPGVTKYAKKNNGPIVRKVKYREKKLNDHYIDITSNKRKQNSNRTENNKQVVMLNNTPWRTDVYYSETENKYYLMGIKYSHLIHKGNEYGITQNQYKILKELEDVPENAIFKFSLYKKDLIEIVQGNNSDWGLYHSRNYSQSNYFEMKPINKKKWDSKELLNIFGNVAASGQFIKGIKQGMKVRKYHVDILGNSYLVRNEELSHILLD

SEQ ID NO: 4770 - protein, 1214 aa, unidentified
  REGION 1..1214: note = Description of Unknown: Cas Enzyme sequence
MTKYSVGLDIGIASVGWSIVDVEKKEIVDLGSRIFPSGNAEKNQERRNFRQLRRLIHRRKNRLSDLTKVFENYGLPIPTFENKNPYELRVKGLSEKLTLEELSEAIYHLVKRRGISYDLGDLEDEDGSGGTEYESSIKINRQLLKNKTVGQIQLERLQEYKQVRGQVETEESILLNVFPSSDYANEAKKILEKQSEFYEEITDELIERICKSDAGNPENNGLITRKREYFHGPGNEKSRTDYGIYKTDGHTLGNLFDELIGTDVQGEKRASASSLTAQIYNLLNDLNNLTVKEPNENTDSDGKLTTEIKKKIIEVGKTADGQFGLTQIVKLIGTKKEHIKGFRVNKSDKAIIHTLSGYRKFRKTLAEVEIEANYLPIEFFDKVADILTLNSEKSEVRKQLEKNDFEFKNIENFDKIKDIIIEQNKDLLVDGRATWHGFSYKTLNMLIPELENTSEEQMSILTHLGYMKPDNEKYKGKGLKNIPSKSITDEIYNPVVAKSVREAINVFNAISKRVGAENIEHVVIELPRDDNADDEKRKLQKFQKEQETEKSKADDEILQKLLISSEALKAEYRKKKKLSIKVRFWYQQECLCPYCGKNIEAKDLIYQNDSFEIDHIIPISVSFDDSQNNKVLVHTSCNQAKEKQTPIGWINNGGGFGQPVTEYKAKVLANKHYNKAKKDNLLSEVDLNNLEVRQGFIARNLNDTRYASRVVLNEFYAFFKSYNLPTKVKVVRGKWTSQMRKKWDYKTLEKTRDTHHHHAIDASIIASFPILKNFDKVVKLIDVDKETGEILKDREAVKIAKEQELLVQMPVVTNEIYEKEFRDLYNSPLFKQVTDANDITNPDNPVKFSHKVNKKANRAVANQTIYSAQTFENIQRSLTENDEVIERREVQTLILDKISDIYAYDISGPKVAGYKKFKELYDKEIESKVLPESSIFLMRRNDIKTFEKLEQIMKDYSEFEEISQSDGKVKKINVSPFELYRREHDYITKYTRKDNGLLGNGAPIKSLKFYSSAVFIEDKKAEQPEKSKGKLDITPKNARVGKRVFLDSLELWRTDLYFNVEKDKYEFLFLRQSDLKQAPHNKITIPNDVYDYRKRACKVSDNSEFIMSLYRGEQIELSFKKDFSKQRHKFLFWSGGSDSSGQKWELKPVAKSQFIKGEPEPIYGMDEEGNNIKLFTVNGQWLVAMSGFSDIRKINTDILGTSYYVNKEKLKLDI

SEQ ID NO: 4771 - protein, 1355 aa, unidentified
  REGION 1..1355: note = Description of Unknown: Cas Enzyme sequence
MESRYYIGLDIGTDSVGWAATNPKYEILKFKGKLMIGSRLFDSANTAADQRLYRSNTRRLDRKKWRIKLLQELFAPEISKVDFGFFQRLKDSFLKDEDKAVFQKNMLFNDKNYNDKDYHRDFPTIYHLRKALIENKKEYDVRLVYIALHHLIKHRGHFLFQGSMSQAISFKEVFRTFKEAVFSEFELEINCKNEDELQGVLKNKHLSKKEKTNKIMSLLDSDRTDKRLKGIIGLICGSKVSLNDIFGDSVQSEEPLKISFAEKPYDEVRPEIENALYEQCNTVDVFKAVYDWAILADILSEGDFNGKNYLSVAKVKIYEKHKKDLEILKNIFKSYSKSLYNQFFRSEKENDNYSAYIGSTKFGKEKFSVKRCTQEVFYKRVLKILKEIEVKSGCTENIKYIQKEIEAQTFLPLQVTKDNGVIPYQVNEAEAQIILNNVSKYLEFLNDKDSYGLTVKDKILKILTFRIPYYVGPLNQHSPRSWMERKNNGVITPWNFEEMVDVKKSAENFILRMTNKCTYLVGEDVLPKNSLLYSEFMVWNELNNVKVKGQKLNIELKKKFFEYYFKNQKSVTKNKLFEFLKTEGVKDIYKDDISGIDQGVFKSSLASYLIFKNIFGNEIEKYSVQQIAENCIRWITLYPDDRKMLKEIIRSNYDDNQVSNEELEKIIRLKFTGWGRLSKAFLTEIYDDITQYNILTALKDTNDNLMQLLSIKYTFSENIEKFNSFNKECNNKFNYENLVSGLMLSPSVKRPVWQTLLILKEITRIRKTPPVKIFIEVARGKESIPERKDSRKEKLLKVYDEFFKDKNNAEIIDEYSKDVAESLKAQDNTALRAQKLFLYYTQLGKCMYSGEAIDLASLNDVQKYDKDHIYPQSKTKDDSLDNLVLVKRKLNAVKSNDIISADIRKKMLPFWRLLHKNNLISTEKFNRLTRSTPLTNEELAGFINRQLVETRQATKIVANLLKELFPNTEIITVNAKAVSDFRKNQLQAVKVRSINDLHHAQDAYLNIVVGNVYYEKFTNNPLKWLNNENRNNYSLNKMFDYDIRKRDEIVWLSGEEGSIKTVKAMYNKNNILYTRYATCNKGAFFDQQIKGPKDNPSIPLKKGLDLKYGGFKSVTPAYFALVESEDKKGAKQRSIEAVPLYLAKQFEKNQQIYVDYCAEKYGLKNPVIILPKIKKDSLFVVDSYPMHLRGSNGRQLIMQNAVQLRIGTEEQKYFKRIEKYIANNLVRKDKRTLLTIRNSEGITRENNIRSYDILLEKQMNTIYNKRPASQLKTLVNGRDKFVNCTLEEQCILLNEILHLLQCKPLTADLSLVSGSKHAGNFQINKVITNAKNAMLINQSVTGLFEKNIDLLTVQK

SEQ ID NO: 4772 - protein, 1122 aa, unidentified
  REGION 1..1122: note = Description of Unknown: Cas Enzyme sequence
MSNGKILGLDIGVASVGVGIIDVSTGEVIHASSRIFSSADAANNAERRGFRGSRRLLRRKKHRIKRLDDLFKNYNIELAGGVSDDNPYILRVKGLSQELTVEELYISLKNILKRRGISYLDDAESDSEAGRSDYAKAVEYNRQLLASKTPGEIQLERLEKYGQLRGNFTIKDEEGQSQQIINVFSTSDYVKEVKKILDCQKAYHDFISDDFCDNILGLIKEKRKYYVGPGNEKSRTDYGIYRTDGTTLENLFGILVGKCTFYPEQYRSSKASYTSQEFNFLNDLNNLTVPTETKKLSLEQKEFLVEYAKNSTILGAGKLLQQIAKLVDCKIEDIKGYRLDNKDKPELHTFEIYRAMKGLTPLVDIGEMSRVQLDILADILTLNTDFEGIREALQNQLPNVFDEEQVKGLVSFRKSKNQLFAKGWHNLSQKIMLELIPELYATSDEQMTILTRLGKFEKSISSRHTSSINADEIADEIYNPVVAKSIRQTIKIINAAIKKWGEFEQIVIEMPRDRNEDEEKKRIADGQKANAKEKEDSIRRAAKLYCDKEKLPGNVYHGHNQLATKIRLWYQQGERCIYTGLPISIHDLIHNQSQYEIDHILPLSLTFDDSLSNKVLVLATANQEKGQRTPYNYLQSTTTAWSYREFKDYVIKCKGIGKKKREYLTFEEDIDVFEVRSKFIQRNLVDTRYASKVILNSLQDYFKGAGKSTKVSVVRGQFTAQLRRKWGIEKTRDTYHHHAVDALIVAASSQLKLWNKQENPLILDYTEGRQVDLETGEILELTDNQYKELVYQPPYQGFVNTISSSAFNDEILFSYQVDSKVNRKISDATIYATRKAQLGKDKVEETYVLGKIKDIYTQSGYEAFLKRYNKDEACFLMYHKDPDTWEKVIEIVLRDYREYDEKGKEIGNPFERYHKENGYLKKYSRKGNGPAIKSLKYYENKLGNHINITPTNSRNSVVLQSLKPWRTDVYFNLETQKYEFLGIKYSDLSFEKGTGKYGISQEKYDSLKTIEGVAKNSVFKFTLYKQDLLFIRDVEKNFGKLLRFSSKNDTSKHYVELKPFEKSKFISEEVLIPALGKVAKSGQCIKGLNKPNLSIYKVRTDILGFKHFVKQEGEHPQLTFKK

SEQ ID NO: 4773 - protein, 1119 aa, unidentified
  REGION 1..1119: note = Description of Unknown: Cas Enzyme sequence
MSNGKILGLDIGVASVGVGIIDVSTGEVIHASSRIFSSANAANNAERRGFRGSRRLLRRKKHRIKRLDDLFKNYNIELAGGVSDDNPYILRVKGLSQELTVEELYISLKNILKRRGISYLDDAESDSEAGRSDYAKAVEYNRQLLASKTPGEIQLERLEKYGQLRGNFTIKDEEGQSQQIINVFSTSDYVKEVKKILDCQKTYHDFISDDFCDNILGLIKEKRKYYVGPGNEKSRTDYGIYRTDGTTLENLFGILVGKCTFYPEQYRSSKASYTSQEFNFLNDLNNLTVPTETKKLSLEQKEFLVEYAKNSTILGAGKLLQQIAKLVDCKVEDIKGYRLDNKDKPELHTFEIYRAMKGLTPLVDIGEMSRVQLDTLADILTLNTDFEGIREALQNQLPNVFDEEQVKGLVSFRKSKNQLFAKGWHNLSQKIMLELIPELYATSDEQMTILTRLGKFEKSISSRHTSSINADEIYNPVVAKSIRQTIKIINAAIKKWGEFEQIVIEMPRDCNEDEEKKRIADGQKANAKEKEDSIRRAAKLYCNEEKLPGNVYHGHNQLATKIRLWYQQGERCIYTGLPISIHDLIHNQSQYEIDHILPLSLTFDDSLSNKVLVLATANQEKGQRTPYNYLQSTTTAWSYREFKDYVIKCKGIGKKKREYLTFEEDIDVFEVRSKFIQRNLVDTRYASKVILNSLQDYFKGAEKSTKVSVVRGQFTAQLRRKWGIEKTRDTYHHHAVDALIVAASSQLKLWNKQENPLILDYTEGRQVDLETGEILELTDDQYKELVYQPPYQGFVNTISSSAFNDEILFSYQVDSKVNRKISDATIYATRKALLGKDKVEETYVLGKIKDIYTQAGYEGFLKRYNKDKASFLMYHKDPYTWEKVIEIVLRDYREYDEKGKEVGNPFERYHKENGYLKKYSRKGNGPAIKSLKYYENKLGNHINITPTNSRNSVVLQSLYPWRADIYFNLQTGKYEILGLKYSDLNYQKGTGEYGITQEKYGLIKSQEGISNESQFKFSLYKNDLILICDSVNREQQLFRFLSRTLPNKKHYVELKPFDKAKFEGGQELMSIFGAVAKGGQCIKGLNKPNLSIYKVRTDILGFKHFIKQEGERPQLTFKK

SEQ ID NO: 4774 - protein, 1363 aa, unidentified
  REGION 1..1363: note = Description of Unknown: Cas Enzyme sequence
MKKTGKIKNSVLQETHYNVGLDIGTSSVGYAVVDADTGKVLVFKKKNMLGGRLFNEGETAKATRVKRSTRRRYDRRRERIKLLRCLMWEMVDEKDPDFFARLDEGFLMREDKTIQSKSILFNDKSYTDKDYYKEYATIYHLRKELFENDEQKDIRLVYLALHHLIKYRGHFLYEGQNFQEINNDINELFVRLYEQLAENCQYKCEIHNNQIEEIVEILKDTKQTKSEKKEVLKPVITKTMRETEKKAAQEIVNAILGKKINFNILFGVDTIIDNEDKALKLSFAEEKYDEQEDYIYEQLQEKAEILDTLKEIYSWFALQDILKGEKTVASAMVKKYEKHKKDLKILRNVVRKYCTPEEYKNFFIEKIIDTKKLKKSVNYVNYIGADGRGNTENLYNEIKKLLEDKDNADKDIQYILKEIDAENFLPLLRTKENISIPYQLTVLEAARIIDNQGKYYPQLSANKDKILSIIEFRIPYYVGPMNTKNRNERFSWACRKEGKQEEKIYPWNWKDIIDEDKTAARFIERMRNTCTYLPGEDVLPRYSLLYSEFVMLNELNKIKVNGKFIEHDMKQKMIEGLFKKQKNVTEKSVINYLKKMNYMNTDQYKIEGYQKEKAFASSLASYIDFTRIFGEIHSGNRQMIEEIIEWLTLFEEKSIVKRQIQNKYGTQVTAQQLEAVCKLRYKGWGNCSAKLLKGLKTTIDGDKDSIIDILNTTNYNFMQIITSKKYEFAKQIEEYNEDNTMTDITIEDISRLHGSPAIKKGIWQTVKVMNELVQIMGHEPDNIFIEFARGEDDKVRTKTRSAQIDKGYKKWKEEFKGEGFSTEVEKELKNKKYKDRLNEEKMYLYFLQNGKCMYSRDKTLDIDKLPLYHIDHILPQTYTPDDSIENKVLVLGIENENKADNLLISQKIRNDRKEFWRYLYECGLMGEKKYKNLTRSAIGEGEIKGFINRQLVETRQIIKNVTQLFTQRYANSNVLAVRAELSSNYREKYGLYKSREINDFHHAHDAFLAVRIGMFLMKRFPGMEKDLIYDAFLRYRSKQNKSSLLKSKYGYLMTFFDEVQCDENGVVIWNPDEDKAYIKSVLYSGNCQISRKKEELTGKFYNETIYPAGSGDLIPLKKNLSVEKYGGYSGKQNAYYVAVQDENGKKQKKIIGIPIYVKELEKTQPGAIDAYIKKQLNTISYRILKDKICKYQEIIVNGNAMYLTGAKEKKNEMSNAKQFFFGDHYYNLYETLLKCFADKVPEDEKEGYDKKMIEVYNYIIAKGERQYKECAFAFEKIKQALDFPMLSYNDKIDCLREILKITQANSTCANIKKYCKQSANVTGTERVGRIERVINIDDSKRNKSVAVFVDKSVTGLYERRYTL

SEQ ID NO: 4775 - protein, 1345 aa, unidentified
  REGION 1..1345: note = Description of Unknown: Cas Enzyme sequence
MKLEYSIGLDIGVSSVGWAVLTDDFRIPKYNDRYAMGVREFESAETAEERRLHRGARRRYNRRIKRIQLLQQTLDALFANDIGFFMQTDENEKHFWRNSNHFDNRTLSETLKNLGKNPRKYPTIYHLRYALLTEKRQFHPRLIYLALHHLVKFRGHFLNENMDWNRKESSDSIYHQLRKYFEVLKEHGYDIDLADEEIEEIIKLLEYDDLTSSDKRTQILKITGREFRQPITLILGLKADIVQLFLESDNRELYREENLKLSFTDGEITEIYEKLTDEEKVIIDLANAIYQNNLLKDLLGDAVCVAEAKVNAYKQFGNDLKTLKQIYNDYFGEEEYRKMFITPRSQLTKYKNTRKVRYLCEFERFLKIHEEEAAFYRNLKGKLKQLLKSASLNKKEKKKIEGIIQRIDRDQFLQKQRNQNNAAIPHQNNVYEAETILKKQQKYYKEISEDMIERVKQIISFRIPYYIGPLVKNKQQSEFGWAIRKKDEPIKPWNIDKVIDHSQSAEAFINRMTSFCAYLLNEKVLPKHSLIYERFELLNELNGIQIRPANKPPHRKYRLVKDEKKWIIENVFEKYKTVTHATLIRELKKGPYKYLVLDQDTGEIKDIFGTQGEDSFHSSLSTYIDMTQIFGEVTDDNQDMIEEIIYWITVFEEKEILKMRIRKKYKNLDNKQIQRLVHLMYSGWGRLSRKLIDEMPINSQQNDTILSLMEREPLVFMEVISNDEFNLNERIAKMNQTDDKQFTKIKYRDIQELQGSPALKKAIWQAILIIEELVEIFGEPKNIMIEFARHDEETGRTRSRKQRINQLYRTTKQDEADLKAFLKEHIEYETAEYRNNRLYLYIVQEGKCLYTGKRLNISRLHEYEVDHIYPRSFVKDDSIDNLALVTKEINQKKGNRRMPLEVMDESQRVIQKKYWKRLFDHNLISQTKYYRLMKEEFTDQDKESFFARQLVETRQITKHVRNLLLERFEHTAIHPVNANIVTHLRNHTETYKIRDLNNKHHAVDAALTALIVLFIIKKHGYNFLNFDFRFQKAREKWRDMLTTYGKHFFLFSEIDQYDHFKDYRTGKKISGREYLKNLNYHIPWQTTKQLGSSEGAFYEQTIYSPKSTLGRNPRYESSKLHKGVHSGLKEECSYLISYKYKTKSGMERVDSRVVKFYVIEKYQKSHYSEEQLARYLASKVTKHKVIDATIHTKIQKHQPILIEGQPFNFVTLGEMHNAKQFIIDEVLTRKLYQILNERREFTVKEIQEVYESISEQAINEYTHYLLESGINNIKKYKDEIKDLETFIKGITELFNMTDAGPGRSSRFGGRIKWKINPRNCKFIYQSITGLKYRKPKSYTKELWKK

SEQ ID NO: 4776 - protein, 1488 aa, unidentified
  REGION 1..1488: note = Description of Unknown: Cas Enzyme sequence
MTETLDTKQEKKGKKGGLTIGLDIGTASVGWAVIDNQFNLVQGKKRIIDIDAHGVRKTRKSRTNLWGARTFDEGQTAEVRRLQRGTRRRLARRTERLKLLRGIFAEEINKVDESFFIRLAESFYQNEDTTNKNIITDYPLFHGTRGSGETFANDKAYHKKYPTIYHLRKDLIYNPAQKDLRLVYLALHHILKYRGHFVNAGQTFDLAHGSIDMKKSFTDLYRAFSVYVNEPLTDVDEKLTDTLDRTQEEAVQTILADRKKSKSWKAYELAEVLITSDNKLQKQQKALYTAIVGNGIDLAKIFANENYSHKVDEAIFPKAADFKYSNDKYDEHIANIGAVLNEEEMAIIEYGKQVYESIILSQILTQPTLAASMVEKYELHKQQLEALKMLTKSIDYALYEQVFKADGVYTKYVDGVGNPGKKLTQEDFYKALKKLLEGAIPQLVFPKKEAASLNFDGVILNEQQKATLIAIDEAMQVERYLPKQRTSANGAIPYQIHEHELVKIIENQKAYYPFLGDALQITREDDAAGTVKKKEYKIQILMKFRIPYYVGPLAQSVGWARDDDGELIETKGHSSNSWVVRNSTEKLTPWNFDEVINKEASAENFIARMTGFCTYLPTEKVLAKNSLLYQEYTIYNELMSCGYYSKGKKVYFSAELKKDIVAQLFQQQKKVLAKDMVKFLVNEHRIDVIEPDLFGIDQRVKTPGYNTTFSTYRDLIGCGISATQIADNRERFEQIITWQTVLEDKAMLKKRIKQTNADVWHNFLTPEQINKLANKHYTGWGRLSKKLLDGIKTSDAEGLTIINHLKKRPYSNFMRLLEDPKIAETIAKAQGDLGKQQTFNYELVEKLAGSPKIKKSIWQTLQIITELEHYLGVENIDRIVIEMARDNSGGRTKTRQQQIEKFQKEFLTNTGKKLDEQIKTAFVNETKAAFNDEKRYLYFLQNGKCMYSGQELSLENLSTYEVDHIIPQTYIKDDSIDNKVLVLKSENQNKGGDVPSQIIVNRMRPYWELLAKNHQVSAKKLANLTRGTLSDETKAGFINRQLVETRQITKHLANILNEYFKDKQVDILTPRAQLVSQFRDGIVYLPAGELDDLSANEGDLEILPAESDKFVKVRLHDKWHKNRELNDYHHAHDAYLVAIVGTYLYAVRPDLRGIWVYNTYKKDEYAMMGRYVGARKEAYRQLLSGMVAPQWSNIDLNTGEVSPCYPDVDNWSRDDVLQKITQTLQLRNINIVKKTEIQDGKFGKEEVWQKTKNEKEAAKIISLKKKNNPNLYGGRKSEESAFAVIVKNKKGEIASISVSAMQVQKYLKSTNKLSYLQQEVDKTITAIVRSQMTKYTKYMLPDDSGTMRLMASFQEASSGRQLPMMNVPTNIKDDTLTEAQEQQLMQTYKTLVQFIAKNKLFKPAKIELLADDGLITDNFKQSTAEDKQKILVELFKVAKGSARNLEALAVAGLGTKDIRMTTKRDLIQADTVVIDQSVTGLYETRRKL

SEQ ID NO: 4777 - protein, 1392 aa, unidentified
  REGION 1..1392: note = Description of Unknown: Cas Enzyme sequence
LSRKMNKKNSDYIIGFDLGTNSVGYAVADLDMKIVRAKGKRLWGSILFDMGETAANTRLLRGARRRYERRRERIRLLRTLVEKSVLSVDPAFFARLDNSFLLNVKNDGDFGRDNVYNLFDGDYTDADYYREYKTIYHLRKRLCEDESRADIRLVYLALHHLIKYRGNFLHDEERLQVGGAGIITQLEEIINGFGVYYSDADGEIGFAPDLDVNEFVGVLTGKARKREKRDVLLKMLSGNDYKKQATAIASLLLGYKGDLSDLVLVSDADEKPEKCVVSFDSADYDEKALAFPSLFGDELSDLIGKLYSVYCDLMLASIIGEGNRLVCDGMIERYEKNKKDVAALKSVLRADRETYKAFFDSDSAAKISFVNYFKPHVVGRKNAIGKLVKREEFYAEVKKVFSKFEDSEAKAYCLGRIEEDDFLIKLNSTRNAVIPYQLNLNELELILDNQGRYYPELSENREKIISLMTFRRPYSVGIINKNSRFSWVAEGDVKNERAYPWNFEAVVNYDSLSERFIRRMTTRCGIFKDEDVLPASSVTYQIYNVLNELANVRVGVNGGPERRLTVAEKQKAFLMFLDKATVTKKDVAALLFREFGLSDARISGLSDESGKFLSKMTSYRALKTAFGGNGCFSVANNRIETDYETYALFEKIIEVITVFSDKKIRKRIIAKYIPSLDERVVNALVGLNMKGWGRFSKKCLVGTDGANGLNVLETLYVTDMNFQQIINDETLGFKERFSQHDNKKLGRITYADVDGLYLSPSVKRSVWQAVKAAEEIVKVMGCEPRCIYIESTRSESDKKRTKTRAGIVTELYNAVKTDVAEYNDCLQRVKSEFKRLDEKKLDDEKVYLYLLQFGRSMYSGKTLDINNLSETCEVDHIVPRHYIKDDSLQNKVLVLKNENQEKSGTLAINKEIRDKMLGFWAFLKANKFIGKKKYENLIRPSYDEKICKGFIDRQLIETSQGLKAVRDLLKERFERCDIELVKAGISSAFRSQLSSEGYYDFFKLRELNDFHHAKDAYLAAVIGYFTRKIYPIWGTDSEARLLKDELYRTNGRSAAELCNRRNGIVVEMMQTVSSDVKDGCSDWNTRYNNILSAFANNDCLISRKKELDTGAFYNATIRSPREEKGCVPLRFAVDRRGEKRPLPPKLYGNYEGENNAFSYFVTYEKGKKRETVLMGLPVRIYYQSRNDEKMIESYYGEILAAENKKFISYDKRKILKYQLARINGQACYITSNSEIINAEQLLIDKKYALLLYCVAHPDKKVFFRGKDYRLTDNDESLTADMKDFFISYVEKLRARYPIYEKYADGILQYTSSQEFAALPVYARNGVSKVEYIERLLNLTRACSTCLDMKPFGGKTSWGRLNNKTIYAKTTLLTDTSVTGIYRKESVIGGTED

SEQ ID NO: 4778 - protein, 1315 aa, unidentified
  REGION 1..1315: note = Description of Unknown: Cas Enzyme sequence
MNKYDIGIDIGTTSIGWAVVDQEKKKVIRKFNKKLWGVLLFDEGTTAEARRIKRGTRKRFDRRRKRIKLLQKEFQEEMNKVDKEFYKKMKETFLWQEDRNIMKTSDEEIWKKYQKKYPTIFHLRKELLETKEKMDIRLVYLAMHHIIKYRGNFLHENNNFKIESLNIEEKIEEVINIVQKKDLDQQIDLPTESLENILNKTEEKETYLKKYFKSLFHTNEREWTNMVLGKSFNVQKLFQIEIEDKELTKLSFKEDNYEAKKVKLEKELKENIMILDYMQEIYNIDYLKKLLSTEKYISLAMVNNYNKHKEDLKILKTALKKLEKKQYKSFLQKDDSIYRKYVRNKITCEEFIKELEKVIEKIEDKNQKEVELLKETMRQKDFLPRITSKDNGTIPYQVHKMELEKIIENQGKYYPFLLNKTKNNNYRIIEILKFRIPYYVGPLNNTTKEKTKTNPNAWACMKKNAFITPFNFEEIIDIDESATKFIERMISHCTYLTEEKVLPTNSILYSKFKVWNELKQLKINERKIPHKLQKKIMEELFERKRNITEKDLKNFLHQTGEYNMYDDLEITGFSAEKKFANNRNSFIDFFGKDGIFEGTNYNEQDAEQIITWITIFEDKNILERKILKDYPDLKNKLPEIKSKKYNGWGNLSKRLLTQIYYKNDLQEDKSILDLMQETPDNFMQIITSKKYCFEEQINNINKEKKTKKLNYQLVEDLMTSPANKKGIYEALKIIDEIIKFMGYKPESISIEMARKEVKKERIPDKKRQLEKIYLECQNEISNYCEYKKIKKDLQSIDKIDAEKLYLYFIQEGKSLYSNTPLNILELENYEVDHILPRTLVKDNSWDNKALVLQKENQDKRDSLVLPESYRNENKNWWKHLLKVGLISQKKYNNLCRETFSEEIIEGFIARQLVETRQICKHVANIVENMYEGVNVISLHADLSHNYREKFELFKFREINDYHHAHDAYLAAVIGNYQKKYLKKITSTKQLQNMKQYILDEEERKRKLKYGYVINSLDPIFKLYNKETKEVLFDIEEFNKTIENTLYQNDIIINRKTELKTTGEFYNESKNKKDAKLKKPIPLKKGLSPEKYGSYSGIKCAYMVLVKYKKKNKEEQELVGMPIMYAESYQKDKSIVLPYFKKLLKLKEEDKLEIIDHKIPFNTLIHLNENNYYITGAGIELQNATELKIPKEKMIKWKFSLNILLNKKKKELTEKYEEHLKEIFQFIIVEMEKNYKMFEKERKEISEKIIFSNLSIEEKEDVIKQLFKMLRCNGVNANLKKYNLNERCGRLNGQKIEHGVIISKSITGIKEKKYEF

SEQ ID NO: 4779 - protein, 1335 aa, unidentified
  REGION 1..1335: note = Description of Unknown: Cas Enzyme sequence
MSIVKNRENIKYYIGVDIGTNSVGWAVIDENGNLLKKGKHHLWGSRLFDQAQTAQNRRNYRSSRRRYNKRRQRIGLLRLIMSDMVLEVDPSFFIRLEKTTFLDKEDKKAILKDNYKMNYNLFCDEDYNDKKYFKDYPTIYHLRKKLCESDEKADPRLIYLALHHIVKYRGNFLYEGQELHLEPSNKEEDLKILFDILGKNNDTVYDISEEQIQFILKTVVENISKTAKVDECMSQLKLNSEDKKIVKEFMRGLVGNKFNVSKLYMHEDLQFDDEDLKLQFSDKSYEEKITEYENVLEEKMEFIDLMQRFYSWIELSKIVGSDSQHASISGAMVNIYESHREDLRTLKEVMLKIGKKEYDEMFKPTSKNVVNYYNYVNPVACSGDKTDGFYKYVKKAIEKSDDSRKDEILQKIANETYMLKQTSKNNAYIPYQMQKDELIKILDHQEKYYPVLKENRDKIISILEFRIPYYYGPLDGNKQFGWLIKKKGKENERILPWNHQEIVDVQETAAQFIKKLTNYCTYLPIEKVMPQKSLTCSMYEVLSEVNKIRIDGKLLPIDTKNRLIEDLFFKRKTVKEKDLINWLKQNQLTVGEITGYQKEKAFSSSLAPWIDFKEIFDEINDSNYDLIEKIIEDMTIFNEGSILKERLKKAYNLDQNKVKKIMKLKYSGWSRLSKKLINGIRADNKFGSSVSILDVMKESHMALMEIINDQDLGFKQIIEKENFKNETGSFEYEDIENLAGSPALKRGIWQTLQVIEEIKNYMGHEPKNIYIEFAREEQEKVRTTTRVKKLKSIYNDIKNQLDVHGKEVYSNLNKQDEKSSIEKRLYLYYTQLGKCMYSGESLDIDKLSNYEIDHIFPRTLTSDDSLDNLVLVKKKENQRKLDDLVLPLEIRNKMEVFWKKLYDNGLITQTKYYRLMRDEFRRDQIDKFINRQLVETRQIIKHVANIIENHYEDTKVFTVRANLSHEFREKYGIYKNRNVNDFHHAHDAYIACIIGRYIQIRFPGLEAKYVYGQYMQNVKKTKNNIDKENHGFIINSMKYECIDEDTGEVIWNPERILDYIKCFNYRDVYITKKLDTNNRELFNVTILPNDKNSEKGKTKATIPVNKLRSNVRKYGGFSGLQSDIVAIEGKKGKKIDRRLINLPILLRYVSIEDQCKYIMENNKYSDVKIIKKIKKNQLIEIDGICYYLKSADELDTAYQLILSRDDNEMIYRIDRAIQNNDFSYFDNKKENIDELYRLICHKMIENYPKYKKKVYEFIKEREEEFFELDNSQKCIVIFEMIRVMKRGEQYINIPFEPYNLKNDRKGRLNCQSILLDNTYFYDVSITGIYSKKYKL

SEQ ID NO: 4780 - protein, 1404 aa, unidentified
  REGION 1..1404: note = Description of Unknown: Cas Enzyme sequence
MSIINFRRRALMEMQASNQLISSHLKDYPIKDYFVGLDIGTNSVGWAVTNKSYKLLKFRSHKMWGSRLFDEGESAVARRGFRSMRRRLERRKLRLKLLEELFADVMVQVDPTFFMRLRESKYHYEDKTTGHSSKHILFINEDYTDQDYFKAYPTIYHLRAELMKDGTDDIRKLFLAVHHILKYRGNFLYEGASFDSNASTLDDVLKQALKNIIFNCFDSTAAIGSIGQILMEPGKTKSDKAKAIERLVDTYIITDEVDTSGKTQKEQVKEDKKRLKSFANLVLGLSASLTDLFGSVEELDDDLKNLQIRGDTYDDERDKLAKAWSDEIHSIDDCKSVYDAIILMFIKEPGLTISESKVKAFNKHKEDLVILKSLLKTDRSIYNAMFKADEKGLHNYVHYIKQGRTEETSCNREDFYKYTKKIVEGLSDSKEKDYILSEINLQTLLPLQRIKDNGVIPYQLHLEELKTILDKCKFKFPFLNEVADGYSVAEKLIKLLEFRIPYYVGPLNTHHNVDNGGFAWAVRKASGQVTPWNFDDKIDREKSAAAFIKNLTNKCTYLLGEDVLPKSSLLYSEFMLLNELNNVRIDGKPLETKVKAHLIEAVFKQDHKKMTENRIEQFLKDNGYISNPHKPEITGLDGEIKNDLTSYRDMVRILGDGFDTSMAEEIITDITIFGESKKMLRETLRNKFSSCLDDEVIKKLAKLRYRDWGRLSKKLLNGIDGCDKTGDCEPATIIKFMRNFSYNLMELLGDKFSFMERIQEINDKLTAGQVLAPHDSIDELALSPAVKRAVWQALRIVDEVIHIKKALPSRIFVEVTRSNKTDKKKKDSRQKRLSDLYAAIKHDDSLVEALNGQKFNTLKSDLSGCDDAALRSKKLYLYYTQMGRCAYTGNIIDLNLLNTDNYDIDHIYPRSLTKDDSFDNLVLCERTANAKKSDTYPIDNTIQTNQKVFWSFLKHQGLISERKYARLTRIAPLTEDDLSGFIARQLVETNQSVKAATTLLRRLYPGVDVVFVKAENVTDFRYDNNFIKVRSLNHHHHAKDAYLNIVVGNVYHERFTRNFRAFFKKNGANRTYNLAKMFNYDVNCTNAKDGKAWDVKTSMDTVKKMMFSNDVRVTKRVYEQKGQLADINLTKASKVKADIYLPIKANDLIVSQNTKYGGYSDIKNAYYTIIEYSDKKNNSIKAFIPIPIFIASKILTEQALLEYIKTVLPKANNIKIIYKRVYNDQLLKIDGFTYYLGGRSNDRFCIDNAIQLIVPLDIQFYLKLVEKFTTIMLEDKNIKVSSVSSRNPVNNQVENITLEYTQKLFDYLVSKFNEPIYLKMRGNKLKDVDNVGRKQFIKLSLEERCKALSELLNIFTNRNKKLSLSSINVSASRKVVNFKVSSLDEFKIINESITGLYSNEVIIV

SEQ ID NO: 4781 - protein, 1102 aa, unidentified
  REGION 1..1102: note = Description of Unknown: Cas Enzyme sequence
  MOD_RES 1086..1093: note = Any amino acid
CVTDENSNILKKGNRHMWGARLFDEAKTAKDRRLFRESRRRIARRNERINILQSLFLEDMEKEYPNFFPMLRESYKVPEDKTISTSINGTKYNLFSDEKFNDHNYFKRFPTIYHLREYLIKETKQVDIRLVYLAIHHIIKYRGNFLYESDFADNIKEVGKSTNIINKYLKDNFEVDCKKNNEELCDILKNKSLSKANKKEELIKCFQYDKYSKSALENILKSFLGYKFSINKIFESAQEKNISFSDEIEGEEEIVNDLQDYAEVFYAMKNVYSWFTLQDILNGREYISEAFKNKYERYQEDLQYIKNIYKTYFKSEYNSMFRKEGESNYVAYNGKSGKKKIKKCGEEKFLSSLIKQVEKLPECFKDKEELLNRIKDNQFLVKLNTTKNGEIPQQLHRKELEKILENQSKYYPCLNENKDKILQLFSFRIPYYVGPLANVGNKKSEWAWVIRNSNERIKPWNFEEVVNIDDTAEEFIRRMTNKCTYLINEDVMPRQSILYSRFCVLNELNNIRINNKKISKDTKRAIINELFEKKKKVTKKLIEDLLKQDGIKNVKIDGLSDGINFTSNMASYIDMKNIFGLVDDSNIDKCEKLIYWITIFEDKKILKKKIQKEYKDISSEQLNRILNLKYNGWSRLSKELLIGLKSYDGDSIMDKLELTHLNFMQIINKKEFGFKEQIEERLPKLENKITYNDVNQLPTSPANKRAIWQSINIVKEINKVMKAEPKNIYIEFARNEERNKEMKDSRAKQLMKKYTAIESQLDELKKYDHNVYKELKMHQNDKELGERLYLYFIQNGKCMYSGKALNIDELNKYEVDHIFPQSYIKDDSLDNKALVIREENQRKKDTLLLSEDIINKMSSWWKSLLDNGLITEKKFYRLIKRKVFETDEDRQRFVERQLVETRQITKYVTNLLNSQYKDTNIFSIRSELTSGFREKYKIYKLRNVNDLHHAVDAYIVSVIGNLIEKDWIGKDSFKYGKYLKDYLKNEKSKDEKYGIIIGFINNRVDVQKLKYTLNCKDFFVTRMLEELTGEFYNQTLYKAENNLKIPKKEDMDTNKYGGYSSENKAYCIIYTYMNAKNKQEYKLTGXXXXXXXXYDIKNKKPH

SEQ ID NO: 4782 - protein, 1122 aa, unidentified
  REGION 1..1122: note = Description of Unknown: Cas Enzyme sequence
MNEQKSVIVGPDCPLTKLPKSFPSHIDEELFCGLDLGIGSCGQALISTAKEKRTIRGFEHLPAMISFLGVRAFDIPEEKTTTGVKLKNPERRAKRLLRRVTARRAQRMKAIRSFLIQIGVLDANYHYAKEEWRTRHEQAVPWQWRVESLTRKLTSWEFAVILMHYGKRRGFKSARKSEIATKGSAGGTLDSTRTNHEALGLFETVADMFHRDERFSVRKRNKEESYTSMILRDDLVAEIRKVFYAQRRLENPHASEEIERDFLEILNRQKSMQDPVKLLGDCPFLANEKRTTPLSPSFELSRALQKLNHITLVLPGGMKRLLAEHILNSTEGYAVFVADFGKKKTITWANLRKLWSIPNDVDFQDILDGTRKPAKDKEPQTRSEMKIAMEKEDFCKRSGKNGCAEGSYLLRKAISEEAWQQALSSDFKQIDQIAFSLAFYETVEDPYSHFTIIGSLVSANVPEFLIAAVRSDFDTQKPTLHNFGGTCGTSSALCRRIIPYLLEGLTYDKAMSKAGFEHTNTTIAFKDIVNPVAKTVIREVMKQIVHLIDEAGALPGRIVVELGRDLGKSIAERNEIDLGIKKRTKTKDANREEVALLKGCEVRSVSDEDLLRYELYLEQGGFCPYSGDQLPNKERLYGPDLQVDHILPRSRSHDNSYDNKVLVYAKSNQNKGNNTPYEWLSSTDAEWTAYNTRIDGMHRLRKRKRMNLLNSSFAEEESCFADRNLNDTRYISKVITAYLDAIYTEAGHKTGQDKGGTRRVFARPGAMTSMVRKAWGLEEFKKDFNGQRIGDKHHAVDALVCACLAEGNAQWISRISNAYGSSEINRSGHIALRGLQPPWENFRSDVVTALSQITVSRRERCGAGGQLHLETVYRARKDEDGKKIALKRTSIVGKNSAGKAVASFTKIGDLDKIAGIHEERSRWLKDALQEWIKHGSPLEPELLPRDPQGCLIRKVYVQQKSMNLRKQPQGHVTSGTIVRCDVFSKVEKGKKVYHLVPVYNYQLIEKYPPMKAIMANKTEEVWTLLDQAYHFEFSLWKNSCIEIRFKDGVVNKGYYSGINRSNGRIAYKLPNDANAEKDETGEDLVFSTKSGVTSFHKITVDRLGRTFPVKSEKRTWRGAVCI

SEQ ID NO: 4783 - protein, 1148 aa, unidentified
  REGION 1..1148: note = Description of Unknown: Cas Enzyme sequence
MSNKINIGLDIGVTSVGGSIIDNNYKIIDMGVRLFDDPANPNDGTLGNEKRRTARSIRRQIRRTKLRKHDLISFLVENNFGSECEIQNIIENFDITKYGFDHPAQLKQKALTNKITKEELIFILFHYIHHRGSFNLTESDLKEGKIKINKNNTYPSIQMVEFFKKNKYFTYRNINDEIFLNIHWQNEIKKALETQECDNEFIDKYLEIFKRTREFNKGPGSEKSPTKYGLYQGQYNKNTCKWEITNNGYKNLGDRTIGKCTGYKNENRGLKNSPCAEVFNLFNDINNIYLLNDNDKKLSEKVKHKIFCKLSDSFFSDKSVYLSRKLICNILNEENIDNKYKCEDICGCRTEGKDKVIFTKLENYYILGRYLRKYNKNFNNNNLNALNVNFLKECDDLFKELASEHDIIKRIEILSNRDELKKLSKDENEKIIKKMNGLSSSHSLSTKAMFEFIEYCIKHLDKSINQQQFYIDIIKNKIEPNSNTTENISKYLKHGMFDNEILSPTVRRAFNQTILVFNKILKVYRKKYDIDNIIIELPRDKNSHEQKKKIDKLNKENKDLILKAIGNETSVNYEKLSIKQKNRLKLWYQQEKKDIYDNQIINFNDVITGKNLDEDHIIPGSISHDNSINNKVLTKSINNSNKNNLTPYLWLSKSNRYNNFKKNVNDLYSKKLINEEKMKNLLYEKNPLDDIFHFIGRNLADTRYIAALILQQFKNFFDNNNNYKNVKIKVVRGAITTFARYNLFIDKHQNKKTLLPKDRDLYCHHAIDASIICFLGMNSKINQMLNYYHMKCMSSNNNIVIDKDTHKMINKMTGEIVNLDQLYDMQQINDFSKELSKYNDTNDSFKNRVHFSRGIISKNNVALSDETIYSYNDKQKIYYSQLDLIKEKTSTLNKYFSDENSKKTCKLLIKKYDYCLFEKLKNIYLNYSQTNKMDKNTDSLDNNPFISYMINEYKIDHPKFIQIENQKIKKLRLINKIESEKIILPCHNNKAIIKSLNCLYGRIYKNNKNKFIIFPINAKVVKNITKYNNTYLKIDDEKLYDKLSFENIDEKNKYINIYRGTILINKKNNDIFYICGGIPSQNKFELKGLNAINAKHQILKNNKPPIRYLLTINPLTTDFDIAQIDPLGRIYNRYGFDDGDKLITIYNR

SEQ ID NO: 4784 - protein, 1398 aa, unidentified
  REGION 1..1398: note = Description of Unknown: Cas Enzyme sequence
MKKLNYSIGLDIGTNSVGFVCMREDFSILKYRGKYALGVHEFEAGQTAEQRRLNRGQRRRYNRRVRRIQLLQEVWKAMFSNEELVANKKINFFSEVFTDKPWKDTNDFEHRSLSEVQRLLGINQLYPTIYHLRADLVKSNEKKHPWLIYLAIHNLVKYRGHFLNGNQSWIKTSNQKPSIKAKLEHLLTLHFHINNSQDVVSEDKLKTIEILLLDLTLKRSEKKERIQQILNNKNILSCFEMLLNLSTNYKKLFYNSEQVELYQSSKNFLISNDDVLETLDGLTEQEEEFMNLALTIYQDIQLHQIIGDFDCISESKVAQYEVFRTQLKRLKEIINEFGSEELYRKLFITSKPNLLEYNKTRDIDKLCYFDRYIKHSNTTEPMKNLPKEVEKQKKDTKSLFFYHLKVILSDIKEQHHNHPISEEIETILTLIDEESYLEKIVGKHNAAIPVQNSIYEIEQILMNQSKHYPQITTEHIQNIIKLVSYRIPYFVGPLIKEKFNKDGELIEARFGWLKRQHFDERVTPWNAHNVIDEMNTATAFIERLTSYCTYLPNQKVIPKQSLLYQEYELLSELNSIQIRRETDAKHKQYRLDKEVKQWIVDHVFRNPQYQNKKIKHKDVLEALKASPYRDSYYDNSNESFKIFGTSKPNEFTATQSSFLKIVETFGIYNEQLEPMYEEIILTLNTLEDEKIARKKLSHILLSYNQSLDYVDRLIQWKVKGWGKFSRTFIDGIPVYSNGSTTVIEEMRNKPIILMELLSNQYDLSTIINKRNMQQHQKVTKLSYQDVASLSGSPAIKRGIWRALKIVEELVSIFGEPTHIMIEMARGEDIKKRTKSREDLYNELLKNIDKSLSDIKQLMQDAKNKISTNKYKEDMYWLYLLQGGKCMYTLEAINIERIHEECEIDHILPRSIVKDDSFDNRVLVKKSANQRKGDSHTPLSMASTTLISELKTYWKKLFDSHFISRRKFDLLMQPNVIEDRQVHNFIARQLVETRQITKHVKNVLENRFTETEVHLVKASIVSKFREHVKLPKIRESYHKVYKEDNRLVKLDINNKHHALDAFLCVAIIQSIIQKYGSNLLEFNFTHKGLDKQMVAAIRNSKEFTLFSNFDALVMPKHSSIGIQSAREYIYEVAYDLPWQSTFASGSSTSAFYLETIYSPRKSPNFNPSESIQSQMHLSRKGYENLFSILIETEKIKNKKRNVYTELVNAKVISFYEFRKLYPNFNLRTETDMQKLVDYLNEIGEITAKNPRFKKIIQKNQKLLFKGEPGYFVSPTELTNAKPLILTRPLTEQLAKLFGMNETVGIDDIEWGKTIYRDLVDCIIEQHGHLVSPKNYDKARNYVDDAESIKEIVYAAVEILKISTLGPTRSDKFGSRWNVSSLASHMSLVNESITGLYYRK

SEQ ID NO: 4785 - protein, 1333 aa, unidentified
  REGION 1..1333: note = Description of Unknown: Cas Enzyme sequence
MSIVKNKDSLKYYIGVDIGTNSVGWAVIDENGCLLNKGKHHLWGSRLFDQAQTAQSRRGFRSTRRRYNKRRERIFLLQLILNDMILEVDPSFFIRLGKTTVLDKEDKKELLKDDYKMNYNLFCDENYTDKDYFDEYPTIYHLRKKLCESDEKADPRLIYLVLHHIVKYRGNFLYEGQELHLEPSNKEEDLKNLFEKLGKENDTTFSIDDEQIKFILQTVVENISRTAKVSNCMSKLELKSSDKKIVKEFLAGLVGNKFNLNTMYQNEEIKNGDEDIKLQFSDKSYEEKIGEYENILEEKIEFVNLMQQFYSWIELSKIVGSNSKITSISDAMVNIYDNHKEDLKVLKEIMLGIGRKEYNEMFRKPKKKIANYYSYINAMEVEGDRVDNFHKYVKKAIAKSEDPRKEAILKKIENETFMMKQTSKNNAYIPYQMQKDELIKILDHQEKYYPILKENREKIISILEFRIPYYYGPLDGNEKFGWLIKKKGKENERILPWNHEEVVDVQATAAQFIRKLTNYCTYLLQEKVMPKKSLTCSMYEVLSEVNKIRVDGKLLDVVTKNKLIDDLFFNKKTVKDKDVINWLKKNQLKVGEITGYQKEKAFSSSLAPWIDFKNIFGEIDDANYELIENIIEDMTVFNEGSILKERLKNIYKLDQNVIKKIMKLKYSGWSGLSRKLIDGIRADNRFGSSASILDVMKESHMILMEIINDKELGFKQIIEKENFKNVSGSLTYEDVEKLAGSPALKRGIWQTLQIIDEIKYYMGHEPENIYIEFARNEDNKVRATSRVKKLQSIYNDIKDQLDNHGKEIHEILKDKDSNSTIDKRLYLYYTQLGKCMYSGEPLYIDQLSNYEIDHIFPRTLTSDDSLDNVVLVKKNENQRKLDDLVLPFDVRNKMEDFWKKLLDNGLITQTKYFRLIRNEFTQDQIDKFINRQLVETRQITKHVANIIEGCYPHTRVFTIRANLTHEFREKYDIYKNRNLNDFHHAHDAYIACIIGRYIQKRFPGLEAKFVYGDYIREFKKSKANISNEKYGFIINSMKYSYVDEDTGEVIWNNDNLSKYLKCFNYRDVYVTKKLDTNNNKLFDIKIFPNDKNSKNGKTEAAIPVNQNRSNINKYGGYSGLQNDIVAIERKKGNRLERKLVNLPIMLRNSSNEEKCKYLLENGKYDSVKIIKYIKKNQLVEIDGGLFYLTSATELVNAYQLLLDNRYYKIIFEINKSIIQNNYCYFEERGEILIDLYKMLCEKMANYYPKYGGIYESLLSKINDFELLNKELKCKTIVEILKILKSGPINGNLKFEPFNMASRSGRLSKQSVQLDKTYFYDVSITGIYSKKYKL

SEQ ID NO: 4786 - protein, 1409 aa, unidentified
  REGION 1..1409: note = Description of Unknown: Cas Enzyme sequence
MSIINFQRSRLMETQTSNQLITSHLKDYPKQDYFVGLDIGTNSVGWAVTNKSYELLKFHSHKMWGSRLFEEGESAVIRRGFRSMRRRLERRKLRLKLLEELFADAMAQVDSTFFIRLHESKYHYEDKTTGHSSKHILFIDDDYTDQDYFTEYPTIYHLRKDLMENGTDDIRKLFLAVHHILKYRGNFLYEGATFNSNAFTFEDVLKQALVNITFNCFDTNSAISSISNILMESGKTKSDKAKAIERLVDTYTVFDEVNTPDKPQKEQVKEDKKTLKAFANLVLGLSANLIDLFGSVEDIDDDLKKLQIVGDTYDEKRDELAKVWGDEIHIIDDCKSVYDAIILMSIKEPGLTISQSKVKAFDKHKEDLVILKSLLKLDRNVYNEMFKSDKKGLHNYVHYIKQGRTEETSCSREDFYKYTKKIVEGLADSKDKEYILNEIELQTLLPLQRIKDNGVIPYQLHLEELKVILDKCGPKFPFLHTVSDGFSVTEKLIKILEFRIPYYVGPLNTHHNIDNGGFSWAVRKQAGRVTPWNFEEKIDREKSAAAFIKNLTNKCTYLFGEDVLPKSSLLYSEFMLLNELNNVCIDGKALAQGVKQHLIDSIFKQDHKKMTKNRIELFLKDNNYITKKHKPEITGLDGEIKNDLTSYRDMIRILGSNFDVSMAEDIITDITIFGESKKMLRQTLRNKFGSQLNDETIKKLSKLRYRDWGRLSKKLLKGIDGCDKAGNGAPKTIIELMRNDSYNLMEILGDKFSFMECIEEENAKLTQGQVVNPHDIIDELALSPAVKRAVWQALRIVDEVAHIKKALPSRIFVEVARTNKSEKKKKDSRQKRLSDLYSAIKKDDVLQSGLQDKEFGALKSGLANYDDAALRSKKLYLYYTQMGRCAYTGNIIDLNQLNTDNYDIDHIYPRSLTKDDSFDNLVLCERTANAKKSDIYPIDNTIQMKQRSFWAFLKHQGLISERKYERLTRIAPLTADDLSGFIARQLVETNQSVKATTTLLRRLYPDIDVVFVKAENVTDFRHDNNFIKVRSLNHHHHAKDAYLNIVVGNVYHEKFTRNFRLFFKKNGANRTYNLAKMFNYDVICTNAQDGKAWNKDTSMDTVKKMMASNDVRVTRRLLEQSGALADATIYKASVAAKAKDGAYIGMKTKSSVFADVTKYGGMTKIKNAYSIIVQYTGKKGEEIKEIVPLPIYLINRNATDIELIDYVKSVIPKAKDISIKYRKLCINQLVKINGFYYYLGGKTNNNIYIDNAIELVVPHNIATYIKLLDKYDLLRKENKALKASSITTSIYNINTSTVVFLSNKVGIDVFDYFMSKLRTPLYMKMKGNKVDELSSIGRSKFIKMSLEEQSIYLLEILNLLTNSKTTFDVKPLGITGSRSTIGVKIHNLDEFKIINESITGLYSNEVTIV

SEQ ID NO: 4787 - protein, 1395 aa, unidentified
  REGION 1..1395: note = Description of Unknown: Cas Enzyme sequence
MEMQASNQLILSHLKDYPIKDYFVGLDIGTNSVGWAVTNKSYELLKFRSHKMWGSRLFDEGESAIARRGFRSMRRRLERRRLRLKLLEELFADAMAQVDPTFFMRLRESKYHYEDKTTGHSSKHILFIDKNYTDQDYYKEYPTIYHLRTKLMKSGTDDIRKLFLAVHHILKYRGNFLYEGASFDSNASTLDDVLKQALENITFNCFDSTAAIGSIGQILMEPGKTKSDKAKAIERFVDTYIITDEVDTSSKTQKEQVKEDKKRLKSFANLVLGLSASLTDLFGSVEDLDEDLKKLQIIGDTYDERRDDLAKAWGDEIHIIDDCKSVYDAIILMSIKEPGLTISESKVKAFNKHKDDLAILKSLLKADKNIYKAMFKADEKGLHNYVHYIKQGRTEETSCNREDFYKYTKKIVEGLSDSNDKEYILSQIELQTLLPLQRIKDNGVIPYQLHLEELKAILDKCGPKFPFLNEVADGFSVAEKLIKMLEFRIPYYVGPLNTHHNVDNGGFAWAVRKASGRVTPWNFDDKIDREKSAAAFIKNLTNKCTYLLGEDVLPKSSLLYSEFMLLNELNNVRIDGKPLEKAVKEHLIEAVFKQDHKKMTKNRIEQFLKDNNYIPKKYKPEITGLDGEIKNDLASYRDMVRILGTNFDVSMAEDIIADITIFGESKKMLRETLRNKFSSRLDDDAIKKLSKLRYRDWGRLSRKLLNGIEGCDKTGDGTPETIIKLMRNFNYNLMELLGDKFSFMERIQEINDKLTDGQVVDPHDIIDDLALSPAVKRAVWQALRIVDEVAHIKKALPTRIFVEVTRSNKAEKKKKDSRQKRLSDLYAAIKKDDVLLNGINNEIFGELKSSLAKYDDAALRSKKLYLYYTQMGRCAYTGEIIELSLLNTDNYDIDHIYPRSLTKDDSFDNLVLCKRTANAQKSDTYPISEEIQKAQKPFWTFLKQQGLISERKYERLTRITPLTADDLSGFIARQLIETNQSVKAATTLLRRLYPDIDVVFVKAENVTDFRHDNNFIKVRSLNHHHHAKDAYLNIVVGNVYHEKFTRNFRAFFKKNGANRTYNLAKMFSYDVKCTNAKDGKAWDVKTSMDTVKKMLASNDVRVTKRVYEQKGQLSDINLTKASKVKADIYLPIKANDPIMSQNMKYGGYSDIKNAYYTIIEYSDKKNNSIKAFIPIPIFIATKTLTKQALLGYIKTVLPKANNLRIIYKKVYNDQLLKIDGFNYYLGGRSNDRFCIDNAIQLIVPLEIQFYIKLVEKFTAIISENKNIALKASSVKSRNPINNQVENITLEYTQKLFDYLVSKFNELIYLKMRGNKLTDVNNIGRKQFIKLSLEERCKALAELLNIFTNMNKKLSLSTINVSASRKVVNFKISSLDEFKIVNESITGLYSNEITIV

SEQ ID NO: 4788 - protein, 87 aa, unidentified
  REGION 1..87: note = Description of Unknown: Cas Enzyme sequence
MNQKYTISLDIGTNSVGWAVLNNFSLAKKHKKIIEIDGKTRGKLKQRTNLWGAYVFEEAETALARRGKRTMRRRILRRRNRIQKLTC

SEQ ID NO: 4789 - protein, 1169 aa, unidentified
  REGION 1..1169: note = Description of Unknown: Cas Enzyme sequence
LSLYNQDDVTSFGFCFDDDKAEEEANRILKSRNWSKSKKVFELGELYNNLSVEQNFEIHWQGTDKKTKDFLEGKNKQQKALFTAVVVGNEIDLAVIFENPTYSNKNNEQMPKTKDFKYSLDVDKYEEWMAKIRPYLTSAEMEVIEKGKDVYESIVLCNILTKDSLSASMVEKYELHKTQLKALKQYVYENHSREIYLKIFGLSGVYSRYVNNGTSEKSLARDEFYAELKKIVPKYVELEEIASEIEFERLLPKQRISDNGSIPYQIHEYELLKIIENQSKYYSFLTDETDRLGQLIKFRIPYYVGPLAKAGKSNFAWMQRYDGKEDVGITPWNFDDVVDKEASNVEFIERMTSFCTYLPHEKVLPDNSLTYQEFKIYNELMICGYEERGKCRTYFSASLRLRIVDELFKKQKKVTAKDMAKFLYNNCITDSELSVSQLFGIDTAVKSPSYNTSYNTYIDLVKRIGLSDSFIEQNKPALEQIIKWATIFKDREILQKTISRANDNEWNGLFSIKQIKELSKLRYTGWGRLSAKLLTGIRCVNGKSILGNLKEENYNNFMRLLEDEKVKNAIKNAQLKGKESGTLNYGLVDELAGSPAIKKGIGQSLKIIKELERVLKVENIDKIVIEMARGDETKGKRTLSRRKQIEKMYQNFAKNTEETLPEDIRRDFLVKTNEKDFDNERLFLYFLQNGKCMYTHTTLEIDNLSNYDVDHIIPQAYIKDDSLDNKVLVLKDANRNKRDSVPSKEIVKKMTSFWDMLARNGQVSPKKLANLKRGNLSEDAKEGFINRQLVETRQIIKHLVNILANHYKDTEIEILTPRANLARHFRKEFELVKNRDINDHHHAHDAYLNAIVSNYIYNKRPDLKELWVYGKYPKGIERKKGDKFLEQLLEGVKDEGWVDMTTGETFADRDEVLNEVRKTLDYRTVHIVKKTEIKSGKFGDETVYKKDPQATPVKQGLEPSRYGGTKSPISAFAVIVQNKKGGIKAVSIPAMQEQGYRKMTDDEKLNLLQKNNPKDGIVKVIVDAVPKFAKFKLPSGAYRLVKSYQESGPALQTKTIQLPAKESEDKDFDKAYDILVDFIEANMLVSDAKVTLLRNEVRQNFKHLSADDKEGVIKDLAKLSKGSNQGLKWLKKAGGFEKERLTTSANLIKNDTVLIYQSPTGLFETRRKI

SEQ ID NO: 4790 - protein, 1362 aa, unidentified
  REGION 1..1362: note = Description of Unknown: Cas Enzyme sequence
VLFNGVLGDGETYVDEQAYYKAYPTIYHLRKRLVENPEQADLRLVYLALHHLLKFRGHFVNQGQEFDLGNLDVADKMMGLLSTFTEATKDVLASEDVFAFEFDDCHHEKANEILKDPKKSRSQKAFQLAELFSLAAQPENFDKHAQGTQAKTKNFLKSKDDQIKALFSATVGNGIDVAKIFGKKEYKPTNDDRFKKAGDFKYAMESFDDELGKLESVLDEAEFEVLLQGKQLYEAVVLSGILTKETLSASMVEKYEQHQAQLVALKSLAKGISPACYADIFKEDTKASKQKKHGAYFQYIQGVGDPSKRLTREAFYKELKGVLEKHIPGLSFKSFHAEDLPLSDILTAIHQDMEQESYLPKQRVSDNGAIPYQIHEHELVKILENQREFYPFLGETHTIQEENAEGEIREREAYKIQTLFKFRIPYYVGTLAKNPGWVRNKHGDLVKTESSAKNAWVVRKSNQKLNPWNFPDVIDKEKSAVNFIERMTNFCTYLPMEKVLPKHSLMYQEFTVYNELIVSGYFGKEGKISFDAPTRQKIMNDLFKKYGKVSAQRLMDFLNCELGLNLRSPQELFGIDTAVKSPGFNASYASYRDLIEAGIPEEMIEANTQRFEDIIKWQTIFEEKKERKKAIRNANENQWDHFLTDQQVNNLAKKHYTGWGRLSQKLLTGIPAKNGKTILENLKEESNGNFMRLLEDEAIAKTLRQDQLAGTEDVKLSYARVESLAGSPALKKGIWQSLQLIKELERYLGKGKISKIVVEMAREHGGGRSQNRLSQLQNLYKNFSAKSGETIDLEVSKQLGEQTNEALQKSERRFLYFLQNGRCMYTDDALELSNILAYEVDHIIPQMYVKDDSIDNKVLVTKKANQDKGGDVPSKAVIQRMEERWEQLAKGGMISPKKLASLKKGKLGKGDIEGFTNRQLVETRQITKHVAAILADYFKNDGIQILTPKSSLTTQFRQGVIYLPKNGFDPEKAIAGGLHFEMDGKVIKDGELVRETSYNDSKFVKLHFHEGFPKNRDLNDYHHAHDAYLNAVVAHYVYHTTDPDLRKLWVYGEYLSQASKVAGKTASQRQGKHRQLLSGMADENYTIIDGESGEVLFEWDREAVLAKISWTLGLRGMNVVKKTEIKDGKYGDESVYQKDATADNFAAGIKRNLDPLRYGGTKAPISALTVLVREKKGLKPLSIPAMVAGNYKKSADKVGFIQGLYPKQKISEVVVAAIPKGSKYLLPSGEPRRLASFQEAATASQFPMHQGWGADSTPEALLDAYDRLCGFIKKNKLFTEKKQPLLEEKIKEFFTQANQEQQLKILSELLGVTKGKNQGLKALSEAGLGTDTQRLKGENALSEGVTLIYQSPTGLYEHRMKL

SEQ ID NO: 4791 - protein, 154 aa, unidentified
  REGION 1..154: note = Description of Unknown: Cas Enzyme sequence
MTNKEELIIGLDIGTTSVGWAVMDQDFNLVQGKKIITEVSKEGQVSKRKSRVNLWGVRLFDEGQTAADRRSKRGMRRRIARRKKRLSYLKEIFQESILTFDPSFFIRMDESFYQNDDKIKTVKTQYPLFNSRLIYERKKMEKRIFFLHFITLIE

SEQ ID NO: 4792 - protein, 1375 aa, unidentified
  REGION 1..1375: note = Description of Unknown: Cas Enzyme sequence
MKKPYSIGLDIGTNSVGWAVITDDYKVPAKKMKVLGNTNKESIKKNLIGALLFDAGNTAADRRLKRTARRRYTRRRNRILYLQEIFAAEMNKVDESFFHRLDDSFLVPEDKRGSKYPIFGTLEEEKEYHKQFPTIYHLRKSLADSKEKADLRLIYLALAHIIKYRGHFLYEDTFDIKNNDIQKIFNEFASVYDNTFEENSLCKENAQVEEIFTDKISKSAKRDRVLKLFPDEKSTGLFSEFLKLIVGNQADFKKYFDLEEKAPLQFSKDTYDEDLESLLGQIGDDYADLFVVAKKLYDAVLLAGILSVKDPVTKAPLSASMIERYENHQNDLSALKQFIRRNLPEKYAEVFSDDSKDGYAGYINGKTTQEGFYKYIKNLISKIEGADYFLEKIEREDFLRKQRTFDNGSIPHQIHLQEMNAILRHQGEYYSFLKENKDKIEQILTFRIPYYVGPLARGNSDFAWLTRDSDEAIRPWNFEEMVDKASSAEYFIHRMTNYDLYLPEEKVLPKHSLLYETFTVYNELTKVKYIAEGMKDYQFLDSGQKKKIVNQLFKEKRKVTEKDIIHYLHNVDGYDGIELKGIEKQFNASLSTYHDLLKIIRDKEFMDDPKNEAILENIVHTLTIFEDREMIKKRLAQYDSLFDEKVIKALTRRHYTGWGKLSAKLINGIRDKQTGKTILDYLIDDGYSNRNFMQIINDDGLSFKDAIQKAQVVGKTDDVKQVVKELPGSPAIKKGILQSIKIVDELVKVMGYAPESIVIEMARENQTTAKGKKNSQQRYKRIEDSLKNLASGLDSNILKENPTDNVQLQNDRLYLYYLQNGKDMYTGEALDINQLSNYDIDHIIPQAFIKDDSLDNRVLTSSKDNRGKSDNVPSLEVVQKRKAFWQQLLDSKLISERKFNNLTKAERGGLDERDKVGFIKRQLVETRQITKHVAQILDTRYNTEVNEKDKKNRTVKIITLKSNLVSNFRKEFRLYKVREINDYHHAHDAYLNAVVAKAILKKYPKLEPEFVYGDYPKYDLKRYISRTKDPKEVEKATEKYFFYSNLLNFFKEEVHYADGTTIKRENIEYSKDTGEIAWNKEKDFATIKKVLSYPQVNIVKKTEEQTVGQNGGLFDNNIVSKKKVVDASKLIPIKSDLSPEKYGGYARPTIAYSVLVVADIEKGKAKNLKRIKEMVGITIQDKKKYEADPIAYLEECGFKNINSNHIIKLPKYSLFEFDNGQRRLLASSIELQKGNELILPYHLTALLYHAQQINKISEPIHKQYVEAHQDEFKELLTTIISLSKRYIQKPNVESLLQQAFDQTDKDIYQLSESFISLLKLISFGAPGAFKFLGVDISQSNVRYQSVSSCFNATLIHQSITGLYETRIDLSKLGEE

SEQ ID NO: 4793 - protein, 1368 aa, unidentified
  REGION 1..1368: note = Description of Unknown: Cas Enzyme sequence
MNLRNAKDYYIGLDIGTNSVGWSVVDAEGLPYSFKGKTAWGSRLFASAEHAADARVHRSQRRRYNRRRQRLLLLQGFFDTEMSKVDPEFFIKMRQSHLWPEDRNPKYQTGYQSLLFNDTDFKEADYHQQFPTIYHLRSHLCKSPERADIRLVYLALHHTLKYRGNFLREGETLKASEANASVAVEAFIGAIENYSEVMEMSFNLLGEDFEQALKQQGLSNQERKNKIEASLGAVKEHKAVAAEIAKAIIGHKVELSKVFEIEKSADTGFTLSSDEKVEAFYDLCVDDDMLTLYSAILALYKAFVLSEILAGIDGDGTLSDSMIVSYDKHKKDLAILKELVKDYCPDKFDEFFRGEKDELGEYIPKKAQGYTAYVLGDSKKDHVSLLTDIAKLFEDIDEIAMDKRYQAIEQRLDKNDGDFLKKLRIRDNGAIPHQLHLEEMRLILSNQGRYYPFLLDDYKGANKIESLLTFRIPYYVGPLNSQGNPEGSRQFAWSTRKEGKEEIPVRPWNFDEIIDKDATAEEFIMRMTGTCTYLYGEKTLPRHSLLYEEFTVLNELNGVRWNKDGENFYRFDAADREGIIEDIFRKRKKVSIKAVSDWLLKRGFLNTTIKGTQGETAFESKLDSYNDFCRILEVPVLDEEQIPMVEELIRWVTLFEDKDILRQRILKIYGDSLTEQQVNAICKLRYSGWGRLSETLLSKFKAETDGGLLSIMDILRYGNPDDAHPGAAMTLQEVLTDKKLGFNQLVTDFNREHSADEEITLDTLPGSPAIKRAIRQACGIVDEIVKIAGSPPAKICVEVTRSDDIQNRGKRTTRRLQQLEEAYKVLAKEDPAFIKELRGQLRDKKNDLASERVMLYFAQGGKCLYSGEVLRINNLSHYQVDHILPRVYIKDDSLDNKALVTQRSNQRKADSLLLDDAIIRSQMRYWQDLRHAKLISEKKFHSLTRREISSKSIERFINRQLTETSQAVKLAQRELFRQFPETEIVPIKAEITSGIRDAYGILKVRDLNDYHHAHDAYLACQINIFMEKRYPQWSDGRYVGMMRRFVQEQAAAQSRGKNLLGAAPFIVQSFGRDGFDKETGEIFRDTWDGQETVARIRKHIGRKDCFISRRTEVSRGAFWDETVYSPRDNPIVPLKANLDMEKYGGYKRIQFACFIVFVATNQKGEKKTFFEGLPIYLAHLMADPEGLRQWAESIAQEKKCRDAAIVKKKGIIPKGQKIILDGDEFYITGAKEARPAMQPAYSSKEAELLASIFISKSDAIEVSKEDLVFAYDLLSGKLEATCGKLSGMLDLSSLRDAYLSVSYEEKIKALTEINNSLCGRRNAADLSGIGGSRYQGNMGFAYASRIKDMDLIDTSITGMFERKYPFGI

SEQ ID NO: 4794 - protein, 1381 aa, unidentified
  REGION 1..1381: note = Description of Unknown: Cas Enzyme sequence
MKQILKKVQGYNIGLDIGTNSVGWVVTDENANLLQFRKKNMWGARLFEKGDTAQGRRLSRSTRRRYDRRRQRIHYLQEMLATMVLPIDESFFIRLNEAFLWKEDKSVQRDYILFADKQFTDRDFYKQFKTIYHLRKFLLDTKEKADPRFIYLALHHMIKYRGNFLYQGQSFDVVENVQESFRVLLEEMYEQLGKEWEYGEHFDDIQRILENTTIGKKSKQEQIAAILTEQYGNKKLANEVTRACLGYSFDLTVVMENENLLDESGKKIKISFSDSKYEEQELELQNRLEEKFAVIEALKRIYNWLVLKDTLRGKKYISEAMVNKYEAHHEDLVKLKRLFRTYLSTEEYSCFFRKEKQKDKYISNYVNYRKGAERCSKEKLYKAIHELFDTVAKDDVVYQEIVEKMDQGEFLTKQNEVSNAYIPYQCNEVEMKRILKQQGEFYPELKENADKILQLLLFRIPYYVGPLVDEKQSKFAWMKRRTGMEQVKIYPWNFEQVVDIDQTAEAFITRMTNYCTYLPEEKVLPKQSLLYSEYELLQELNKIKINGKFSLETRNKIIEQLFKKQKKVTEKQLKKWLVREQYCTTKVTEKMVKLDENAYYITGFQKENEFASSLTSYIDFTKILGEITERNRKMIEEIIYWLTVFEEKSIVKRKIQKKYGNEINDKQLAQILKLNYSGWGRFSEKFLNGIKGFDRQGQKKTIMELLREDSRLLNIMQIINNEEMGFCKIIEANQKKLYGNENLLDVVQELHGSPAIKRGIWQSLKIVEEIISIMGGVPQNIFIEFAREDDDRVRTNSRVKQIERLYKKFKEEVNDFNEHAANELKEKRYQNRIDEEKVFLYFMQNGKSLYSGVTLDIDRLNEYEVDHIIPRTLVKDDSLENKALVLKGENQRKGEGLIPHEWQNRQKEVWKKLLSCGLMGKKKYANLCKESFGNEKEQKHFIARQIVETRQIIKQVANILAQYYQGVNVAAVKASLGSELRENYTIEKKDDNGFFMENKSYTMLKSRKINDFHHAQDAYLACAVGLYIKAAFPKYEKEIDYEGYRKYYQKKNQQKDGVRNEKRQFFSYVMSRFSEQIVDKETGEILWDGTQKLAYIKKIFGYRDCLITKKLEENTGEFYKQTINAKPEKGKENNTKLLPIKKGLSVEKYGGYQGGEAAYSCLVRYQQGRKTKLSLEKISVIIAKKIAEKEVSLDRYLKEKLGVEEIVILRKKVMKNQLIEDSDGNRFYLTAATEVVNAKQFILDGKHQHLLRTIAIMEKGEYYGYRLDELENSMDELYAYYRMKIQQQYPAYESIVKKIVESHVYESLHVEEKIKAVQEKGKFLIQLLRLTEANAECIDLKTISDGRLADRIGRKNHYTIKEGIKFIDQSITGLYERYMTV

SEQ ID NO: 4795 - protein, 1336 aa, unidentified
  REGION 1..1336: note = Description of Unknown: Cas Enzyme sequence
VEKVKYYIGLDIGTSSIGWSVTDEKNNLLKFKGKNMWGVRLFEEGKTAKARRIFRSTRRRHDRRRYRLSLFRKIIEPELLKIDPSFFIRLEESFLHQEDRKNSGFNKYNLFIEEGFDDVEYYKRYPTIYHLRKHLIVSKEKEDIRLIYLALHHILKYRGNFIYENQDFNVDNINLEAQLKETLSLLDELIYLEKLDNVDINQITSLLKRKDLKKTEKKEKIVSLLNELFTDKKQLEEFTKLVIGLKSKANLLFPNVEFDIESEKILNISFETSQYDDSKDEIDEILDDKSFVLEKIKELYNGIFLSSLFDNSKTKYISDIMVKKHEDHGNDLKLLRNLFRENYSHKSENDYERIFKSKLIGKNYRTFIRNPKQCSYEDLLKEIKKVLVAKPLIGNKEYDECMEKVEKETLLPRINTVSNSIYPYQLNLVELEKIIENQVEYYPLLGEKTEDGKNKIIELFKFKIPYYVGPLNRNINNKNSFAWIEKYSNEEITPWNFHDVVNVELSAEKFITRMTNFCTYLINETVIPKNSLLYTKFMVLNELKQIKINGKKLPLELEQKIVTDLFINNQKTKVTKSDLERWLKKNKEYSDIDLEITGFSRENEFANNLKPYIDFIKIFGEINNQNNLMIEEIINWLTIYEDKAIVANRIEKTYKDVTEEQIKKIVNLKYTGWSRLSKKLLEDNLLFDKRTGEVFSIIKLLETTKENFMQIISNKYYNFDEMIEKENFGDLNKEISYEEIKALVCSPAIKKGIWQSILIVKEIIEIMKDKPEHIFIEMARGDREKVRTKSRKEQLKELYEKMSGEYSKFGISKAERKDLIKQINDNENNLAQMKYFLYFLQQGKCLYCGESLNIYDLRNCEIDHIIPRTIIKDDSIDNLALVNKSCNQWKFDNLTLSRTTISNQKPIWNYLFKNKFISLKKYNNLIRDEFKEDDINGFINRQLVETRQITKHVANLINGWLGNDVVFTIKAKFITDFRNKYEIYKIRELNNLHHAQDAYLCSCIGNYILKRYNNFKNEFIFSKYLKYNSSWSNRGYGFIINNMDNDYVKEDDKIQINAEDWIQRIIKISSYQDMIVTKKVEKMSGEFYNQNALPKGKNLIPLKKNLDPIKYGGYSGKNESYYILIKYYKGKKEVKKMIGIPIVIDQLSKKEHNRVLEYIKNVEGITNFEIVRNNICKNQMIEYNGQNCFIASSRELCNAVELKLNRKVIKYLYILTNKYLSEEEINIFKANENEVIYEIIDKMKKHYPMFENECIKITDYVNRGYFNDLSIEDKKTFVFEMFRILNAGSINGNLEKFSRDEIKFGNRIGRLNEKNINNGYFIDNSITGLYRRKYEL

SEQ ID NO: 4796 - protein, 1326 aa, unidentified
  REGION 1..1326: note = Description of Unknown: Cas Enzyme sequence
MKKDYTIGLDIGTNSVGYSVITDDYKLIAKKMKVFGNTDKKTIKKNFWGVRLFDSGETAQETRMKRTSRRRTSRRKNRLCYIQELFKPEIDKFDSNFFYRLNESFLTEEDAKFDKHPIFGTLEEEVSFHQNFPTIYHLRKYLADTDEQADLRFVYLAIAHIVKYRGNFLIEGELNTENHSVKELSKNFIQIYNQALNNLENFQEVDKSVDFSNELVAQLNKTERMENVLKLFPNEKGTGTLAQFIRLIVGNQANFKKVFQLEEDHKIQFSEDDYEENLENLLAIIGDEYSDVFVIAQKLYQAVLLDGILTVGEEKTKARLSAAMIKRYEDHAEDLKALKLFVREKMPDRYKEVFNDVDKDGYAGYIDGKTKEEQFYKYLKNLLSNVDGSEYFLQKIDQENFLRKQRTYDNGVIPHQIHAEELNAIIKRQEKYYPFLKENHKKIEQIFKVRIPYYVGPLAKNKEQSRFSWNIRNTDDAVRPWNLDEVINKDASAIAFIERMTIKDIYLGENVLPRHSLMYEKFTIFNELTKVTYSDDRGMYQKFSASEKIDIFNKLFKQDRKVTRKKLENYLVNELAISSPSVKGIEEQFNANFGTYLDLKKFDELAPYLDNEEFQDVLEEIVKILTVFEDRMMIQNQLAQLPLELSPKTIKSLSRKKYTGWGRLSAKLINGIKDKQTGKTILDFLIEDETDSILINRNFMQLINDDILTYKKIIEDNQPFQEKMSVEDIVMNLSGSPAIKKGILQSLKIVDELVKIMGYTPKNIVVEMARENQTTGRGKLNSKPRLKGIENGLKAFSDSVLKENPTDNRQLQNDRLYLYYLQNGKDMYTGKPLDIDHLSDYDIDHIIPQSFITDNSIDNRVLTTSKANRGKSDNVPSEEVVSKMEYSWRKLLKEKLISERKFANLTKRKLTDNDKAGFISRQLVETRQITKNVANILDSRFNTDSSNREVQVITLKSSLVSEFRKTFHLYKVREINDLHHAHDAYLNAVVAISLLKVYPQLKPEFVYGEYGKNSIHEKNKATVKKQIYSNIMRFFSKEDVLCNEDGEILWNKKQAIAQITKTLGKHQVNVVKKVEVQKGGFYDQNILKKGKYKKIYNIKRNLSGEKYGGYVKPTNSLSIILKERKKKKILGITILDKQKYDENPKQFLDEKGFKNAELISKLRKYTLYETKDGTMRMVSSEKEAVKANQLILSSELTTMVYHIKEYKNKESSISKVFIENNLDLLKKLSTELIEFAVKYIKKPLVIEEIKQMVDHCSDKTKLELAESLFNMLFFIHSGSSTEFVFMGKKISRDRLRYQSISDVFNSEIIHQSITGLYETRIRLAED

SEQ ID NO: 4797 - protein, 1011 aa, unidentified
  REGION 1..1011: note = Description of Unknown: Cas Enzyme sequence
IDIKHRKRTTKLATQEEFYKFIKPILEKMDGAEELLAKLNRDDLLRKQRTFDNGSIPHQIHLKELHAILRRQEEFYPFLKENREKIEKILTFRIPYYVGPLACGNSRFAWLTRKSDETITPWNFEEVVDKDASAQSFIEKMTNFDEQLPNKKVLPKHSLLYEYFTVYNELTKVKYVTERMRKPEFLSGEQKKAIVDLLFKTNRKVTVKQLKEDYFKKIECFDSVEIIGVEDRFNASLGTYHDLLKIIKDKDFLDNEENEDILEDIVLTLTLFEDREMIEERLKTYAHLFDDKVMKQLKRRHYTGWGRLSRKMINGIRDKQSGKTILDFLKSDGFSNRNFMQLIHDDSLTFKEEIEKAQVSGQGDSLHEQIADLAGSPAIKKGILQTVKIVDELVKVMGHKPENIVIEMARENQTTTKGLQQSRERKKRIEEGIKELGSDILKKYPVENAQLQNEKLYLYYLQNGRDMYVDQELDINRLSDYDVDHIVPQSFIKDDSIDNKVLTRSDKNRGKSDDVPSEDVVKEMTSHWRQLLKAKLISQRKFDNLTKAERGGLSEADKAGFIKRQLVETRQITKHVARILDSRMNTKRDKNDKPIREVKVITLKSKLVSDFRKDFQLYKVRDINNYHHAHDAYLNAVVGTALIKKYPKLESEFVYGDYKVYDVRKMIAKSEQEIGKATAKRFFYSNIMNFFKTEVKLANGEIRKRPLIETNGETGEIVWDKGRDFATVRKVLAMPQVNIVKKTEVQTGGFSKESILSKRESAKLIPRKKGWDTRKYGGFGSPTVAYSILVVAKVEKGKAKKLKSVKVLVGITIMEKDSYEKDPIGFLEAKGYKDIKKELIFKLPKYSLFELENGRRRMLASAIELQKANELVLPQHLVSLLYYAQNISATTGSNNLGYIEQHREEFKEIFEKIIDFSEKYILKNKVNSNLKSSFDEQFAVSDSILLSNSFVSLLKYTSFGASGGFTFLDLDVKQGRLRYQTVTEVLDATLIHQSITGLYETRTDLSQLGGD

SEQ ID NO: 4798 - protein, 1380 aa, unidentified
  REGION 1..1380: note = Description of Unknown: Cas Enzyme sequence
  MOD_RES 111..129: note = Any amino acid
MVNKKYAIGIDIGTNSVGWSVVTDDYKVPSKKMKVFGNTEKRYIKKNLLGTLLFDEGNTAENRRLKRTARRRYTRRRNRILYLQEIFAEEINKIDDSFFQRLDDSFLIVEXXXXXXXXXXXXXXXXXXXHTIFGTLQEEKEYHKQFPTIYHLRKQLADSSQKADIRLIYLALAHIIKYRGHFLFEGDLKSENKDVQHLFNDFVEMFDKTVEGSYLSENLPNVADVLVEKVSKSRRLENILHYFPNEKKNGLFGNFLALALGLQPNLKTNFELAEDAKIQFSKETYEEDLEEILGKIGDDYADLFIATKSLYDGILLAGILSTTDSTTKAPLSSSMVNRYKEHQKDLALLKEFIRQNLSDSYKEVFNDKLKDGYAGYIEGKTTQENFYRFIKKAIEKIEGSDYFIDKIDREDFLRKQRTFDNGSIPHQIHLQEMHAIIRRQAEFYPFLAKNQDKIEKILTFRIPYYVGPLARGKSEFAWLNRKSDEKIRPWNFDEMVDKETSAENFITRMTNYDQYLPDQKVLPKHSLLYEKFAVYNELTKVKYVTEQGKSFFFDANMKQEIFDGTFKVYRKVTKEKLMDFLGKEFDEFRIVDLLGLDKDNKSFNASLGTYHDLKKIVSKDLLDNPENEDILENVVLTLTLFEDREMIRKRLEKYKDVLTEVQRKKLERRHYTGWGRLSAKLINGIRDKVTRKTILDYLIDDGTSNRNFMQLINDDTLSFIDEIRLAQGSGEAEDYRAEVQNLAGSPAIKKGILQSLKIVDELIEVMGYDPEHIVVEMARENQFTNQGLRNSQQRYKKIENAIKNLDSNLNSKILKEYPTNNQALQNDRLFLYYLQNGKDMYTDEELDIDQLSNYDIDHIIPQAFIKDDSLDNKVLTKSAKNRGKSDDVPSLEIVHKKKNFWKQLLDSQLISQRKFDNLTKAERGGLTNEDKARFIQRQLVETRQITKHVARILDTRFNTKLDEAGNRIRNPKVNIITLKSSLVSQFRKDYQLYKVREINNYHHAHDAYLNAVVATALLKKYPQLAPEFVYGDYPKYNSYKSRKTATEKVLFYSNIMNFFKRVLVYAKTGEVRIRPVIEVNKETGEIVWDKKSDFRTIRKVLSYPQVNVVKKVEMQTGGFSKESTLPHGDSDKLIPRKTEKFYLDTKKYGGFDSPTIAYSVLLIADIEKGKAKKLKRVKELIGITIMERMAFERNPIEFLGHKGYKNILEKNIIKLPKYSLFELENGRRRLLASAKELQKGNEMILPPHLVTLLYHSSNIHKITEPIHLNYVNKNKHEFKELLRHISDFSTRYILAQDRLSKIEELYDKNDGDDISDLTSSFVNLLTFTAIGAPAKFKFLGSDIDRKRYTSIAEILEATLIHQSVTGLYETRIDLSKLGGD

SEQ ID NO: 4799 - protein, 1083 aa, unidentified
  REGION 1..1083: note = Description of Unknown: Cas Enzyme sequence
KLFELEDSEQISNKSFKEEIDEAEIESMLGEKTEAFESLRSIYNWVTLEELLGDIETDDLNDKTISNAMITKYNNHEKQLKMLKELIKDICPKEYNNIFRKEGNDSSYPNYIKNTRNHSLENLNKYIKKILDKYPLAKEHRYYIYIYELLEENRLLAKLNTTDNSVIPYQLQKIEMERIIDSQGQYYPFLAENKTLLIKILESRIPYYVGPLNRNSEFAWHISLENSKKSGKIYPWNYENYIDIDSTAEEFIKRMTNKCTYLREEDVLPRYSLLYSEFVLLNELNKVKIRINGKIIDIDKNSKKEIIENIFKTQKTVKVSDIVQWVRKNPNCFITKPTDDIIVEGTQQENEFAASLSSYYDFKKIFGKIDDSNIKMIEEIISWITIFEDKEILKRKIKGKYKLNKNDIEKIMKLKYSGWARLSKKLIDGIRTQTSEWTGNTIIDIMRNTNYNFMQIINDSRFDFKEIIDELNPINKKERLGYEDIKELQGSPAIKRGIWETVKIIDEIVNIMGAEPENIFIEFARSDEVSKRTTSRTNRMKVLYDEIRKDVDLYNGEVYKTLQNCIKSKDKLDNKALYLYFTQNGKCMYTGKSLNPDDLSKYEIDHIIPRSYIKDDSIDNLVLVIPEANQDKKDRLILGPEIQRRQGEYWNNLYKYGLISRKKYDNLTRGSIPDREIIGFINRQLVETRQISKHISDLLSEVYEDTKIISIKARLTSDYREQYDLYKNRDVNDYHHAHDALIVSVIGKFIINRYPYLEDEVNIKKYIKWFKTTNMHKDNKNKYGFILASMNQDYSSDGFIWAKDDEIVKVKKALSYKDCFVTKKVEEQTGKFYDETIYAHNHPKAKIPIKKGLDPKKYGGYSGVQNAYYVVIEYMKGKKKIRKMISIPISEAQSFQKTGLDDYIAQLENIDDVSTLRILKNNIKRYQLIEYQGQNVYLINEGEQQNATQLIVDDKYKEMLYKISENKIVSAEKDKDYYEKIMIEFFDYFVEKLVNYYPLYIDLAKNIKESRKDFIGYEFNEKVRFIRELLLITQAKSSYGKFKSFNTKIKNDDAGRIRKVWKIEDVIFIDRSITGLFERRYKL

SEQ ID NO: 4800 - protein, 1423 aa, unidentified
  REGION 1..1423: note = Description of Unknown: Cas Enzyme sequence
MKAYSIGLDIGTNSVGWAVIGEDNQLVRYKKKNMWGARLFDEADKAEGRRKNRAARRRLKRRAQRINFLQQIFASIVLSVDDGFFIKLNESMLWKEDKTHDPFKLSLQEAGYYAKNPDGITLRYPTIYHLRKALMESNEKFDPRLVYLAIHHIVKYRGNFLYQKDFNIDDSSDISEKLTQLSEYLKENFGFDGTVLDLKQQEIVAIIKQADKSRSARRSEIEALFEFSKTNKVIFSEIIKMILGLNADAKKIFADLEDKLGIEFSGKYEDKRDEIATTLGDDRMELINLLEAIYNWGVLQSVLKGEGSVSQAMINKYDAYAADLKFIKDLFREKLSRVDYKTFFKSKKDNKGETLYYTKYTTSGYDYKKFIKDFETYFIKATDGFGYSYDNFKKDTSGNKSLEKIVEAINRFARQFSSEYAQKFIERLNNGEAFSKQRMSDNGAIPYQLHKNELIKIIENQGKYYPELLEKIDNGDGKQEYKIVRLLEHRIPYYVGPLQTKNQNNSNFAWMKSRADGNITPFNFYQKVDKIASAEAFIDNLTNNCTYLPDKPVLPRHSLLFSEFVVRNELKNLKIEGKRIPIELENEIFNELFLQNKKVTRKMLIDLLKCENFVPLVNNSNPEIEGMAQSSCFTATMQSYVDLTKKVGLSVELEISSPSYLMAENLIKWITVFEDKGILREKIEKEYGDKLTPEQIFNICKLNYGGWARLSRELLTTIKDNTNNSIIDLMRESKDNFMQIISKPPIKKKLQEKLEKYVNDHSELDVIDDIPASPALKRGIRQAKKLVDEIIELRGGQKPVKIYIEMARGGEEGKRKDNRKRQLEKLHNSIEINNSYCGADELKRIKKELEEWEEIDKEKRYLYFLQLGKCAYSGKPINLDTISQECEVEHILPQSMIKDDSLDNKVLVYRKFNQDKSGDYPLDPEIRQSQTGLWRYWLDNKLISDVKFARLIKTKEKFEADKLSGSFIKRQLVETRQISKHVAALFNKIYGSESDIDVVEPVKAGIASEFRDKFDLPKSRTINDFHHAKDAYLNAVLGQYLISKFPNRSRNALYSRYMSFKKDLMKNASARKQRNDRELSFVLSGIGRKEDMNCETGEIIDGEARVATIRHTMMFNDCLVTRMTETKTNGELYNATVYKHQNSAKAKIPRKDNLSVEKYGGHTSDKVAYMAAVEQTDVDNKKKRLIIKVPIRIVLLAHNNDILLSELIKQELGIKELHIIKSLIPKYQVIKTKDDSMLMLISQANAGNAKQLRLPYEVENKYVKLQKLISGFDDFSTPEFARSMYYKLPEYANRVGETGNYHYELKNSIFEDIDVFLNEFYCTMVDKIAIYIPFYGKEMIGKLRVFFEAFIVCHDLKQKVAFLDEMLKLTQVNAQYPVFEKLDISKKYFKSGTGRITAKTFYLDDIEFYDYSITGLKVKKTKL

SEQ ID NO: 4801 - protein, 1335 aa, unidentified
  REGION 1..1335: note = Description of Unknown: Cas Enzyme sequence
MAKNKDIRYSIGLDIGTNSVGWAVMDEHYELLKKGNHHMWGSRLFDAAEPAATRRASRSIRRRYNKRRERIRLLRDLLGDMVMEVDPTFFIRLLNVSFLDEEDKQKNLGNDYKDNYNLFIEKDFNDKTYYDKYPTIYHLRKELCENKEKADPRLIYLALHHIVKYRGNFLYEGQSFTMDNSDIEERLNSAIEKFMSINEFDNRIVESDINSMIAVLSKIYQRSKKADDLLKIMNPTKEEKAAYKEFTKSLVGLKFNISKMILAQEVKKGDTDIVLEFSNANYDSTIDELQSELGEYIEFIEMLHNIYSWVELQAILGATHTDNPSISAAMVERYEEHKKDLRVLKKVIREELPDKYNEVFRKDNRKLHNYLGYIKYPKDTPIEEFYKYIKGLLAKVDTDEAREILERIDLEKFMLKQNSRTNGSIPYQMQKDEMIQIIDNQSVYYPQLKENREKLISILEFRIPYYFGPLNAHSEFAWIKKFEDKQKERILPWNYDQIVDIDATAEGFIERMKNTGTYFPDEPVMAKNSLTVSKFEVLNELNKIRINGKLIAVETKKELLSDLFMKNKTITDKKLKDWLVTHQYYDTNEELKIEGYQKDLQFSTSLAPWIDFTKIFGEINTTNYQLIEKIIYDISIFEDKKILKRRLKKVYQLDDLLVDKILKLNYTGWSRLSEKLLTGMTADNEFGSKATVLFVLENSNKNLMEIINDEKLGYKQIIEESNMQDIEGPFKYDEVKKLAGSPAIKRGIWQALLVVQEITKFMKHAPSHIYIEFAREEQEKVRKESKIAKLQKIYENLNLQTKEDQQVYESLKKEDAKKRMETDALYLYYLQMGKSMYSGKPLDIDKLSTYQIDHILPQSLIKDDSFDNRVLVLPEENQWKLDSETVPFEIRNKMIGFWQMLHENGLMSNKKFFSLIRTDFSDKDKERFINRQLVETRQIIKNVAVIINDHYTNTNVVTVRAELSHQFRERYKIYKNRDINDFHHAHDAYIACIVGQFMHQNFEHLDAKIIYGQYKKNYKKDVKHHNNYGFILNSMNRLHYDSDTGEVMWDPAKIGKIKSCFYYKDVYVTKKLEQNSGTLFNVTVLPNDAHSEKGITAATVPLNKYRADVHKYGGFGNVQSIIVAIEGKKKKGKKLIDVRKLTSIPLHLKNAPVEEQLSYIASPEHEDLIDVRIVKEILKNQLIEIDGGLYYVTSPTEYVTARQLSLNEQSCKLISEIYAAMLKKRYEYLDEEEIFDLYLQLLQKMDTLYPAYKGIAKRFFDRAEDFKNIDVVEKCDVIKQILIIMHAGPMNGNIMYDDFKFTNRIGRLKSKNIDLDKTTFISSSVTGLFSKKYKL

SEQ ID NO: 4802 - protein, 1450 aa, unidentified
  REGION 1..1450: note = Description of Unknown: Cas Enzyme sequence
MPKKDYTIGLDIGTNSVGWAVIDNEFEVLDVDKKVKIVKNGKTRGKKRLTKMWGSRLFEEGKTADKRRQFRTTKRRNNRSHERLQYLRKIFAPEIEKIDKYFYLRMDESFLQDTDRNEKVKTQYPLFPTVEEEKQYHTKYPTIYHLRKDLAESKEVVDIRYIFLALNHILKNRGNFLRQDDGDGAFGDFSNIEVKPAFLKFIEKYNDLFDVELDRDKYSDEIEKALKSCKDSSAQLIGQIFEENKKGTLYQFIKLIFGLKPDFKTTFNLEKEAKLKFSDDEYDSNLEKLLSEIGSDFEDLFVSAKEVNNAISLADILTITKPEYKSSKTKLSASMVERYEKHGDDLQKLKELLKKNSEVYDDYFYKYEAVKENGTTLVKANYVGYVGIPKATYRKFLVNQSKIAEADVRKPFSQKFATQERFYKYTKNILIKLVNLSESHEELRKEFLQKIEDKTFLLKQRTFDNGAIPYQLQLHELKVIINHQKKANFSFKRFIESKFSEDNTLTNEEALYKILKFRIPYYVGPLRNKPDKNDTKQKSPWIAKNVDENIRPWNFERIVNQEESAVKFIERMQNDDTYLYGVKTLPKNSLTYQKYAVLNELTKVRLDGDLICPEIRQQIFNELFKKNKKVNIKLFKNYLNCERGLNLNISEIKGLGENSENENQFNNQFSAYQDLRTWYVDALSSNKTSKEEKEKLKNEAEKILDDEKYLETFEEIIKVLTVLPEDKNMKYTVLKSIKDIYVLDKKVIKYLAKKSFSGYGRLSGKLLGLGRDALRSSFSADGFGEKWTIVDFLEKDSHNRNFMELINDPNLTFKKQIDDSYQKESNVTFTDLVNELAGSPAIKRGILQSLKIVDEIVHFMTSAEDRKNKKFNFPKNIVIEMARENQTTQRGKANSKTRLKVLQEIFNAQWKEATNEELANEKLFLYYLQDGKDAYTNDEIIFPLSNYDVDHIIPQSFIKDDSISNKVLTSSKSNRGKLDDIPSEEVAKKMRYTWDKWLSQKRIPKRKYDNLTKSLRGGLTEKDREGFIKRQIVETRQITKHVARILNDNFSNKETKIITVKSALASQLRKDFDLYKVRELNDYHHAHDAYLNAIVAKQLLQMYPHLEGKFVYGKIDNSTWYKDNQKATKERKIWLNISKSVAKEIGQSNKVDIIKNTFMKNATVTTHQTDRATNEDGRELYKATIAPKGKGANLLSKKFNGRDLQLDIDKYGGYLERKEAFITIEDGKLKSVKRTEIDNYKNSKVKIKRNQIFKNGEIYRTVASLIESGKWNQLKLTQEQNNYIYGLQTWEKVIKYVQNDEDSKKDKPFYGKDLAEQIEKEYPNIIEDIEKIIFEFIIKNKLAKVENISKPETFLHYQQKLEYLLALLNISSRGTTSDNKYTVFEEGVDIETGEIVYIPLKEKKGGKDIEKKEQINIRVRYGSKTGDIKVDKTTLIHQSITGLYETRIKL

SEQ ID NO: 4803 - protein, 1341 aa, unidentified
  REGION 1..1341: note = Description of Unknown: Cas Enzyme sequence
MNKPYSIGLDIGTNSVGWAVITDDYKVPSKKMKVEGNTDKKYIKKNLLGSLLFEGGETAKETRTKRGQRRRYTRRRNRLLYLQEIFKSEMDKVDSNFFMRLEESFLWPEDKQGSKHPIFGTVKEEVEYHEAFPTIYHLRKELADSDAKADIRLVYLALAHIIKYRGHFLFEKVDPKNANLKGNFSKFVEVYNEVFDDDKDCSVEVESILGAKSTKSKKIEDILKLYPGLKKADLFAKFISLAVGTSVSFQKEFELENECKLQIPKESFEEDLEGLQGQIPDEFFEVLYAAKALYDSILLSSILTDISGTNAPLSSSMIRRFKEHKEDLEQLKKFIKKHSTYDYNSFFNDNTKPYYAGYIDGKTSQVEFYKAVKKFFEKDNDANWIIDKIDREDFLRKQRTFDNGAIPHQIHLAELKAIIEKQKKYYPFLEKEADRIESILTFRIPYYVGPLSNGYSKFGWVVRKGNEAIKPWNLEEQIDKSATAERFITRMTNRCTYLPSENVLPKHSLLYEKFMVFNELTKIRYVLENNKHFAVDTEMKMKIFEMLFKKNRKVTEKQLLAFFDKEYPDFHITKVMGLDRKKPEFNSSYATYHDLKKIVSQEYLDNPENADEIEDIIQTLTLFEDREIIREKLSVYKNHFTKDQLKKLERRHYTGWGKLSKKLICGIRDKQTHKTIMEFLEDDGFTNRNLMQLVTADELSFAKEIKDASSIDTTLSLRELVQEIPGSPAIKKGIHQSLKIVEEIRRVMGYDPENIVIEMAREAQTTAEGERRSRERMRILEKALGEFEGKVNVSLPKENKLLSNNRLYLYYLQNGKDIYSGADLDINLLSTYDIDHIIPQSFIKDDSLDNIVLTTSEDNRGKLDNVPSPEVVRKMKGYWQQLLKAKLISDRKYNNLTKAERGGLTEEDKKTFIRRQLVETRQITKHVARILDERFNNENNESGEPIRKVRVITLKSKIVSDFRKKFELYKVREINDFHHAHDAYLNAVVGTLLLKKYPKLESEFIYGAFKKGTTRQIYEKATRRYLFYSNILNFLNGPLEDRVNEDGELIWDNDKDLPIVRNVLNRPQVNIVKKIERVESGPLYKETIHPREEKDDSKLISIKRDLSTKKYGGYKEPVEAYSILVAFEEIVKGNKKISRKVVKIPIKDIVLVEKDVIGYLNEKGINNTVGIFKIYKNSLFEFENGRRRLLSSATELQKGNTLYLSKEFIPLLYNCFKYVGTSEDKYDKYISEHKTLFEPLFERIMDFVDSYIQKPKVSDRLRKVFNTRFSKSNNLEIAQSFVNLLTITNLGASSTFVFFGEEITRNNYRYNSSKEHANGILVLQALTGLYETRIDFSKFGE

SEQ ID NO: 4804 - protein, 1365 aa, unidentified
  REGION 1..1365: note = Description of Unknown: Cas Enzyme sequence
MIKLFCKLLNLGGYFMNKPYSIWLDIGTNSVGWAVITDDYKVPSKKMKVEGNTDKKYIKKNLLGSLLFEGGETAKETRTKRGQRRRYTRRRNRLLYLQEIFKSEMDKVDSNFFMRLEESFLWPEDKQGSKHPIFGTVKEEVEYHEAFPTIYHLRKELADSDAKADIRLVYLALAHIIKYRGHFLFEKVDPKNANLKGNFSKFVEVYNEVFDDDKDCSVEVESILGAKSTKSKKIEDILNLYPGLKKADLFAKFISLAVGTSVSFQKEFELENECKLQIPKESFEEDLEGLQGQIPDEFFEVLYAAKALYDSILLSSILTDISGTNAPLSSSMIRRFKEHKEDLEQLKRFFKSHSNYDYNSFFNDNTKTYYAGYIDGKTSQVEFYKAVKKLFEKDHDANWIIDKIDREDFLRKQRTFDNGAIPHQIHLAELKAIIEKQKKYYPFLEKEADRIESILTFRIPYYVGPLSNGYSKFGWVVRKGNEAIKPWNLEEQIDKSATAERFITRMTNRCTYLPSENVLPKHSLLYEKFMVFNELTKIRYVLENNKHFAVDTEMKMKIFEMLFKKNRKVTEKQLLAFFDKEYPDFHITKVMGLDRKKPEFNSSYGTYHDLKKIVSQDYLDNPENEDEIEDIIQTLTLFEDREIIREKLSVYNNHFTKDQLKKLERRHYTGWGKLSKKLICGIRDKQTHKTIMEFLEDDGFTNRNLMQLVTADELSFAKEIKDASSIDTTLSLRELVQEIPGSPAIKKGIHQSLKIVEEIRRVMGYDPENIVIEMAREAQTTAEGERRSRERMRILEKALGEFEGKVNVSLPKENKLLSNNRLYLYYLQNGKDIYSGADLDINLLSTYDIDHIIPQSFIKDDSLDNIVLTTSEDNRGKLDNVPSPEVVRKMKGYWQQLLKAKLISDRKYNNLTKAERGGLTEEDKKTFIRRQLVETRQITKHVARILDERFNHEKNESGEPIRKVRVITLKSKLVSDFRKKFELYKVREINDFHHAHDAYLNAVVGTLLLKKYPKLESEFVYGAFKKFETRKIYEKATRRYLFYSNILNFLNGPLEDRVTEDGELIWDNNKDLPNIKKCLYVPQVNVVKKTEVQTVGQNGGLFDNNIVPRTKIKNPEKYVEIKKNKGLDVTKYGGYSGETIAYSVFVVGKRKAKNGKIKAVKELVGITVRNQKQYENNKLKYLLNMGFEEINPSLLFEFPKYTLFQMEDGRKRMLASSTELQKANMIYFEEKFVKLLYHAKNISDENSKIHENYLSEHRNEFLSLFKIIIEFSKKYIVKDKVEQKLVNVVEKEFEAASIHQLSESFVNLLEYVNRGPSSQFNFLGVVINRENLRYQTVTECLNAIVCFESITGLYETRINLSKYGE

SEQ ID NO: 4805 - protein, 1350 aa, unidentified
  REGION 1..1350: note = Description of Unknown: Cas Enzyme sequence
MNKPYSIGLDIGTNSVGWAVITDDYKVPSKKMKVEGNTDKKYIKKNLLGALLFEGGETAKETRTKRGQRRRYTRRRNRLLYLQEIFKSEMDKVDPNFFMRLEESFLWAEDKQGSKHPIFGTVKEEAEYHEAFPTIYHLRKELADSDAKADIRLVYLALAHIIKYRGHFLFEKVDPKNANLKGNFSKFVDIYNEVFSDDKDNSVEVESILGAKSTKSKKIEDILKLYPGLKKGDLFAKFISLAVGISVSFQKEFELENECKLQIPKDSFEEDLEGLQGQISDEYFEVVYAAKALYDSILLSSILTDISGTNAPLSSSMIRRFKEHKEDLEQLKRFFKRHSTYDYNSFFNDNTKPYYAGYIDGKTSQVEFYKAVKKLFEKDNDANWVVDKIERDDFLRKQRTFYNGAIPHQIHLAELKAIIEKQKKYYPFLEKEANRIESILTFRIPYYVGPLSNGHSKFGWVVRKGNEAIKPWNLEEQIDKSATAERFITRMTNRCTYLPSENVLPKHSLLYEKFMVFNELTKIRYVLENNKHFAVDNEMKMKIFEMLFKKNRKVTEKQLLAFFDKEYPDFHITKVMGLDRKKPEFNSSYATYHDLKKIVSQEYLDNPENAEEIEDIIHTLTLFEDREIIREKLSIYKEHLTKEQLKKLERRHYTGWGQLSKKLICGIRDKQTHKTIMEFLEDDGYTNRNLMQLVTADELSFAKEIKDASCIDTTLSLRELVQEIPGSPAIKKGIYQSLKIVEEIRRVMGYDPENIVIEMAREAQTTAEGERRSRERMRSLEKALAEFEGKVNVSLPKENKLLTNKRLYLYYLQNGKDIYTGTDLDINLLSTYDIDHIIPQSFIKDDSLDNIALTTREDNRGKLDNVPSSEVVSKMKGYWQVLLKAGLMSDKKYNNLTKAERGGLTEEDKKTFIRRQLVETRQITKHVARILDERFNHEKNESGEPIRNVRIITLKSKLVSDFRKKFELYKVREINDFHHAHDAYLNAVVGTLLLKKYPKLESEFVYGAFKKLTTRQTYEKATRRFLFYSNILNFLNGPIEDRVTEDGEPIWDNDKDLPNIKKWLYVPQVNVVKKTEVQTVGQNGGLFDNNIVPRTKIKNPEKYVEIKKNKGLEVTKYGGYSSETIAYSVFVVGKRKAKNGKMKAVKELVGITVRNQERYEKNKLKYLLSMGFEEIEISLLFEFPKYTLFQMEDGRKRMLASSTELQKANMIYLEEKLVKLLYHAKNITDENSKTHEEYLSEHRNEFLRLFEIIIEFSKKYIVKDKVEQRLVNAVEKDFESASIHQLSESFVNLLEYVNRGSASQFEFLGVIIKRENLRYQTVTECLNAIVCFESITGLYETRVDLSKFGE

SEQ ID NO: 4806 - protein, 1391 aa, unidentified
  REGION 1..1391: note = Description of Unknown: Cas Enzyme sequence
MKKPYSIGLDIGTNSVGWAVITDEYKVPAKKMKVLGNTNKESIKKNLIGALLFDAGNTAADCRLKRTARRRLTRRRSRILYLQEIFANEMNKVDESFFHRLDDSFLVPEDKRGSKYPIFGTFEEEKEYHKQFPTIYHLRKSLADLKEKADLRLIYLALAHIIKYRGHFLYEDTFDIKNNDIQKIFNEFTSIYNNIFEESSLSKENAQVEEIFTDKISKSAKKDRVLKLFPDEKSTGLFSEFLKLIVGNKADFKKHFDLEEMAPLQFSKDTYDEDLESLLGQIGDDYADLFVVAKKLYDAILLAGILSVKDPVTKAPLSASMIERFDNHQNDLSALKQFIRRNLPEKYAEVFSDDLKDGYAGYIDGKTTQEGFYKYIKNLISKIEGADYFLEKIEREDFLRKQRTFDNGSIPHQIHLQEMNAILHNQGEYYPFLKANKEKIEQILTFRIPYYVGPLARGNSDFAWLTRNSDDAIRPWNFEEMVDKARSAEDFINKMTNFDLYLPEEKVLPKHSLLYETFAVYNELTKVKFIAEGMKDYEFLDSGQKRKIVENIFKNQRKVTEKDIINYLHNVYGYDGIEIKGIEKQFNASLSTYHDLLKIIKDKEFIDDPKNEEILEKIIHTLTIFEDREMIKQRLAQYNSVFDEKVIKALSRKHYTGWGKLSAKLINGIRDKQTGNSILDYLMDDGKSNRNFMQLIKDDGLSFKEIIQNAQVVGETDNLRQVVQNLPGSPAIKKGILQSIKLVDELVKVMGSDPESIVIEMARENQTTAKGKKNSQQRYKRIEDSLKNLAFGLDSKILKEHPTDNIQLQNDRLFLYYLQNGKDMYTGNPLDINQLSSYDIDHIIPQAFIKDDSLDNRVLTSSKDNRGKSDNVPDLEIVEKMKGFWQQLLKSKLISERKFNNLTKAERGGLDRQDKVGFIKRQLVETRQITKHVAQILDARFNTEVNVKKQKIRTVKIITLKSNLVSNFRKEFGLYKVREINNYHHAHDAYLNAVVAKAILKKYPKLEPEFVYGDYQKHDLKRYISRSKDPKEIEKATEKFFFYTNLLNFFKKEMHYADGTIVKRDKIEYSEETGEIAWDKEKGFATIEKVLALPQVNIVKKTEIQTHGLDRGKPRGLFNSNPSPKPSEDSKENLVPIKQGLDPRKYGGYAGISNSYAVLVKAIIEKGVKKQRKTILEFQGISILDKINFEKNQANYLLKKGYTEILSTITLPKYSLFEFPDGTRRRLASILSTNNKRGEIHKGNELVLPAKYTTLLYHAKRINKSLEPEHLEYVTKHRAEFAELLEYVLRFNDKYVGALKNGERIREAFTNWETVDIKDLCFSFIGPENSKNAGLFELTSQGSASDFEFLGVKIPRYRDYTPSSLLSSTIIHQSITGLYETRIDLSKLGEE

SEQ ID NO: 4807 - protein, 1345 aa, unidentified
  REGION 1..1345: note = Description of Unknown: Cas Enzyme sequence
MKKPYSIGLDIGTNSVGWAVVTDDYKVPAKKMKVLGNTDKSHIEKNLLGALLFDSGNTAEDRRLKRTARRRYTRRRNRILYLQEIFSEEMGKVDDSFFHRLEDSFLVTEDKRGERHPIFGNLEEEVKYHENFPTIYHLRQYLADNPEKVDLRLVYLALAHIIKFRGHFLIEGKFDTRNNDVQRLFQEFLAVYDNTFENSSLQEQNVQVEEILTDKISKSAKKDRVLKLFPNEKSNGRFAEFLKLIVGNQADFKKHFELEEKAPLQFSKDTYEEELEVLLAQIGDNYAELFLSAKKLYDSILLSGILTVTDVGTKAPLSASMIQRYNEHQMDLAQLKQFIRQKLSDKYNEVFSDVSKDGYAGYIDGKTNQEAFYKYLKGLLNKIEGSGYFLDKIEREDFLRKQRTFDNGSIPHQIHLQEMRAIIRRQAEFYPFLADNQDRIEKLLTFRIPYYVGPLARGKSDFAWLSRKSADKITPWNFDEIVDKESSAEAFINRMTNYDLYLPNQKVLPKHSLLYEKFTVYNELTKVKYKTEQGKTAFFDANMKQEIFDGVFKVYRKVTKDKLMDFLEKEFDEFRIVDLTGLDKENKVFNASYGTYHDLCKILDKDFLDNSKNEKILEDIVLTLTLFEDREMIRKRLENYSDLLTKEQVKKLERRHYTGWGRLSAELIHGIRNKESRKTILDYLIDDGNSNRNFMQLINDDALSFKEEIAKAQVIGETDNLNQVVSDIAGSPAIKKGILQSLKIVDELVKIMGHQPENIVVEMARENQFTNQGRRNSQQRLKGLTDSIKEFGSQILKEHPVENSQLQNDRLFLYYLQNGRDMYTGEELDIDYLSQYDIDHIIPQAFIKDNSIDNRVLTSSKENRGKSDDVPSKDVVRKMKSYWSKLLSAKLITQRKFDNLTKAERGGLTDDDKAGFIKRQLVETRQITKHVARILDERFNTETDENNKKIRQVKIVTLKSNLVSNFRKEFELYKVREINDYHHAHDAYLNAVIGKALLGVYPQLEPEFVYGDYPHFHGHKENKATAKKFFYSNIMNFFKKDDVRTDKNGEIIWKKDEHISNIKKVLSYPQVNIVKKVEEQTGGFSKESILPKGNSDKLIPRKTKKFYWDTKKYGGFDSPIVAYSILVIADIEKGKSKKLKTVKALVGVTIMEKMTFERDPVAFLERKGYRNVQEENIIKLPKYSLFKLENGRKRLLASARELQKGNEIVLPNHLGTLLYHAKNIHKVDEPKHLDYVDKHKDEFKELLDVVSNFSKKYTLAEGNLEKIKELYAQNNGEDLKELASSFINLLTFTAIGAPATFKFFDKNIDRKRYTSTTEILNATLIHQSITGLYETRIDLNKLGGD

SEQ ID NO: 4808 - protein, 1350 aa, unidentified
  REGION 1..1350: note = Description of Unknown: Cas Enzyme sequence
MKKPYSIGLDIGTNSVGWAVVTDDYKVPAKKMKVLGNTDKSHIKKNLLGALLFDSGNTAADRRLKRTARRRYTRRRNRILYLQEIFAEEMSKVDDSFFHRLEDSFLVTEDKRGERHPIFGNLEEEVKYHENFPTIYHLRQYLADNPEKVDLRLVYLALAHIIKFRGHFLIEGKFDTRNNDVQRLFQEFLAVYDNTFENSSLQEQNVQVEEILTDKISKSAKKDRVLKLFPNEKSNGRFAEFLKLIVGNQADFKKHFELEEKTPLQFSKDTYEEELEVLLAQIGDNYAELFLSAKKLYDSILLSGILTVTDVSTKAPLSASMIQRYNEHQMDLAQLKQFIRQKLSDKYNEVFSDVSKDGYAGYIDGKTNQEAFYKYLKGLLNKIEGSGYFLDKIEREDFLRKQRTFDNGSIPHQIHLQEMRAIIRRQAEFYPFLADNQDRIEKILTFRIPYYVGPLARGKSDFAWLSRKSADKITPWNFDEIVDKESSAEAFINRMTNYDLYLPNQKVLPKHSLLYEKFTVYNELTKVKYKTEQGKTAFFDANMKQEIFDGVFKVYRKVTKDKLMDFLEKEFDEFRIVDLTGLDKENKAFNASYGTYHDLRKILDKDFLDNSKNEKILEDIVLTLTLFEDREMIRKRLENYSDLLTKEQVKKLERRHYTGWGRLSAELIHGIRNKESRKTILDYLIDDGNSNRNFMQLINDDALSFKEEIAKAQVIGETDNLNQVVSDIAGSPAIKKGILQSLKIVDELVKIMGHQPENIVVEMARENQFTNQGRRNSQQRLKGLTDSIKEFGSQILKEHPVENSQLQNDRLFLYYLQNGRDMYTGEELDIDYLSQYDIDHIIPQAFIKDNSIDNRVLTSSKENRGKSDDVPSEDVVNRMRPFWNKLLSSGLISQRKYNNLTKKELTPDDKAGFIKRQLVETRQITKHVARMLDERFNKEFDDNNKRIRRVKIVTLKSNLVSSFRKEFELYKVREINDYHHAHDAYLNAVVVKALLVKYPKLEPEFVYGEYPKYNSYRERKTATQKMFFYSNIMNMFKSKVKLADDQIVERPMIEVNDETGEIAWDKTKHITTVKKVLSYPQVNIVKKVEEQTIGQNGGLFDDNPKSPLEVIPSKLVPLKKALNPEKYGGYQKPTTAYPILLIVDTKQLIPISVMDKKRFEQNPVKFLKDKGYQQIEKNNFVKLPKYTLVDIGNGIKRLWASSKEVHKGNQLVVSKKSQDLLYHAHHLDNDYSNEYVKNHYQQFDILFNEITSFSKKCKLGKEHIQKIEEAYSKERDSASIEELADGFIKLLGFTQLGATSPFSFLGIKLNQKQYTGKKDYLLPCMEATLIHQSITGLYETRIDLSKLGGD

SEQ ID NO: 4809 - protein, 1417 aa, unidentified
  REGION 1..1417: note = Description of Unknown: Cas Enzyme sequence
MAKFNKNYSIGLDIGVSSVGYAVVTEDYRVPALKFKVLGNTEKEKIKKNLIGSTTFVPAQSAKGTRAFRVNRRRIDRRNHRIAYLRDIFQKEIEKVDKNFYRRLDESFRLLGDKSEDLQIKQPFFGNKDLETAYHKKYPTIYHLRKHLADADKNSPVADIREVYMALSHILKYRGHFLTLDKINPNNIYMQNSWFDFIEACQEVFDLEVSDESKTIADIFKSSDNRQDKVKNILSYFPKELEKKDKSIFKQLLQLLFGLKTKFKDCFELEEEPDLNFSKENYDENLENLLGTLEYDFSDVFDKLKILRDTILLSGMLTYTGATHARFSATMIERYEEHRKDLQRFKSFVKQNLSEQDYLDIFGRKTQNGFDIDKETKGYVGYISNKMVLTNSQKQKTIQQNFYDYISGKITGIEGAEYFLNKISDGTFLRKLRTSDNGAIPNQIHAYELEKIIERQGEDYPFLLENKDKLLSILTFKIPYYVGPLAKGNNSRFAWIKRATSQDVLDDNDEDTRNGKIRPWNYHKLINMDETRDAFITNLIGNDIILLNEKVLPKRSLIYEEVMLQNELTRVKYKDKHGKTHFLDSELRQEIINNIFKTNSKRVSSAMLLDYLENYTNLQAVEIVSGIEKDKSLNSTLKTYNDFKTIFSEEFLDSEIYQKELEEIIKVITVFDDKKSIKNYLTKYFGHLEFLDEEKINQLSKLRYTGWGRYSAKLLLDIRDEDTGFNLLQFLRNDEENRNLTNLISDNTLSFEPKIKAIQSKSTVEDDVFDEIKKLAGSPAIKRGILNSIKIVDELVQIIGYPPQNIVIEMARENMTTEEGQRKSKTRKTKLESALKNIENSVLENGKVPHSDEQLQSEKLYLYYLQNGKDMYSLDKTGSPAPLYRDQLDQYEVDHIIPYSFLPIDSIDNKVLTHRKNNQRKLDNIPDKETVANMKPFWEKLYNAKLISQTKYQRLTTSERTPDGVLTESMKAGFIERQLVETRQIIKHVARILDNRFSDTKIITLKSQLITNFRNTFHIAKIRELNDYHHAHDAYLAVVVGQTLLKAYPKLAPELIYGHHAHFNRHEENKATIRKHLYSNIMRFFNNPDSKVSKDIWDCNRDLPIIKDVIYKSQVNFVKRTMIKKGAFYKQNIIPKNSSVTVDKRFPIKNKKYLDPKLYGGYYERNSALSVFIIGQRFNKNNKLKVVKEFYDINIIDYPWFNTNPISFFNDDSENGFLTKNNLQSVQAFYKIPKYSLIQKNDGTRMLFESTTNFHKATQFKLTESQNELFFHMRRLLTKTDFMDLKSEESIKESQDFIMSHKEEFDNIVNGLFEYVEKQLGSKSLFTQAHEAYKLRKYPVFNLSEEIIRYYYDNFLKLFSLTKSGTSSGYVVGLFEAPKLRNAVYKATKDENKATLIHQSITGLYETRIDLSKLGED

SEQ ID NO: 4810 - protein, 1377 aa, unidentified
  REGION 1..1377: note = Description of Unknown: Cas Enzyme sequence
MNNKPYSIGLDIGTNSVGWRVITDDYKVPSKKMKVLGNTDKRFIKKNLIGALLFDEGTTAEARRLKRTARRRYTRRKNRLRYLQEIFAEEMSKVDSSFFHRLDDSFLIPEDKRGSKYPIFATLVEEKEYHKQFPTIYHLRKQLADSKEKADLRLIYLVLAHMIKYRGHFLYEEAFDIKNNDIQKIFNEFISIYDNTFEGSSLSGQNAQVETIFTDKISKSAKRERVLKLFPDEKSTGLFSEFLKLIVGNQADFKKHFDLEEKAPLQFSKDTYDEDLENLLEQIGDDFADLFVAAKKLYDAILLSGILTVTDPSTKAPLSASMIERYENHQKDLAVLKQFIKTNLPEKYVEVFSDQSKDGYAGYIDGKTTQEAFYKYIKNLLSKFDGADYFLDKIEREVFLRKQRTFDNGSIPHQIHLQEMNTILRRQGEHYPFLKENKEKIEKILTFRIPYYVGPLARGNRDFAWLTRNSDQAIRPWNFEEIVDKASSAEDFINKMTNYDLYLPEEKVLPKHSLLYETFAVYNELTKVKFIAEGMRDYQFLDSGQKKKIINQLFKKKRKVTEDDIIDCLQKIDNYDGIELKGIEKQFNASLSTYHDILKIIRDKEFMDDPKNGDILENVIHTLTIFEDREMIKQRLAQYNSIFDEKVIKALSRKHYTGWGKLSAKLIDGIRDKQTGKTILDYLMDDGKSNRNFMQLIKDDELSFTEIIQKAQVVGDTDNLRQVVQNLPGSPAIKKGILQSIKIVDELVKVMGHAPESIVIEMARENQTTARGKKNSQQRYKRIEDSLKNLASGLDSNILKENPTDNIQLQNDRLFLYYLQNGKDMYTGEALNINQLSSYDIDHIIPQAFIKDDSLDNRVLTSSKDNRGKSDNVPSLEVVEKMKAFWQQLLDSKLISERKYNNLTKAERERGGLNELDKVGFIKRQLVETRQITKHVAQILDARFNKEVTEKNKKNRNVKIITLKSNMVSNFRKEFGLYKVREINDYHHAHDAYLNAVVAKAILKKYPKLEPEFVYGDYQKYDLKRYISRSKDPKEVEKATEKYFFYSNLLNFFKEEVHYADGTIVKRENIEYSKDTGEIAWNKEKDFATIKKVLSLPQVNIVKKTEEQTVGQNGGLFDNNIVSKKKVVDASKLIPIKSGLSPEKYGGYARPTIAYSVLVTYKQNNKIKNTMVGIPVLTKLEFERDPNLYLRNLGINNVSHVIKLVKYTVLEFKHKYGTYRRFIVSNQELKRANQIFVTTKQMKLISQYTTLDKNEHDSLLKNNQQLIQSIWNQFLEFMLATDLVNKKQYDELILTNNQTIEECRNIMNRVITTLSFTNINAGQKKIIFDDTLSLPIKRWQFTDSDKMVKKIIESTLIHQSITGLYETRIDLSKLGED

SEQ ID NO: 4811 - protein, 1391 aa, unidentified
  REGION 1..1391: note = Description of Unknown: Cas Enzyme sequence
MKKPYSIGLDIGTNSVGWAVVTDDYKVPAKKMRVSGDADRSRIKKNLLGTLLFDDGNTAESRRLKRTARRRYTRRRNRILYLQEIFTKSMNEIDESFFHRLDDSFLVPEDKRGSKYPIFATLEEEKEYHKKFPTIYHLRKHLADSKEKTDLRLIYLALAHMIKYRGHFLYEESFDIKNNDIQKIFNEFISIYDNTFEGSSLSGQNAQVEAIFTDKISKSAKRERVLKLFPDEKSTGLFSEFLKLIVGNQADFKKHFNLEEKSPLQFSKDTYDEDFENLLGQIGDDFADLFLVAKKLYDAILLSGILTVTDPSTKSPLSASMIERYENHQKDLAALKQFIKNNLPEKYEEVFSDQSKDGYAGYIDGKTTQEAFYKYIKNLLSKFEGADYFLDKIEREDFLRKQRTFDNGSIPHQVHLQEMNAILRRQGEHYPFLKENREKIEKILTFRIPYYVGPLARGNRDFAWLTRNSDEAIRPWNFEEIVDKASSAEEFINKMTNYDLYLPEEKVLPKHSLLYETFAVYNELTKVKFIAEGLRDYEFLDRVQKKQIVNQFFKEKRKVTEKDIIHYLHNVDGYDGIELKGIEKQFNASLSTYHDLLKIIKDKGFMDDPKNEEILENIVHTLTIFEDREMIKQRLAQYDSIFDEKVIKALTRRHYTGWGKLSAKLINGICDKKNGKTILDYLIDDGKINRNFMQLINDDGLSFKEIIQKAQVVGKTDDVKQVVQELPGSPAIKKGILQSIKIVDELVKVMGYAPESIVIEMARENQTTARGKKNSQQRYKRIEDSLKNLAPGLDSNILKENPTDNIQLQNDRLFLYYLQNGKDMYTGKPLDIDQLSSYDIDHIIPQAFIKDDSIDNRVLTSSKDNRGKSDNVPSLEVVQKRKAFWQQLLDSKLISERKFNNLTKAERGGLDERDKVGFIKRQLVETRQITKHVAQLLDARFNTEVNEENQKIRTVKIITLKSNLVSNFRKEFGLYKVREINDYHHAHDAYLNAVVAKAILKKYPKLEPEFVYGDYQKYDLKRYISKSKVSNTIDKATEKYFFYSNLLNFFKERVRYADGTIKKRENIEYSNDTGEIAWNKEKDFATIKKVLACPQVNIVKKTEIQTHGLDRGKPKGLFNSNPSPKPSEDSKENLVPIKQGLDPRKYGGYAGISNSYAVLVKANIEKGAKKQQKTILEFQGISILDKINFENNKENYLLEKGYIEILSTITLPKYSLFEFPDGTRRRLASILSTNNKRGEIHKGNELVLPGKYTTLLYHAKNINKKLESEHLEYVEKHRDEFAEILEHVLLFNEKFVGALKNGEKIRQAFAKWETVDIKELCFSFIGPENSKNAGLFELTSQGSASDFEFLGVKIPRYRDYAPSSLLKATLIHQSITGLYETRIDLSKLGED

SEQ ID NO: 4812 - protein, 1421 aa, unidentified
  REGION 1..1421: note = Description of Unknown: Cas Enzyme sequence
MAKFNKNYSIGLDIGVSSVGYAVVTEDYRVPTFRFKVLGNTEKEKIKKNLIGSTTFVPAQSAQGTRIFRVNRRRIDRRNHRIAYLRDIFQKEIEKVDKNFYRRLDESFRVLGDKSEDLQIKQPFFGDKELETAYHKKYPTIYHLRKHLADADKNSPVADIREVYMALSHILKYRGHFLTLDKINPNNINMQNSWIDFIESCQEVFDLEVSEESKTIAAIFKSSDNRQEKVKKILPYFQQELLKKDKSIFKQLLQLLFGLKTKFKDCFELEEEPDLNFSKENYDENLENFLDSLEEDFSDVFAKLKVLRDTILLSGMLTYTGATHARFSATMIERYEEHRKDLQRFKSFVKQNLSEQDYLDIFGRKTPNGFDVDKETKGYVGYISNKMVLTNSQKQRTIQQNFYDYINGKITGIEGAEYFLNKISDGTFLRKLRTSDNGAIPNQIHAYELEKIIERQGRDYPFLLENKDKLLSILTFKIPYYVGPLAKGNNSRFAWIKRTTSQDFLDDNDEDTRNGKIRPWNYHKLINMDETRDAFITNLIGNDIILLNEKVLPKRSLIYEEVMLQNELTRVKYKDKNGKTHFFDSEHRQNIINGLFKINSKRVNAERLIKYLSDNHKNLNAIEIVSGVEKGKSFNSTLKTYNDFKTIFSEEFLDFEIYQKELEEIIKVITVFDDKKSIKNYLTKYFGHLEFLDEEKINQLSKLRYTGWGRYSAKLLLDIRDEDTGFNLLQFLRNDEENRNLTNLISDSTLSFDPKIKAIQSKSTVEDDVFDEIKKLAGSPSIKRGILNSIKIVDELVQIIGYPPQNIVIEMARENMTTEEGQKKSKTRKTKLESALKNIENSILENGKVPHSDEELQSEKLYLYYLQNGKDMYSLDKKGSPAPLYRDQLDQYEVDHIIPYSFLPIDSIDNKVLTHRKNNQRKLDNIPDKETVANMKPFWEKLYNAKLISQTKYQRLTTSERTPDGVLTESMKAGFIERQLVETRQIIKHVARILDNRFSDTKIITLKSQLVTNFRKTFHIAKIRELNDYHHAHDAYLAVVVGQTLLKAYPKLAPELIYGLHAHFNRHEENKATIRKHLYSNIMRFFNNPDSKVSKDIWDCGRDLPVIKDVIYNSQINFVKRTMIKKGAFYNQNPVGKFNKQIAAKNRYPLKTKATYLDTSIYGGYGPMNSALSILIIAERFNEKRGKIETVREFHDIFIIDYEKFNSNPLQFLNDVSEGGFLKKNDLNSVLAFYRIPKYSLMQRTDGTRILFESKSNLHKVTQFKLTKTQNELFFHMKRLLTKSNLMDLKSESAIKESQNFIQTHKKEFDNIADRLSNYSQKMLGETKSLQTLINGYNERPIKQIDNNEETIRYYYDNFIKMFSFVKSGAPKDIINFFNDKYTVPRMRPKPDKKMLDATIVHQSITGLYETRIDLSKLGED

SEQ ID NO: 4813 - protein, 1418 aa, unidentified
  REGION 1..1418: note = Description of Unknown: Cas Enzyme sequence
MAKFNKKYSIGLDIGVSSVGYAVVTEDYRVPAFKFKVLGNTEKEKIKKNLIGSTTFVPAESAQGTRVFRVNRRRIDRRNHRIAYLRDIFQKEIEKVDKNFYRRLDESFRVLVDKSEDIQIKQPFFGNKELETAYHKKYPTIYHLRKHLADADKNSPVADIREIYMALSHILKYRGHFLTLGKIDPNNINMQNSWIDFVESCQEVFDLEISDESKTIADIFKSSDNRQDKVKGILSYFPKELENKDKSIFKQLLQLLFGLKTKFKDCFELEEEPDLNFSKENYDENLENLLGTLEEDFSDVFAKLKILRDTILLSDMLTYTGATHARFSATMIERYEEHRKDLQRFKSFVKQNLSEQDYLDIFGRKTQSGFDVDKETKGYVGYIANKMVLTNSQKQRTIQQNFYDYISGKITGIEGAEYFLNKISDGTFLRKLRTSDNGAIPNQIHAYELEKIIERQGRDYPFLLENKDKLLSILTFKIPYYVGPLAKGDNSRFAWIKRATSQDVLDDNDEDTRNGKIRPWNYQKLINMDETRDAFITNLIGNDTILLNEKVLPKRSLIYEEVMLQNELTRVKYKDKNGKTHFFDSEHRQNIINGLFKINSKRVNAERLIKYLSDNHNDLNAIEIVSGVEKGKSFNSTLKTYNDFKTIFSEEFLDSEIYQKELEEIIKVITVFDDKKSIKNYLTKYFGHLEFLDEEKINQLSKLRYTGWGRYSAKLLLDIRDEDTGFNLLQFLRNDEENRNLTNLISDSTLSFDPKIKAIQSKSTVEDDVFDEIKKLAGSPSIKRGILNSIKIVDELVQIIGYPPQNIVIEMARENMTTEEGQKKSKTRKTKLESALKNIENSILENGKVPHSDEELQSEKLYLYYLQNGKDMYSLDKKGSPAPLYRDQLDQYEVDHIIPYSFLPIDSIDNKVLTHRKNNQRKLDNIPDKETVANMKPFWEKLYNAKLISQTKYQRLTTSERTPDGVLTESMKAGFIERQLVETRQIIKHVARILDNRFSDTKIITLKSQLVTNFRKTFHIAKIRELNDYHHAHDAYLAVVVGQTLLKAYPKLAPELIYGLHAHFNRHEENKATIRKHLYSNIMRFFNNPDSKVSKDIWDCGRDLPVIKDVIYNSQINFVKRTMIKKGAFYKQNIIPKDSSVTVDKRFPIKNKRYLDPKLYGGYYERNSALSVFIIGQRFNKNNKLKVVKEFYDINIIDYPWFNTDPMSFFNDDSENGFLTKNNLQSVQIFYKIPKYSLIQKNDGTRMLFESTTNFHKATQFKLTESQNELFFHMRRLLTKTDFMDLKSEESIRESQDFITNHKKEFDNIANGLFGYAEKQLGSKSLFTQAHEAYKLRKYPVFNLSEETIRYYYDNFLRLFSLTKSGTSSGYVVGLFEAPKLRNVDYKATKDESKATLIHQSITGLYETRVDLSKLGED

SEQ ID NO: 4814 - protein, 1403 aa, unidentified
  REGION 1..1403: note = Description of Unknown: Cas Enzyme sequence
MVKKPYSIGLDIGTNSVGWAVITDDYRVPSKKMKVLGNTDKRFIKKNLIGDLLFDEGTTAEDRRLKRTARRRYTRRKNRLRYLQEIFSEEINKVDNSFFHRLDDSFLVPEDKRGSKYPIFATLEEEKEFHKNFPTIYHLRKQLAESNEKADLRLIYLALAHMIKYRGHFLIDDPKFKVQNNDIQGLFEKFVEEYDNVQGTTLSKIKLNVTEILTAKIPKSEKREQLLKNYTSEDKNTLFGNLIGLALGLTPNFKTNFSLENDAKLQISTESYEEDLGNLLTLIGENFLELFSAVKNLSDGILLAGIVSNESQHAPLSAREVIRFKEHEEDLAALKHFIKNNLPEKYAEVFSDDSKNGYAGYVGVDSKVRKRNGKLATEEEFYKYLKNILNNVKGADYFLEKIKREDFLRKQRTFDNGSIPYQVHLAEMRAILRRQGEHYPFLKENKEKIEKILTFRIPYYVGPLARGNHDFAWLTRNSDHAIRPWNFEEVVDEASSAEDFINKMTNYDLYLPEEKVLPKHSLLYEAFAVYNELTKVRYIDERGEEFLMNTFMKQDIFEKVFKVFKNVNKQMVLEYLSLEHDESRIVDITGIDNEKGRFNASLGTYHDLLKIIKDKEFIDNPKNGEILENIIHTLTIFEDREMIKQRLAQYNSIFDEKVINALSRKHYNGWGKLSAKLINGIRDKQTKKTILDYLIDDGEINRNFMQLINDDGLSFKEIITKAQVVGKTDDVKQVVQELPGSPAIKKGILQSIKIVDELVKVMGHAPESIVIEMARENQTTARGKKNSQQRYKRIEDSLKILASGLDSNILKENPTDNIKLQNDRLFLYYLQNGKDMYTGETLDINQLSSYDIDHIIPQAFIKDDSIDNRVLTSSKDNRGKSDNVPDLEIVEKMKGFWQQLLKSKLISERKFNNLTKAERGGLNRQDKVGFIKRQLVETRQITKHVAQILDARFNTEVNDKKQKIRTVKIITLKSNLVSNFRKEFGLYKVREINNYHHAHDAYLNAVVAKAILKKYPKLEPEFVYGDYQKYDLKRYISRSKESKEIEKATEKYFFYSNLLNFFKEEVHYADGTIVKRENIEYSKDTGEIAWNKEKDFAIIKRVLSLPQVNIVKKTEIQTHGLDRGKPRGLFNSNPSPKPSEDSKENLVSIKQGLDPRKYGGYAGISNSYAVLVKAIIEKGVKKQRKTILEFQGISILDKIKFEKNKENYLLEKGYIEILSTITLPKYSLFEFPDGTRRRLASILSTNNKRGEIHKGNELFLPEKYITLLYHAKNINKTLEPEHLEYVEKHRDEFAKLLEFVLDFNDKYVGALKNGERIRQAFTDWETVDIKELCLSFIGPENSKNAGLFELTSQGSASDFEFLGVKIPRYRDYTPSSLLNATLIHQSITGLYETRIDLSKLGEE

SEQ ID NO: 4815 - protein, 1376 aa, unidentified
  REGION 1..1376: note = Description of Unknown: Cas Enzyme sequence
MSNKPYSIGLDIGTNSVGWAVITDDYKVPSKKMKVLGNTDKRFIKKNLIGALLFDEGTTAEARRLKRTARRRYTRRKNRLRYLQEIFFEEMSKLDSSFFHRLDDSFLIPEDKRASKYPIFATLAEEKEYHKQFPTIYHLRKYLADSKEKADLRLIYLALAHMIKYRGHFLYEDTFDIKNNDIQKIFNEFISIYDNTFEESSLSGQNAQVEAIFTDKISKSAKRERVLKLFPDEKSTGLFSEFLKLIVGNQADFKKHFNLEEKAPLQFSKDTYDEDLENLLGQIGDDFADLFVVAKKLYDAILLSGILTVTDPSTKAPLSASMIERYENHQKDLAALKQFIKNNLPEKFVEIFSDQSKDGYAGYIDGKTTQEAFYKYIKNLLSKFEGADYFLEKIEREDFLRKQRTFDNGSIPHQIHLQEMNAILRRQGEHYPFLKENREKIKKILTFRIPYYVGPLASGNSDFAWLTRNSDQAIRPWNFEEIVDKASSAEEFINKMTNYDLYLPEEKVLPKHSLLYETFAVYNELTKVKFIAEGLRDYQFFDSGQKKQIVNQLFKEKRKVTEKDIIHYLHNVDGYDGIELKGIEKQFNASLSTYHDLLKIIKDKEFMDDAKNEAILENIVHTLTIFEDREMIKQRLAQYDSLFDEKVIKALTRRHYTGWGKLSAKLINGICDKQTGNTILDYLIDDGKINRNFMQLINDDGLSFKEIIQKAQVFGKTDDVIQVVQELPGSPAIKKGILQSIKIVDELVKVMGHAPESIVIEMARENQTTARGKKNSQQRYKRIEDSLKILASGLDSNILKEHPTDNIKLQNDRLFLYYLQNGKDMYTGEALDINQLSSYDIDHIIPQAFIKDDSLDNRVLTSSKDNRGKSDNVPSIEVVQKRKAFWQQLLDSKLISERKFNNLTKAERGGLDERDKVGFIRRQLVETRQITKHVAQILDARFNTEVTEKYKKDRTVKIITLKSNLVSNFRKEFRLYKIREINDYHHAHDAYLNAVVAKAILKKYPKLEPEFVYGDYQKYDLKRYISRTKDPKEVEKATEKYFFYSNLLNFFKEEVHYADGTIVKRENIEYSKDTGEIAWNKEKDFATIKKVLSLPQVNIVKKTEEQTVGQNGGLFDNNIVSKKKVVDASKLIPIKSGLSPEKYGGYARPTIAYSVLVIADIEKGKAKKLKRIKEMVGITIQDKKKFEANPIAYLEECGYKNINPNLIIKLPKYSLFEFNDGQRRLLASSIELQKGNELILPYHFTALLYHAQRINKISEPIHKQYVETHQIEFEELLTTIISLSKKYIQKPNVESLLQQAFEQADKNIYQLSESFISLLKLTSFGAPGAFKFLGVEISQSSVRYKPNSQVLDTTLIHQSITGLYETRIDLSKLGED

SEQ ID NO: 4816 - protein, 1380 aa, unidentified
  REGION 1..1380: note = Description of Unknown: Cas Enzyme sequence
MGEKLMIKKPYSIGLDIGTNSVGWAVITDDYKVPSKKMKVLGNTNKHFIKKNLIGALLFDEGTTAEDRRLKRTARRRYTRRKNRLRYLQEIFTEEMSKVDSSFFHRLDDSFLVPEDKRESKYPIFATLKEEKEYHKNFSTIYHLRKHLADSKEKADLRLIYLALAHMIKYRGHFLYEESFDIKNNDIQKIFNEFLCIYDNTFEGNSLSGQNSQVEAIFTDKITKSAKRERILKLFPEKESIGLFAEFLKLILGNQADFKKHFNLEEKAPLHFSKDTYDEDLENLLGQIGDDYTNLFLVAKKLYDAILLSGILTVTDPSTKAPLSASMIERYENHQKDLASLKQFIKNNLPEKYDEVFSDQFKDGYAGYIDGKATQEAFYKYIKNLLSKFEGADYFLEKIEREDFLRKQRTFDNSSIPHQIHLQEMNAILRRQGEHYPFLNENREKIEKILTFRIPYYVGPLASGNSDFAWLTRNSEEAIRPWNFEEIVDKASSAEDFINKMTNYDLYLPEEKVLPKHSLLYETFAVYNELTKVKFIAEGLRDYQFLDSGQKKQIVNQLFKEKRKITEKDIIHYLHNFDGYDGIELKGIEKQFNASLSTYHDLLKIIRDKEFMDDPKNEAILENIVHTLTIFEDREMIKQRLAQYNSLFNDKVIKALTRRHYTGWGKLSAKLINGIRDKQTGNTILDYLIDDDKINRNFMQLINDDGLSFKEIIQKSQVVDKTDDVKQVVQELPGSPAIKKGILQSIKIVDELVKVMGHNPESIVIEMARENQTTARGKKNSQQRYKRIEDSLKNLASGLDSNILKENPTDNVQLQNDRLFLYYLQNGKDMYTGEALDINKLSNYDIDHIIPQAFIKDDSIDNRVLTSSKDNRGKSDNVPSLEVVQKRKAFWQQLLDSKLISERKFNNLTKDERGGLDERDKVGFIKRQLVETRQITKHVAQILDSRFNTEVNEKNQKIRTVKIVTLKSNLVSNFRKEFKLYKVREINDYHHAHDAYLNAVVAKAILKKYPKLEPEFVYGEYQKYDLKRYISRSKDPKDIEKATEKYFFYSNLLNFFKEEVHYADGTIVKRENIEYSKDTGEIAWNKEKDFATIKKVLSLPQVNLVKKTEEQTVGQNGGLFDNNIVSKEKVVDASKLIPIKSGLSPEKYGGYARPTIAYSVLVTYKQNNKIKNTMVGIPVLTKLEFERDPNLYLRNLGINNVSHVIKLVKYTVLEFKHKYGTYRRFIVSNQELKRANQIFVTTKQMKLISQYTTLDKNEHDILLKNNQQLIQSIWNQFLEFMLATDLVNKKQYDELILTNNQTIEECRNIMNRVITTLSFTNINAGQKKIIFDDTLSLPIKRWQFTDSDKMVKKIIESTLIHQSITGLYETRIDLGKLGED

SEQ ID NO: 4817 - protein, 1373 aa, unidentified
  REGION 1..1373: note = Description of Unknown: Cas Enzyme sequence
MENKNYSIGLDIGTNSVGWAVITDDYKVPSKKMKVLGNTDKRFIKKNLIGALLFDEGTTAEARRLKRTARRRYTRRKNRLRYLQEIFAEEMSKVDSSFFHRLDDSFLIPEDKRGSKYPIFATLAEEKEYHKQFPTIYHLRKQLADSKEKADLRLIYLVLAHMIKYRGHFLYEEAFDIKNNDIQKIFNEFISIYDNTFEGSSLSGQNAQIEAIFTDKISKSAKRERVLRLFPDEKSTGLFSEFLKLIVGNQADFKKHFDLEEKAPLQFSKDTYDEDLENLLGQIGDDFADLFLVAKKLYDAILLSGILTVTDPSTKAPLSTSMIERYENHQKDLAALKQFIKNNLPEKYDEVFSDQSKDGYAGYIDGKTTQETFYKYIKNLLSKFEGTDYFLDKIEREDFLRKQRTFDNGSIPHQIHLQEMNDILRRQGEYYPFLKDNKEKIEKILTFRIPYYVGPLARGNRDFAWLTRNSDQAIRPWNFEEIVDKASSAEEFINKMTNYDLYLPEEKVLPKHSLLYETFAVYNELTKVKFIAEGLRDYQFLDSGQKKDIFYTLFKAEDKRKVTEKDIIHYLHNVDGYDGIELKGIEKQFNASLSTYHDLLKIIKDKEFMDDPNNEEILENIVHTLTIFEDREMIKQRLAQYDSLFDEKVIKALTRRHYTGWGKLSAKLINGISDKQTGNTILDYLIDDGEINRNFMQLINDDRLSFKEIIQKAQVVGEIDDVKQVVRELPGSPAIKKGILQSIKIVDELVKVMGHAPESIVIEMARENQTTGRGKKNSQQRYKRIEDALKNLAPGLDSNILKEHPTDNIQLQNDRLFLYYLQNGKDMYTGEALDINQLSNYDIDHIIPQAFIKDDSLDNRVLTSSKDNRGKSDNVPSLEVVQKRKAFWKQLLDSKLISERKFNNLTKAERGGLDERDKVGFIKRQLVETRQITKHVAQILDARFNTEVTEKDKQNRIVKIITLKSNLVSNFRKEFRLYKVREINDYHHAHDAYLNAVVAKAILKKYPKLEPEFVYGNYQKYDLKRYISRFKDPKEVEKATEKYFFYSNLLNFFKEEVHYADGTIVKRENIEYSKDTGEIAWNKEKDFATIKKILSLPQVNIVKKREVQTGGFSKESILPKGNSDKLIPRKTKDILWETTKYGGFDSPVIAYSILLIADIEKGKAKKLKTVKTLVGITIMEKAAFEENPITFLENKGYHNVRKENILCLPKYSLFELENGRRRMLASAKELQKGNEIVLPVYLTILLYHSKNVHKLDEPEHLEYIQKHRNEFKDLLNLVSEFSQKYVLADANLEKIQNLYADNEQADIEILANSFINLLTFTALGAPAAFKFFGKDVDRKRYTTVSEILNATLIHQSITGLYETRIDLSKLGED

SEQ ID NO: 4818 - protein, 1374 aa, unidentified
  REGION 1..1374: note = Description of Unknown: Cas Enzyme sequence
  MOD_RES 985..988: note = Any amino acid
MSNKPYSIGLDIGTNSVGWAIITDDYKVPSKKMKVLGNTDKRFIKKNLIGALLFDEGTTAEARRLKRTARRRYTRRKNRLRYLQEIFAEEMNKVDSSFFHRLDDSFLIPEDKRGSKYPIFATLAEEKEYHKQFPTIYHLRKQLADSKEKADLRLIYLALAHMIKYRGHFLYEEAFDIKNNDIQKIFNEFISIYDNTFEESSLSGQNAQVEAIFTDKISKSAKRERVLKLFPDEKSTGLFSEFLKLIVGNQADFKKHFDLEEKAPLQFSKDTYDEDLENVLGQIGDDFADLFVAAKKLYDAILLSGILTVTDPSTKAPLSASMIERYENHQKDLAVLKQFIKTNLPEKYVEVFSDQSKDGYAGYIDGKTTQEAFYKYIKNLLSKFEGTDYFLDKIEREDFLRKQRTFDNGSIPHQIHLQEMNAILRRQGEHYPFLKDNKEKIEKILTFRIPYYVGPLARGNRDFAWLTRNSDEAIRPWNFEEIVDKASSAEDFINKMTNYDLYLPEEKVLPKHSLLYETFAVYNELTKVKFIAEGLRDYQFLDSVQKKQIVNQLFKEKRKVTEKDIIHYLHNVDGYDGIELKGIEKQFNASLSTYHDLLKIIKDKEFMDDAKNEAILENIVHTLTIFEDREMIKQRLAQYDSLFDEKVIKALTRRHYTGWGKLSAKLINGISDKQTGNTILDYLIDDGEINRNFMQLINDDGLSFKEIIQKAQVVGKTDDVKQVVQELPGSPAIKKGILQSIKLVDELVKVMGHEPESIVIEMARENQTTARGKKNSQQRYKRIEDSLKILASGLNSKILKEHPTDNNQLQNDRLFLYYLQNGKDMYTGEALDINQLSSCDIDHIIPQAFIKDDSLDNRVLTSSKENRGKSDNVPCLEVVEKMKVFWQQLLDSKLISERKFNNLTKAERGGLNERDKVGFIKRQLVETRQITKHVAQILDARFNTEVNEKKQKIRTVKIITLKSNLVSNFRKEFELYKVREINDYXXXXTLHDAYLNAVVAKAILKKYPKLEPEFVYGDYQKYDLKRYISRSKDPKEIEKATEKYFFYSNLLNFFKEEVHYADGTIVKRENIEYSKDTGEIAWNKEKDFATIKKVLSLPQVNIVKKREVQTGGFSKESILPKGNSDKLIPRKTKDVLWDTTKYGGFDSPVIAYSILLIADIEKGKAKKLKTVKTLVGITIMEKATFEENPITFLENKGYHNVRKENILCLPKYSLFELESGRRRMLASAKELQKGNEIVLPVYLTTLLYHSKNVHKLDEPGHLEYIQKHRNEFKDLLNLVSEFSQKYVLADANLEKIKNLYADNEQADIEILANSFINLLTFTALGAPAAFKFFGKDVDRKRYTTVSEILNATLIHQSITGLYETRIDLSKLGED

SEQ ID NO: 4819 - protein, 1391 aa, unidentified
  REGION 1..1391: note = Description of Unknown: Cas Enzyme sequence
MKKPYSIGLDIGTNSVGWAVVNDDYKVPAKKMRVFGDTDRSHIKKNLLGTLLFDDGNTAESRRLKRTARRRYTRRRNRILYLQEIFTDSMNEIDESFFHRLDDSFLVPEDKRGSKYPIFATLEEEKEYHKKFPTIYHLRKHLADSKEKTDLRLIYLALAHMIKYRGHFLYEESFDIKNNDIQKIFNEFISIYDNTFEGSSLSGQNAQVEAIFTDKISKSAKRERVLKLFPDEKSTGLFSEFLKLIVGNQADFKKHFNLEEKAPLQFSKDTYDEDFENLLGQIGDDFADLFLVAKKLYDAILLSGILTVTDPSTKSPLSASMIERYENHQEDLAALKQFIKNNLPEKYAEVFSDQSKDGYAGYIDGKTTQEAFYKYIKNLLSKFEGADYFLDKIEREDFLRKQRTFDNGSIPHQIHLQEMNAILRRQGEHYPFLKENKEKIKKILTFRIPYYVGPLARDNRDFAWLTRNSDQAIRPWNFEEVVDKASSAEDFINKMTNYDLYLPEEKVLPKHSLLYETFAVYNELTKVKFIAEGLRDYQFLDSGQKKQIVNQLFKEKRKVTEKDIIHYLHNVDGYDGIELKGIEKQFNASLSTYHDLLKIIKDKEFMDNADNEEILENIVHTLTIFEDREMIKQRLAQYGAIFDEKVLKTLSRRHYTGWGKLSAKLINGISDKQTGNTILDYLIDDGNNNRNFMQLINDDGLSFKEIIQKAQVVGKTDDVKQVVQELPGSPAIKKGILQSIKIVDELVKIMGHAPESIVIEMARENQTTARGKKNSQQRYKRIENALKNLAPGLDSNILKENPTDNIQLQNDRLFLYYLQNGKDMYTGKTIDINQLSNYDIDHIIPQAFIKDDSLDNRVLTSSKDNRGKSDNVPSIEVVQKRKAFWQQLLDSKLISERKFNHLTKAERGGLDERDKVGFIRRQLVETRQITKHVAQILDARFNTEVNEKNQKIRTVKIITLKSNLVSNFRKEFRLYKVREINDYHHAHDAYLNAVVAKAILKKYPKLEPEFVYGDYQKYDLKRYISRSKDPKEVEKATEKYFFYSNLLNFFKEEVLYADGTIRKRENIEYSKDTGEIAWDKEKDFATIKKVLSYPQVNIVKKTEIQTHGLDRGKPKGLFNSNPSPKPSEDSKENLVPIKQGLDPRKYGGYAGISNSYAVLVKAIVEKGAKKQQKTILEFQGISILDKINFENNKENYLLKKRYIEILSTITLPKYSLFEFPDGTRRRLASILSTNNKRGEIHKGNELVLPGKYTTLLYHAKNINKKLEPEHLEYVEKHRNDFAKLLECVLNFNDKYVGALKNGERIRQAFTDWETVDIEKLCFSFIGPENSKNAGLFELTSQGSASDFEFLGVKIPRYRDYAPSSLLKATLIHQSITGLYETRIDLSKLGED

SEQ ID NO: 4820 - protein, 1420 aa, unidentified
  REGION 1..1420: note = Description of Unknown: Cas Enzyme sequence
MAKFNKNYSIGLDIGVSSVGYAVVTEDYRIPAFRFKVLGNTEKEKIKKNLIGSTTFVPAQSAQGTRVFRVNRRRIDRRNHRIAYLRDIFQKEIEKVDKNFYRRLDESFRVLGDKSEDIQIKQPFFGDKELETAYHKKYPTIYHLRKHLADADKNSPVADIREVYMALSHILKYRGHFLTLDKINPNNINMQNSWIDFIESCQEVFDLEVSEESKTIAAIFKSSDNRQEKVKKILPYFQQELLKKDKSIFKQLLQLLFGLKTKFKDCFELEEEPDLNFSKESYDENLENFLGSLEEDFSDVFAKLKVLRDTILLSGMLTYTGTTHARFSATMAERYEEHRKDLQRFKSFVKQNLSEQDYLEIFGRKTPNGFDVDKETKGYVGYISNKMVLTNPQKQKTIQQNFYDYISGKITGIEGAEYFLNKISDGTFLRKLRTTDNGAVPNQIHTYELEKIIERQGRDYPFLLENKDKLLSILTFKIPYYVGPLSKGNNSRFAWIKRTISQDILDDNDEDTRNGKIRPWNYHKLINMDETRDAFITNLIGNDIILLNEKVLPKRSLIYEEVMLQNELTRVKYKDKYGKTHFFDSELRQEIINNLFKTNSKRVSSAMLLDYLENYTNLQAVEIVSGIEKGKSLNSTLKTYNDLKTIFSEELLDSEIYQKELEEIVKVITVFDDKKSIKNYLTKYFGHLEFLNEERINQLSKLRYTGWGRYSAKLLLDIRDEDTGFNLMQFLRNDDENRNLSQLISDSTLSFDSAIKSIQSKSTVEDDVFDEIKKLAGSPAIKRGILNSIKIVDELVQIIGYPPQNIVIEMARENMTTEEGQKKAKTRRTKLESALKNIENSVLENGKVPHSDEQLQSEKLYLYYLQNGKDMYSLDKTGSPTPLYRDQLDQYEVDHIIPYSFLPIDSIDNKVLTHRENNQRKLNNIPDKKTVANMKPFWEKLYNAKLISQTKYQRLTTSERTPDGVLTESMKAGFIERQLVETRQIIKHVARILDNRFSDTKIITLKSQLVTNFRNTFHIAKIRELNDYHHAHDAYLAVVVGQTLLKAYPKLAPELIYGHHTHFNRHEENKATLRKHLYSNIMRFFNNPDSKVSKDIWDSNRDLPIIKDVIYNSQINFVKRTMIKKGAFYNQNPVGKFNKQIAANNRYPLKTKATYLDPSIYGGYGPMNSALSIIIIAERFNEKRGKIETIREFHDIFIIDYEKFNDDPLQFLNDISEGGFLKENSLNRVLAFYRIPKYSLMQKIDGTRMIFESKSNLHKVTQFKLTKTQNELFFHMKRLLTKSNLMDLKSESAIKESQNFIQTHKKEFDNIADRLSNYSQKMLGETKSLQTLINGYNERTIKQIDNNEETIRYYYDNFIKMFSFVKSGAPKDIINFFNDKYTVPRMRPKPDKKMLDATLIHQSITGLYETRIDLSKLGED

SEQ ID NO: 4821 - protein, 1394 aa, unidentified
  REGION 1..1394: note = Description of Unknown: Cas Enzyme sequence
MENKNYSIGLDIGTNSVGWAVITDDYKVPSKKMKVLGNTDKRFIKKNLIGALLFDEGTTAEARRLKRTARRRYTRRKNRLRYLQEIFAEEMSKVDSSFFHRLDDSFLIPEDKRGSKYPIFATLAEEKEYHKQFPTIYHLRKQLADSKEKADLRLIYLVLAHMIKYRGHFLYEEAFDIKNNDIQKIFNEFISIYDNTFEGSSLSGQNAQIEAIFTDKISKSAKRERVLRLFPDEKSTGLFSEFLKLIVGNQADFKKHFDLEEKAPLQFSKDTYDEDLENLLGQIGDDFADLFLVAKKLYDAILLSGILTVTDPSTKAPLSTSMIERYENHQKDLAALKQFIKNNLPEKYDEVFSDQSKDGYAGYIDGKTTQETFYKYIKNLLSKFEGTDYFLDKIEREDFLRKQRTFDNGSIPHQIHLQEMNDILRRQGEYYPFLKDNKEKIEKILTFRIPYYVGPLARGNRDFAWLTRNSDQAIRPWNFEEIVDKASSAEEFINKMTNYDLYLPEEKVLPKHSLLYETFAVYNELTKVKFIAEGLRDYQFLDSGQKKDIFYTLFKAEDKRKVTEKDIIHYLHNVDGYDGIELKGIEKQFNASLSTYHDLLKIIKDKEFMDDPKNEEILENIVHTLTIFEDREMIKQHLAQYASIFDEKVIKALTRRHYTGWGKLSAKLINGIHDKKSGKTILDYLIDDGYSNRNFMQLINDDGLSFKEIIQKAQVVGKTDDVKQVVQELPGSPAIKKGILQSIKIVDELVKVMGHAPESIVIEMARENQTTGRGKKNSQQRYKRIEDALKNLAPGLDSNILKEHPTDNIQLQNDRLFLYYLQNGKDMYTGEALDINQLSNYDIDHIIPQAFIKDDSLDNRVLTSSKDNRGKSDNVPSLEVVQKRKAFLQQLLDSKLISERKFNNLTKAERGGLDERDKVGFIKRQLVETRQITKHVAQILDARFNTEVTEKDKQNRIVKIITLKSNLVSNFRKEFRLYKVREINDYHHAHDAYLNAVVAKAILKKYPKLEPEFVYGDYQKYDLKRYISRFKDPKEVEKATEKYFFYSNLLNFFKEEVHYADGTIVKRENIEYSKDTGEIAWNKEKDFATIKKVLSLPQVNIVKKTEIQTHGLDRGKPKGLFNSNPSPKPSEDSKENLVPIKQGLDPRKYGGYAGISNSYAVLVKAIIEKGAKKQQKTVLEFQGISILDKINFEKNKKNYLLEKGYIKILSTITLPKYSLFEFPDGTRRRLASILSTNNKRGEIHKGNELVLPEKYTTLLYHAKNINKTLEPEHLEYVEKHRNDFAKLLESVLDFNDKYVGALKNGERIRQAYIDWETVDIEKLCFSFIGPRNSKNAGLFELTSQGSASDFEFLGVKIPRYRDYTPSSLLNATLIHQSITGLYETRIDLSKLGED

SEQ ID NO: 4822 - protein, 1370 aa, unidentified
  REGION 1..1370: note = Description of Unknown: Cas Enzyme sequence
MKKPYSIGLDIGTNSVGWAVVTDDYKVPAKKMKVLGNTDKSHIKKNLLGALLFDSGNTAEDRRLKRTARRRYTRRRNRILYLQEIFAEEMMQVDESFFQRLDDSFLVEEDKRGSRYPIFGTLKEEKKYHKEFKTIYHLREKLANSTEKADLRLVYLSLAHMIKFRGHFLIEGQLKAENTNVQALFKDFVEVYDKTVEESHLSEMTVDALSILTEKVSKSRRLENLVECYPTEKKNTLFGNLIALSLGLQPNFKTNFQLSEDAKLQFSKDTYEEDLEGLLGEIGDEYADLFASAKNLYDAILLSGILAVDDNTTKAPLSASMVKRYKEHKEELAAFKRFIKEKLPKKYEEIFKDDTKNGYAGYVGADKKLRKRSGKLATEEEFYKYVKGILNKVEGADVWLDKIDREDFLRKQRTFDNGSIPHQIHLQEMHAILRRQGEHYPFLKENQDKIEKILTFRIPYYVGPLVRKGSRFAWAEYKADEKITPWNFDDILDKEKSAEKFITRMTLNDLYLPEEKVLPKHSLLYETFTVYNELTKVKYVNEQGEAKFFDANMKQEIFDHVFKENRKVTKDKLLNYLNKEFEEFRIVNLTGLDKENKVFNSSLGTYHDLRKILNKSFLDNKENEQIIEDIIQTLTLFEDREMIRQRLQKYSDIFTKAQLKKLERRHYTGWGRLSYKLINGIRDKQSNKTILGYLIDDGYSNRNFMQLINDDALSFKEEIAKAQVIGEMDGLNQVVSDIAGSPAIKKGILQSLKIVDELVKVMGHNPANIVIEMARENQTTAKGRRSSQKRYKRLEEAIKNLDHDLNHKILKEHPTDNQALQNDRLFLYYLQNGRDMYTEDPLDINRLSDYDIDHIIPQAFIKDNSIDNRVLTSSKANRGKSDDVPSEDVVNRMRPFWNKLLSSGLISQRKYNNLTKKELTPDDKAGFIKRQLVETRQITKHVARMLDERFNKEFDDNNKRIRRVKIVTLKSNLVSSFRKEFELYKVREINDYHHAHDAYLNAVVVKALLVKYPKLEPEFVYGEYPKYNSYRERKTATQKMFFYSNIMNMFKSKVKLADDQIVKHPMIEVNDETGEIAWDKTKHITTVKKVLSYPQVNIVKKVEEQTGGFSKESILPKGNSDKLIPRKTKKFYWDTKKYGGFDSPIVAYSILVIADIEKGKSKKLKTVKTLVGVTIMEKMTFERDPVAFLERKGYRNVQEENIIKLPKYSLFKLENGRKRLLASARELQKGNEIVLPNHLGTLLYHAKNIHKVDEPKHLDYVDKYKDEFKELLDVVSNFSKKYTLAEGNLEKIKELYAQNNGEDLKELASSFINLLTFTAIGAPATFKFFDKNIDRKRYTSTTEILNATLIHQSITGLYETRIDLSKLGGD

SEQ ID NO: 4823 - protein, 1417 aa, unidentified
  REGION 1..1417: note = Description of Unknown: Cas Enzyme sequence
MAKFQKNYSIGLDIGVSSVGYAVVTEDYRVPAFKFKVLGNTEKEKIKKNLIGSSTFVPAQSAQGTRVFRVNRRRIDRRNHRIAYLRDIFQKEIEKVDKNFYRRLDESFRVLGDKSEDIQIKQPFFGNKELETAYHKKYPTIYHLRKHLADADKNSPVADIREVYMALSHILKYRGHFLTLGKIDPNNINMQNSWIDFIESCQDAFDLEISDESKTIATIFKSSENRQEKVKQILSYFQQELLKKDKSIFKQLLQLLFGLKTRFKDCFELEEEPDLNFSKENYDENLENLLGALEEDFTDVFAKLKILRDTILLSGMLTYTGVTHARFSATMVERYEEHRKDLQRFKSFVKQNLSEQDYLDIFGRKTPNGFEVDKETKGYVGYISNQMVLTNPQKQKTIQQNFYDYISGKITGIEGAEYFLNKISDGTFLRKLRTTDNGAIPNQIHAYELEKIIERQGRDYPFLLENKDKLLSILTFKIPYYVGPLAKGDNSRFAWIKRTTSQDVLDDNDEDTRNGKIRPWNYHKLINMDETRDAFITNLIGNDIILLNEKVLPKRSLIYEEVMLQNELTRVKYKDKYGKTHFFDSELRQEIINNLFKTSSKRVSSAMLLDYLENYTNLQAVEIVSGIEKGKSLNSTLKTYNDLKTIFSEELLDSEIYQKELEEIVKVITVFDDKKSIKNYLTKYFGHLEFLNEEKINQLSKLRYTGWGRYSAKLLLGIRDEDTGFNLLQFLRNDDENRNLSQLISDSTLSFDSTIKAIQSKSTVEDDVFEEIKKLAGSPAIKRGILNSIKIVDELVQIIGYPPQNIVIEMARENMTTEEGQKKAKTRKSKLESELKNIEDSVLDNGKVPHSDEQLQSEKLYLYYLQNGKDMYSLDKKGSPSPLYRDQLDQYEVDHIIPYSFLPIDSIDNKVLTHRENNQRKLNNIPDKETVANMKPFWEKLYNAKLISQTKYQRLTTSERTPDGVLTESMKAGFIERQLVETRQIIKHVARILDNRFSDTKIITLKSQLVTNFRNTFHIAKIRELNDYHHAHDAYLAVVVGQTLLKAYPKLAPELIYGHHAHFNRHEENKATIRKHLYSNIMRFFNNPESKVSKDIWDCNRDLPIIKDVIYNSQVNFVKRTMIKKGAFYKQNIIPKDSSVTVEKRFPIKNKRYLDPKLYGGYYERNSALSVFIIGQRFNKNNKLKVVKEFYDINIIDYPWFNTDPMSFFNDDSENGFLTKNNLQSVQTFYKIPKYSLIQKNDGTRMLFESTTNFHKATQFKLTESQNELFFHMRRLLTKTDFMDLKSEESIKESQDFITNHKKEFDNIVNGLFGYAEKQLGSKSLFTQAHEAYKLRKYPVVNLSEETIRYYYDNFLRLFSLTKSGTSSGYVVGLFEAPKLRNVDYKATKDESNATLIHQSITGLYETRIDLSKLGED

SEQ ID NO: 4824 - protein, 1353 aa, unidentified
  REGION 1..1353: note = Description of Unknown: Cas Enzyme sequence
MRKEYSIGLDIGTNSVGYAVIYHDFTVPAKKMKVLGNTDKKHIKKNLIGSVTFDEGSTASDRRLSRGARRRYTRRAYRLNTLQRFFDEPLSAVDPNFLARLKESFLVEGDKHYAKHPIFANEAQEKAYHEKFPTIYHLRKFLANTKEQADLRLVYLALAHIIKYRGHFLIDGQLNADNTSVKTIFNQFARAYNEAFALSQDFVAISEEQGMRVEEILNDVKLSKSGKVEKTLELFEGQARNGRLKQFLSLIVGNQGNFKGHLPIEEDAKLQFSSEKYDEDLETLLATVGNDFSDIFALAHNVYDAMLLSGILAGVDSETKAKLSESMVKRYETHQQDLDDFQAFMRLRCTDKEYKDMFKNREVTGYAQYIEGTLPSKSGYTKCASRADFYTYVKKVIEGKEGAEPFLEKISQDRFLLKQRTYENGAIPHQIQLKELEEIIDNQGQYYPFLLENKDKLKAILTFRIPYYVGPLAKHKKYSDFAWLERRSDQAITPWNMHEVIDVDRTAEKFIERMTNFDTYLPTESVLPKHSLIYEQYMIFNELTKVRYVSEQGRKLLLNTREKALIFDELFKKHRKVTRKRLETFFALEFNIEGVKVEGIEDSFNASYATYHDLKKVEGMAEIMDDESYFDHIEQIIKILTIFEDRSIIERQLSQFDFLPEKTRKKLSRKKYTGWGSLSKKLLVGIRDRVSHKTILDYLKDDEHEGRPLNRNLMQLINEDGLSFKEYIATHQPEIGEASLQDIVAEIPGSPAIKKGILNSLKIVDELVEIMGYQPSNIVVEMARENQTTKRGKTLPREKGLKEAIDKLGSAILKEFPTDNKSLQNDRLYLYYLQNGKDIYTGNPLDIHRLSEYDIDHIIPQSYLKDDSIDNKVLTSREANRGKLDDVPSREVAEARIGFWTSLLKSGLISQRKFDNLTRGLRGGLTEEAKQGFIHRQLVETRQITKHVARILHQRFNQENMPEVNIISLKSRMVSTFRKSFGLYKVRDINDYHHAHDAYLNAVVSLSVLKVYPQISRDLIYGQFGKHQRVKGTQATKEFYLYKNILKFFDKENVIVESTGEVLWNQATVIPRVKKVLYKSQINFVKKAEVQRGEFYKASIVSKSDSDVLIPRKKGWDTKKYGGLMYPKVAYSLAVKYINGKGEETSEFIGVKITEQEKFEKNPNSFFKSHGITNILGYLKVVKYDLIEFSDGRRRLLASDKELQKANQLMLSEEWTKMVYHLKQCSETGNVDSKRHVESNLDKLDDIFEYLLEFVDKKIKLPKASEELKKAYNKRNKICDISTLSESMMGILLFCHRGAFPVKFKFFGENVGQKRYIGLSSCWQGVLIYQSITGLYETRVKLEDLSSWDGAQL

SEQ ID NO: 4825 - protein, 1354 aa, unidentified
  REGION 1..1354: note = Description of Unknown: Cas Enzyme sequence
MRKEYSIGLDIGTNSVGYAVIYHDFTVPAKKMKVLGNTDKKHIKKNLIGSVTFDEGSTASDRRLSRGARRRYTRRAYRLNTLQRFFDEPLSAVDPNFLARLKESFLVEGDKQYAKHPIFANEAQEKVYHEKFPTIYHLRKFLANTKEQADLRLVYLALAHIIKYRGHFLIDGQLNADNTSVKTIFNQFAHAYNEVFALSQDFVAISEDQGMRVEEILTDVKLSKSGKVEKTLELFEGQARNGRLKQFLSLTVGNQGNFKGHLPIEEDAKLQFSSEKYDEDLETLLATVGNDFSDIFALAHNVYDAMLLSGILSGVDSETKAKLSESMVKRYETHQQDLDDFQAFMRLRCTDKEYKDMFKNREVTGYAQYIEGTLPSKSGYTKCASRTDFYAYVKKVIEGKEGAEPFLEKISQDRFLLKQRTFENGAIPHQIQLKELEEIIDNQGQYYPFLLESKDKLKAILTFRIPYYVGPLAKHKKYSDFAWLERKSDQAITPWNMHEVIDVDRTAEKFIERMTNFDTYLPTESVLPKHSLIYEQYMIFNELTKVRYVSDQGRKLLLNTREKDLIFDELFKKHRKVTRKRLETFLALEFNIEGVKVEGIEDSFNASYATYHDLKKVEGMAEFVDDESYFDQIEQIIKILTIFEDRSIIERQLSQFDFLSEKTRKKLSRKKYTGWGSLSKKLLVGIRDRVSHKTILDYLKDDEHEGRPLNRNLMQLINEEGLSFKEYIATNQPEIGEASLQDIVAEIPGSPAIKKGILNSLKIVDELVEIMGYQPSNIVVEMARENQTTKRGKTLPREKGLKEAVDKLGSAILKEFPTDNKSLQNDRLYLYYLQNGKDMYTGNPLDIHRLSDYDIDHIIPQSYLKDDSIDNKVLTSREANRGKLDDVPSREVAEARIGFWTSLLKSGLISQRKFDNLTRGLRGGLTEEAKQGFIHRQLVETRQITKHVARILHQRFNQENMPEVNIISLKPRMVSTFRKSFGLYKVRDINDYHHAHDAYLNAVVSLSVLKVYPQISRDLIYGQFGKHQRVKGTQATKEFYLYKNILKFFDKELKIHSGTGEVLWNQEKTLAQVRKVLECPQINLVKQVKEQKGTFSKEFILVKGYSDKLVPCKTGLSTEKYGGKGSPNTAYTIAIQEPQKIGKKYLGDLHAVTIQNSLKYKDNLERLVASLGLSEEVRVIKLPVYSLIQFDDGKKRLFISPNELQKANQLALSQKYYALLYHSARCGDLNSSESLDYVIQHRLDYDQLLEILLSFSIKWNGTISIAKKIKELYTENKNTDIKEIAASFVSLASLVSSGASSEFNFFGKKIDRVRYRGSDAKKCWSGTLIYQSITGLYETRVKLEDLSSWDGAQL

SEQ ID NO: 4826 - protein, 378 aa, unidentified
  REGION 1..378: note = Description of Unknown: Cas Enzyme sequence
MIRGEVVRLFPTPEQEKMFRECIGYARFSYNYCKSYDDNYVKTHNTRLSIFDLPKLIVQLKHSGNYDWMKKLPADIAKQAARDFAQAKTNSKRIYKNASHTSYKRKHDHKQSFFCDPYKTKIKSRKRVYISKIGDVKMGRKLPKDKKLKNPRVIQQYGKWYLSVSFEEEPKEKPILSEETIGVDMGLKDLMVLSDGSVYENINKQSKIRKLDKEKRRLESSLARKKVKGAKCQSKNYYKTRTKYYKVIEKLNNIRKDYRHQVTRNVINKNPKRLVLEDLDIKDMLKDATKAKAISEASWYTLRVYLTYKAEENGIDVVIADKYFPSSQLCSCCGYKNKQVKDLNIRTWTCPKCNVNHNRDLNAALNLKNYSDNYCTNL

SEQ ID NO: 4827 - protein, 1332 aa, unidentified
  REGION 1..1332: note = Description of Unknown: Cas Enzyme sequence
MTKYYLGLDIGTNSVGWSVTDTEYNVINKNKKRLMGVELFEEANTAEERRLFRSQRRRLDRRNWRLQLLRDEFEKEIAKVDPDFLLSLQESKYHLEDKKINKKFILFNDKNYTDKKFHKDYPTHYHLREAMKTQKNPDIRKVYLALHHIYKSRGHHLFEEQSFSNGTIETTLNELLTTLNISLDIKKVTKICLSKDNTTNKVKAFKEITNDKQIQEIFRLIFGGSVSLDKLYNMDEYKELDSNVKTISFKNKNYDEVRHEYETVLNDNIELLDKIKLVYDAIILANIKKDGLSLSKSKIEIYNKHKQDRKNLKKLIMQEKSLTVKERKALYFNIMLKDEKAGTNYVNYTRNSDITKSCDYESFKKFLKKELSILKDTKQKELILNDIDQDTFLPLLRTKDNSVIPYQIHKEELLEIINNAKKYHKFLTEEVIDRLIKIFEFKIPYFIGPLNNNIENNFAWSVRKTGYEHTPVTPWNYYEVIDETESAKKFIDNLISNCTYLEDQKVIPKESLLYSEYMLLNELNAIKIDNVKITTDIRDIIIDELFIKTKTTVTKNKIKQLLVKKKLIDKTAEITGIDNIVKGNLKANHEFSKILGDNFNKEHVENMIYWLTIYGDTKKLVRENIETNYSNIYTKEQIDQILKLKFKDWSSLSKKLLTEIHSKSLINTETGEMLNIIEALRQTNYILMELLSNKFDYTEQIDKLNIKKEIKELTPDILNNLYVSPSTKRAIWQTLKINDRLKKELGTEPTKIFIETTRTNQAPKIVKDTRHQNLINLYNKIKESDVKGLGINLKELKESLEKELPSNLKSKKLYLYYLQLGKCLYTGKNIDKNEINSILEYDIDHIYPQSKVKDDSFDNTVLVYRTANANKSDIYPLSESTQEKNKSLWSALKSLKLMTDEKYNRLVRTEEFSNNELSGFIARQLVETSQTIKVVSKLLKQLNPKSRICYSKAENVNVFKQNYGKIKECNRKSQNKEQIIKVRELNDLHHAVDAYLNIVVGNVYDTKFTSNPRTFIDSSKDNRKYSLNTLFYYDIKDAWIVDKTINTVDREINDTNIQVNKRASRKTGKLFDATIYKANVAKEGVYYPIKTKDGRMLDVTKYGGYTSITISHYTLVSYTVTTPNESYDAKYLVPVPIYKVNSIKTDDDLLKHIKNVIPRKPNETISNIKFIKKELYTHSKVILNGLPVYLGGKTNNNITYRSALQITFDYDTTRYLKTIFNYINWQKANKGKGDLWHSITQGDNLKTYDAIIKKMTDKIINKINPTKFNMLQDKSYRKTFEKLTLDEQVQVLAELLNLITTKLAPNAKVLKLINMSASVKSIPFSLNGYELF

SEQ ID NO: 4828 - protein, 1287 aa, unidentified
  REGION 1..1287: note = Description of Unknown: Cas Enzyme sequence
MADNLKYNIGLDIGISSVGWCVTDEENNIVKKSGKHLWGSRLFDEGQTAATTRTLRGVRRRTERRKNRIRYLQSMLLEDIEKVDENFIPRLQQSNLIKDDKNQFKFNLFEDKEFIDKEYYSEYPTIYHLRKALVTKEQKFDIRLVYLALHHIIKYRGNFLTKGDLSDETNAINSDLENIIEYLKENEIELKYPIEKIKEVLVNKELTKSEKAKEILSLFDYEKEDKQIIDNIFKSVVGLKFNLNAIFDLEDERKLEFASDNDWDSIAGELNENAEIFYSMKNIYSWIIVESFLVGKNYISEAFIEKYDKYHKDLVKLKNAYKKYLDIIQYDKMFRKYEPDNYYSYNGKLSEIEKSKKCSNEELCKRIKKDLKGFEDESDVSEIFNDISNENYLIKLNTTDNGEIPYQLHEKELKKILEKQSKYYNNIKENKDKILSLLTFRIPYYVGPLSTNSKWAWVKTNSKEAIRPWNFDEIVDKDATAEEFIRRMTNKCTYLLNEDVIPKESLLYSKFSVLNEINNIQVNDKRISKDMKTKIIELFKNKKSVGKKDIINLYKKDGINIEKIDGFTTSNGKFNSNMNAYVDFSKILENSDENEEMIEELIYWITIFEDKSILKHKIEEKYSSILTKEQINKIIKLKYIGWSRLSMQIITSDKFGFKEQLEQALKDVIGEEKKKISYDDIAEIQTSPANKKGIWQAILVVKEITKILKAEPENIYIEFARSDETKGVITKKKLEKIEQQYKEISDFTKNNKSLLEELNKAKNQTKNINERLYLYFMQMGKSMYSGEKLDIENLSSYQIDHIIPQSYIKDNSIDNKVLVLSEENQRKKDSLLLEDTIIDKMLPTWTYLNEHGLISDLKFKKLIKRKMFSNEEEEVKFISRQIVETRQITKYVREILTKLYPNTEIVGLKASVTHNFREKYEFYKIRNLNDCHHAQDAYIMCVSGKAFKDSKLLKYEKIKHFLEEEKRKSVEERNKDKDEKYGIVMKIIRKRVDIEKVNKVFQYKDYLVTRKLEEQTGEFYNQNPIKKSEIKNTRIALKSEKDPLKYGGYSGENQAYYVIYEYKDKKGKSEYRMQGIPIRYSYEIKNKKITLEEYLKNKCNENQEEFIRILKSKILKNQAFFDENNELQKIISDSEYRNMKQLFLNKNEIIELYSALNFNIFNEKKREKLDREKIAIDSYRTIINKMINEFKGIDDIEKKDILNNGKFEALDIEEKIKTLNNLLTCISKAYVDLNNIGLNSNEGRKYNINFNKKKLNNMTFIDQSVTGFYERRYRVDELANNNSQKTM

SEQ ID NO: 4829 - protein, 1588 aa, unidentified
  REGION 1..1588: note = Description of Unknown: Cas Enzyme sequence
MNKIIEKAEKIFIGLDIGTESVGYALTDENYQVPQIGGKPLMGVRLFDAADTAEKRRVQRATKVRLKRTKQRIVFLQELLAPEIERVDPLFFIRLKSSGYWADDKQSKGLDSLDSLFADGMYTDKDFYKQFKTIYHLRAFLMKEDNWKSGAPDIRLIYLACHHILKNRGHFLYGGDIGSSNSDNFDVLNQGKILFEKLNEYFKRLEDDDKAGGETSNNIHFSLENFDKVKEIAKDDKLRKAQKNEKLREAFGISVKTPIERILAVTCGSKVKISEVFLGYENDEITHFELEKNWEAEESKYRDALNAEQFELLTILKDIYDWFMLMKLLKGFSHISYAMEDTFKSHKKQLDFLKALLKKYDAKLYHKFFRDANHKGVYEKSKIANYAHYIGSNLAGGKSILPKAPQDTFYEFIKQELYEKGGFAKKEFKSFLKNEDGEFSFEHGGYTLDDMHNDIIERKFLQKLRSKENATIPHQLHKVELERILTFAEKYKLISTEKNEDGLSLKDKIISIIEFRVPYFVGRTNPYFKDVKGRHVWIERSNQYNELPQTVNGKLRPWNFDKAIDLDACGEKFIKRMLSQCSKLRNEEVMAKNSLVYAKYSVLNELNKLKINREPISVELKQCIFNNVFKAYRKVSTGTLLYFLNNCKGICNADGNKLTRDDLSGFDVKGGFTTSLSPFIEASKIFGDEVFANENFYSTDEGRLFDKVIEWHAVHTDKQLVEKSIRREYKDCLAQKYGDGAEDKIKKLKAINFSGFGNMSEKFLTTPVPHGSDENKTIIKSTGLVNPRMSVLEIMWDTNENLNEIIWNPEYGFRSFIDSENNAGGDESAENFKERIQESYASPSVKRSVWQAIKVVDELIELAGRKPDKIFIEVTRSGKAVKGDKGRTKSRRQKIEAIYKDAKNLAEDIKNEGLLDKLGTIGDAQLRSEKIFLYFMQGGKCAYSGDSINFSDVLSGDNSRYNIDHIIPQALVKDDSFTNLVLAKRHLNGEKGKNYPLNQTSAIWQNIVKLKILWKKWLDSGMITKEKYDRLNRTTEFSEKELEGFIERQLVFTGQATTVVAELLKSKYEAEGGPQVVFYSKAENVSAFRHKFDILKCREINDFHHAHDAYLNIVVGSVWHTRFNSNFYKAKYQDEKQKRLNANKLFEYDVDNVWIKPRFKTEEGYKKDGTPYQKQTQEIIERTGTLAVVDTVLYQKKTTKNDNTDKYNSLPVSKKLKSKGKDGSLYDATVYGVDAHQKDFKKGKALVQDDNSVLIPLKGKQHILSYTSKYGGYKSAKTAYFIIYEYTDAKGERITYFDQLAQKDKKVWEAKTGEQKMTYIVDKLKQMNHKTNHQQMQKLEESLKKQFEKSKPNQQKIDELNICLNKYKKYDPQVKIIRDKVYLNSLFEIGSMRVRLAGCNAANVMFHNALQWIANKETLEYVRIISEFNDMIKKEKKKVEDFVDGDKISLSGNAKHLTKVKELTKEKNKMLWDTIVSKLKKLYPTGEGEKMKKLQGKNLGFPDVYQKLKDNEEKFLSLDIAKQIEVLTGLIQGMGCNAGAFDLSGLGLGKVGTIQPLRKIGKEIPLALILQSVTGLKEKRVIIKEAKE

SEQ ID NO: 4830 - protein, 1409 aa, unidentified
  REGION 1..1409: note = Description of Unknown: Cas Enzyme sequence
MSIINFPRRGLMEMQTSKQLISSHLKEYPIKDYFVGLDIGTSSVGWAVTNKLYELLKFRSHKMWGSRLFDEGESAVGRRSFRSIRRRLERRKLRLKLLEELFADAMAQVDPTFFMRLRESKYHYEDKTTGHSSKHILFIDKDYTDQDYFKEYPTIYHLRAELMKSGTDDIRKLFLAVHHILKYRGNFLYEGATFDSNASTLDDVLKQALEKITFNCFDCNSAISAIGQILMEAGKTKSDKAKAIERLVDTYIATDTEGTSSKTQKEQVKEDKKRLKAFANLVLGLSASLTDLFGSVEELDDDLKKLQITGDTYDDKRDELAKAWGDEIHIIDDCKSVYDAIILMSIKEPGLTISESKVKAFNKHKEDLVILKSLLKTDRSIYNAMFKADEKGLHNYVHYIKQGRTEETSCNREDFYKYTKKVVEGLADSKDKEYILSEIELQTLLPLQRIKDNSVIPYQLHLEELKTILKTCGAKFPFLNEVADGYSVAEKLIKMLEFRIPYYVGPLNTHHNVDKGGFAWAVRKASGRVTPWNFDDKIDREKSAAAFIKNLTNKCTYLLGEDVLPKSSLLYSEFMLLNELNNIRIDGKPLETAVKEHLIEAVFKQDHKKMTKNRIEQFLKDNNYIHNKHKPDITGLDGEIKNDLTSYRDMVRILGTNFDRSMAEDIIMDITIFGESKKMLRETLRNKFASHLDDEAIKKLSKLRYRDWGRLSKKLLNGIEGCDKAGNGTPETIIELMRNFSYNLMELLGDKFSFMERIQEINDKLTEGQVVDPHDIIDELALSPAVKRAVWQALRIVDEIVHIKKGLPSRIFVEVTRSNKTEKKKKDSRQKRLSDLYAAIKKDDALLSGLSNEEFGGLKSGLANYDDAALRSKKLYLYYTQMGRCAYTGEVIELSQLNTDNYDIDHIYPRSLTKDDSFDNLVLCKRTANAQKSDTYPIAEEIQKAQKPFWTFLKQQGLISERKYERLTRITPLTADDLSGFIARQLVETNQSVKAATTLLRRLYPEIDVVFVKAENVTDFRHDNNFIKVRSLNHHHHAKDAYLNIVVGNVYHEKFTRNFRAFFKKNGANRTYNLAKMFNYDVTCTNAKDGKAWDVKTSMNIVKKMMDSNDVRVTKRIYEQKGQLADINLTKASNVKADIYLPIKGNDLIMSQNTKYGGYSDIKNAYYTIIEYRDKKNNSIKSFLPIPIFIATKNLTNQALLEYIKTILPKANNLRIIYKKVYNDQLLKIDGFNYYLGGRSNDRFCIDNAIQLIVPLEMQFYIKLVEKFIAIISENKNIALKASSVKSRNPLNNQVENITLEYTQKLFDYLVSKFNEPIYLKMRGNKLTDIDNTGRKEFIKLSLDERCKALAELLNIFTNMNKKLSLSTINVSASRKVVNFKISSLDEFKIINESITGLYSNEITIVSNE

SEQ ID NO: 4831 - protein, 1398 aa, unidentified
  REGION 1..1398: note = Description of Unknown: Cas Enzyme sequence
MEMQASNQLISSHLKDYPIKDYFVGLDIGTNSVGWAVTNKSYELLKFRSHKMWGSRLFDEGESAVARRGFRSMRRRLERRKLRLKLLEELFADAMAQVDSTFFMRLRESKYHYEDKTTGHSSKHILFINEDYTDQDYFKAYPTIYHLRAELMKDSTDDIRKLFLAVHHILKYRGNFLYEGATFDSNASTLDDVLKQALENITFNCFDSTAAIGSIGQILMESGKTKSDKAKAIERLVDTYIITDEVDTSGKTQKKQVKEDKKRLKSFANLVLGLSASLTDLFGSVEDLDEDLKKLQIIGDTYDERRDDLAKALGDEIHIIDDCKSVYDAIILMSIKEPGLTISESKVKAYNKHKDDLVLLKSLLKADRKLYNTMFKSDEKGLHNYVHYIKQGRTEETSCNREDFYKYTKKIVEGLSDSKDKDYILSEIELQTLLPLQRIKDNGVIPYQLHLEELKTILDKCKSKFPFLNEVADGYSVAEKLIKLLEFRIPYYVGPLNTHHNVNNGGFAWAVRKASGQVTPWNFEDKIDREKSAAAFIKNLTNKCTYLLGEDVLPKSSLLYSEFMLLNELNNVRIDGKPLEPKVKAHLIKAVFKQDHKKMTKNRIEQFLKDNGYISKPHKPEITGLDGEIKNDLTSYRDMVRILGDGFDTSMAEEIITNITIFGESKRMLRETLRNKFSSCIDDETIKKLAKLRYRDWGRLSKKLLNGIEGRDKTGDCEPATIIKFMHNSSYNLMELLGDKFSFMECIQEENVKLTEGQVVNPHDIIDELALSPAVKRAVWQALRIVDEVIHIKKALPSRIFVEVTRSNKTEKKKKDSRQKRLSDLYAVIKKDEALLSGLKDTEVDGLKSGLANYDDAALRSKKLYLYYTQMGRCAYTGEVIDLSQLNTDNYDIDHIYPRSLTKDDSFDNLVLCKRTANAQKSDTYPIGEGIQKTQKPFWTFLKQQGLISERKYERLTRNTPLTADDLSGFIARQLVETNQSVKAATTLLRRLYPGVDVVFVKAENVTAFRHDNNFIKVRSLNHHHHAKDAYLNIVVGNVYHERFTRNFRAFFKKNGANRTYNLAKMFNYDVNCTNAKDGKAWDVKTSMDTVKKMMDSNDVRVTKRLLEQTGALADATVYKATVAGKAKDGAYIGMKTKASVFADVSKYGGMTKIKNAYSIIVQYTGKKGEVIKEIVPLPIYLTNRNITDQDLINYVASITPQAKDISMIYGKLCINQLVKVNGFYYYLGGKTNSNVYIDNAIELVVPDNISIYIKVLDKFDLLRKDNKELKASTVTTRIHSKESTSIVSITDKDGLIVYDYLMSKLRTPLYMKMKGNKVDELSSIGRSKFIKMSLEEQSIYLLEVLNLLTNSKTTFDVKPLGITASRSTIGVKIHNLDEYKIINESITGLYSNEVTIV

SEQ ID NO: 4832 - protein, 1408 aa, unidentified
  REGION 1..1408: note = Description of Unknown: Cas Enzyme sequence
MSIINFRRRGLMEMQTSKQLISSHLKEYPIKDYFVGLDIGAGSVGWAVTNKSYELLKFRSHKMWGSRLFDEGESAVGRRSFRSIRRRLERRKLRLKLLEELFADAMAQVDPTFFMRLRESKYHYEDKTTGHSSKHILFIDKDYTDQDYFKEYPTIYHLRAELMKSGTDDIRKLFLAVHHILKYRGNFLYEGATFDSNASTLDDVLKQALENITFNCFDCNSAISAIGEILMNAGKTKSDKAKAIERLVDTFITTDTEDISSKTQKEQVKEDKKRLKAFANLVLGLSASLTDLFGSVEELDDDLKKLQITGDTYDDKRDELAKAWGDEIHIIDDCKSVYDAIILMSIKEPGLTISESKVKAFNKHKEDLVILKSLLKTDRSIYNAMFKADEKGLHNYVHYIKQGRTEETSCNREDFYKYTKKVVEGLPDSKDKEYILSEIELQTLLPLQRIKDNGVIPYQLHLEELKTILKTCGLKFPFLNEVADGYSVAEKLIKMLEFRIPYYVGPLNTYHNVDKGGFAWAVRKASGRVTPWNFDDKIDREKSAAAFIKNLTNKCTYLLGEDVLPKSSLLYSEFMLLNELNNVRIDGKPLETAVKEHLIEAVFKQDHKKMTKNRIEQFLKDNNYIPNKYKPDIAGLDGEIKNDLTSYRDMVRILGPNFDKSMAEDIIIDITIFGESKKMLRETLRNKFASHLDDETIKKLSKLRYRDWGRLSKKLLNGIEGCDKVGDGTPETIIELMRNFSYNLMELLGDKFSFMECIQEINDKLTEGQVVDPHDIIDELALSPAVKRAVWQALRIVDEVIHIKKALPSRIFVEVTRSNKTEKKKKDSRQKRLSDLYAVIKKEEALLSGLKEAEFTGLKSGLANYDDAALRSKKLYLYYTQMGRCAYTGETIILSELNTNYDIDHIYPRSLTKDDSFDNLVLCKRTANAQKSDTYPIAEEVQKAQKPFWTFLKQQGLISERKYERLTRNTPLTADDLSGFIARQLVETNQSVKAATTLLRRLYPEIDVVFVKAENVTDFRHDNNFIKVRSLNQHHHAKDAYLNIVVGNVYHEKFTRNFRAFFKKNGADRTYNLAKMFNYDVKCTNAKDGKAWDVKTSMDIVKKMMDSNDVRVTKRLLEQSGALADATVYKATVAGKAKDGAYIGMKTKSSVFADVSKYGGMTKIKNAYSIIVQYVGKKGEIIKEIVPLPIYLTNRNTTDQDLIDYVASITPEAENISIIYRKLCINQLVKVNRFYYYLGGKTNNNIYIDNAIELVVPTNIAAYIKVLEKFNLLRKDNKEIKASTVTTRIYNESSTAIVSITDKEGLIVYDYLMDKLRTPLYMKMKGNKVDELSTIGRSKFTNMTLEEQSIYLLEVLNLLTNSKTTFDVKPLGITASRSTIGVKIHTLDEFKIINESVTGLYSNEITIV

SEQ ID NO: 4833 - protein, 1407 aa, unidentified
  REGION 1..1407: note = Description of Unknown: Cas Enzyme sequence
MSIINFPRRGLMEMQTSKQLISSHLKEYPIKDYFVGLDIGTSSVGWAVTNKLYELLKFRSHKMWGSRLFDEGESAVGRRSFRSIRRRLERRKLRLKLLEELFADAMAQVDPTFFMRLRESKYHYEDKTTGHSSKHILFIDKDYTDQDYFKEYPTIYHLRVELMKSGTDDIRKLFLAVHHILKYRGNFLYEGATFDSNASTLDDVLKQALENITFNCFDCNSAISSIGQILMDAGKTKSDKAKAIERLVDTYIATDTEDISSKTQKEQVKEDKKRLKAFANLVLGLSASLTDLFGSVEELDDDLKKLQITGDTYDDKRDELAKAWGDEVHIIDDCKSVYDAIILMSIKEPGLTISESKVKAFNKHKEDLVILKSLLKTDRSIYNAMFKADEKGLHNYVHYIKQGRKEETSCNREDFYKYTKKVVEGLPDSKDKEYILSEIELQTLLPLQRIKDNGVIPYQLHLAELKAILKTCGPKFPFLNEVADGYSVVEKLIKMLEFRIPYYVGPLNTYHNVDKGGFAWAVRKASGRVTPWNFDDKIDREKSAAAFIKNLTNKCTYLLGEDVLPKSSLLYSEFMLLNELNNIRIDGKPLETAVKEHLIEAVFKQDHKKMTKNRIEQFLKDNNYIPKKHKPDITGLDGEIKNDLTSYRDMVRILGANCDRSMAEDIIMDITIFGESKKMLRETLRNKFASHLDDETIKKLSKLRYRDWGRLSKKLLNGVKGCDKAGDGTPETIIELMRNFSYNLMELLGDKFSFMERIQEINDKLTEGQVVDPQDIIDELALSPAVKRAVWQALRIVDEVIHIKKALPSRIFVEVTRSNKTEKKKKGSRQKRLSDLYAAIKKDEALLSGLKDTEFDGLKSGLANYDDAALRSKKLYLYYTQMGRCAYTGEVIELSQLNTDNYDIDHIYPRSLTKDDSFDNLVLCKRTANAQKSDTYPIAEKIQKAQKPFWTFLKQQGLISERKYERLTRNTPLAADDLSGFIARQLVETNQSVKAATTLLRRLYPKIDVVFVKAENVTDFRHDNNFIKVRSLNHHHHAKDAYLNIVVGNVYHEKFTRNFRAFFKKNGANRTYNLAKMFNYDVTCTNAKDGKAWDVKTSMNIVKKMMDSNDVRVTKRLLEQSGALADATVYKATVAAKAKDGAYIGMKTKSSVFADVTKYGGMTKIKNAYSIIVQYIGKKGEVVKEIVPLPIYLTNRNTTDQDLIDYVASITPEAKDMSIIYRKLCINQLVKVNGFYYYLGGKTSNSICIDNAIQVLLSNEFLIYAKLLDKVNTLRKSNPSINIQNISTLSPFAKEQISITINDNLKFYDYLVEKLNSNIYIKMKGNKASDLIDIGREKFKGIDVSSQCILLLEILNMLTNMKTTYDIKLLGFSTSRTKIALKVSTLDEFKIINQSITGLYSSEITIV

SEQ ID NO: 4834 - protein, 1409 aa, unidentified
  REGION 1..1409: note = Description of Unknown: Cas Enzyme sequence
MSIINFQRRGLMETQASNQLISSHLKGYPIKDYFVGLDIGTSSVGWAVTNKAYELLKFRSHKMWGSRLFDEGESAVARRGFRSMRRRLERRKLRLKLLEELFADAMAQVDPTFFMRLRESKYHYEDKTTGHSSKHILFIDKNYTDQDYYKAYPTIYHLRAELMKDGTDDIRKLFLAVHHILKYRGNFLYEGATFDSNASTLDDVIKQALENITFNCFDCNSAISSIGQILMEAGKTKSDKAKAIEHLVDTYIATDTVDTSSKTQKDQVKEDKKRLKAFANLVLGLNASLIDLFGSVEELEEDLKKLQITGDTYDDKRDELAKAWSDEIYIIDDCKSVYDAIILLSIKEPDLTISESKVKAFNKHKDDLAILKSLLKADRSIYNEMFKADEKGLHNYVHYIKQGRKEETSCNREEFYKYTKKVVEGLPDSKDKEYILSEIELQTLLPLQRIKDNGVIPYQLHLEELKTILDTCKSKFPFLNVVADGYSVADKLIKMLEFRIPYYVGPLNTHHNVDNGGFAWVVRKASGRVTPWNFDDKIDWEKSAAAFIKNLTNKCTYLLGEDVLPKSSLLYSKFMLLNELNNVRIDGKPLETKVKAHLIKAVFKQDHKKMTKNRIEQFLKDNGYISKTHKHEITGLDGEIKNDLASYRDMVRILGTNFDVSMAEDIIADITIFGESKKMLRETLRNKFSSRLDDEAIKKLSKLRYRDWGRLSKKLLNGIDGCDKIGDGTSVTIIEAMRDFSYNLMELLGDKFSFMERIQEINAKLTEDQIVNPHDIIDDLALSPAVKRAVWQALRIVDEVVHIKKALPARIFVEVTRSNKAEKKKKDSRQKRLSDLYAAIKKDDALLSGLTNEEFGGLKSGLAKYDDAALRSKKLYLYYTQMGRCAYTGEVIDLSQLNTDNYDIDHSYPRSLTKDDSFDNLVLCKRTANAQKSDTYPISKEIQKAQKPFWTFLKQQGLISERKYERLTRITPLTADDLSGFIARQLVETNQSVKAATTLLRRLYPGVDVVFVKAENVTDFRHDNNFIKVRSLNHHHHAKDAYLNIVVGNVYHEKFTRNIRAFFKKNGANRTYNLAKMFNYDVKCTNAKDGKAWDVKTSMDTVNKMMTSNDVRVTKRLLEQSGALADATVYKATVAAKAKDGAYIGMKTKSSVFADVTKYGGMTKIKNAYSIIVQYIGKKGEVVKEIVPLPIYLTNRNITDQDLIDYVASITPQAKDISIIYRKLCINQLVKVNGFYYYLGGKTNSNIYIDNAVEVVVPANIAVYIKVLEKFALLHKDNNNIKASTVTTRIYNEGSTNIVSITDKDGLIVYDYLMSKLRTPLYMKMKGNKVDELSTVGRSKFMNMTLEEQSIYLLEVLNLLTNSKTTFDVKALGITASRSTIGVKIHTLDEFKIINQSITGLYSNEITIV

SEQ ID NO: 4835 - protein, 1321 aa, unidentified
  REGION 1..1321: note = Description of Unknown: Cas Enzyme sequence
VDKFKEKNKQYKIGLDMGVASSGWAVSDENGDLLKFKHQPMWGVRLFNEGETAESRRNFRTTRRRLARRIQRGKWLRSILGPEIEKMDPDFFKRMKYSSWSSRDAERNEIGELFDNGAYCSGFYQKAFPTIFHLRKELATNPEKKDLRLVYLALHHIVKYRGNFLYDGEMSIHEGINLASILDDFFASSNQEESVSPEKFSSIKDTILKVVKDQACDKQQEIYNVMQRLLGDDSKKYCMEFAKAILGKKADFSILFPVTGAEEENKFKLSDEEKCDEFSSSLDGRLLTSFQLLKKIHSAYLLASILSAKITTLSDVYINYYESYKKDLHILKHLLKKYCAPDVYHTMFYGTNTKDATYAKYQKNNSGNSSYDELMKKIKDILKKIDDPEAEIDKQYCLSRIKDGSFLRKPKNNNNGAIPHQLQVEELKEILEKQKKYYPVLAENEMKIIQIASFRIPYYVGPLSTAATQYGWAVRKENGPVTPWNYSEKIDVMSSAEQFINNLTNSCQYLYGEDVIPKNSLLFSEYCLLNELNGIRMNGYRLGADVKQRLLTELFTRTKHVTKSTICKCLFQNGFAKQERGLDITGFQKKNEFASSLSSFIDFTSIFGNVNEKNQEMIENCILWITLFSDKSILRMKIKKNYPELSSETVTAICKLNYQGWGRFSRKLLVGIKTMNAEGELLSVMDILRTTNLTFMEILYDRRFSFQEIIEKENAPKQKDISLSRYDSVFPDTPISPSVKKTTWQGLKVIQEIVKIMGKEPKQIYIEFTRSEGKKGKRTINRYDALEKMYKRIKDNPDFQKCWDELTSEKEQYKEQNGPLSKMKLFLYFLQNGKCLYTEQHLEISNLNQYQIDHILPQAYIKDNSIDNLALVIQKENQRKKDSLLLNEDIITKETPYWDTLKKNGLLSTKKYNALIRTDVPDEEFDSFVSRQIVETSQAIKLMSGILKKVYPSTNIVGVKAGLSHDFRIANGLYKIRELNDYHHAHDAYIACQVGMFLTGQYGQIQKMENVKRDFFVAVANQHDELLNFKEGFVAWSMSRDYGNWCGSQVVAKVRKTLRYHQYFISRKTEESSGAFYNQKMLPVGEKEKTTVPSKEGRDPLIYGGYSGEQLAYFDIIEFMKGKKKVSKLVGIPIRITALERTKPDSIKKYLNDNYPGARILKERICKYQYVLYHEKDGTVNEYYIVSDGEVINARELLLPWRYVANLASFDKLDEIGKQELFQVLCAKMKEYPCYMKHAVILEKHVGDFGNLSSDWQKKCIRGLLCYMQANSSRFDFSDKKGLNWNDVPTNRLQFILNPEFIEFVDKSVTGMFERRYQIGV

SEQ ID NO: 4836 - protein, 1323 aa, unidentified
  REGION 1..1323: note = Description of Unknown: Cas Enzyme sequence
MKKSKDVESYAIGCDMGTGSFGWCVTDENGELVSFRHQPMWGVRLFETGKTAEERRQFRSTRRRLARRVQRLQWLRDLLGSEVEKVDPDFFKRLQYSSVSPHDSQWEALRELFASDGYCSNLYEKKYPTIYHLRKALAEETQKADFRLIYLAIHHIIKYRGNFLHEGEMQIHGGVDLKSSVSALLSLVIDGDTEISEAVSSITDTLKDEKKSAFDKQKVIQIALQSVTDDQDKKFCAELSKAILGRSADYTQIFPTLGEKKISVSLDDEAACEQFSENLGDTELEVFQVLQKLYADYTLAMLLSGNVSTISDVYINRYNQHAQDLRTLKRIVRAKCPHETYHDLFNGKQSWYERYRLNNSKDSSYDNLIKSIKKILESIENSVHDDDVSYCMKRIEEGEFLKKPKSSENGAIPNQLHCEELKAILDHQKRFYPVLAENEQKLLQIASYRIPYYVGPLSPQATKYGWAQRKEQGPVTPWNFTDKIDVMASAERFITQRTDTCQFLYGEPVLPKNSLLYGEYCVLNELNGIRLDGKRLSVDVKQQIFHELFQTQKTVTKGTLSKWLYEHRYASHEKGLDLTGFQKEDEFASNLSSWIDFSRIFGGIREQDKEMIENLILWNTLFTDKKILKAKIRKSYPTLADPTVVAICRLNYQGWGRLSQKLLTGISTLDAQGRVWTVMDLLWETNQLFMEIIFDETYGFQQKIETANKQNKPETSLNAYDTAFPDVPMSPSVKKSAWQGLQVIREIVQVMGKEPKRIYVEFTRGDEEKKRTISRYYALEKIYKRLKDDPSFEKVYEELTSRKEEYKKQNGPLKIMRLYLYFLQNGKCMYSGQTLDIQRLGDYQIDHILPQAYIKNNSIDNLVLVKSKENQRKRDSLLLDDTIITKQKPFWKTLRKNGLISSKKFHALIREEVSENDYIGFINRQIVETSQAVKILSDVLKEAFPTTTVMGIKAGLSHDFRSQNGLHKVREVNDYHHAHDALLACQVGRFLAGPFGQMIKNKEAFIDFQNALQDDTSNARDEKYGFVIHCMSREYGSWHGYAVVEYLRKVFGYHHYFLSRKTEEMRGAFYNQMLMPKGEKGGATVPSKEGKDFVVYGGYSGENLAHFDIIEYSKGKKRYRKLVGIPIRIIALEETQRGAVTRYLSSLYKDPVIIKAGIRKYQYIRYPEKDGSLNEFYIVSDGEVINARELNLSQETIAHLALFDRLEVIEKQKLFKELCYKMKQYPCYQGIAEKLLLHVCDFGEMNSLQQKKCIQGILVYMQANSSRFDFGKEFGASWKNVSSNRLIKSLDPNQIEFIDHSVTGMYERRYHLGLSNRGDHKTC

SEQ ID NO: 4837 - protein, 1337 aa, unidentified
  REGION 1..1337: note = Description of Unknown: Cas Enzyme sequence
VKNKDSLKYYIGVDIGTNSVGWAVIDENGCLLNKGKHHLWGSRLFDQAQTAQARRGFRSTRRRYNKRRERIFLLQLILNDMVLEVDPSFFIRLGKTTVLDKEDKKELLKDDYKMNYNLFCDENYTDKDYFEEYPTIYHLRKKLCESDEKADPRLIYLALHHIVKYRGNFLYEGQELHLEPSNKEEDLKDLFEKLGKENDTTFSIDDEQIKFILQTVVENISRTAKVNNCMSKLELKSNDKKIVKEFLAGLVGNKFNLNTMYQNEEMKNGDEDIKLQFSDKSYEEKIGEYENILEEKIEFVNLMQQFYSWIELSKIVGSNSKITSISDAMVNIYDNHKEDLKVLKEIMLGIGRKEYNEMFRQSKKKIANYYSYINSMEVDGDRVDNFHKYVRKAIAKSEDSRKEDIINKIENETFMMKQTSKNNAYIPYQMQKDELIKILNHQEKYYPILKENRDKIISILEFRIPYYYGPLDGNEKFGWLIKKKGKENERILPWNHEEVVDVQATAAQFIRKLTNYCTYLPQEKVMPKKSLTCSMYEVLSEVNKIRVDGKLLDVVTKNKLIADLFLNKKIVKDKDVINWLKKNQLKVGEITGYQKEKAFSSSLAPWIDFKNIFGEIDDANYELIENIIEDMTVFNEGSILKERLKNIYKLDQNVIKKIMKLKYSGWSRLSRKLIDGIRADNRFGSSTSILDVMKESHMILMEIINDKELGFKQIIEKENFKNVSGSLTYEDIEKLAGSPALKRGIWQTLQIIDEIKHYMGHEPENIYIEFARNEDTKVRTTSRVKKLQSIYADINHQLDDHGKEVYKNLKSKDSNSTIDKRLYLYYTQLGKCMYSGEPLEIDQLSNYEIDHIFPRTLTSDDSLDNVVLVKKKENQRKLDDLVLPFDVRNKMEDFWKKLLDNGLITQTKYFRLIRNEFTQDQIDRFINRQLVETRQITKHVANIIEGCYLHTRVFTIQANLTHEFREKYGIYKNRNLNDFHHAHDAYIACIIGRYIQKRFPGLEAKFVYGDYIREFKKSKANIDNEKYGFIINSMKYSYVDEDTGEVIWNNDNLSKYLKCFNYRDVYATKKLDTNNNKLFDVKILPNDKNSKNHKTKAKVAVNKNRSNINKYGGFNTLKNDIVAVERRKNNKIERKLVNLPIMLRNSSNEEKCKFLLENGKYDSVKIIKYLKNNQLIEIDKTFYYLGSATELDTAYQLILSKKDTETLYHINESIKNNDFTYFDDKKEILDCLYQFVLKKLNENYPKYRKKIYKFMKERENEFFGLDNFLKCKVIFEIVQIMKRGNQYIDLPFEPYNLKRERIGRLNGQSISLETTYFYDVSITGIYSKKYKLLHGEQ

SEQ ID NO: 4838 - protein, 1347 aa, unidentified
  REGION 1..1347: note = Description of Unknown: Cas Enzyme sequence
MEQVEQEKCENKDYTLALDIGTNSIGWAVIRSDMRLFKKRMAVYNYTDGKIIGWKKRDLWGSLLYEKALAKDTSAKNTSTKDTPAKSARIKRASRRRLRRRKWRLRELRRIFEPEIKNIDTDFFDKLDKSFLNKSDTDVFKDKEQAERYKYPIFSDKLQERQYHKDYPTIYHLRKALIEKDDKADLRLVFLALSHILKYRGHFLLPGDPKNFSTKDILQVGEKYNEFLRSFCDKFNLQEVTVKDFDDNIIDAEKLNGILKSLKPKAEGENIEEAVNILKQLNNLILGKKEKILFGDEEIKLSFAADDAEIEMEKLSNCIWSELLIPAKALFFNLRLIDILKLNPQHAASTTTLFSATKVAQYNALDKQKQRCKDNACIPYQVQWLEMKEILEKQKKYYHFLAENEDKILQLLVCKIPYYVGPLIQANKNKSRFAWLVKKEQSGQIKQEITPWNLNETIDKEKTAQAFIDKLVGKDTYLPNERVLPKASLIYQKFCILNELTKVRYKNDEDKWDYFDKNCKEKIIQGLFCQYKEVSEKRLRSFINKNLNLTKNSEPEIRGIDGKFNSQYLTYIDLKNAGIKDDFLKVDENPDENADENIDKLEIIENIIQILTVFEDKEIRKEKIKKVCQAAGIEDKVADKLASKHYKGWGNLSKKLIYDIRTTNEGKNIIDLLLEGNRNFMQLISDEKLPFAKEIADAKLDNQKLSREEWLNSLCVSANVKRGLRLCDKLIDEIKKVMGSYPKTVVIEMAREHQDTVKTDSRYSKVSKILQGLKKEEMPKQVKENLKKYQENQSALLNDKIYLYFLQEGKDLYSGEPLDFDKISSGNNNDYQIDHIMPRCKIKDNSLDNRVLTHTANNQNKGAERLDEKIINRNKPLWQALLRKGFMSKRKYDLLTNPAFCKREEENFAQRQLVETRQITKNLADYLHTKFDILGSNKTKICMPHAKLVSNIRNELKLYKIRELNDMHHAQDAYLNGVVFLEPSIASKYDYKCYYKDSKQRASEKKQEEIDTINKLIESLAKKKNLLMDVLNKSQVNVVKHPAFASGKFWDETIYSKSSTEKEKRIPIKKDMNVKLYGGYKSTKYAYFALVKEIEENNELELEAIPIADRKIYEQNPQQYLEAKSGKGKKIIEKALPYNTLFEYANKNSALRWKDCQRFYLSGAGEMHNARQFVLPPALSELLYCIAKIYDANAASPQKGNFEVDEYLWERFKKQANQLDNLYKSILEFLEKYKLVKSQKRDLLPSICTELSNKAKDLVNASAYDYQKEDFKDIINKTMELLKLTTAAKAVGKLKYLFVGYQVRYNGTDMPTSTEIQKNGFRIIFQSLSGLKEVVYDPFPQLEEEKN

SEQ ID NO: 4839 - protein, 1349 aa, unidentified
  REGION 1..1349: note = Description of Unknown: Cas Enzyme sequence
MEQVEQEKCENKDYTLALDIGTNSIGWAVIRSDMRLFKKRMAVYNYTDGKIISWKKRDLWGSLLYEKALDNKRTKETPAKSARIKRASRRRLRRRKWRLRELRRIFEPEIKNIDPDFFDKLDKSFLNKSDTDVFKDEEQAERYKYPIFSDKLQEKQYHKDYPTIYHLRKALIEKDDKADLRLVFLALSHILKYRGHFLLPGDPKNFSTEDILQIGKKYNEFLRSFCDKFNLQEVTVEKDFDVNIIDAKKRKDIFDEVVESLSKQEGENIEEAVNILKQLNNLILGKKEKFSLGDEKIELSFDKDDAEIEMEKLSNCIWSELLIPAKALFFNLRLIDILKLNPQHAASTTATALFSAAKVAHYNELDKQKQRCKDNACIPYQVQWLEMKEILEKQKKHYHFLEKNEDKILQLLACKIPYYVGPLIQANKNKSRFAWLVKEEQSGQIKQEITPWNLNETINKEKTAQAFIDKLVGKDTYLPNERVLPKASLIYQKFCILNELTKVRYKNDEDKLRYFDKDCKEKIIQGLFCQYKEVSEKKLQSFINKNLNLTKNSKPEIRGVDGKFNSQYSTYIDLKNAGIDDDFLKVEDNTGKLEVIEKIIQYLTVFEDRDIRKEKIKEACKEAGIKDEVADKLVAKHYKGWGNLSKKLIYDIRTTNEGKNIIDLLLEGKHNFMQLISDEKLPFAKEIADAKLLDNQQLSREEWLNSLCVSANVKRGLRLCDKLIDEIKKVMGRYPKTVVIEMAREHQDTVKTDSRYSKVSKILQGLKKAKEMVPEQLEKNLKNYEKNPSYLLNDKLYLYFLQEGKDLYSGEDINFGKLLTGNDYQIDHIMPRCKIKDNSLDNRVLTHTANNQNKGAERLDEKIINQNKPLWQVLLQRGFMSKRKYDLLTNPAFCKREEENFAQRQLVETRQITKNLADYLHTKFDLNGAKNTKIFMPNAKLVSNIRNELNLYKIRELNDMHHAQDAYLNGVAVLKLNNASKYAYKCYYKDSKQGASDKKQEEIDTINKLIKSLESNRGNLIKVLNESQVNVVKHPAFASGKFWDETIYSKSSTEKEKRIPIKKDMNVKLYGGYKSTNNAYFALVKDEESDKLELESIPIVDRKIYEQNPQQYLEAKSGKGKKVKVIEKALPYNTLFEYANKNSALRWKDCPRFYLSGEREMHNARQFVLLPQFLELLYCISKIYDDNQGKEKFEVDEYLWEMFKKQVNQLDNLYKSILEFLEKYKLVKSQKRDLLTSICTELSNKAKDLVNANAYDYQKEDFKDVIYITIDLLKLTTAAKSISILSTMFCKKLGEKSKNNAKNKPASNRVRYNSMPTSQTNGFRIIFQSLSGLKEVIYDPFPQLEEEKN

SEQ ID NO: 4840 - protein, 1338 aa, unidentified
  REGION 1..1338: note = Description of Unknown: Cas Enzyme sequence
MGKSSPSSYSIGLDIGVKGVGWDVIGADGLHIKLKGRPAWGVRLFDEGNHAADRRVKRSGRRRYVRRRHRLNMLQELLGSDMQEVDPLFFRKMKESALWDEDRQIPNGLEVLLRDIVVDGEPYHKKFPTIYHLREYLMETDKKVDFRLVYLALHHTMKYRGNFLYEGQPLSAKGNLEEEIREAINTYLRFIDPNSEKGCTEGVIRSITAAVADTALGRMDTRNTIRDLLVKEGCDRTLATEFGKALAGSKIDAVKLFMLEGVEKIEIALSSENLEDDIALVPNEEAQIILELLGRAYSASVLDEILGGCDSISKSMIKRYSEHAKQLRSFKQLVRDYAPERYSEMFRKEGGGLKNYSNYIIGENSTRKDFERKAYACSRDDFLAAAKKLLESMPEDVHVDARHQELLQAINSGTFLSKLRTRKNGAIPYQLHSQEMSRIIELQSAHYPTLKAGYAGGTHRLIQILEFRIPYFVGPLSYNPNASESDRFDWLTRRIQGEKITPWNFDEVINREQTAEDFITRMTGTCTYLLGEDVLPKHSVLYQDFELLNELNKISIDGKPIAIDVKKKAFDELFMRQKRVSHKAFADWLIRENHHPRDTAVKIAGTQKESEFACSRSTLIDMQKIFNGKAEENIGRCEDIILWSTLFNEESMVEAKIRREYPEVTDVQFKAIKKLRYKGWGRLSQKLLSGLKVQDRSDAKVSIISLMRDTRMNFMEIVNAKEYDFAKLIEQNNEESLVANLNFSPKLLDDIVASSAVKRGIWQALLIVKELTQVMGAPPENIFIEMARGDEAKHRTVSRYARLKNLLKALDEDLEYSAILKEFNAKSKNQKAFDNRSLYLYFMQLGKCLYCGKGLDVERLNIYQVDHIIPRSLTKDDSFENLALVHQECNQTKGDSLTINADVRHKMGAFWRMLEGKRLMGSKKYCNLTRCEFKERDIERFVARQLVETRQINRRVVEILHVLYPESEIHGIKAGVVSDLRKRLALPKIRELNDTHHAMDAHLTALMGLFIQKCYPGWRSESSYGEYMKFARTERKSRFGMFVSQFPKTHADTTTGEILWDGEVLERTLRNLMEEKRYFITKRSSAKSGAFYDETVYASPQNDATARKLIPKGKGLETSKYGGYSGERESYSVLIEYQRTTKNRSMRLVSIPVRIAMLGKSAVGDFLQQNYSDCRIVRDNIKAGHQIYCNGNPLYISSANEAHNARQIFLSYEEQKQLREVLNEENPAGELDKEALELCKAIAGIIEGCYPIYKNIGTRILSDLETFENLEPEEKQEFLLELLRVTAASPGNGNFSKYKVGGLKGRVGRLSRFTFGGFQDMEFLDLSITGIYEGRFRV

SEQ ID NO: 4841 - protein, 1339 aa, unidentified
  REGION 1..1339: note = Description of Unknown: Cas Enzyme sequence
MGKKSLENYSIGLDIGVTGVGWSVAHSDGTLAKVKGKPAWGVRLFEEGSHAADRRMKRSARRRYVRRRHRLNMMQEMLSANMQKVDADFFRKMKESALWEEDRQAQNGLALLLKNVSVDGEPYHKKFPTIYHLRKYLLETKEQADFRLVYLALHHIMKYRGNFLYEGQALSAEGNLEEEVREATNAYFRFMMPNDDRDCTEETVKAIKIAVADMSLGRMDTRTVIRDTLVAQGCERISAAEFGKALAGSKFDATKLFSFEGVEKTELALSSEDLESDIAQVSDEDAQVVLELMGRAYSASVLDEILGGCEGISSAMVKRYDEHAKQLRDFKDLVRDFIPDSYNEMFRKEGGNLKNYPNYIIGENSTRKDSERKGYACKREDFIKAAKSLLEGMPEEAHANTKHEKLLAAIESDTFLVKLRTRKNGAIPYQLHSQEMDTIIENQSVYYPALKAGYVDGEHRHRLVQILEFRIPYFVGPLSYNPDALESDRFDWLTRRVQGEKITPWNFNEVIDREQTAEDFITRMTGTCTYLLGEDVLPKHSILYQDFELLNELNKVSIDGKPISVDVKKQAFNELFTSRKKVTHKAFADWLINENHHPRDTSIKITGTQKETEFASSRSVLIDMQKIFDGKAEENIGRCEDIILWATLFNEKDMLKAKVERGYPEITKPQLKAIQKLRYKGWGRLSKKLLSGLRVQNRFGEKVSIIKIMCDTRMNFMEIINAKEYGFAELIEQTNEENIGINPTLSPKLLDDLVASPAVKRGIWQALLIVKELVQVMGAPPENIFIEMARGEQEKKRTVSRYNRLEELLKAVRSDSDYQDIIAEFDARKGNQKAFDDRALYLYFTQLGKCLYCGKDIHIDRLNRYQVDHIIPQSLTKDDSLENLALVHSECNQVKGDSLTINDDVRHSMGWFWRTLQGKKLIGSKKYNNLTRHEFNEHQIERFIARQLVETRQINKHVVEILHTLHSESEIHGIKAGEISDLRKRLALPKIRELNDTHHAMDAYLTALMGLFIQRRYPKWRSESNHGEYMKFAQNERKSRFGMFVNQFPKSHVNTETGEIIWDGEELERSLRKLMEEKRYFITKKPSTRSGAFYDETLYSPDAGIRALIPKKQGLSVEKYGGYSGGKESHSVLIDYQKSAKKRKVELVSIPVRIAICGTHATNSFLQQNYSDVRILRTNVKAGQALYCNGSPLYISSANEVHNARQLFLSYEDQKCLSDVLKEESPSDNFDEQAIRLYELLANTIERYYPIFESTGSRILEGVEDFALLTSEDKQRLLQELLKVTSANPSNGNFARFRVGTLRDRMGRLARFTFGKFKDVEFLDQSVTGVYEKRYRAPN

SEQ ID NO: 4842 - protein, 1327 aa, unidentified
  REGION 1..1327: note = Description of Unknown: Cas Enzyme sequence
VKYSIGLDIGTNSCGIAVINEENKLLKAKGKNIWGAVKFDEGQTAKERRSYRGARRLQVRKKRRIRLFREIIEKEIYNVDTTFFHRLEDSFLYQEDKRNTSSKYNLFIDENYNDRKYFEEYPTIYHLRKRLITDPSQCDIRLVYLAIHHILKYRGNFLCEGQGFEEISSSGTILLDELFELYSRNYEVNINLNPSKIINILEDKKKSKKDKVKEICEIQGVNSLNKATVKELANGFVGLQMDLKKIFLDVEFEDNNKIKLSDSTAEDKYVALEDVLGEDFIILEKIKKIYNGIQLKEILGNKQDGSPNASISEAMIVKYEKFRSDLVLLKKVIKENCPGNIYYEIFRSKEKEIANYENYVNNKIKAKVGSDNRKTFYDKIKKVLSTKENEDISYILREIDEERFLVKLNTRDNSIIPYQLHEIELSKIIDNQGEYYPVLKDNKDKILKILNFRIPYYVGPLNENSKFGWLQRQRGEGKVRILPWNYENVIDIDATAEKFIERMTNYCTYLPDEKVLPFNSIIYTLYLYYNEINKVEFNNNQLDKTEKEKLKNEVFLQNNIVTEKKLKEWYVQQINRSFSDITVTKLQGEGKANVTLKPIRDFNRIYGKITEDNIIEIETIIYWLTVYEDKKIVARRLRKELNLSEEKVKEILKLKYSGWGRFSRKLLEEIKSVNDSYCKKSILEVLRDTNLNFMQIINDDYYGFNKIIDEINGSDKIEKINFEIDIKPLQGSPSLKKGVGQAVKQIEEVIKLIGDTPQNIFIEFAREDQESKRTIARREKMLKLYEEIEELGSGDKEIIKILKDSKTKIDNERLYLYFIQRGKCMYTQEPLNIDELQHYQTDHIIPRSLIKDDSLSNKVLVKGMENQNKSDRELRSDIISRNKEWWGDLLKCNLISKRKYDNLVHGSQNLKEKVEKDFINRQLVEVRQISKHVTNLLRRAYGHKGTNVVAIKASLVDDFKSQYNIYKSREINDFHHAKDAYIAAVVGQYILNRYPSMKAEFIYDDYLQYKITEKDKGRDKYGFIISSMKRNFYDSDTGEVLWDANEMINNVNKVLSYNDCIITRKTEVMNGGMFNLTRMPKGEKEKLTGKEVPLRNNKNIFLPPEKYGYYNGVQESYYSIIEFTDKKKRVKRLVGVPIMVNSRLKNSKDGLYEYFSKIYKDVKIIKERIPKYQKIRVDGNEYYIVSSKEWCNSTQLILSKDTYKNIARFNKKDYFNKQPQKVLDENLNKAYEELIIKIQTVYSMYGSALKKLVEGKETFKELEPSKKLQVINEILKLTKADSQCGNFKLVGGTDREGRINGKENIDVNKIIFIYESPLGINRREVQY

SEQ ID NO: 4843 - protein, 1380 aa, unidentified
  REGION 1..1380: note = Description of Unknown: Cas Enzyme sequence
MDKYQLGLNITPDKIGYAIMDNRNNLLKPNGAKAGIGERLFIPGEVAEPTRLLRSARRIKRRRQWRLTCLEQEFKPELYKVDPAFLYRLKDAWLSRSDVRRNRRQNLFANVVTEAQFYKKYPTIYHLQVDLINHPEKKFDLEYIYLAIHSLIKKRGNFLSSTPVDSYKASKFDTTSAYKQLNKAFKAIGYPFVKLAVQYADSGNDILLSDSLFKTNKIKKFQEIVVEEPKKKTDATQSKKVTRQLLNALLNSPTRFDILLNAEVEDDLNWKFTLADEDVDEKVSYIKQSLSDEQIEILDLLIDWHNYIELHQLLNGATTIAEAMVNIYDKHGQDIKLFNKYRLTVNNETAKSLKNLYLSYANGSRNNRDVKKAVGAKSLSREDFYDKITKIIKKQPENELSKQILAEIELGNFLPKITDKRNAAIPYQLNALELNKILKNQGKYYPFLIKPNPSQNKLDQKNAPYKITQLLTFKVPYYVGPLAKNEKNPHARFTWVVRKEAGQVTPWNFYDKIDQVKSADNFIKRSIGTDTYIFNEPVLPKSSLYYDEFSVLNELNSIKLNGDKIPVKLKQAIYENVFKKYKKVTVKKLKDYLIKNHDFKIVQVRGLADQTAFTSSLTSYHALKDILGEKVNEAKYNDDLEKIIEWSTVFEDRNIFYIKLNEINWLTELERQKLLAYRFRGWGNLSKKLLVDLKPTASGNVLDQLWKSKKTFIQIISQDSFKAAIDQNNVMVSKKLNDEELINNAYTSPANKKALRQALKVVKDVINTTGKIPDIISLRFNRGRSTETELSLNRQRQLIRQYNLIKDDLLNSELKKNLKQASNKRILTDKEYLYFKQLGRDAFDGSPLDFDKIKTYHLSHILPANYVPDDSLNNLALTTQSNSIKKGSQFANIFAQNIISNLNISVRNFWDKLVELGLIAKSKLYNLITDPDAINKTGRNKMIAHQLTGNSMVIKLLATILQAKYPNIKVIEVRNNNISQLRKCLNLLPLPSINDYDIGLDAYISAVIGNYLYNVYPKLRPFFIYGQYLSPDNEKNSPDFDIRSFNFLWKIMYGKEEDIYISGTHTPVFNRQDIIDKLKRAYHFKYQNVSQETFIKHGALFDQTIYPNPDHDLKRRSKLIRMKNDRPVELYGGYSSQKSGYFSLVRIEKKNGSFTNKIIGVPQMETDKLNKINDAKKYHERLYTILEPIVMTSETGKPVKNISNFKIIKAKIPYRQVIEDEGAKYTLGSAKYMYNFKQLYLSQEIRQIIADYVEDPNFRRHTRTIKLENDATISEKLNKVFEAILDQINTNFVLFNKARVKDKINEGSHKFYQLGISDKIIVIKNLLIACHANASAGYMKQINVNNTNINTIVTLTDSAELIYQSPTGMHEVKRKISDLF

SEQ ID NO: 4844 - protein, 1350 aa, unidentified
  REGION 1..1350: note = Description of Unknown: Cas Enzyme sequence
MQKNYSIGLDIGVSSVGWACLTPDYQILRFNNRYAMGVREFESAETAENRRIQRGTRRRYNRRIKRIQLLQETLAPLFKNDPNFINTTNAKEKHHWRNNNDFEKNSLSEILISLNENPRTYPTIYHLRDALVKSNEKFDPRLIYLALHNLVKYRGHFLNENMTWNNSLKTNELTGLLKDFFSEIGKHGYEIEKFENQIYIDIVTIIENKELTNSDKRNAIIRIIGKNFREPVTLLLGLSTNMAHLFPHSDNVIVYKEEKLKISFEKENVEEVVDKLTDEEKLIIDKAHVIYQNNLLKDLLGNTHYVAAAKVQAYDQFGKDLKWLKALYNDHFGEEGYRSMFITPRKNQTEYNKNRKINLLCEFDRFLKVKSKYEEKFYSGLLKKLNLLVKTGNLSITQSKEVNEVIERIKRDQFLRKQKNQMNSSIPYQNNVYEAINILKNQQKYYLEITNEMIEKVKEIISFRIPYYIGPLISNEENAKFGWAQRKEDGNIKPWNIEKIIDRSQSAENFINRMTSYCTYLTNEKVLPKHSLLYQKFEVLNELNGIQIRSSHELPNQKHRLEANEKKWIIENVFTKYKTVTHKRLKNELKKSSFKHLILDNNTGGLKEIYGTQKEDRFASSLSTYIDMETLFGPLKSVDKEMLEKIVYWISVFEEKEIIKYKIRENFPKVNQKQINQLINKNYPGWGRLSKKLLNELPADKENGLTIIDVMEQNSMVFMEVLSEGKYDLENRITKLNSQSDESYTRIKYKDIEQLQGSPAVKKGIWQAILIIEELVDIFGEPKNIMIEFAREDGQSRRTQSRKKQISDWHRAINKGEKDLKSFLKEHSQYEEAKYRNNRLYLYVTQQGKCLYSGEQLNLSQLQNYQVDHILPRSFVKDDSIDNLALVTTTMNQKKSGTKMPLEIIPKDKVYTQKAQWKKLFENKLISQRKYQRLLKESFSEQDKESFFARQLVETRQITKHVKDLLNERFEHTEIHTVNANIVTGLREHSDVIKLRNLNNKHHAVDAALAALIIQFTINKYGSNFLNFNFKYQEARKKWRKVFTKYHKSFFLFGDIDKYEKFTHYQTGEILSGRQYLAILNNEMPWQTTKKVGSSEEAFYDQTLYSPNDVKGRKPQYSSSKIEKGVHSSLKVDSSYLISYKYLNQKGQEKVNSEIVNYLVIERYQNVNFSQNDLALFLAKKVVKGTVISAKIHTRILKHQLLMNEKHPLYFVSEREMNNAKQFRPSRELMKRIHHINTKLIDKDNVKESYFKETFQLIIEDVMLQYKHFLPESRIHNMKEYVKKVKNIETFNYGLNEVYKMASASAARSEVFGGRYERKLDPKKVKFIYQSITGLRYRKPKSFKNELWFK

SEQ ID NO: 4845 - protein, 1357 aa, unidentified
  REGION 1..1357: note = Description of Unknown: Cas Enzyme sequence
MQKEYSIGLDIGTSSVGWSVIDSNTYKVIKKNTLINHYNLNTSEETKEIKEKALWGVRLFEEAETAVNRRMARSTRRRYDRRRKRIKLLQEIFKNEINKVDNEFFEKLKTSFYSPEDINNIKINLTDFDKKNIFSNNKRNGTPKKYPTIYHLRNELVNNPEQKDIRLVYLAHHHIIKYRGNFLYNNDNFKVNDINIADKLKEAFELIDDKELFTLNTENDYKNLESIILGKSKNDVNVNLKKEFKNIIDDSKIADELVKLIIGNKFNVLTIFGLEKEEDCIEKISFNGSEYDDNYDKLSSQLNDKIEILEELKELYDAIFIKKMFNSENATTISALMVEKYDKHKKDLKELKSLLKENKNEYKRIFKSSDKEKCIYEKYVDNNIEYNDFKNEIKKALEKVTNLDLANKILKELNDETYLPRITSTDNGKYPYQFNKEELRKIIEHQSKYYPFLKNEVNGINKLEKILSFRIPYYIGPLNNRTNNKDIENPNAWLIKKDENKPISIYNFDEVIDKEQTAEKFIERMIKNCTYINNEKAMPINSIFYSRYKVISEIKQISVKANNQIIRFDKEQIENIYTDLFLKREKVNRKDLENYLRQDSFFRSIGDFETSGFQGKDRFVSSMKSYIDFFGENGLFNNTDYDLNDAEDIIKDVTIFEDKELLRTRIERKYPELNSSRICKLKYSGWSSLSKKLLDEIYYINPESKERKSIMDLLLETNENFMQILNNKKYHFQDEINKLNVITENEKINYELVKNLATSPKNKRGIYQALKIVEEIVDFMGYEPKNIAIEMARGDEEKKRTSSRKDQLKSIYDNIKGQVENYKELNKELNEIPDDQITEKVFLYFIQLGKSLYSGEKLDINRLNEYEVDHIMPQSLIKDDSIDNKALVLKEENQKKRDSLVLPKEYCDKCTKWWTHLRKCNLISAKKEFALTRKEYTKDQIEGFINRQLVETRQITKHVANILNNFYKKTKIIYLHANLSHNYREKFELYKYRDLNDYHHAHDAYLAVCLGIYQDKYINKNIDFNELKELSKQLYKNEQYKELKYGYVINSLDNNIRNVNIKTGEVFDNINFNKTIENTLYRNDIIISKKTEIKTGEFYNQTKNSKGLAGVELKKGLDTKLYGSYTSLNPSYAVVVKYYKGNTINQRMVGIPILIDTKLNSDPSVIDNYVKSLLNIKKDESISYVLDRENKILKIPFFTKMKWNEQICSLVGATDKVEVCNAKEFKINKLNLKKWKYTLNILLNKKKKSNTFDYNKYENDLKEILNYIYEKVENEYNLYFNLTSELKDIIDESLISIEYEEKAIIELLKLLKFNSQTANFKHINHSTAFGRKEKRIIDHATLITQSVTGLKERTYEF

SEQ ID NO: 4846 - protein, 1322 aa, unidentified
  REGION 1..1322: note = Description of Unknown: Cas Enzyme sequence
MKQNCKYNIGLDIGTTSVGWAVVKTETQKIVRKGNKYLWGVRLFEEANTAAERRQARSVRRRYERRRNRIKFLREEFQDEIYKVDPSFYKKLDETFYHKDDKINKTINISKEEKLMADQYNKKYKTIYHLRNKLVTNEEKEDIRLVYLAIHHIIKYRGNFLYPGNFSVSNLNLEDKLIESFSVIKDMCSNLNIPSDYFDYIDITKLTNSLLNTSKNDIKVNVSEILSGLDKTFVNEFIKMINGNNFNFTKMIAIQEDDNKVELSFRGSDYDDKYSEYEKSLGEKIEVLDILKQLYDGLFLKRLFKGSDNTNISSLMVEKYNNHSKDLRFLKDLLKEDRSLYRKIFKDENCFYAKYVSNSISYDDFIKEIIKYIPDDVDPDILKSIENGMFLPRITDKDNGKYPYQLNKEELIKIIENQGKYYPFLLEKINNTYKIVKILEFKIPYYVGPLAKDGRSDFSWLIRKDDKVKITPYNFDEVIDKDKTAEKFITRMISHCTYLLDEPAMPSSSILYSKYKVLNELKQIKVNGVKLTKNLQDKIIDEFFKKNSGNLTDKKFKEYLYTLKDFDMYGTDIQVTGYSADGKFANNMNSYVDFFGDNGIFDGTQYDEENADQIIEWITIFNDKDILEKRVRDNYPNISNEGIKKILTKNYSGWSSLSKRLLTEKYYVDKSSGISKSILDLMEETDKNFMQIINDNEYNFQRMIDQYNKIDSSKKIDYSLVENLATSPSTKRGIYQALKIVKELTDYIGYDPESIMIEMARNDDKKERKVDRKKYLANIYMNAKNEIYNYNVLMEQLDEQEKITLKLFLYFIQEGKSLYSGKPMNIEDLDSYEIDHIIPRTLVKDDSIDNKALVYREENQIKAASFTLPKEYLTNTNKAWWSHLKKIGLISPKKFHNLIRKEYSDEDIEGFINRQLVETRQITKHVANILGNYYENSKIVYLNANFSHNYREKFELFKFRDINNYHHAHDAYLAAVLGEYKEKYFRKHINYDLIKELNSILKENKDYKNLRFGYVVNSLNTKMNSILNDIVETKVDEEIGEVLFNADEFNKKVENTLYRNDILISRKTEIRTGKFYKETILPHNHVKVNSGIRLHDTLPVDKYGFYTELKFTYLALVSNTHKCYVIGVPLMLDSTEKINNYLASRIKCNINDLKIIKTIIPFNTLIKYNGQEVYLTGNGELMNAYEIKINKENMKKWKYTLNLILNNKSIPKYDNKPIIADDEVDLQMNDIIEFLLSLECKIPLYKSSINKVKNINITFLDFDTKKKLVLELFKMLSSSKNNADLKFIGGTEREGRLTFSNINNGVITFKSTTGLKESKYEF

SEQ ID NO: 4847 - protein, 1375 aa, unidentified
  REGION 1..1375: note = Description of Unknown: Cas Enzyme sequence
MQKEYSIGLDIGTSSVGWSVIDSNTYKVIKKNTLINHYNLNTSEETKEIKEKALWGVRLFEEAETAVNRRMARSTRRRYDRRRKRIKLLQEIFKNEINKVDNEFFEKLKTSFYSPEDINNIKINLTDFDKMNIFSNNKRNGTPKKYPTIYHLRNELVNNPDKKDIRLVYLALHHIIKYRGNFLYNNDNFKVNDISIADKLKETFELIDDKELFTLNTEIDYKNLESIILGKSKNDVNVNLKKEFKNIIDDSKIADELVKLIIGNKFNVLTIFGLEKEEDCIEKISFNGSEYDDNYDKLSSQLNDKIEILEELKELYDAIFIKKMFNSENATTISALMVEKYDKHKKDLKELKSLLKENKNEYKRIFKSSDKEKCIYEKYVDNNIEYNDFKNEIKKALEKVTNLDLANKILKELNDETYLPRITSTDNGKYPYQFNKEELRKIIEHQSKYYPFLKNEVNGINKLEKILSFRIPYYIGPLNNRTNNKDIENPNAWLIKKDENKPISIYNFDEVIDKEQTAEKFIERMIKNCTYINNEKAMPINSIFYSRYKVISEIKQISVKANNQIIRFDKEQIENIYTDLFLKHEKVNRKDLENYLRQDSFFRSIGDFETSGFQGKDRFASSMKSYIDFFGENGLFNNTDYDLNDAEDIIKDVTIFEDKELLRTRIERKYPELNSSRICKLKYSGWSSLSKKLLDGIYYINPESKERKSIMDLLLETNENFMQILNNKKYHFQDEINKLNIITENEKINYELVKNLATSPKNKRGIYQALKIVEEIVDFMGYEPKNIAIEMARGDEEKKRTSSRKDQLKSIYDNIKGQVENYKELNKELNEIPDDQITEKVFLYFIQLGKSLYSGEKLDINRLNEYEVDHIMPQSLIKDDSIDNKALVLKEENQKKRDSLILPKEYRDKCTKWWTHLRKCNLISAKKEFALTRKEYTKDQIEGFINRQLVETRQITKHVANILNNFYKKTKIIYLHANLSHNYREKFELYKYRDLNDYHHAHDAYLAVCLGIYQDKYINKNIDFNELKELSKQLYKNEQYKELKYGYVINSLDNNIRNVNIKTGEVFDNANFNKTIENTLYRNDIIISKKTEVKTGEFYNQTIYSRNNKNAHYKIKDNLPVELYGGYDQLKYSYMALIKYNKKTKLIGIPIQLCVKKDKDNQITNYIKTGLNINDYTIIKTDIPLNQPMIYKRQKVEITGCGLKGAEVINATELQFTRAEQEKYKYLLNFIFNNHYPAYNKELNISYDEFKSKCEEQFDILINDLFNDILEKISKHYYLYNSIYNNLLIVNNNNEFKELQLENDKTIKTKQISKVQVIKELIQLLKYSSDNADLELLSKTVKFSDRVGRKSGTNIDHATLITQSVTGLKERTYEF

SEQ ID NO: 4848 - protein, 1021 aa, unidentified
  REGION 1..1021: note = Description of Unknown: Cas Enzyme sequence
  MOD_RES 120: note = Any amino acid
  MOD_RES 130: note = Any amino acid
  MOD_RES 134: note = Any amino acid
MSQIWGSYQVNGVLNKDDFYKIIKNNINDSESAKIILKEIELDSFMPKQRTNQNGVIPYQLHQIELDKIIKNQSKYYPFLAEKNPVIDHQKQAPYKLDELVRFRVPYYVGPMITASDQEXTSGKNFAWMXRKEXGKITPWNFEQKVDRMASANKFIKRMTTKDTYLLGEDVLPANSLLYQKFTVLNELNNIRINNRRISVDVKQDVYANLFKKYKTISSSKLSNYLKNNYKLKFVKINGLSDKSNNPKFNSSLATYYQLKHLNILGNKIDDPNYQKDLEHIIEWSTIFEDKSIYAAKLKTIDWLNVEQIKALSNLRYQGWGRLSHKLLTGLHDKNGQNIMEKLWDSQKNFMQIVKEPDFKTAIEKENQSVVKATDTEDILANAYTSPANKKAIRQVIRVADDIVKAASGKAPAQFAIEFARESEKNPKLSQIRGSNLRKSYEKVFENSANKLVDVSLKEELDSSIKSRKLVRDKYFLYFMQGGRDAYTGERINIDEVDTKYQIDHILPQSFIKDDSLNNRVLTLAKINNEKSDQLPFNYSNRPADKGRLGMTMHKMWHEWLELGLISKYKYRNLILDPNQVDKYQKSGFINRQLVETSQIIKLVATILQAKYPDSEIIVIKASYNHALRDRLNLYKNREVNDYHHAIDAYLTTICGNFLYQVYPDLRPFFVYGQFKKFSSNPDLEKQALKKHKKFDFIWPLLKKKDAPEEIHQFKMGPVVFHKHEDIFNKLRRAYTFKYMLVSREVTTRDQEMFKMTLYPRADHDTKKSRKLIPKAKNMPTNIYGGYTSNSDAYMALVKIKKGQIFIYKVIGVPMRALSKLKIAKKQGKYDQVLKDVLTPVIMLNKNGKTQRGIEGFRILKGKIPYKQVVLDGEKKFMLGSSTYVYNAKQLTLSNETMRIVTNNFTIKDDRSKLLNQAYNEILEKVDKYLPLYDINKFRNKLHKGKDKFSKLNIKEKEATLVEILNGLHDNSVMGKLKNIGFSTAFGQMQIPSGITLSPNAKLIYQSPTGLFEKRVKISEL

SEQ ID NO: 4849 - protein, 1386 aa, unidentified
  REGION 1..1386: note = Description of Unknown: Cas Enzyme sequence
MTKIKNEYIVGLDIGTNSCGWVAMDFQNTILRMHGKTAIGSHLFDAGNSAADRRAFRTTRRRIKRRKWRLKLLEEIFDPYMTEVDPYFFARLKESGLSPLDKRKNASSIVFPTALEDKKFYCNYPTIYHLRYDLMSEDKKFDLREIYLAIHHIVKYRGNFLYNTPVKDFEASKIDVKDSLEKLNELYERLDSEFTVELDSSNALEIEKIIRDKNVFKINKVKSIHQLLSLKTENKERTKLIKDVSKQIINAILGYKTKFETILLKNISKDEADDWEFKLTDVDADNKFENLIGDLNENEQEILLVIRNLANAITLSNIVEEGKTLSESMIDKYNKHSDDLKLLKQVISDHPDRDKAKKLALAYDLYVNNRHGKLLQAKDVLGSKKTLSKEDFYKEVKKNLDDSKASQEILDAIALDSFMPKQRTNENGVIPYQLHQLELDRIIKNQGKYYPFLKEANPVSSHLKQAPYKLDELIRFRVPYYVGPLISPNESTKNKQTKKNQNFAWMIRKEQGQITPWNFDQKVDRMASANKFIKRMTTKDTYLLGEDVLPANSLLYQKFTVLNELNNIKINGKRISVPLKQELYNNLFKKNSTVTTNKLKSYLKENYNLINVEIKGLADEKKFNSGLTTYNKLRNLKIFDQQIDDLNYDKDFERIIEWSTIFEDKAIYKDKLKTIKWLSDRQIDKLSKIRMQGWGQLSKKLLSQLTDNNGQTIIEQLWDSQNNFMQIVNQADFKDAIAVANQNLLVNTSVEDILNEAYTSPANKKAIRQVVKVVDDIVKAASGKVPKQIAIEFTRDADDKAKISQTRANKLRKVYKELSNELASEAIRNELERVAKDQKLLKDKYYLYFMQLGRDAYTGEPIDIDELEQYDIDHILPQSFIKDDSLENRVLVKKAVNNGKSDNVPVKLYGNHMAADLGITIRHMWEKWKDQGLITKTKYNNLIIDPDKINKYESSGFIHRQLVETSQIIKLASTILQSKYPDTEIIVVKARYNHYLRKHLNLYKSREVNDYHHAIDAYLSAICGNLLYQVYPYLRPFFVYGQYKKFSSDPKKEKIIYDKTRKYNFISQIFENKGNDIISLETKKKVFDKKDIIEKLKHAYDYKYMLVSRETETRDQEMFKMTVYPRLSRDTKKSRNLIPKKKDMPTEIYGGYTNNSDAYMVIARINKKKETEYRVFGVPMRELVNLRKAEKKGHYNAYLKQVLEPEIMYNKNGKKNKTISSFEIVKSKVPYKQVILDGDKKFMLGSSTYVYNAKQLTLSQDAMQAITDNCENDTDEEKALIEAYDEILTNIDKYLPLFDINKFRDKLHAGREKFINLSLDVKKDTILQVLNGLHDNAVMPKIKSLGLSTELGKLQIPTGVKLSENAKLIYQSPTGLFEKRVKISDL

SEQ ID NO: 4850 - protein, 1353 aa, unidentified
  REGION 1..1353: note = Description of Unknown: Cas Enzyme sequence
MEKYYNIALDLGTNSVGWAAIGPDYKVVKKGDKHLWGVVLFDKGESAKDRRVFRSTRRRFDRRRKRIELLRMLMAGSIGKEDPTFFRRLDSSFLCNKNKDPNSTRQYHYNIFNDTYTDKIYYKKYPTIYHLRKTLMESDEKADIRLIYLAIHHIIKYRGNFLHDEDAITISGAGVISLLEETFSALKTLSDDFLNADAEAFYRILSNKNLSKKDRQKELLTLIGNTPLSKVLVSLLLGYKVKSNEIVSAFSLSLDEDCILQFGTDDTEEQLATLSNLLNDDQIDFLNCTYKTFFENNFIDILGEGNVYVSDLMIQRYEKHKQDLKLLKNVLVQGSDEYKAMFRSPRHQKEGKKSDKENKSSNKKVKVFNYACYVKTNTKQTRYQNSCTQEEFYDYVKKVLSKFEDSANKTAILNEIEKGSFMPRINDITNAAIPYQFNKNELVAILDKQGKYYPEFYNNKDKIISLLTFKRPYSVGVLKGPFSWIDQTIDGTVYPWDFEQKVDYDIANANFIKKMLSKDPFFDDQYVLPKDSITYQKYVVLNELNNIRIKGKPLDVTLKQRLFDDLVCQKTTVSKADIIKFINVYYKGVNIVADDIKLSDDKLLGSMRTLVDFKKILGNDFTEKDIPLYDKIVESIAIFNDIKVRQKVINNLFEYKPYLRKYTVLFSKKRYSKWGRYSYRTLVEELSEETTPRSILDIMYQTQYNINEILYGKEFGFIGRTVGKQEHIIPNYENLIDSLYADASVKKTVWQAYKVVREIIEIIGNEPDHIFVETTKEDDIKKKKDSRKKLLDYLYSAIQTDVAEYNATLKEIKKQKSTVAEELFSNEKVFLYFLQMGRCMYSGTSLSLDHLSEYEVDHIIPRSLVKNDSIDNKVLVLKQENQRKKELAISFAVRKKMQPFWAFLKANKMISGYKYNNLMKDEYTDKDVAGFINRQLVETTQANSCFQQVIKTAFPDRTDYVLPIRAGLSREFRKKMVDKDPKQYGSFIKIRSLNDFHHAKDAYLAAVLGTFTTKYYRAWGNDDRIFATKKIMETMQSENEFKKLLSQRYSFILDLLENGDYEPTNSDGEPIPVDVAFENICRQMDYNDIAVFKVKERQASNAFYNMNPLKAGEGKLPLKYVKDANGNSIPLDPALYGGYSGEQDAYFVWISYDKGKKRETRLEGIPALIATQAKTNDQAINDYFVSLNLKNFSVESVPVYKNQLIKLNGQLVYIVASGEVANATQLVVDKKYHKLLKIAETKKYAESDIAQLNEDAVEFVTQYVEKLEKYYGLYKTIAEKVTEFLTTGFTSIDLDDKLTYISNLLVVTKSGSSRINMPKEWNGGSDWGRLSGKTIYKKDVHLYHSSITGYYKK

SEQ ID NO: 4851 - protein, 1096 aa, unidentified
  REGION 1..1096: note = Description of Unknown: Cas Enzyme sequence
MLKVGGFMQDCILGLDIGIASVGWAVVLKQTQEVLKSGVRLFSAAEASENQNRRTCRGIRRNKRRQQNRLKTVSIFLNRHDFFKPETISVSPLKARVAGLKQKLTQEELFVALYNLVKHRGVSYLEDIEEAKDNDQVLQNIQKTAYEYPCQIQLERFESLGYYRGTNIVDDQVYINTFTIGMYGKEARQILSVQKEYYPQITDQFIEEYLQILKTKREYYIGPGNEKSRTNYGVYKTNGETKDNLFDELRGKCSVYSGKYGMDIALRASGASYTVQYYNLLNDLCNIKYQGRKLSQEEKEAVIDLIKDNKIAMKITKALKRLYGFDESEVKGYRVDKNDKEENHSFEIYRMMRQEFEQKGIGIKKFSTQTLDAIADILTINTETQGILSYLQNKERPEYIYIKGLTEAEINILVEIRRKKGSLFSKWSNFSYRLLNQLMPEMMNSGDEQHTCINRMNIRKYDVEAQNKIDGAQIVDEIYNPVVSRSIMQTVKIINALMKKYSFCDIVIEMPRDRNSDEQRKNIQKMQKDNEARKKDALKFAGITEAQLDYRNDKNILKKLMLYYKQQGKCLYSGNDIDIELLLKGEKYYEIDHIIPISISFDDSQSNKVLVESGQNRKKGQKTPFAYLSSSEGNWSYKEYQLYVLDLFKLKYINKKQKEMLLFEEDITKIDVVQGFINRNINDTRYASKVVLNELQRFFANREISTKIKVINGSMTSQLRKNVLDYQKDRDLDYRHHAQDAMICCYTALSLNQYQKEFVNLDTGEIIDKERLYQLDKDEKARYLSLAGWDTKMQILKFNDKIKFSHKVDTKVNRTLSDQTIYGTREKDGAYYVVNKIKDIYDDKGYESFFKKLQKDPTIFLMYQHDSKTWDKLMKIIEMYPDVKGSPFKQYRKEFGSVTKYAKKDNGSVIKELKYLDHKMGKGIDITHKYENARNKVVLESLKPFRADLYYDEKRKVFHLIPIKYADFKFEKGRYILPIESYEEILRNESVLGEGETMGTLKEKHISFRFSLYKNSILELIGVDGSTIYRFLAKSHNAKNYFEVKGLDKAFKKQVYIGITKKIHTCNKYNVDILGNVHKVEKEPLILQFQLDNMMI

SEQ ID NO: 4852 - protein, 1049 aa, unidentified
  REGION 1..1049: note = Description of Unknown: Cas Enzyme sequence
MASELVFGFDIGTTSIGSAVVKMDSSLETGRILHLGVRIFPEARDPEGIPLNQERRKRRMMRRQLRRRRIRRRELNRLLCILGLLPEFSKSEASAWADVMGLDPWQLRTRALSERLTPAELGRAIYHIAQRRHFRGRDLEIADAQSAEKHDATTAEEEKAASQREKDRSALRESGLTLGAFIASIPERSERRRGYHFARDDVAAEFRAIVAAQAPHHEQLRDPELVAAIEQTIFEQKPVFWRKATLGSCRFNPGAELAGSASWIAQEKRMLEKLNNLRIEEGNGRPLDDQERSAILKLLRKQDSVSWAGIHRHLKLYWRKHGLPEKPTFNLQRGGEKGLISNRLENRLSTIMGDRWDAEPDLRQRMRREIHARLYAADYSQIGGRIVIRREAERRQARVSARESLKADFALTEQQAHDLAKISFAPGWEPFSSVALWEMLPRLQHGVALHTLLAGPEEEVWRASTFPHRFMPTGSWVDRLPTPGNSREESDRQKAVRNPTVLRVQNELRKVVNNLISVYGRPDRIRVEVARDVGKSAHDRADDLKRNRDREKERKRAFEELQKSGIAQPSRQDVEKWMLWEECNRQCPYTGRMIDFAALFHHGEFQVEHIWPRWRSMDDSFANKTLCHRDFNLKKSNRTPFEAFEHDAEGWEVALKRVRDFAGPPGRVAVKAKRFAATEMPSDFAARQLTDTGYAARQAVGFLKMLFPDLGQSSEVRVATLSGRVTSRLRHNWGLNQILHDSGEKTRADHRHHALDALVVAIAHPGYTQRLSMWFKARDAATPMPEPLLGPPFADVREQLERRMSDIIVSHRVRRKVSGPLHKDTIYGDAGPAEGSGGIAYRWFVTTKKVEDLSARILANDDAWPDAHVRDRIRDWVAKNGGSPKKALLNGYPTVSEGGAPIRKVRIREKQQAKLMAHLKSGFADLGNNHHALVYLTPNGKSEFRIVSLFEAATRLRRGLPPVDSSDLTDLKFKMSLAAGDTIKLGGERAGLWIVRKMSANGQITLWPINDADAEKHKTIFEPTIGGIVSRGLEKIAVDPIGRIRPARD

SEQ ID NO: 4853 - protein, 1053 aa, unidentified
  REGION 1..1053: note = Description of Unknown: Cas Enzyme sequence
MDYILGLDVGATSLGWCVLQLDTNERPIKIERMGARIYSDGRDSKSQEPLAVTRRNARGMRKRSDRLLRRKKRLMKILIGCGIWSEVEAERKNLEKTIDPYEIRCKALDQKVTLSELGRALFHINQRRGFKSSRISNKKDKDTSALKTAIENLNKRLESGGYRTTIGEYLYKLNLHKSHPQNRQPLRVRVTLEGTKAAYNFYANREMYEEEVDRLLKKQQEFHPELTTELCNKIKNAIFYQRPLKPQTVGNCRFESGEPRASVASPLYQKFRFLQTLNILAPDDQNNGESLTPEERSLIKEMMLKQKFVKFDAIRKELKKSITFNLEDDRRRELNGDEVSAVLSRPALFGPIWQRLDDNQKEEIVEALLSQQDEKKLADFLISRFDLSSEQLDSIMEAHLPEGYGSLGMKALGKIVPHLERGEIYSKACELAGYSKAEGTGEWNFLPYYGVILEKEVIGGSLASEDDPDKKHKPETSDYERFWGKISNPTVHIGLNQIRLLVNELIKTYGKPTRIAVEFARELKLSRQQKKAVMQEQNENKKRNDRINEMLKNTGIKDNYDNRMIVKIWEDQAKQNPLERMCPFCGKPISFERLFSGEFEIEHLLPFSRTYNNGHNNKVISCQACNRIKNNRTPFEAFGADPVKWAEIFERIKYLPLRKQRCFKEDAIKQESEIIERLLNDTKYLARSAKKYLGAVCPSSKINTIPGQLTAQLREAWGLNTLLSDSYEKDRTDHRHHAIDAFVVACTNRAMLQAISTASANSWIKKRRLFENTPPPFSGFTRMSIQPFIDNIVVSHKPDHGNALRAVAENKTVSALHEETSYGFVKDSVKEGMGIFAIRKPLISLIKDNNIQEIASHRIRSLVLKSLEGVTDKKEREQKLREFSLKHNVHSIRIHIRRSKDTMVPIKDKKTGKPYRYVALGGNYCAEIYQPNRGKHKNEWQIEVTSYYHAHQKDFIPKWRQDEPEAKLIMRLFKDDIVAWKNGNSRKIMRVKKFNQDGRLFFEPHTIAKSEKDPNSTSHKQLQERNARKIKVDILGRVFDPLYKKDTNGRKNS

SEQ ID NO: 4854 - protein, 1023 aa, unidentified
  REGION 1..1023: note = Description of Unknown: Cas Enzyme sequence
MKILSFDIGVTSIGWAFVEGEELKDCGVRIFTKAENPKNGDSLAAPRREARSTRRRLARRKARLNTIKRLLCEEFGLNLSDYLANDGELPKAYETTKDTKSPYELRTLALEQKLEPKELARVILHIAKHRGYGNKHAKTGSDKDSGKVLSAIKVNEATMNAKRYKSVGEYLYKEFYQKERYEKKGNTLTKEFKNVRNKGENYEHCVAQEQVKAELKLIFTKQREFGATFSENFESQILETAFYQRDLKSFADKVGECVFYRGENRAPKDSLSAMEFVALTRIINTLKNLEEKSKNLGVGETYGKDKIQEILKVVLDKGEMSYKKLREILHLDERILFAKDSKLDYTKEVQEAEKAKFIELKNLKAFKKAMGGDFGKFAREELDNIATEITLIKSKENLAKKLQNYPALSKEQVEALSNLNFAKHIDLSLKALHKILPFMREGLRYDEAVQKAGLQEHKKHLQKGEFLIPLKEYEPYLANPVVARALSEYRKVLNALLRKYGAVHKIHLEFTREAKLSAEERQKYEKEQKEHFEANQNAIKQCEILGLPLNGANILKMKLWIEQGECCVYSGDKITESDLKDSNALQIDHIYPYSRSFDDSYMNKVLVFSKENQNKLDKTPYEAFGDDKEKWDRILSFSAKLPKQKQRRISNTNFKDKEGGFLARNLNDTGYIARLASQWSKDCLEFLPLNENEVNITGEKGSKKHIEAISGSLTATLRHYWGLGDKDRNNHLHHAVDAIILAYTNAKTIKAFADFRKNQEQNKAKFYAKQIAESEYEEQKAFHKAQVKVFRQRVEEKINEIFVSKPPKKRARGALHEETFYSFEDEKLLKSYGGKQGIEKAISLGKIRQVGTKIVKNGAMVRVDIFKDKKGKFYGVPIYTMDFALGILPNKAVAIGKDKDGVIKDWIEMDSNYDFCFSLFKDDLILVQKKEMEKAELCYFVSFGVSTASIQVEKHNNKFEGLSENEKILYSNATQKEVAGKSIGIQNLKTFEKYQVSPLGEVQKAEFESRQEIKLKSSPKRKG

SEQ ID NO: 4855 - protein, 1171 aa, unidentified
  REGION 1..1171: note = Description of Unknown: Cas Enzyme sequence
MDKKVVIGLDLGIASVGYCLVEKETQEIILRGSHVFEILSNAKSGPNTKGGYGEGIRGEKRRARRLIRRRQTRKSDFCKLIESEKYKKLFNFSKTSILENKLNDKNYINKIGSEYDNLKVFSCQELNKIPYPIYELAAYGLDNELKPDELFKVLHARLSFRGVSYAIPKEDCSKPLSKQLLELLEKNKKLRDLNCRILNDLNDANKEEKEQKNHLLIFSCKRNCDDLKKIIQNCSGLGNLKEEFIKDFLGDPSSENISKKYGIFSRVRDYSYGPGTEKSRTDFGIYKKDGTQVKNLGEESIGICPVFNDLKRSLKCQIIPEISNLLSQLNSIKILFDNEVHFLSLTQKITIFRKIITEKVPLTLLKMSKWLSIKKDDIKGYPTNKDRSEHNFESCKNLIKIIKNEILIIKDFQELIEKSYELDILTEKYLINFYNPDEPSYCNKNYSQSIKLIKEKDINKIINNYENYCNLNPLTEKEMNSKTAEKIQESKNNYTKNVISGTHQLSLKALYEYIKENVNDNKTCSAFYFKQLAEFEKSQYKFSSYSKYLPEDLLKYADFISPNVKQTVRECCKILNKILKKYIFNNEKYILDAIVIETTNDTKYALHGIENNKRIINQQMNESKIKEKIRENYPGIKEETIEKISLLKQQNYTDLYDGYSINEKDIINNPDQYEIDHILPISRTQNNNQNNKAITKKLNNKNKGNRTLYEGKSSSEFEELKIKGISIFEKTNIIKLNNLLMKDLKLKERSFIARNLTETQYIIRRIKLGFIAYYDHIMQHRLIDDNGESTINQLKDMQILTVSGEVTQRIRNKKLSVGKKDREISSEHHSVDASICAMLGTLTPFRETLNSLIRIINNETGKGEGKYNDKRPLDIFDYEIISNNEGVKISSNIKKSGGGLSTKYTNKLDKYKTLEEKLTEINSGKSKKLSDETIYGYVDINEEHHQKEKINLLKTDEKQIQKLKSIFGKDYKYPDCLNSKNYFDALKKIGFNSISKFNLNLEDLKENPFHLYMEDQAIVDLEFKLSLSKSCVKIIDNNLNADIKKITVLGNKINGYLLKKMSKNAMIDGLTAKCVYLVKKEDQKIIFLNENYLNLGKEKCEKNNGEIIDVIEIGQIYNINNVLFKIIGCHKTNGCLQGKNIENKKEKTRQNPYSTFPKEKIKTNFLFNNKQ

SEQ ID NO: 4856 - protein, 997 aa, unidentified
  REGION 1..997: note = Description of Unknown: Cas Enzyme sequence
LFKHFVQILTCIVNCQLKDKWMTKILGIDLGTSSIGWCIINEKERIPSAIVDMGVRIFSEVTDAKTKTPKNQERRLKRGLRRQTDRKARRRKKVSNILNRFGFLPLTQSDHQAWQEWNIKVGCPYEIRKKALTERITKEEFAKAMIHFAKRRGFKSNRKVPGGEDGIVKSAISEIRQEMETSGFRTVGEYLHGEEIKRGKYLHRDMFEDEFTKIWEKQSSFDANAYSESLKECLWDAIFFQRPLKIQTHLIGNCSLEQNRKRCPKAYLAFQEFRILTELANLEVKDPITGDHEPLSSDQKTALFELLNISEKLTWKKARKALGLHDGETINLEETGSKYLQGNKTATQLVKIIGKDNWSRYARSQKDQLITDISTIEQEESLKKRLTEHWKFKQNEVLGLLKIKLEDGYGNYSHKALSKIIPHLKEGKNLWEAKLSSGYNDQEKEEALDALPLPDNLRNPVVMKALHEVRKVINAIIRTHGKPEIIRIEMARDLKQSKKDRDQYLKVVREREKENKKISSILGEDPEFNLAKPTRDDRIKYQLWKECGMVCPYSGQSISKSMLFGGGVEIEHILPYSISLDDSIGNKTLCVTSFNRDKGNKTPYQAFGNQLEWDDMVQRVRASRMSFGKKKRFETKEASFDNFSSRQLNDTRYICKEVSGYVKKLGVRVDVSRGQLTHAIRHQWGLNRLLSTENQKNRDDHRHHALDALITAIISPRMMQEVSRISQKLNGASLSNRLFKLPKPWSAFDEDLKNKVFSIIVSHAEENRISGAFHEDTAYGKRKDGTLAYRKSVEMLNNKECEDKIRDPAVKAIILKQISKHDGDIKKALAEPIFHKDGKTPIKKVRLETKKEEHSLFEVRHNHEPFKYHLLGNNHHIEIFEDKNGKWLPRVVSTYESAKRARTNKENIVSRDFKDNKFIMSLSSKQMLEIINETKVEYYKVQNISVSSGGRVMLKRDYSADLKDSSTSMDKTINALKKLNFRKISVDPIGRVQTRND

SEQ ID NO: 4857 - protein, 1492 aa, unidentified
  REGION 1..1492: note = Description of Unknown: Cas Enzyme sequence
MAQGQKVQTTNEPKKPGYTIGLDIGTASVGWAVIDNNFNLVKGKKRIIEIDSDGTKHRRKSRTNLWGVRVFDSGETAAGRRGHRSTRRRLARRTKRLGYLRAIFADEMEKVDAHFFVRLEESFYQRSDKANKKTTIRYPLFDGRLGAGETYNSDKAYYEEYPTIYHLRRRLVRDASQADLRLVYLALHHILKYRGNFLYEDLPFSVNDGADSIDVKPNFVALHEAFCTVLTEVGGTETVQLDEKTMKLVETALKNNKISNTAKAEALLDTVGSTDKKIKKQQKALYQAVVGNGINLATIFANDKYSEKNNKTLPKPSEFKYGNDKYEEYMSALDGVLTEQEVTVIARGKAVHSSMTLSQILTKPSLAESMEEKYKTHKKQLKTLRAWTKKLDLSLYDAVFKTGGYYDAYIRGEDNPGKRLTQETFYKQLKKALETHITGLVFPKGNEPLNLDNVQLTDKDKAILHELHAAIQLDQYLPKQRTNANGAIPYQIHEAELVEIIENQAQYYEFLKEVCPIKRTHTDGSVEEAEEYKIQILMKFRIPYYVGPLAKNVNWQRDGEKNLVATGAPSENSWLARKSVTKITPWNFDEVIDKEASAKNFIERMTGTCTYLPGQKVLPQSSLLYQEYTVYNELMTCGYVSNGKKELFSPELKEEIVEKLFKKYKKVTTKEMLLFLTNEKGFKVDAQRPLFGIDTYVKNAPYNASMSAYIDLVTCGIEPHVIDDHRAIFEDIIKWQTIFEDKTMLRTTITRENNENWGNLLQTEQINKLVNKHYTGWGRLSKRLLDEIKTENGKTIINHLKTEQYGNFMQVITNDTDIKGAIDEAQGKLDQHNELSKDVVDELAGSPALKKSIWQTIQVIKELEKYLGVDNIDRIVIEMARDDEGGRPVTRQKQIENYYKKAGTEIAKDLRTVFKEQTEAAFSDDKVFLYFLQNGKCMYTEDTLQLTDLSDCEIDHIIPQTYIKDDSFDNRVLVKRTANQNKGGEVPSAAIIAKMRPYWEQLAKNNQVSKKKLANLTRGRLTEKDKAGFINRQLVETRQITKHIANILTTYFKDKNVEILTPKAQLVSQFRAGTIYIEAHEAADIIREEPQLTIHAAKSDKFKIVQLHDNWYKNRELNDYHHAHDAYLCAVVATYLYGVRPDLRELWVYGSYHKDAKQLIGRYVGQRQAANKQLLSGMVRPEWTNELIDHETGEVYPCYPDVSAWSRDEVITKLDRILTLRNINIVQKTEPLTGSFGNVTLYKNMKNAQKAKKGKKIDDTFANGFKKHLPAAMYGGTKAPDSAFAVIVRTEKDEIKALSVPVMHRAKFGQAKSKKEKLNYLQTHIDATATAIVRLQMNKNTKYMLPDKTSWRMTSYQDTVSGSQVPMMKSWQQKTNEKEDTQSDELLLHTYHTLAEFIAKHKLFTQEKLAHIADDGTITRHFKTTTLEDKYNILNEMLRVTKGKNQKLEALAAAGLGTTSQQMRVKGGRKFAPGTQIVDQSVTGLYETRRKL

SEQ ID NO: 4858 - protein, 1432 aa, unidentified
  REGION 1..1432: note = Description of Unknown: Cas Enzyme sequence
RKEIMYNYNIGLDIGTGSVGWCLTDENGHLLKVNRKGNNGKTYRNSAWGVRLFESADTAADCRIKRSTRRRYNRRRTRIIELRKIMSDMIMPIDPNFYARLDEAFLWNEDKSDKAKAPFLLFNDNGYDDVKYYTDYPTIYHLRKHLLETEGRADARLIYLALHHMMKYRGHFLFEGQSFEAIDNIEDTFIELEHLVNVYVKEKEDTDNNSKNNALYQTIKNYLADNKVKNKDKKEDITDTFIKAGYDNKYSKELAAAVLGYEFNVGIIVNDNNLTDENGKALKAKFADAKYEEQEEKLSDTLGEKYYIVETLKKIYSWKVLHSILGDSKYLSYAMVDKYKKHGEQLTALKDLFHKYTSQNEYNDFFHHEKDEDGKYIVNYVNYIKGIKRLSNETNKKYNTKQQLYESIKEKLGERAADDEVYKKILVEMEQETFLEKINNVDNSAIPYQLNLMEMDKILTQQGVYYKELRGNKELLLKMLSSKIPYYVGPLNNNSNGNRNFAWMTKKAGKENEKVYPWNVKDVVDIDVTAEDFITRMTNYCTYLPDEKVLPKESLLYQKYMLLEELSQIRIDGKKLSKEDRKVIINDLFIGKGRIKVSDKDFKEYLNKINYVKINDKGYDVTGYQSDDGFACALSSYNKFRRILGYVDERNEKMIEDIIYWLTVFDDKDIVKRKINKQYADRLNDEQLKKILKLKFKGWGRYSAKLLNGIKGDMGTTIIEMLEDADERFEYCDYCPNFMQIINKDEKIKQIIDDNRPRYDGTKDLLDVIQDMHTSPANKRGIWQTMKVIEEIIEYMGEKPQQIYIEFAREDDPKAKNKRTDSRKRAIDKALKKLKEDVVDEYNENVYKELKQYEKRLDEEKVYLYFMQNGKDLYFPDKELNLDELEKLEIDHIIPYSLSDDDSLDNKALVLKGNNQNKGNKIVKEAFPQLFSNSGTVNYWKNLKKAGLISEKKFNNLQKNNVDDILTKGFINRQLVETRQIVKSVANLILDYYNEQIDVIEVKSSLSTSVRKMLTYEKKDNNGFWEENKDNCMFYKNRDMNDYHHAHDAYLANIIGMYIQKNYPHLQKELNYSQYRRVWRKYYENTKNNNGVNWFATLGKFSSNNEEADWYGQDIIAYMRKIFCYRDVLISKKVEENTGAFYSETKYPREDKAGSKLVPLKQGDNMRGANNLKELDTRKYGGYKGGEKAYFVLVRYCTEKALKKKVKKEYHMEFVEIPVYIARGIKNKNINLYDYVCDTLNEANKNSVADVEILRNKVPKYQMIIGENGEEYYLVSATEVINSKQFVLGGSNQQYNRLLNYIKYGKNDKWQYIQTELLDEQLIGLYNLLIAKIKDEYKGFSKEAVRIQENNSFDKLDVKDKKEFIAEMIKLVQPDSDYPYLGKYATGLSNRMGRKTGEKVGKKITLVDKSVTGLYERRTTFELEDDSSTKSR

SEQ ID NO: 4859 - protein, 1425 aa, unidentified
  REGION 1..1425: note = Description of Unknown: Cas Enzyme sequence
MYNIGLDIGTGSVGWCLTDENGYLLKVNRKGNNGNTYRNSAWGVRLFESADTAADCRIKRSTRRRYNRRRTRIIELRKIMSDMIMPIDPNFYARLDEAFLWNEDKSDKAKAPFLLFNDNGYDDVKYYTDYPTIYHLRKHLLETKEKVDPRFIYLVLHHMMKYRGHFLFEGQSFEAIDNIEDTFIELEHLVNVYVKEKEDTDNNAENNALYQEIKNYLADNKVKNKDKKEYITDTFIKADYDNKYSKELAAAVLGYEFNVGIIVNDNSLTDEDGKALKAKFADAKYEEKEEKLSDTLGERYYIIETLKKIYSWKVLHSILGDNKYLSYAMVDKYEKHSEQLKALKYLFHKYTSQDEYSEFFHQEKNKEGKYIVNYANYIKGIKRLSNETNKKYNTKQQLYQSIKEILGERAADDEVYKKILVEMEQETFLEKINNVDNSAIPYQLNLMEMDKILTQQGVYYKELRDNKELLLKMLTSKIPYYVGPLNNNNKGNRNFAWMTKKAGKENEKVYPWNVKDVVDIDVTAEDFITRMTNYCTYLPDEKVLPKESLLYQRYMLLEELSQIRIDGRKLSKEDRKAIIDDLFIGKGRVKVSDKDFKEYLNKINYVKINDKGYDVTGYQSDDGFACALSSYNKFRRVLGYVDERNEKMIEDIIYWLTVFEDKDIVKRKINKQYPDRLTDEQLKKILKLKFKGWGRFSRKFLAGIKGDMGTTIIDMLEDADDRFLYCNYCPNLMQIINKDEKIKQIIDDNRPRYDGTEDLLDVIQDMHTSPANRRGIWQTMKAIEEIIEYMGEKPQQIYIEFAREDDPKAKNKRADSRKRAIDKALKKLKEDVVDEYNEKVYKELKQYEKRLDEEKVYLYFMQNGKSLYTGKELNLNEPENLEIDHIIPYSLSDDDSLDNKALVLKKENQNKGNKIVKEAFTQSFSDSEMMDYWKNLKKAGLISEKKYNNLQKNNVDDILTKGFINRQLVETRQIVKSVANLILDYYNEQIDVIEVKASLSTSVRKMLTYEKKDNNGFWIENKDNCMFYKNRDMNDYHHAHDAYLANIIGLYIQKNYPRLQKELNYSQYRRIWRKYYENTKNNNGVNWFATLGKFSSNNEEADWYGQDIIAYMRKIFCYRDVLISKKVEENTGAFYSETKYPREDKAGSKLVPLKQGNNMRGANNLKELDTRKYGGYKGGEKAYFVLVKYCIEKALKKSVKKEYHMEFVEIPVYIARGIKNNDINLYDYVCDILNEANKNSVADVEILRNKVPKYQMIIGENGEEYYLVSATEVINSKQFVLGGANQQYNRLLNYIKYGKNDKWQYIQTELLDEQLIGLYNLLIAKIKDEYKGFSKEAVRIQENNSFDKLDVKDKKEFIAEMIKLVQPDSDYPYLGKYATGLSNRMGRKTGEKVGKKITLVDKSVTGLYERRTTFELEDNSSTKSC

SEQ ID NO: 4860 - protein, 1110 aa, unidentified
  REGION 1..1110: note = Description of Unknown: Cas Enzyme sequence
MGEENRRYVIGLDLGINNVGWSIVDAETSSLIDYGVVLYQKSSDAKDRRGARAARRLKKRRNHRIERLALLFYTKGINPKRSIDPDLLLKRVKGLTDKIELQDIVNISYYIATHRGYIPFNVDKEERTTVELADDEYPCQYLIKMQTHFGKYRDLPMVIKFEDNIKEIRKILTTQKKYHQEINDELIKEIIKVISSKRKFYEGPGGAKISQLTPYGRYSTKDDLLELEKNKYLYEKLIGNCKLAINEKVAPSANYFVEEFNFYNDFINTKVINPSLLDEEYRLKVNENRKFTERTIQEFKEYILNRDSVNFVSMIKYVLNTDLSNIEGYRIDKDNKPNYSKFEIYKYIVKQFNAKDLNPQWLYDEDKEIYNKVIYVLTVVPSSEAIEEMLKDRIHDYQFNEEEIAVLSEIKKKKTNDFKYHSLSEVIIKRALKDMKETQYQMNYMQLMKRNDYEKEAREFLQNNYTNQTKRPYRIERKYIDDLISNPQVKKTLRKAISVINAIIKRQGGYPEIIAVESVRELNGEQKKNQLIKEQRENEKRRNRAKEFLEENKLPINETNIEKAMYYFETDGHCIYCNKPISESELMTLEIEHILPISHSFDDSYDNKTISCLSCNKLKGKKTPYEMFMATNQIDDFKDRVVKYNISEAKKRNLLYQGDISKHHVKFINRNLRDTAYGSTALVGEINKFNTFISYKEGKDKKIKVVTIPGQLTTKVRTRMGLEEKDRSTNYHHAVDASIIASIANTELGRWITDAQNNPAFAFENKNYYPTLIRSIKNLKLSNIDQLKSINDENTKFSYEIRKNPQQKLSDANIIKLKEIDGKYYKVKQVDNIYTYDFSKKKNVEDFEKLLDENNQSKKLLCITEDKSLFELIKGIYNKYKAEKINPFVSYCLEANGLSNPKEFNYLIHGIRKPSKKNNGPIVKTLRYIESINMPYILEKKPNTKENKFGEFVVPENNKSLIALDSLSQYRTDIYYDRGKAAFTFLPIYCVSVNLKTKEIDKNDKYYQMMHDKYIGDGDVVLIGSIYNGEWVRVTKKKPINAPEDLKIDSKKPEGKYKGWHKNKNSLEFYPNGDMQRNPYTFTRNDLRIEIFSIDILGRRYKRLDSKDFV

SEQ ID NO: 4861 - protein, 1123 aa, unidentified
  REGION 1..1123: note = Description of Unknown: Cas Enzyme sequence
MKKYTIGLDLGINNVGWAKYDLETKKVIDKGVVRFKESSTAQDRRIIRGSRRLRKRKQHRVERLAIQLSNINFCTSRSYEPELLNKRIKGLNESLSEQEITNIIYWFAIHRGYIPFDEEKPEREDHKFAEDEYPCQYIFDYYKEYGVYRGQCDLISLKDNLKELKQILLTQQKYHSKLTDEVIDNILYIIQSKREFWEGPGASKENQLSPYGRYRTLEDLEKYKADPTYHQYLYEMLIGKCELSIDKDGFMDQVAPKCNFYAEEFNFYNDFINMSVKEPSQIDEEYRNKITLKGKFTEDTIEEIKKEIISTKKVSLDKLVKKILGLELKDIQGYRIDKKYKPEISQFEFYKYLLKSFKDEKLNPSWLENDDKTIYNQIVYILTVAPSTYAIEDMLKDRVKEVEFKKEEIDVLIDIKKKKNPDLKYHSLSERILKKALDDIKRHNCEYNFMQIMKRLEYEKEMKEYFQNNYSTKTQSPYTIEDQYIDHLIANPQVKKTLRKAIKIINAIIKEEKNYPETIVIESATSLNSKERKKQIEEEQKTFNQLNKEVKKELEDNGYEATDKNMQLLINWKETNESCIYCGESISLKEVLITEIEHILPKSKSMDNSHNNTTCSCLKCNKEKNNRTPYQYLTSKNMYEGFKNRVMNQYDKMSQDKKSNLLFEGDIDKYSIKFINRNLRDTSYASVALVQELKKYNEYLGAKEGYKINIITSPGQLTSKIRQYLKIKNKDRTYLYHHVVDAMILASIPDTEIGKVLIEAQNDSQYWFKDKNKENKYKEEVYNMLNNVWLSNRDQIQKFNQDCDNMPDNNKEGLIKRSYEVLKNPVRQFSQYTEYAKYIKQNDVYYKISQIDNIYNLLIRKKDGSADKDKKLLDELFDLSNKKNKTLLCEKKDPKLYQKLKNIYEKNSFSINPFVDESKYMYGLEDGDKFDCLKQGIRKTDNSNSPLVIKLRYLEKVTNPYIKNNITTRRKNLYNEFTINKPKKDTLIGLDGLKQVSTRIFYSYEDKKFIFLPICAISFVNGKLNKKEKNYQTTYNRLIGNKNVKEMGNIYVGEWVGVYKKNGEYFEGRYKGYHKTNNVLKYYINGLDTLSCATIGSSDLRIIIYTTDILGNRHIRLDTQKEI

SEQ ID NO: 4862 - protein, 1488 aa, unidentified
  REGION 1..1488: note = Description of Unknown: Cas Enzyme sequence
MVQQQYTVGLDIGTSSVGWAVINKDFKLVSGKKHINDNGKQKRSRTNLWGVRLFDAAETAADRRLKRGMRRRIARRKERLNYLRGIFQADILAFDDSFFIRMDESFLQDDDKQATAFSYRDQSGAMQTRVVTEKEAVKYPLFNGKSGSGETYTDESAYYNQYPTIYHLRQRLIDNPAQADLRLVYLAMHHILKYRGHFVNQGQTFDLGNINIAGNLTSALDKLDEASSFKFGLADVDADQANAILKNKQWSASKKAYELNTLYEIIQDTVYRRENETQAVAYDSLTVKQQEKWLAEKQKQVKAFLTGIVGNTISPKDIFANKDYDKKQNEDFPEKIKYSNENFEEQIGELEKYLDETEVAAIVAGKDVYESLVLSNILTKSTLSGSMIEKYNVHGTQLKNLKSFSRKVSAEFYDKLFNVVKDEKGKPQIGVYAQYIDGVGNPAKRLAREDFYDALKKVFESEFKGLTFPAGEKGIDFTKTDLSADRVAFIREMNEAINLENYLPKQRQADNGAIPYQVHEHELIRIIENQKQYYPFLGDKVQVTYEDESGQTQVRSEYKIQVLFKFRIPYYVGTLAKNSGWVNEDGKKLVARNVAAKNSWVVRNSDERVTPWNFEQVINKEASSINFIERMTNFDTYLPNEKVLPKNSLLYQEFIVNNELISSGYYLNGRKEYFLPEQRQRIITRLFKRYRKVSAKQMLDFLKSEYQIKLDDDPKKLFGLDTFVKVPSYNGSLSTVVDLTKKMGISEDLIANYPERFEEIIKWQTIFEDKKILKKTIREVNHNKWSGMLTAEQVNKLSKRHYTGWGRLSQKLLDGVKTSQGRTIIESLREGICDNFMRLIEDEKIAEFIANAQVAGAKDGVLAYDLVDQLPGSPAIKKGIWQSLRVLQELEHYLGRDAIGKVVIEMSRDDESSRRTKARKQQLEEFYKKFKESTGSDVTAELKRELSEKDAKEIDDEKVFLYFLQNGKSMYSGDQLYLSRLADYQVDHIVPQTYIKDDSLDNKVLVTQRDNQNKGGDTPSHTVVTRMNSYWDMLAKNGQVSPRKLANLKKGTITLKQREGFINRQLVENRQIIKHVANILTNYYTGTDTLVLTPKSGLTSQLRSGLIYELNPAFDEAKALDRGKAYQVERYTTIKLHDRFVKNRKLNDYHHAHDAYLNAFVAQYVYQDHPEWKNAWVYGKYPRNGQADFGKWATQRKQKSLQLLSSMANDVWNLEDPDTGEITRLNRNETFKQIQKTLQYRNINIVKKLETQTGEFGDETVYKKGNKADDYSLGLKKKYPAQRYGGTKSANSAMTVLVKDSSGYVLPVSISASDYDSYTKASDKLAWVRTRKKNIAEILVTSLPKYAKYELPSGAMRLIASYQEAKSAVELPMLNLRLIDDDTKILSLYDQLSQFIADNKLFTDKKILLLTGKMRNTFDNLEDLKDKQKVIEELLGVTKGFNQNLKALSRIGLGTAAQRLKSGNTMTNGITIINESVTGLYLTRTTYN

SEQ ID NO: 4863 - protein, 1333 aa, unidentified
  REGION 1..1333: note = Description of Unknown: Cas Enzyme sequence
MSQNIVDYCIGLDLGTGSVGWAVVDMNHRLMKRNGKHLWGSRLFSNAETAANRRASRSIRRRYNKRRERIRLLRAILQDMVLENDPTFFIRLEHTSFLDEEDKANYLGADYKDNYNLFIDEDFNDYTYYHKYPTIYHLRKALCESTEKADPRLIYLALHHIVKYRGNFLYEGQKFNMDASNIEDRLSDVFTQFADFNNIPYEDDEKKNLEILEILKKPLSKKAKVDEVMALIAPEKDFKSAYKELVTGIAGNKMNVTKMILCEPIKQGDSEIKLKFSDSNYDDQFSEVENDLGEYVEFIDSLHNIYSWVELQTIMGATHTDNASISEAMVSRYNKHHEDLQLLKKCIKDNVPKKYFDMFRNDNEKLKGYYNYINHPSKAPVDEFYKYVKKCIEKVDTPEAKQILHDIELENFLLKQNSRTNGSVPYQMQLDEMIKIIDNQAKYYPVLKEKREKLLSILTFRIPYYFGPLNENSEFSWIKRLEGKENQRILPWNYQDIVDVDATAEEFIKRMTNYCTYFPDEQVLPKNSLIVSKYEVYNELNKIRVDDKLLEVDVKNDIYNELFMKNKTVTEKKLKNWLVNNQCCSKDAEIKGFQKENQFSTSLTPWIDFTNIFGKIDQSNFNLIENIIYDLTVFEDKKIMKRRLKKKYALPDDKIKQILKLKYKDWSRLSKKLLDGIVADNKFGSSVTVLDVLEMSRLNLMEIINDRDLGYAQMIEAAASCPEDGKFTYDEVERLAGSPALKRGIWQSLQIVEEITKVMKCRPKYIYIEFERSEEAKERTESKIKKLENVYKDLDEQTKVEYKTVLEELKGFDNTKKISSDSLFLYFTQLGKCMYSGKKLDIDSLDKYQIDHIVPQSLVKDDSFDNRVLVIPEENQRKLDDLVVPSDVRVKMIGFWKLLFDHELISPKKFYSLIKTEYTERDEERFINRQLVETRQITKNVTQIIEDHYSTTKVAAIRANLSHEFRVKNHIYKNRDINDYHHAHDAYIVALIGGFMRDRYPDMHDSKAVYSEYMKMFRKNKNDKKRWKDGFVINSMNYPYEVDGELIWNPDIINEIKKCFYYKDCYCTTKLDQKSGQMFNLTVLPNDAHSPKGTTEAVIPVNKNRKDVNKYGGFSGLQYVIVAIEGKKKRGKKTKLVKKISGVPLHLKAASLDEKIKYIEEKENLTDVKIIKDSIPVNQMIEMDGGEYLLTSPIEFVNGRQLVLNEKQCALIADIYNAIYKQACDNLDDVLMIQLYIELINKMKALYPAYQSIAEKFESMTEDYVAVSKEEKADIIKQMLIIMHRGPRNGKIQYADFNVGDRIGRKNKMSLDLERVTFVSQSPTGIYTKKYKL

SEQ ID NO: 4864 - protein, 1414 aa, unidentified
  REGION 1..1414: note = Description of Unknown: Cas Enzyme sequence
MNRNKQVLMDRANVCDSTNKTMEQLYNIALDIGTSSVGWCVTDMNGKLMKFKRRNMWGARLFDKGQTAETRRLKRSLRRRYARRRQRIILLQNLLGDMVNQKDKNFFVRLNESFLWKCDKTEKSDYLLFADKDYTDKEYYKKYPTIYHLRKHLIESNEKADPRMVYLAIHNIIKHRGHFLYQGQKFEEVSDLSDIINELSDCLKCNFEGAEFKIEKEVIEKVEEIFNEKTKEGVNNEHKKSKAEKCEDLEKILVDNKWDKKISKEIAKACLGYKFNVGTVIGESELKGEDGKSIKIQFDDSKYEEKILELAEKINDKIEIINILQNVYSWIVMEDILSGYKYISDAMVDKYERHNKQLNMLKRLFRKYLSRDDYLEFFRKEKGKEKDEEKDKDKNKEKYIINYVNYIKRNKRCANTKGTARENLYNEIKGKFKGMAENDAEYQLILQEMDNDEFLLKQKNVNNSNIPYQINLIELEKIIDNQGKYYPVLLENREKIIKLLTFRIPYYIGPVNPRKNDNKFAWVKKKEGHETETVNPWNLEEIVDIDVTAERFIDNMTGFCTYLPEEKVLPKNSLIYQEYKVLNELNKIKVNDKGLDIKTRNDIIEGVFKKQKNINEKTLKTYLLSINYLGAKIIEEYKIEGYQGDKQFANSMGSYIDFKKILGSVDVRNLDMIEEIVYWLTVFEEKSIVKRKMIQKYSDKLSEKQLSRILDLKYDGWGRFSKKFLTGIYGDYYGEKKTIMDVLKEDNKLPNLMQIINKKEFGFNEIIEKNRIKLDEGEVLKDAIDKIHCSPEVRRGIWQSMKLVEEVIEIENGVLPQNIYIEFARSEEDKKRTKKRKNKLEAAYKVLKKEIDVYNEKVLKELGEYKEKLDDEKVYLYFLQNGQCMYTKQELNLNGYLKDCEIDHIIPQSVYDEDSLDNKVLVLKGANQEKGNRIPYDYIKEKNKVNWESMKIWWEKLYKCGLMSEKKYKRLTTQNIGEIINSGFIKRQLTVTSQMIKNVANLITDYYGGKVNVMAVRAAFSTKIRKTYSELVKGSDGNYIEKNDGDCFIKNRFLNDFHHAHDAYLASIIGKYLNTVYPKMADEINYNKYIKYYNEQCKKNRKQKFNFILSKFDKIFERDGEIVWNGVEQIKYLKNILNYRDCIITHKLEENTGSFYDENRLPKNDKSEKLIPIKEGLPVERYGGYQGGEAAYCCLVSYVKKKKQQLELVKIPVMTAKKIYDGKTTLENYLKEKMGLDDIHIIRKKIMKYQLIEEDGCRYYLVSAEELANAKQLVLGSKNVRFNRILNIIEDNRYNGYSPEYIQRGLDDFYEFLIGKIQKEFGRSSSVAKEIYDTKVFYELESAKDKGDFIMEILKLTNIGSDYPYLKKYKKYNKISSSLIDRKGRSKYQGYKIKPGTVLIDQSVTGLYERRLEL

SEQ ID NO: 4865 - protein, 1347 aa, unidentified
  REGION 1..1347: note = Description of Unknown: Cas Enzyme sequence
MAKINYNIGLDLGTNSIGWAVTSDDFRVIKKGDKRLWGVALFDEGKSSAEYRTFRSSRRRFERRRVRIDLLQTLMSKSVASVDPTFFRRLDMSYLCSNVIDDKSDRDYRYNLFNGKFNDSTYYKEFKTIYHLRKYLMESNKKEDIRLIYLALHHIVKYRGNFLHQEDQLSINSINIEETIVDFVENYLSDEIVDSKQFFEELTKKDATKKDRLNSISSLFSSKELGNLCGKLVVGYSIDNKNIKKAFNLENDIDSVKLQFGKEDLDINIASLSDQVDDNIIDLIINLKGIYEDIMLIKIVGEGNSTISESMIHRYEKHQKDLSLLKQLLLGNYEAYKDMFNCEKAINNYVNYVNKTNKKVKSSKRKCTREDFYKYVISVVSSFDDSDIKSYILKEIEMDEFMPLINDVINSNIPYQLNYNEAKAIIDNQSQYYPELKENYHKILSIIKFRRPYSVGVLNSNSKFSWITQTINEKVYPWNFDKLVDLDKANENFIKAMVTKDAYTDDFVLPLESITYQKYIVLNELNNIRYKGSCLNVDIKKKVFDCFLRKTSVSCDDIIKVYKNEYNIDCLKDDFSGFSDNETKRFISSMKTYIKLKQIFGKDFNEKDIKLYDKIVESITIFNDKNVLKGVLEKLFNSTAHDYLSKYIKQLSKLSFSKWGKYSYQLLEGTLSTENNPQSINDLLYNTNLNFMQIIYEPRFGLMDLLKKENGKEAPTYKNLIEPLYASAAVKKTVWNSYKIVDEIVKIMGCEPKNIFIETTREDSEKKKTLSRYDALKDLYNSIKDDVNKYNVEQLKNELNKFEKIDKDKLYLYFMQLGKCMYSLKPINIDRLDECEIDHIVPRCYIKDDSFDNRVLVYRDANQRKSDLALSDEVINNCKDFWLFLYGQRTGRNQFISKKKLDNLMRYNWDGNTISGFINRQLVETTQINKLLKDVLCSVYSESEDKIKFVNSGIVSLFRNVQASEDLEVYGNFLKLRGLNDLHHAKDAYLVSIFGTFTTEVFPTWGQDERALQAKKLLEDGFKKASTKELINDRYGVIIDKLKSKDYECLKTDGEYITGENAYNNIITMMDLNDISIVKLKEEYANSSFYNQTIYSPKSGINLVSRGTYKNASGESIEMDPKLYGGYSNVNNAYFISINYSKGKKRLSKLVGVPVAVATQAKNISSDKPIVDYLIGEGFDAPEIVGKPVRKNQLINYYGQDVYITSDNEVVNATQLFVSKKYMFMLKCILDGKIEKAINIPEFKDVAKAFVLEYVEKINNYYPLYKSIGEKILEFANNVLLSMDDKDICKYISNLLIITKSGAGRIDMPKEWNGGSSWGRLSGKTISKNDDNIKWKDCSITGYYRNK

SEQ ID NO: 4866 - protein, 1067 aa, unidentified
  REGION 1..1067: note = Description of Unknown: Cas Enzyme sequence
MGYILGLDLGIASVGYGIIDSDSYEIIKYGVRLNEEANAEDNLKRRTMRGGRRLKSRRRNRINAIKNYLNDIGLINKNDIKPIVDIYDVRVRGLNNKLTPNELACAILNIAKHRGSSLEVAVDDDSEDAISASALQKNTTYIRKNNLYVCEHQLSKTRLGKIRDFENVYKMEDYEKELRKILSNQNLSNEIIEKIVLLVTRRRDFSEGPGSEKYPTKYGSYREIIDENGNKVIKKVNLIEETRGKCSIFKNEPRIAKNTYTAYIFNLLNDLNNVKYYSDGEKKCLTTEQKKEIISIINKTGKFSVNDLCKYLGIEKSDIEGLRIDSKEEKILTTFDVYSKFIKQKISRDIIDNHELFDNIIEVLTRTQVVDKRKEEIIKIYSSIIEDDLNTIANMTKVNGYHSLSKKAMDILINEMLVTNDNQMQIIQKNGLNISDGNFKGKDIPFDNDSILSPVARRVHRQAIIVLNELRKEFGEFESIVIETTRDKNSKEQKKNIVKHQKERVERKEKLDELLLQKDFNPSKLNSLTRLKVLLYEEQNGKTIYAGLPIDLNVLINDPTAYQIEHIIPYAISFDNSMNNKALASAKENQLKGKMTPFQYFKSGKAFGNINSYDAFKKVVENANYSKEKKNNLLNESNVTKFENMEEFANRNLIDTSYGIRSIMNVIKKYFKDNEIATNVFTIKGKVTHSFRVRAGIDDNDENNKIRDNYIHHAVDALIIAASAKNKVFNNAFKMQSIGEDVYLEETGEFIDLDNNPFDDGQLIKFIKDLKKIDDSVFHFSYKIDTKTNRQISDETIYSTRNYDGVEYVIKKYKDIYGKEGESLKKLFDDGKADCLLSYRNDIETYKLLKEIYDFYKESKNPFAEYKKDHGYIKKYSKNNNGPIIKQLKYKSEILGNHLSVSQNYEKNKDLSKTKNVVLLQTTPYRTDVYRSPNGLYKFLTIRRYDVKYENGMNIIDENRYNSLKENKKILPEDIFLFSLNRNNIISIVKKDEICDIKQLDEINNYYRFIGTNNDKKNIIEVKYINKVTEKQLMLSIGKSIVKFEKYNVSPAGKYQKVVKEDLKLKW

SEQ ID NO: 4867 - protein, 1110 aa, unidentified
  REGION 1..1110: note = Description of Unknown: Cas Enzyme sequence
MGYTLGLDIGVASVGFGLINNESGEVLEAGARLFSSANPDNNQTRRSNRGARRLNRRKVHRLERIRDLFENYDILQGDIQEFTPYHLRVRGLNEKLELPELYAALYNLAKHRGISYLEDVDVSELKGNNPLEKNIDLLKELYPCQIQLQRYETYGQVRGMIEFQSSSGEIDYLVNIFPTPAYKAEAETIIRKQMEFYSQLNEDFLKEYITILTDKREYFVGPGNDKSRTDYGIYRTDGTNLTNLFDILVGKCSIYSDERRGARASYTAQLFDFLNDMNNLTVAGEKLTFEQKQQIYNEIMSAKSVNVIKFIMKVTHCKKDDIKGYRVDSKQKPEFHSFEGYRKLRNHLLLTLDFQLDDVSREDRDKIAEVLTLNTEYMQIINQLKEQVNILSEELCEEIASFRKSCGSLFSKWHSLSVKAMREIEEELWQTSYNQMQLFTQNGVFKSKSERFKNLKYIPTELLLEEIYNPVVKGSIRESIKVINAILKKYGTLDAIVIEMPRETNEKEEKQKIEKMQKANANQKKSAIAKAKEEYSFGKEAYRQQNNLDLKLRLWYEQKQRCLYSGKTITIYDLVNNPHLFDIDHIIPKSISYDDSLNNKVLCYASENRQKGQTTPYKYFMRKSNSDWNYEQYKSYIMTSLYIDGKGEMPRSKVDYLLFEEDLNKYEVRQQFINRNLNDTRYASKMVLNTLQSFMKENYEHTKVAVVRGKFTAQLRRKWKIVKNREESHSHHAIDALIIASVPHLNLWKKAKNQVLSEKVIYDEQTGEVLNQDYDSLVYQEPFSKYFIQLEQVLTNCKYSYKVDRKPNRQVADATIYSTRTGVVKDSKGDKSFKIDVDSEEHYVVAKIKDIYQDNDAKRFMDRYKKDKTQFLMYHHDPQTFKILEEVMKTYSTSKNPFADYAKEYGTIRKYSKKNNGPEIRSIKYYDSRLGQHIELQPGQSKSKKVVLQSLNPWRSDLYYHKKEQRYIVAGLKYADLSFQKGTGEYGISYEKYQHILQLEGIHLTIEEIKDLIENNQEPQEYSFCFSLYKNDFIQWQDEENVLQQYRFLSRNLSSKNMVEVKPIDKAKFDKQAQGLKTIRKDIECIQKVSVDVLGYQHIINFEKLKLTFK

SEQ ID NO: 4868 - protein, 1118 aa, unidentified
  REGION 1..1118: note = Description of Unknown: Cas Enzyme sequence
MKGDNMGTIIGLDIGIASVGVAVVDKDTLEIKCVVSDLFDSADASKNIERRNARQARRLNRRRKTRVGDFNTLWLKEFGEIPEEHDTDVLLLRNAGLEEQLTLDEIYCVLKYMLKHRGISYLEDALNEENVTGSYQKGIAINQRESEYMLPCEIQLERFRKYGQYRGECDAENENGEKITLSNVFMTSSYRKEIEKFLGTQKKYHVVNDKFVDKYIKIFERKRKYYEGPGSEKSRTNYGIYTTKKNPDGTYKNEKNIFEKLIGKCSIYKEELRAAGASYTAQEFNILNDLNNITVNNKKLTTQQKKDIIEIVQNSDRINMEKIISSCIGEKIEKIEGARIDKNEKNIYHTFEQYNKMRRAFAEKSYDIKKLTIEQLDEIGRILTINTEREGIEDAIMDSELLNLNNEQIDLLIELRRKNSSLFTKWQSLSIKAMREIIPDLYERNVNQMNIFTERGVFKDKLNLFENSVYLPKELVLEEIYNPVVRRSISMTIDALNALIKKYGYPEDIVIEMPRDRNDAEQKDRIKKFQKTRENELKNIKKKIKEEYGIEITDEHFRKHKGLELELKLWVEQNEKCPYSGKHINVQDILYHHELFEIDHIIPLSISYDDSRNNKVLVYKEENQDKGNRTPLMYLSTVNRQYDQHEFMNYVLSTKSLPRKKRELLLNYEDITKIDVLKGFINRNLNDTRYASRSVLNAMQLFFGGKECDTKVRVIRGSVTNQLRIKLNLPKDREKSYSHHAIDAAIMCYSQMGLMNFRNTQNKFIDFENETYLSDDKDSCFDNKYYNEALFGQVLKMRKNLLKAEGEPQRSVQSKGVFDEEEKNNGIVRYHHKVDKKPNRGLSNATIYGTRKIEDKIYKIVGYDIRNNKDVEAIINIIKKGKLNNFLMAKHDPETFKNLMEIYEQYKEEKNPFIAYEQETGDYIRKYAKNHNGPIIKKIKYVDNEVGSCIDISANYGYKNGDKRVIMDTLASYRADVYYNFNEKLYRIIGIKYAYFKYLNGKYVLDEKSYVAILIKEGLLKEGDTLESLKLAGYEYRLSFYENDIIEYEQNGIVYKERFLSKSEGVKNKVETKPIMAKGYKNRKFPYLSKVRYISKIYTDILGNETKIYKEKFKLSVD

SEQ ID NO: 4869 - protein, 1113 aa, unidentified
  REGION 1..1113: note = Description of Unknown: Cas Enzyme sequence
MNDLILGLDIGVASVGYGVINGQTGQVVDAGVRLFNSAAAVENVERRTARGSRRLTRRKQHRRYRVKQLLLAAGLHEPDTRDVYNPYALRVKGLSEQLDATELYVALFHLAKRRGISYLEDVDETDMKGDLKLNKTLSEKQLPCEIQFERLKKYGKVRGIIEVDDEETERQHLVNIFETNHYQKEAATILTTQKKYYPTINDEFILHYCDILIGKRKYYHGPGSEKSRTDYGRFKTDGTTLDNFFEALIGSCSIYPAEIRAAKSSYTAQEFNLLNDLNNLRISAIEDGKLTQAQKEKIINIIKTKEIFGSAKMLKLIADTVGCAVDEIAGFRIDRKNKPEFHTFEVYRKISKALQNIDGIDSVSLSREIYDKLAHILTINTDASEIRAQITEHLPQLARTEVIDSFIALKKKGTFSGWHSLSLRAMNEMILELSASSKNQMQMLHERNIVKDYKTKFQSCTYIPIKEVLTEIYNPIAARSIRQALKIVNEILKQYKDLSSIVIEMPRDYISTDEERKQLKAFQAKNEDEKSDAIKRAKEEYNFSEEVFAGHKELMLKLRLWYQQNQRCIYSGKTISVKDLVHNKNMFEIDHIIPESISADDGQNNKVLCYAGENQVKLQQSPFQYYKNKTGGWDFNQYKSFVLSLYNDGKGTISKTKKDLLLLEDDINKWEVRQGFIARNLVDTRYASKVVLNTLQDFFTARQQTTQVKVVRGKFVAQQRRKWNIKKDRDESYAHHAIDALIIAGIDRMKLWGKGSFYELTQTTYSYDANTGEVLPIMSKDEFLERTNKTPFVHFKQQLRDITDNIKYSHMVSKKPNRKISDATIYSTRMVENDTEYVVRKVSNIYDEKSYVTFKKIYDKNKTDFLMYRHNPETFSVLESIISMYPDAKNPFAMYQAEFGVIRKYSKKGNGAPIHNLKYLATRLYANSPHLDITHKSNSQDTNKKRVVLLSVNPFRADVFFDVVKKQFRIIGVKYAAFDFAKAGQYRINAVKYREILKKEEIDDNNHKFLYSFYKDDIIEFGNEQDGTQMFRFLSKNESANAKNRIEVKPIDAPKFEQRQGIMTITQKTTIVRKYTTDVLGNMFLAPLENDPREKSMQLSLTNENIERIMIDK

SEQ ID NO: 4870 - protein, 1056 aa, unidentified
  REGION 1..1056: note = Description of Unknown: Cas Enzyme sequence
MTTEQRNFILGLDIGIASVGYGIVDSDTKEIIDAGVRLFPEGKSDENNGRRTKRGSRRLSRRRKHRLLRVKYLLEKYGFETKNMEGTNPYEIRVRGLYEKLTDRELVIALNHLSKRRGIHNVDVSDDDGSDSELSTKEQINRNNKLLKDKYICEIQLDRLKENGIIRNHTNRFKTSDYINEARKILETQSKYNEKIDENFISEYIKLIETRRTYYEGPGKGSPYGWEEDVKKWYVSMMGRCTYYPEELRSVKYSYSASLFNILNELNNLVIARDENSKLTKEEKELLIEKVFKVVKTKPSLQKIAKALDVKPEDIKGYRIDKSDKPEFSTIKIYHDIKAAVNNKEVPEDEQLLDEIAEILTIWQSEEDIIDELSKLNSTLSESDILKISKLKGYTGTHALSLKLIKEINHELWETKKNHMGVISSMKLRPRNMDFKGLNKIPVDFVDEWILSPVVKRSLVQAIKVVNEVFKQYGTPKDIIIELAREKNSDDKKKFIQKLQKENEKLNKEVREILNLHKRGDKGLFEKLKLWHLQDGFCMYSAQQIKIQDLITNSENYEIDHIIPRSVSYDDSMNNKVLVKLEENQKKSKQTPFQYLSSGAGEITYSEYKKHVLSLAKDKKRITKKKLGYLLEERDINKFDVQKEFINRNLVDTRYATREIMNLLKLYFKDNNIETKVKSINGGFTYFLRGIWGFDKYRNEGYKHHAEDALIIAMADYIFENRDIFKNENLLMKNNQAVDLETGEILQEEDFKAKFFENNIYKNINAIKEYQNFKYSKRVDKKPNRELMNETIYSSRKIDGDEYIIRKIKNLYDPKNKDIKKKYLKDETTFLMYEHDKQTFESLRMIMERYKEADNPLAKYHEETGEYLRKYSKNGNGPIVKSIKYKHTKLGSHHEITHKYNKSKNKVFTLSFNPFRIDIYKENDKYKFINVRYVDIIDNGHEYAIDSKMYNERKLEKKISGNAKFIGSFFKYDLIKIDGELTSIIGVFSDAGNLLEVDLVEQSYKEFADINGLRKQKYMSIGSKHEILKYTTDILGNLYPVKNEKLKMKFPKSKGK

SEQ ID NO: 4871 - protein, 1064 aa, unidentified
  REGION 1..1064: note = Description of Unknown: Cas Enzyme sequence
MRHILALDMGTASTGYAIIDENYNVLITGVRLFREGTAEENVGRRRFRSSRRGVRRSRHRLDRLKELLTNVIGVSGDQSYTNLYEIRARGLNNKLSPDELIAAIIQLAKHRGIFYLSPEDLAAEDGSGQSSADIIRTNEYKLKEGVYPCHVQLEKLNTTGIVRGIENKFTHESYRNELIKLLEVQSEFYPKLKGIINDILCIYDSKREYYEGPGSYKSPTPYGSYQLDESGNVIKINLIDKMRGKCTYFPDELRAPKWSYSACLFNLLNDLNNLTIQGMKITEAQKQELISEYVNKGKSVTIPAIAKVCGVKKEDIFGFRIDKKEKPIFTKFEGYNELLKIAKSVNEEATIEGNKQLVDDISEILTKEKSIEIRKKTLIDDLNLSVNLSKEIAKLGDFTKYHSLSFKAINLILDSLLKTSKNQMELYTEAGIKPYNHNFSQNNQLSANLSDWIVSPVVKRSINETIKVFNALRKYLKTQMGEDAEFSDVVVELAREKNSQEKKDLIKKIQKANEEKRYKIMELVENRRLTRAEFERISLLLEQDFKCAYSLEPIELADVFKAGLLEVDHIIPLSISLSDAQSNKVLVYQRENQAKGQRSPFQYFCSGKAKITFERYKEYVTKNLNFSNAKKSNLLYLGNPVEDMKGFIERNLVDTRYASRETYNLLKSFFEYHNINTKVKVINGSATSYFRKKAYLSKNREETYAHHAQDAMIIAGFANTKLMKFFSKIGAFSESLNHKDSIVEVDGNIINSETGEVLEQELFDKSENVSNYIQFLKRIESIEPLYSHKVDRKPNRALYDQQIKATRSFVEDNKEVTYIITKYSDIYNTEKGNSGAKLKKRILESPEDLLMYHHDPKTFEIFLKIVEQYGEEDNPFAAYKEDHGPIRKYSKKGNGPIIESVKFREKQLGSHRVNTKQNGHNKSVFLKIKSLRTDVYQDGENYLVLNVPYDMVSFVNGRYIIDQDKYMKAKQAQKIPESARFVTSLYRGDYIAYEENGELVECIFKCINNEKAHRIEISYVDRPTDKQVMKGIKTSIKNLTKYNVDVLGNKYKVTDEKLEFDVTI

SEQ ID NO: 4872 - protein, 1053 aa, unidentified
  REGION 1..1053: note = Description of Unknown: Cas Enzyme sequence
MKKNYILGLDIGITSVGYGVIDYKTRDVIDAGVRLFKEANVENNEGRRSKRSTRRLKRRRRHRLQRVKKLLFDYNLLTDHSELTGINPYEARVKGLSQKLSEEEFSAALLHLAKRRGVHNVNEVEEDTGNELSTKEQISRNSKALEKKYVAELQLERLKTDGEVRGSINRFKTSDYVKEAKQLLKVQKAYHQLDQSFIDTYIDLLETRRTYYEGPGEDSPFGWKDIKEWYEMLMGHCTYFPEELRSVKYAYNADLYNALNDLNNLVIARDENEKLEYYEKFQIIENLFKQKKKPTLKQIAKEILVNEEDIKGYRVTSTGKPEFTNFKVYHDIKDITARKEIIENAELLNQIAEILTFYQSSEDIQEELAKLNLELTQEEIEQISKLKGYTGTHNLSLKAINLILDELWHTNDNQMAIFNRLKLVPKKVDLSQQKEIPTTLVDDFILSPVVKRSFIQSIKVINAIIKKYGLPNDIIIELAREKNSKDAQKIINEMQKRNRQTNEHIEEIIRTTGKENAKYLIEKIKLHDMQEGKCLYSLEAIPLEDLLNNPFNYEVDHIIPRSVSFDNSFNNKVLVKQEENSKKGNRTPFQYLSSSDSKISYETFKKHILNLAKGKGRISKKKKEYLLEERDINRFSVQKDFINRNLVDTRYATRELMNLLRSYFRVNDLDVKVKSINGGFTSFLRRKWEFKKERNKGYKHHAEDALIIANADFIFKEWKKLDKAKKVMENQTVEDNQAESMPKIETEQEYKEIFITPHQIQHIKDFKDYKYSHRVDKKPNRELINDTLYSTRKDDKGNTLIVNNLNGLYDKDNDKLKKLINKSPEKLLMYHHDPQTYQKLKLIMEQYGDEKNPLYKYYEETGNYLTKYSKKDNGPVIKKIKYYGNKLNAHLDITDDYPNSRNKVVKLSLKPYRFDVYLDNGVYKFVTVKNLDVIKKENYYEVNSKCYEKAKKLKKISNQAEFIASFYNNDLIKINGELYRIIGVNNDLLNRIEVNMIDITYREYLENMNDKRPPRIIKTIARKTQSIKKYSTDILGNLYEVKSKQNPQMIMKG

SEQ ID NO: 4873 - protein, 1054 aa, unidentified
  REGION 1..1054: note = Description of Unknown: Cas Enzyme sequence
MKEKYILGLDLGITSVGYGIINFETKKIIDAGVRLFPEANVDNNEGRRSKRGSRRLKRRRIHRLDRVKSLLTEYNLINREQIPTSNNPYQIRVKGLSEILSKDELAIALLHLAKRRGIHNINVSSEDEDASNELSTKEQINRNNKLLKNKYVCEVQLQRLKEGQIRGEKNRFKTTDILKEIDQLLKVQKDYHNLDIDFINQYKEIVETRREYFEGPGQGSPFGWNGDLKKWYEMLMGHCTYFPQELRSVKYAYSADLFNALNDLNNLIIQRNDSEKLEYHEKYHIIENVFKQKKKPTLKQIAKEIGVNPEDIKGYRITKSGTPQFTEFKLYHDLKSIVFDKSILENEAILDQIAEILTIYQDEESIKEELNKLPEILNEQDKAEIAKLTGYNGTHRLSLKCIHLINEELWQTSRNQMEIFNYLNIKPNKVDLSEQNKIPKDLVDEFILSPVVKRTFIQSINVINKVIEKYGIPEDIIIELARENNSDDRKKFINNLQKKNEATRKRINEIIGQTGNQNGKRIVEKIRLHDQQEGKCLYSLESIPLMDLLNNPQNYEVDHIIPRSVAFDNSIHNKVLVKQIENSKKGNRTPYQYLNSSDANLSYNQFKQHILNLSKSKDRISKKKKDYLLEERDINKFEVQKEFINRNLVDTRYATRELTSYLKAYFSANNMDVKVKTINGSFTNHLRKVWRFDKYRNHGYKHHAEDALIIANADFLFKENKKLQNANKILEKPTIENDTQKVTVEKEEDYNNMFETPKLVEYIKQYRDYKFSHRVDKKPNRQLIKDTLYSTRMKDEHNYIVQTITDIYGKDNTNLKKQFNKNPEKFLMYQNDPKTFEKLSIIMKQYSDEKNPLAKYYEETGEYLTKYSKKNNGPIVKKIKLLGNKVGNHLDVTNKYENSTKKLVKLSIKNYRFDVYLTEKGYKFVTIAYLNVFKKDNYYYIPKDLYQELKAKKKIKDTDQFIASFYKNDLIKLNGDLYKIIGVNSDDRNIIELDYYDIKYKDYCEINNIKGEPRIKKTIGKKTESIEKLTTDVLGNLYLHTTEKAPQLIFKRGL

SEQ ID NO: 4874 - protein, 1064 aa, unidentified
  REGION 1..1064: note = Description of Unknown: Cas Enzyme sequence
MGYILGLDIGVASVGYAIIDEKYNVLISGVRLFREGTAEENVARRGFRSSRRGVRRSHHRLERLKELLSNVLGVSGDQSYINIYEIRVRGLTNKLSPDELIAAVIQLAKHRGIFYLSPEDLAAEDGSNRSSADIIRNNENKLKDGVYPCHVQLEKLNTTGTVRGIENKFTHESYRSELIKLLDVQSSFYPKLKEIIDEVLCIYDSKREYYEGPGSYKSPTPYGSYQLDENGNVIKINLIDKMRGKCTYFPKELRAPKWSYSACLFNLLNDLNNLTIQGIKITEPQKQELINEYVNKGKSVTIPAIAKVCGVKKEDIFGFRIDKSEKPVFTKFEGYNELLKIAKSVNEEATIEGNKQLVDDISEILTKEKSIEVRERKLVDDLKLSTSLAKEIAKSSGFTTYHSLSFKAINLILDDLLRTSKNQMELYTEAGIKPYNHNFSQNNQLRANLSDWIVSPVVKRSINETIKVFNALRKYLKTQNGDDAEFSDVVVELAREKNSQEKKDLIKKIQKANEEKRYKIMELVENRKLTRAEFERISLLLEQDFKCAYSLKPIELSDVFKAGLLEVDHIIPLSISLSDAQSNKVLVYQKENQVKGQRSPFQYFSSGKTKISFERFKEYVTKNMNFSNAKKRNLLYLGNPVEDMKGFIDRNLVDTRYASRETYNLLKSFFDYHNINTKVKVINGSATSYFRKKAYLSKNREETYAHHAQDAMIIAGFANTKLMKFFSKIGAFSESLNNKESIVEIDGNIINSETGEVLEQELFDKSENVSNYIQFLKRIESIEPLYSHKVDRKPNRALYDQQIKATRSFVEADKEVTYIITKYSDIYNTGTGNAGSKLKKMILESPDKLLMYHHDPKTFEIFQKIVEQYGDESNPFAAYKEDHGPISKYSKKGNGPTIESVKFRDKQLGSHRVNTKQNGYNKSVFLKIKSLRTDVYQDGENYLVLNVPYDMVSFVNGRYIIDRDKYNKSQQDQKIPESATFVTSLYRGDYISYEENGEIVECIFKCINNEKAHKIEISYVNRPTDKQVMKGIKTSIKNLTKYNVDVLGNKYEVTDEKLEFDVTI

SEQ ID NO: 4875 - protein, 1064 aa, unidentified
  REGION 1..1064: note = Description of Unknown: Cas Enzyme sequence
MGYILGLDIGVASVGYAIIDENYNVLISGVRLFREGTAEENVARRGFRSSRRSMRRSRHRLDRLKEILSSALGVSGNQSYTNLYEIRVRGLSNKLSPDELIAAIIQLAKHRGIFYLSPEDLAAEDGSNQSSADIIRTNENKLKDGIYPCHVQLEKLNNMGTVRGIENKFTHESYRSELIKLLEVQSSFYPKLKEIMDEVLCIYDSKREYYEGPGSYKSPTPYGRYQLDESGNVIKINLIDKMRGTCTSFPDELRAPKWSYSACLFNLLNDLNNLTIQGVKITEAQKQELISEYVNKGKAVTIPAIAKVCGVKKEDIFGFRIDKSEKPIFTKFEGYNELLKIAKSVNEEDAIEGKKQLVDDISEILTKEKSIDVCERKLVDDLNLSTSLAKEIAKSGCFTTYHSLSFKAINLILDDLLKTSKNQMELFMEASIKPYNHKFSQNYKLSANLSDWIVSPVVKRSINETIKVFNALRKYLKSQNGDDTEFSDVVVELAREKNSQEKKDLIKKIQKANEEKRYKIMELVENRKLMSAEFERISLLLEQDFKCAYSLEPIELSDVFKAGLLEVDHIIPLSISLSDAQSNKVLVYQRENQAKGQRSPFQYFSSGKAKITFERFKEYVTKNLNFSNAKKRNLLYLGNPIEEMKGFIDRNLVDTRYASRETYNLLKSFFDYHKINTKVKVINGSATSYFRKKAYLSKNREETYAHHAQDAMIIAGFANTKLMKFFSKIGAFSESLNNKDSIVEVDGNIINSETGEVLEQELFNKSENVSNYIQFLKRIESIKPLYSHKVDRKPNRALYDQQIKATRSFVEDNKEVTYIITKYSDIYNTGTGNAGSKLKKMILESPDKLLMYHHDPKTFEIFLKIVEQYGEESNPFAAYKEDHGPICKYSKKDNGPIIESVKFREKQLGAHRVNVKQDGHNKSVFLKIKSLRTDVYQDGENYLVLNVPYDMVNFVNGRYIIDQDKYYKSKQVQKTSESATFVTSLYRGDYITYEENGETVECIFKCINNEKTHRIEISYVNRPTDKQVMKAIKTSIKNLTKYNVDVLGNKYKVTDEKLEFDVTI

SEQ ID NO: 4876 - protein, 1064 aa, unidentified
  REGION 1..1064: note = Description of Unknown: Cas Enzyme sequence
MGHILALDMGTASTGFAIIDENYNVLITGVRLFREGTAEDNVARRRFRGSRRSIRRNHHRLDRLKELLSNVLGRSGNQSYTNLYEIRVRGLSNKLSPDELIAAIIQLAKHRGIFYLSPEDLATEDGSNRSSADIIRANENKLKAGIYPCHVQLEKLKTRGTVRGIENKFTHESYRNELIKLLEVQSKFYPQLQDITEDILCIYDSKREYYEGPGSYKSPTPYGSYQLDESGNVIKINLIDKMRGKCTYFPDELRAPKWSYSACLFNLLNDLNNLTIQGLKITEPQKQELINEYVNKGKSVTIPAIAKVCGVKKEDIFGFRIDKAEKPIFTKFEGYNALLKIAKSVNEEATIEGKKQLVDNISEILTKEKSIEIRERALIDDLNLPVNLSKEIAKLGDFIKYHSLSFKAINLILDDLLKTSKNQMELYTEAGIKPYNHNFSQNNQLSANLSDWIVSPVVKRSVNETIKVFNALRKYLKTQNGDDAEFSDVVVELAREKNSQEKKDLIKKIQKANEEKRYKIMELVENRKLTRAEFERISLLLEQDFKCAYSLEPIELSDVFKAGLLEVDHIIPLSISLSDAQSNKVLVYQRENQAKGQRSPFQYFCSGKAKITFERYKEYVTKNLNFSNAKKRNLLYLGNPVEDMKGFIERNLVDTRYVSRETYNLLKSFFEYHNINTKVKVINGFATSYFRKKAYLSKNREETYAHHAQDAMIIAGFANTKLMKFFSKIGAFSESLNHKDSIVEVDGNIINSETGEVLEQELFDKSENVSNYIQFLKRIESIEPLYSHKVDRKPNRALYDQQIKATRSFVEDNKEVTYIITKYSDIYNTEKGNSGAKLKKRILESPEDLLMYHHDPKTFEIFLKIVEQYGDEDNPFAAYKEDYGPIRKYSKKGNGPIIESIKFREKQLGSHRINTKQDGHNKSVFLKIKSLRTDIYQDGENYLVLNVPYDMVRCLNGRYIIDQDKYFKAKQSQKIPDSARFVTSLYRGDYITYEENGELVECIFKIINNEKAHKIEISYVNRPTDKQVMKGIKTSIKNLTKYNVDVLGNKYKVTDEKLEFDVTI

SEQ ID NO: 4877 - protein, 1064 aa, unidentified
  REGION 1..1064: note = Description of Unknown: Cas Enzyme sequence
MGYILGLDIGVASVGYAIIDEKYNVLISGVRLFREGTAEENVARRGFRSSRRGVRRSRHRLDRLKELLSNELGVSGNQSYTNLYEIRVRGLSNKLSTAELVAAIIQLAKHRGIFYLSPEDLVAEDGNNQSSADIIRTNENKLKTGVYPCHIQLEKLNTTGTVRGIENKFTHESYRSELIKLLEVQSEFYPNLKGITDDILDIYDSKREYYEGPGSYKSPTPYGRYQLDENGNVIEINLIDKMRGKCTYFPDELRAPKWSYSACLFNLLNDLNNLTIQGIKITENQKQELISEYVNKGKSVTIPAIAKVCGVKKEDIFGFRIDKSEKPIFTKFEGYNALLKIAKSVNEEARIEGKKQLVDDISEILTKEKSIDIRERKLIDDLKLSISLAKEIAKSEGFTTYHSLSFKAINLILDDLLKTSKNQMELYTEAGIKPYNHNFSQNYQLSANLSDWIVSPVVKRSINETIKVFNALRKYLKTQNGDDAEFNDVVVELAREKNSQEKKDLIKKLQKANEEKRYKIMELVENRKITSAEFERINLLLEQDFKCAYSLEPIELSDVFKAGLLEVDHIIPLSISLSDAKSNKVLVYQRENQAKGQRSPFQYFSSGKAKITFERFKEYVVKNLNFNNAKKKNLLYLGNPVEDVKGFIDRNLVDTRYASRETYNLLKSFFDYHKINTKVKVINGSATSYFRKKAYLSKNREETYAHHAQDAMIIAGFANTKLMKFFSKIGAFSESLNNKDSIVEVDGNIINSETGEVLEQELFDKSENVSNYIQFLKRIESIEPLYSHKVDRKPNRALYDQQIKATRRFVEDNKEVTYIITKYSDIYNTGKGNSGSKLKKRILESPEDLLMYHHDSKTFEIFQKIVEQYGEEDNPFAAYKEDHGPIRKYSKKGNGPIIESVKFRDKQLGAHRVNTKQDGHNKSVFLKIKSLRTDIYQDGENYLVLNVPYDMVSCLNDRYIIDQDKYFKAKQSQKIPDSARFVTSLYRGDYITYEENGELVECIFKIINNEKAHKIEISYVNRPTDKQVMKGIKTSIKNLTKYNVDVLGNKYKVTDEKLEFDVTI

SEQ ID NO: 4878 - protein, 1064 aa, unidentified
  REGION 1..1064: note = Description of Unknown: Cas Enzyme sequence
MGYILGLDIGIASVGYAVIDDQYNIITNGVRLFREGTAAENVDRRAFRSSRRGIRRSHHRLERLTALLSTALDSKDDSSYTNIYEIRVKGLSDRLEPSELKAAIIQLTKHRGIFYLSPEDLAVEDGSSQSSADIIRINEHKLKSDIYPCHIQLEKLKTTGVVRGIDNKFTHESYRKELVKLLDVQSKFYSQLEDIKEEILNIYDSKREYYEGPGSYKSPTPYGSYQLDENGNVIKINLIDKMRGRCTYFPDELRAPKWSYSACLFNLLNDLNNLTINGEKITEKQKQELIDEYVNKGKSVTLPAISRVCGVKKEDILGYRIDSSGKAIFTKFDGYNELLKIAKSVNEESLIVGNNQLIDDISEILTREKSLEIRKEQLSEKLGLFAPLAKELAKATGFTAYHSLSFKAINLILNDLFQTTNNQMALYTAAGIKPYNRNWAQGNQLSANLAEWIVSPVVKRSLNETIKVFNALRKYLKKEFGEASEFSDVVVELAREKNSQNKKEHIKKILKDNENRRYQIMELVEGRKLDSVDFQRISLLLEQDFKCAYSLEPIELADVFKPGLLEVDHIIPLSLSLSDAQSNKVLVYHSENQRKGQQTPFQYFSSGKAKVTFEKFKEYVNQNSNFTKAKRENLLYLGNPVEGLKGFIKRNLVDTRYASSEFYNLLKSFFEYHKLNTKVKVINGGATNYFRKKAHLSKNRDETHAHHAQDALIIAGFANTKLVKFFSKIGAFSDNFEDKNALIEVDGNIVSTETGEVLNLDLFNKKENISAYIQFLKRIEEIQPLFSHKVDRKPNRGLYDQQIKATRKFVEGNKEETYIITKYSDIYNTGAGNSGSKLKKRILESPEDLLMYHHDVKTFEIFRKIVEQYSEEANPFAAYKADHGPIRKYSKKGNGPIIESVKFRDKKLGSHRINMKQEGKNASVFLKIKSLRTDIYQDGSNYLVLNVPYDMVQFTNSRYIINQDKYYEAKHMQGIPDSAEFVMSLYRGDYITYEEAGDTVEYIFKCLNSEKNHKIEVSYVDRPNDKQLMKGIKTSISNLTKYNVDVLGNKHKVTNEKLKFDVTI

SEQ ID NO: 4879 - protein, 1064 aa, unidentified
  REGION 1..1064: note = Description of Unknown: Cas Enzyme sequence
MGYILGLDIGVASVGYAIIDENYNVLISGVRLFREGTAEENVARRGFRSSRRGVRRSHHRLERLKGLLSDVLGVSGDQSYTNLYEIRVRGLNNKLSPEELIAAIIQLAKHRGIFYLSPEDLATEDGSNRSSADIIRTNENKLKDGIYPCHIQLEKLNTTGAVRGIENKFTHESYRSELIKLIEVQSAFYPKLKGITDELLCIYDSKREYYEGPGSYKSPTPYGSYQLDESGNVIKINLIDKMRGKCTYFPKELRAPKWSYSACLFNLLNDLNNLTIQGIKITEPQKQELISEYVNKGKSVTIPAIAKVCGVKKEDIFGFRIDKSEKPIFTKFEGYNELLKVAKSVNEEATIEGNKQLVDDISEILTKEKSIEVREGKLVDDLKLSTSLAKEIAKSGGFTTYHSLSFKAINLILDDLLRTSKNQMELYTEAGIKPYNHNFSQNNQLGAKLSDWIVSPVVKRSINETIKVFNALRKYLKTQNGEDAEFSDVVVELAREKNSQEKKDLIKKIQKANEEKRYKIMELVKNRKLTRAEFERISLLLEQDFKCAYSLEPIGLADVFKAGILEVDHIIPLSISLSDAQSNKVLVYHKENQAKGQRSPFQYFSSGKAEITFERFKEYVTKNLGFSNTKKRNLLYLGNPVEDIKGFIDRNLVDTRYASRETYNLLKSFFDYHNINTKVKVINGSATSYFRKKAYLSKNREETYAHHAQDAMIIAGFANTKLMKFFSKIGAFSESLNNKESIVEIDGNIINSETGEVLEQELFDKSENVSNYIQFLKRIESIEPLYSHKVDRKPNRALYDQQIKATRSFVEADKEVTYIITKYSDIYNTGTGNAGSKLKKMILESPDKLLMYQHDPKTFEIFQKIVEQYEDETNPFAAYKEDHGPIRKYSKRGNGPIIESVKFRDKQLGAHRVNTKQQGHNKSVFLKIKSLRTDIYQEGNSYLVLNVPYDMVQFINGKYLINQDQYYKAKKNQIISEKAKFIMSLYRGDFISYEYKGEVFSCIFKCMNSEKEHKVEISYIDRPTNKQERLSVKTSLKNLTKYNVDVLGNKYKVTDEKLEFDVTI

SEQ ID NO: 4880 - protein, 1064 aa, unidentified
  REGION 1..1064: note = Description of Unknown: Cas Enzyme sequence
MRYILGLDIGVASVGYAIIDENYKVLISGVRLFREGTAEENAGRRGFRSSRRSIRRSRHRLDRLTDLLSSVLNVSGNQSCTNVYEVRVRGLSSKLTPDELLASIIQLAKHRGIFYLSPEDLAAEDGSNQSVADIIRTNENKLKAGVYPCHVQLDKLKTTGIVRGIENKFTHESYRSELIKLLEVQSTFYPQLQTIIDDILRIYDSKREYYEGPGSFKSPTPYGSYQLDESGNVIKINLIDKMRGKCTYFPNELRAPKWSYSACLFNLLNDLNNLTIQGTKIVESQKQELINEYVNKGKSVTLPAIAKVCGVKKEDIFGFRIDKSEKPIFTKFEGYNELLKIAKSINEVDSIEGKVQLVDDISEILTKEKSIDIRERKLVDDLKLSNSLAKEIAKSGGFTTYHSLSFKAINLILDDLLKTGKNQMELYTEAGIKPYNHNFSQSQQLSANLSDWIVSPVVKRSINETIKVFNALRRYLKVKCGNDTEFSDVVVELAREKNSQEKKDLIKKFQKANEEKRYKIMELVGDRKLTSAELERINLLLEQDFKCAYSLKPIDLSDVFKPGLLEVDHIIPLSISLSDAQSNKVLVYQRENQEKGQRSPFQYFSSGKAKITFERFKEYVNKNLKFSNAKKRNLLYLGNPIEDMKGFIDRNLVDTRYASREIYNLLKSFFDYHQIDTKVKVINGSATHYFRKRAHLSKNREETYAHHAQDAMIIAGFTNTQLIKFFSKIGAFSESLNNKDTIVEVDGNIINSETGEVLERALFDKPENVSSYIQFLKHIESIEPLYSHKVDRKPNRALYDQQIKSTRSFIEDNKEVTYIITKYSDIYNTGAGNSGAKLKKRILESPESLLMYHHDYKTFENFQMIVEQYSKESNPFAAYKLDHGPIRKYSKKGNGPIIESVKFRDKQLGAHRVNRKQQGRNKSVYLKIKSLRTDVYQDGENYLIVNVPYDMVRFVSGRYIIDQDKYYKSKQAQKISDSAKFVTSLYRGDYITYEENGEIVEYIFKCINNEKAHKIELSYVNRPTDKQLMKGIKTSIRNLTKYNVDVLGNKYKVTDEKLEFDVTI

SEQ ID NO: 4881 - protein, 1054 aa, unidentified
  REGION 1..1054: note = Description of Unknown: Cas Enzyme sequence
MSLNTNGYTLGLDIGIGSVGWGIIDEERNIVDAGVRLFPEADGSNNESRRSTRGARRLKRRRRHRLDRIESLLKENHIWPEHEKFDKKKSTQPYELRRKGLYEKLTKEELTIALRHLGKRRGIHNVEVAEDEKTDGASTKEQIKQNDQLLKNHYVCEAQLILREQEGSIRGLKNRFKTSDYVNEARKILTTQQEFYPKEVTDEFISSYISLIETRREYFDGPGKESPYGWYEGDKPSQEKWFENMVGKCSYFPEEFRSVKQAYSAQLFNLLNDLNNLTITRAEEPKLTTEEKKEIVETVFKAKKGSPTLKKIAKTIDVKEEDIKGFRIKKNNTPEFTDLKIYKDIAKITVKEEIIENPEVLDKITWICTIYQTPTHRLEKLIELDLPISEEKLEQISELNYGGTHRLSLKLIQYMLPDLWDTSKNQMEILTEQGLKPKDVDYSGRKYLPYNHINEMVLSPVVRRSLIQTIRVINGVIKQYGTPKEIVIELARESNSEDKRRFINQMQKENEALNKEVRAKLEAAGKDGKGIFHKLRLWHLQDGLCAYSLKPIKIEELLDNPTHYEVDHVIPRSVSFDDSMNNKVLVHRDENQQKGNRTPFQYMSSGQYAKFRTQVLSWYKAGRLKRKKRDYLLEERDINKYDVQKEFINRNLVDTRYTTREIMTMVRQFFVSNDQEVKVKSINGSFTNYLRKLWDFPKDRGVDFKHHAEDALIVAMAGFIFEHKDTFAPQRRLLDEGKVVHKETAEILDEKEYASEFADKWEKVKAIKNYVGYKYSHKVDMKPNRQLFNETIFSTRTVDEDEFIINKHKNIYDPDYTKLKKMVFEKPEKLLMYKHDHKTFEKLLNVMEKYREAKNPLHQYHEETGEYLTKYAKNNNGPVIKSVKYIEKKLGIHYSITDKYQTESKNVVFLSMKPFRIDVYYEENRYKFVTVRYSDLKETSDRYILEKDTYSKICEGKNINDRDNFLFSLHKNEVFVLNGEVLRLIGTNDDGKNKIEANEFTNNYRERANREDFTPKQLFKTIGQKTEELRKLHFDILGNVFENKNEKIKWEYPK

SEQ ID NO: 4882 - protein, 1048 aa, unidentified
  REGION 1..1048: note = Description of Unknown: Cas Enzyme sequence
MKRKCGIGLDIGIGSIGYVVISRTNNFDARIEDLGVRVFDSGENIRKKASNAQERRGYRSVRRLLRRKKHRKERVKKFFLKIKLMNEIQLKAWEERNGDQNVLQTRIKGLSEKLKPEEILDCIIHICNHRGYREFYDEDSCNENINKDDLKKIEGGLASFDELYQHGNYKSVAEMILKDPVFKTETTFVDYRNHKNNDRYVLIKREFVKKELENILHQQSKYYPQLTENNIKIICDNMVFIQRDFETGPGNENDKTRRFMGFIDSIGKCMYYKDEKRAYRSTVIADIYALVNCLSQFSFINTETGEILLPDNAATKIIDTALLNAAITENDIKNILKPYQLEMRKPEKLQVKVPDTIRTLKILKSILTNAGYKYEELIKENQFDINNPSKLHQLCLLLSENITPARRTRVLKAKGWNEKLQKEVIRKKFGGTASVCEKYMINAIEAFKRGETYGNFQARMLKEQEETLSEFKKQKFLSPFDKKIDEELIKNTVVFKSVNETRKILNELIRRYGSPEYINIEVADDLGRSFKERSKIIKHYNDKQKDREKIENKLIELGLRKEGEVKPFDIERYRLWEEQEGRDLYTGEAIPLEKILSGIYDVDHIVPFSLILDDSLQNKALVNLGVNRQQKGQQVPLAFLNDVDKIDYLKRVNVLYKNKKISTKKYKYLMLPNLYANSELLTEWKSRNINDTRYITRFLVNYFSANLLFDSTKTKNVFGVKGIITSKMRKLWLNKKTWGDEQKNRDNNLHHAADALVIANLTPAYLEIASDKIKLDRIYKDYHKKISNEYLTYLGKAVNKMVKYYGFNKEYAEKLLATPNSRVPAMIRNIADETDIRLWDNSLECYKDVSEEQFYKNVRAFYKDDTVFADTIKPVLVSYKQNKKYQGKVADDTLYKNEEKGYYKKVISDNNKSILDARNYYCLELYKNIDDGISLRGIRYVDLKKQYKKLCINVSCPKDYKNHIMYLFNNDYIAIFDKNNNLKFNGYYKGLKSVNNRFIYVKNNNSNLSEYKTIGKKDIIKKYYVDILGKIGGEIKCSVPFLSLKDNI

SEQ ID NO: 4883 - protein, 1424 aa, unidentified
  REGION 1..1424: note = Description of Unknown: Cas Enzyme sequence
MKAYSIGLDIGTNSVGWAVIDEKNQLVRYKKKNMWGARLFDEADKAEGRRKNRAARRRLKRRAQRINFLQQIFAPIVLSVDDGFFIKLNESMLWKEDKTHDPVKLSLQKAGYYAKNPDDIKLRYPTIYHLRKALMESNEKFDPRLVYLAIHHIVKYRGNFLYQKDFNIDDSSNISEKLTQLFEYLEENFGFDSDVLDSSKQQEIVAIIKQTDKSRSARRSEIEALFEFSKINKVIFSEIIKMILGLNADAKKIFANLEDKLGIEFSGKYEDKRDEIATILGDDRMELINLLEAIYNWGVLQSVLKGEGSVSQAMINKYDAYATDLKFIKDLFREKLSRVDYKTFFKSKKDDKGETLYYTKYTTSGYDYKKFIKDFETYFIKATDGFGYSYDDFKKDTSGNKSPEKVTKAIDKFARQFSSEYAQKFIERLNNGEAFSKQRMSDNGAIPYQLHKNELIKIIENQGKYYPELLEKIDNGDGKQEYKIVRLLEHRIPYYVGPLQTKNQNNSNFAWMKSRADGNITPFNFYQKVDKIASAEAFIDNLTNNCTYLPDKPVLPRHSLLFSEFVVRNELKNLKIEGKRIPIELENEIFNGLFLQNKKVTRKMLIDLLKCENFVTLKNNSNPEIEGMAQSSGFTATMQPYIDLTKKVGLSVELEINSPSYLMAENLIKWITVFEDKGILREKIEKEYGDKLTSEQISNICKLNYSGWARLSRELLTTIKDNTDNSIIDLMRESKDNFMQIISKPPIKNKLQEKLEKYVNDHSELDVIDDIPASPALKRGIRQAKKLVDEIIELRGGQKPAKIYIEMARGGEEGKRKDTRKRQLEKLHNGIEINNSYCSADELRRIKKELEEWEEIDKEKRYLYFLQLGKCAYSGKPINLDTISQECEVEHILPQSMIKDDSLDNKVLVFREFNQDKGGSYPLALEITQSQIGLWRYWLNNKLISNVKFARLIKTKEEFEADELSGSFIKRQLVETRQISKHVATLFNKIYGSEDNTNVVEPVKAGIVSEFRDKFDLPKSRTINDFHHAKDAYLNAVLGQYLISKFPNRSRNALYSRYMSFKKDLMKNASARKQRNDRELSFVLSGIGRKEDMNCETGEIIDGEARVATIRHTMMFNDCLVTRMTETKTNGELYNATVYKHQNSAKAKIPRKDNLSVEKYGGHTSDKAAYMAAVEQTDVDNKKKRLIIKVPIRIVLLAHNNDALLSELMKQELGVKELRIIKSPIPKYQVIKTKDGSMLMLTSQADAGNVKQLRLPYDVENRYAKLQKLISGFDDFSTPEFARSMYYKLPEYANRVGETGNYHYELKNSIFEDIDVFLNEFYCTMVDKIAIYIPFYGKEMIGKLRVFFEAFIVCHDLKQKVAFLDEMLKLTQAKAQYPVFEKLDISKKYFKSGTGKITAKTFYLDDIEFYDYSITGLKVKKTKL

SEQ ID NO: 4884 - protein, 1427 aa, unidentified
  REGION 1..1427: note = Description of Unknown: Cas Enzyme sequence
MKYSIGLDIGTHSVGWAVIDEDNQLVRYKKKNMWGARLFDEADKAEGRRKNRAARRRLKRRAQRIHFLQQIFAPIVLSVDDGFFIKLNESMLQKEDKTHDPFELSLQEAGYYAKNPDGITLRYPTIYHLRKALMESNEKFDPRLVYLAIHHIIKYRGNFLYQKDFNIDDSSDISEKLTQLFGYLEENFGFDSTELDSKQQEIVAIIKQTDKSRSARRSEIEALFEFGKTNKVIFGETVKMILGLNADAKKIFADLEDKLGIEFSGKYEDKRDDIATILGDDRMEFINLLEAIYNWGVLQSVLKGEGSVSQAMINKYDAYAADLKFIKDLFREKLSRVDYKTFFKSKKDDKGETLYYTKYTTSGYDYKKFIKDFETYFIKATDGFGYSYDNFKKDTSGNKSPEKVAEAINQFARQFSSEYAQKFIERLNNGEAFSKQRMSDNGAIPYQLHKNELIKIIENQGKYYPELLEKIDNGDGKQEYKIVRLLEHRIPYYVGPLQTKNQNNSNFAWMKPRADGNITPFNFYQKVDKIASAEAFIDNLTNNCTYLPDKPVLPRHSLLFSEFVVRNELKNLKIEGKRIPIELENEIFNELFLQNKKVTRKMLIDLLKCENFVTLKNNSNPEIEGMAQSSGFTATMQPYIDLTKKVGLSVELEINSPSYLMAENLIKWITVFEDKGILREKIEKEYGNKLTSEQISNICKLNYSGWARLSRELLTTIKDNTDNSIIDLMREGKDNFMQIISKPPIKNKLQEKLEKYVNDHSELDVIDDIPASPALKRGIRQAKKLVDEIIELRGGQKPVKIYIEMARGGEEGKRKDTRKRQLEKLHNGIEINNSYCSADELRRIKKELEEWEGIDKEKRYLYFLQLGKCAYSGKPINLDTISQECEVEHILPQSMIKDDSLDNKVLVFRKFNQDKGGNYPLSLEIIQSQTGLWRYWLNNKLISDVKFARLIKTKEKFEADELSGSFIKRQLVETRQISKHVATLFNKIYGSEDNTNVVEPVKAGIVSEFRDKFDLPKSRAINDFHHAKDAYLNAVLGQYLISKFPNRSRSVLYSRYMSFEKDLMKDASARKQRNDRELSFILSGISRKEDTNYETGEIIDGEARVAIIRHTMMFNDCLVTRMLKRNNGKFYDINLQKKEIGEKKKKDNAKAVLIDKKKGLPSDKYGGYDGVQKAYYVAIGYHDTKGRRKNELIGIPIDVANKIDSKQLKIIDFVKSVVPKDTSDVKVLRDKILKYQVIKRNDSMQMLVSDQEVWNARQLFFDFKIEQLFAILDKKDKDDKKMVNVNCLDNLESNKYIKNKLCRILGIDLQTNTSTICKIINEKLNEMFEVFIEKLKENYHLFDNETNRIESERSVFYGCSIAKKIGILDQLLCMTRANSDTANFKTNTFGKLSIDRMGRKTGQSFELSDIEFYDYSITGLKVKKTKL

SEQ ID NO: 4885 - protein, 1050 aa, unidentified
  REGION 1..1050: note = Description of Unknown: Cas Enzyme sequence
MNRSYGLGLSIGIGTVSYTVLSQIKDTNNIIDNDVRIEDIGVRMFETGETPDHKNSLNQDRRSYRASRRLIRRRKHRKERVKHFLERIQFINYDKYRTWKKNFNPNIFQLKYDGLSKKLSPEEIFAIIIHFCNHRGYKDFYEEDATTINEKERGKIKTALSNFEKIYKDNGYISVSEMILKDPIFLGKGNYPDYHNHAIKNKQDNIEPRFFLIKREYLRKELINILKKQQQYYSKLTDKRINFICDNIVFIQRDFEDGPGDKKDSTRKYMGFLDSIGNCIYYKNEKRAFRTTIISDIYSLINQLSQVYFIDKNTEEISFSKEAANEIIDYVLINASLTEKDLKNILKKYDLILNKPGNLKLKINDCLKALKILKNTLEKCGYDYTSLIKEEQFNLKQPSKLQKLCILLSKNITPKRRILALQKAGYNKELQQEMIRKNFSSTANVSEKYMIQAIEAFKHGENYGNFQARMFKDKYNNITKKEKHLLLPSLTLKDDEDIVKNVVVFKAINETRKVINALIRKYGSFKYINILASDELGHSIQERKRIVKMQNKNRKETQNIRTKILELGLKKEDEITTQDIQRYKLYQQQNGIDLYTGSIIPENEILGTNYEIDYIVPFSLILDDTLNNKVLTKISINRITKNTKLPLQFLENEALDFYKKTVTTLFNKGKISSKKYNYLLLPILNEEILSEWKSRNLNDTRYICKFITNYISSNLIFDSNKKKNVYAIKVPIISKMRKIWLNKKTWGAKELDKTNNLYHAVNALVAANLTPAYVEIVYDNIRLQQIYREHHKTISNEYIDYLNKSINKMQKYYGFSIEYSQKLLRSLGKVPAILKNIWAEADIRLADNTIEYYKDIDDERFRQNICSFYQDKEFAESVQKVIVSYKSYKKFQGKITDDNPLPLRKNKSSYIKKMNNILNANKYYCIEVYKTIDNTINLRGIRFIDLIRKKGKLKLVIDNPIDYKHHIMYLFKNDYVKVYKNNKLLFKGYYKSVGNINQNILMFKIDNSSINTLKFIGKQYNIKKYDVNILGKLGGEIKCSVPFMFHKGNN

SEQ ID NO: 4886 - protein, 1502 aa, unidentified
  REGION 1..1502: note = Description of Unknown: Cas Enzyme sequence
VFPLKPILQHFGGNVKQMAKESTKERLKKTNYSIGLDIGTNSVGWAVVDDNMNLVKRCKKHLWGSRLFDTRETAEKRRKFRGARRRLLRRRIRIAMLNKIFADFIGDENFFVRMQESFLQKGDRSLRNKDILFDEACECTITKDNGERITISSDSDFYKLYPTIYHLRMDIMAHPNWQFDPKLIYLAVHHILKNRGNFINEDMATQGEKVDLLDLLSQMLNSACDILDIDINEIDEFSECKWIYKLNTNAEQFLAILQDNALSKKEQKTKIESDFDCKKDNKEIVEIFKMLVGYKFGLSNIFPNNCEDKTDYDLSSADADEKIASANDFTEFLTNAKNLYSNIEYDRIMRGKTYISEVMIERYNRYKQQLKDLKSVFLAIYPKQNGRMHPEYRKFFRDLKTVDNYARYTYSANSCEEKNFKEFIEKVIINNKEPIINGGICLDDNQSFAQKAKKILICMGSKLVEEDKETIFTDIELTDFDRQKEAELGFLQRPRVAGNGIFPKQAHEAELNKILKNQGQTWSDFLNGETQNKIKDLFNFKIDYFVGPLGIRKDKNQQNFGWLVRKEGFENEPITPFNYDNAIDFEKTRTEFIERMTGTCSYMIGEKALPKNSMFYSYFNVLNELANISVIINNKPEKLSKLSNQSGMGYFDDVINRLLETNTYKQKDLLNLLSHYYENVSIRGLADSEKLNSNLKPIRDMARIVCGKMELSANTIMEFLCSEKAEMCENIIRDITIFGESKKSLGESLHKYDLTDKQINELCALKYTGWGNLSKKLIYGIKSQDTQHLTILELMDKERKNFMSIYSDQRYGFDSQVKQELEKCSTSIAEKIEELACSPSVKRGITQAFKVAEELVSVMGHAPQNMFIEFARGEDKSKKGKISTSRQKQLKKKYDEALKSAQDLYKQLISDNNELKSNLNNLKDADKAKDFDNEKVVLYYLQAGKCMYTGEPLYLDRLNEYEVDHIVPRSLITDNSFENKALVKKYANQEKQDSEVVPNKFKQYKLWQSLKTLKFLSNEKYMRLARTELTDRDKAGFIKRQIVETSQIVKNTAILLDSYFKNKKEETHIYSIKAGLNSEFRKQFGYPKGEGGRAINDLHHAKDAYITTIMGNYLLNKWTLDNVESLHTSGLFYNAKSAKSSQNGLLLWCLKQNADNGVEWKDDDNLTTKMVLNNFDRNYYSADCFFTKKINSKPTGEFYDQTKYKNVKNAKAWGENYKSSMVTLGKKKFGKELDPAIYGGYSSINPSIFAVLQKQTNKGFRYEFIGIPTMIICPTSTMSVKEYLQLNYPNHKIVRFIPQYAVLEEETFGKAIISGISDKYCANQLKFSRRNKELYKFTYLVFKYFDGNKKFVNYMRWLDDGTYPILSKDEKELLTIQKQKQYAESYVLDCVSRFKTEYIGHLRSKYIRKDYADVFEPYFDEMLSENADLNKMLAIIPDLLKVTQCNGARASFKDYSTQNTKLSGEYGRITVSIKDWENTYIIHNSITGIYSKKEKIIKNTKK

SEQ ID NO: 4887 - protein, 1361 aa, unidentified
  REGION 1..1361: note = Description of Unknown: Cas Enzyme sequence
MKDFPKEYYVGLDIGTASVGWAVVDKEMHLLKNSEKHLWGSRVFEQAQTAQNRRMARGIRRRLSRRFLRLKELQKLMMPFVDNDDFFQRMNESFYMREDRTQKNKFNLFCDIDYTDKDYNKEFPTIYHLRNVLMTENKKFKKELIYLALHHILKNRGNFLYENFQGDINTLNLADELDFAIQNTNSIYANEDENFKIAFKQSNDEVCKILLDTRLSNAEKIKAIAIKENVLSVFVSNMLVGFQVDLYKIFGDESIINNNFKRKLKLKDTEIEDKILELGEYGEIVATWLKFYNALQFKLIMGDNKNVSSALIKKYEKHKQDLKNLKHIFKKYLSKNDYTNFFKKLDSQKTINYALYVESDEMAGKFSGLGIEVLCKNINKIFYQISPKITDANDSELISNMQNDIEQNNFLPKIRTSDNGVFPYQIHMFELQKILENQGKFYPYLNKIKDKIIQLMSFRIDYYVGPLAKRKDSDFGWIKKKKGYENITINAFNYDEVVDKEACQEEFITRMTGQCTYLPQEKALPKNSIYYCWFNVLNELSNIKYIDDNGSQFLSKELREVILDEFLLTNSINEKKLSHLLEQNGISVKGITGLATGDKMMSNLKPYRDFRNILDSTDNENNSIFENFMKWSAIYGEMVENIIKWLTIFGDNRSLLINKIKKAYPQLTMEQLNKIRALSYTGWGNLSKEVLFGIRAKDSERGLTILEAMNKDGANFMSVLNNKKYDFLIRFAQKRDEASKLTIQDLVKNLAGSPAIKRGIYQSYKIVKEINNYIGYAPKKIFIEFAREEGKKERTVNRQNQIINFYKNLEKQYQDLWNNIDKNFLYDEKNVKLFDNEKYFLYYLQNGKCAYSGDSLDINKLSSYQVDHILPQSLIKDDSLDNKVLVTMDRNQYKLDADTVPSEIQNKMRGFWFTLKDAGLMTAEKYSRLIKKELTDSDIKHFINRQLVETRQIIKNTADILNKYFIDNNEQVNIIPVRANLGSQFRMMFGYYKGDGARVLNDFHHAKDAYLSVFMGQYLYQNFADMSEVVREYNARFKMDIKHTNGFLLNSLNYEKDWYKDKTFTNKKALANFEKNYYYTDCYFTMKTEVSNNGELYNQSVYKNEKNRKRFGQNAKQLISLGHFNNSSKDMPVADYGGYNSKNYAYFVIVKLGNGKLTFECVPYLVTIKNFNLDSYIKEQFGNDAKLIAIIPKYQLIYDKVLRYVFITGDRSKNIATQFVIGRKNKQLYEFIYHIYSGWRNYDEEKNNQSKEDFCEQCFKDFAIIFIKHLQDNYPLDSTCKKVEELFKKEQVFSFEQKCDLIKELLHISHSDASTCDLKKFDETLAANAGKIVKNVDLDTAYLIYNSVTGIYHKKVKITEI

SEQ ID NO: 4888 - protein, 1096 aa, unidentified
  REGION 1..1096: note = Description of Unknown: Cas Enzyme sequence
LGKILGLDIGIASVGWGIIDTDTNKIVDMGARLFDSADANNNKTRRDARGSRRILRRRKYRFKCIEKLLLNHGFYPPTDYDVNPYELRVRGLNEKLEPSQIFAALWHLAKRRGISYLDEAEDEQKNINDSLKTNNELLKEKYPCEIQLERLNKYGKVRGLIEIENEDGSSETLVNIFTSGAYKSEALQILSTQSRHYNQIDNDFIEDYIEILTRKRDFYIGPGDKKNRTNYGIYKTDGREIASIFEELIGKCSIYRDEQRAPQASYTAQEFNLLNDLNNLTVNGRKLSEQEKRKIISSILSTKNVGVTTMVKLIKVATGLGNDIDIKGYSVDKDEKMVFNHTFEAERKLSRFLQDTSINYEDFSLEDKDRLSEILNKSKDYKSLVKNCEDEFSNFKEDDMALLFSFLQKNKTLYSNWHSFSLKIMREMRGDLYKNPKNQMNLLIEKGIKKSIEADFSKYKYIPLNFLDDEIYNPVVKRSVNQSIKIINSIIKKHGDLEAIIIEMPRDANEKEEREKLQKIQRDNEREKREALDRARNEYSITEKQLYSQKTLTNKIRLWYQQDGRCIYTGEPISIQDLINYPNSFEIDHIIPKSISLDDSLNNKVLCYHSVNQIKGQRTPFNAFSMNPNNVDYDKIKDRASKLLGEKKINKTKYELLTFEEDISKQDIRERFINRNLNDTRYASKVVLNGLEEYMRNKNKETRIHLVRGKFTHQVRKRWGLVKDRDESYAHHAVDAIIVASCYLLGQSDGTVRSPFLQKIGKSKIPFWNVVSNNEYDKEVYKLPWDNFIIDLNNRIDKIRYSHKIDTKVNRAISNATLYSTREIDGEDYVVEKHKNIYDNVTAKKVIDGIRKDLEKFKDPNDSEILMRKHDIKTFEIITKIIENYSDENTNVFEAYRKEHGYIRKYSKKGNGPIIKDIKYISKRLGHGLEVSKTDKLSKDKKVVLLSLNPFRSDVYYNKEKEIYKIIGIKYNDLIFKEGKYVLKFDDYTLMKKQLKIDAHYDFLFSLHKNDIIGITYKSNPGIEERFRFLSSRADNPNRIEIKPIDKNKFEKQKQPTIGTKVLKFNKYYTDILGNVFNVIDEELKFEFAIDNINDI

SEQ ID NO: 4889 - protein, 954 aa, unidentified
  REGION 1..954: note = Description of Unknown: Cas Enzyme sequence
MWGVTLFDKGNLCDNRRAHRVERRRIDRRQQRILLLQELFAPAVSEVDVNFYKRIKESALVRTDSEEPYCLFNDKNYTDADYHRQYPTIHHLIAELISDSTAHDVRLVYIACAWLLAHRGHFLSDISTDNVNELRDFGSSYYGLMNFLQEYSQESDYRAPWVLDENGVKEFGEILKQKGVNRKIVRLQTLLNDGKKFKKKAGDETAFPFSIEGIIRLLCGGTYPLADLYSNPAYSDFGSVCLSADDESMENVIAALGDDGELIIRLKAIFDWAILDDLLNNCSYISQAKVNIYEQHRADLRYLKEFVRKNYPAETYNQIFRKFVKNNYVAYCGNIKNCPNTDKYEKCLSREDLCKYLRNELELDNGAGENAVDPEILNRIRNNDFLPKQVSTENRVIPYQVYYVELKKILENASGYLPFLKEEDADGYVTREKILSIMRFRIPYYVGPLNKNNNEHAWIVRREGESGRILPWNFEEKVDLDASNEEFIKRMTNTCSYLAGEEVLPKSSLLYSRFEVLNEINNLKINGVSIDIKKKQMIFCDLFMKKKKVTPKAVKEYLIRNNMCSKQDAETLSGIDIDIKSSLSSRIAFERLLASGALTEADAEKIIKAKTYTEDKNRFNKWLGENFGHLTADDRKYIGNLKFKDFGRLSKTLLSGITGRKIDSETGEIGSAENTVIGFMWESNATLSELLLSDKYTFAQTIQQMNAEYYSKYPKTLEDRMKDMYISNAVKRPIIRTFDVVNDIVKVMGGAPKKIFVEMARGGDKEKKNKRTVSRKQQLLDLYKSIRDTDLREIARELEISLEKEEENRLQSKRLFLYYTQLGRCMYSGEPIDIRALMNGNKEYNIDHIYPQAKVTDDSIINNKVLVLSKINGEKKDVYPINREIQSKMHGFWSKLKANGLIGEEKYNRHKNEGLFAGGRMGLYQPPAGGNTAIDKGRCHTACGKVPRHADSLC

SEQ ID NO: 4890 - protein, 994 aa, unidentified
  REGION 1..994: note = Description of Unknown: Cas Enzyme sequence
LRNVLELDNGTGENAIDPEILNRIRNNDFLPKQVSTENRVIPYQVYYVELKKILENASGYLPFLKEKDADGYVTREKILSIMRFRIPYYVGPLNKNNNEHAWIVRREGESGRILPWNFEEKVDLDASNEEFIKRMTNTCSYLAGEEVLPKSSLLYSRFEVLNEINNLKINGVSIDIKKKQMIFCDLFMKKKKVTPKAVNEYLIRNNMCSKQDAETLSGIDIDIKSSLSSRIAFERLLASGALTEADAEKIIKAKTYTEDKNRFNKWLGENFGHLTADDRKYIGNLNFKDFGRLSKTLLSGITGRKIDSETGEIGSAENTVIGFMWESNATLSELLLSEKYTFAQTIQQMNDEYYSKYPKTLDDRMKDMYISNAVKRPIIRTFDVVNDIVKVMGGAPKKIFVEMARGGDKEKKNKRTVSRKQQLLDLYKSIRDTDLREIARELEISLEKEEENRLQSQRLFLYYTQLGRCMYSGEPIDIRALMKKDEKYNIDHIYPKAKVTDDSIINNKVLVLSKINGDKKDVYPINRDIQSKMHGFWSELKANGLIGEEKYNRLTRTKGFSPEEEWGFINRQLVETRQSTKAVATLLAEKYPDTQIVYVKAGMVSDFRQEYKLPKSRALNDLHHAKDAYLNVVCGNVYHEHFTRPWFLKNRSNYTVNMKKLLEGPVYGGGVRVWDGAPSVAAVKRTMLKNNCHMTFYSVMRKHGNKGGFFDQNPLRAGKGSFPRKADLPVEKYGGYNRLTTAFSVLVHYQLGKKPVAEFVPVALINAERFLADSDYALNGYIRQHLEPKAADIKLLLGGRPVKIGTEFALDGLHVLFGGQGTADTHIGMKVFTPLVLPEQDVQYVKAVESFVQKTEENEKLEYSENETVSKDGNIALYDLLIEKYSSRPYSLRPENQCIKLTKGRDTKRRDTEERDIKGRDKFIALGVKEQCAVLLHILSQFNRTAVADPTLKLTGNCRLPSILNGWKYGDVRIIDSSASGLRKKTSDNLLELI

SEQ ID NO: 4891 - protein, 301 aa, unidentified
  REGION 1..301: note = Description of Unknown: Cas Enzyme sequence
  MOD_RES 286..298: note = Any amino acid
MKNKNYFIGLDIGTDSVGYAVTDTAAQYNLLKSCGEPMWGVTLFDKGNLCDNRRAHRAERRRIDRRQQRILLLQELFAPAVSEVDVNFYKRIKESALVRTDSEEPYCLFNDKNYTDADYHRQYPTIHHLIAELISDSTAHDVRLVYIACAWLLAHRGHFLSDISTDNVNELRDFGSSYYGLMNFLQEYSQGSDYRAPWVLDENGVKEFGEILKQKGVNRKIVRLQTLLNDGKKFKKKAGDETAFPFSIEGIIKLLCGGTYPLADLYSNPAYSDLGSVCLSADDESXXXXXXXXXXXXXASL

SEQ ID NO: 4892 - protein, 1124 aa, unidentified
  REGION 1..1124: note = Description of Unknown: Cas Enzyme sequence
MLNKYTLGLDLGIGSVGWAVINQDGAEARLENFGVRLFRSGERNAGKDRLSQERRKYRSERRLVRRRKHRKERLKAYLQVIGLTNLDKIQAWYEKNNPQIYAIRAKGAYERLTGEEIAVALIHIANHRGYRDFYEFTNFGEKDQKDKEINDIKQAISVIDEIYINGNYKTIGEMFHKDNEFYKIYNIDNESDKKRLFPCTKNNEHTFRYLVNRTYLEHEVATILSVQSQYYSCLTQQVKNKIVDIIFSQRDFEDGPGDVNDNTRPYKGFLYSIGNCRYYKNLPRGFRHTVISDIFALTNALSQYSYRDLSNGSINLSCDAAEAMVNYAMTNAAISIKEVKTILKTFNIELIENSNIDKKALIKSLKYLPYIKKALENVGFSWQEYIEEDQFDKNNPSKLHLLGEVLSSYQTPRRRKKELNKFNFVNNKLLDILLAKKFSGTVQVSKDYMIDTIKAFLRGETYGNFQARKIVETDKLFADIKGVKSSRLPPITDKEINQNPVVFRAINETRKIVNALVGLYGLPTYINVEVAKELDRSFETREKMKKEHKKNEELYERLKERCKELYDADKVNEVMLDKLRLYELQAGKCYYSGISIEADELMSPMYQIDHIVPYSLILDNTIHNKALVLATENQNKRQRTPLMYMDENKRNEFLARINEDYRQKKISDKKYKYLTLQNLNDEALLHEWKSRNINDTRYITKYIINYMQRNLIFNTEKKHSVYGVKSAVTSRFRKIWLRGSVWGAQEKDRQQSHFHHAVDAIVLANLTPEYIEIASDYLKLESIYRRNNKRETSEYLEYLANCQNKMLKYYGFKKDYAEKLLRGGKVPALLPRIQAEIRLRLNDECTLDDYRSRAELFYRDRAFTEALVQPIVSAKPNRKYKGQINDINPISVQEIDGVLWKVKRKEIETLCHSDISKLVGASTDLLDKLSEVFIGKEDKYTVGKYLKENNLDILMTSSGHPVRKVSLKEASTGIKFTKHIDAKNEAVLNTKYHCIEIYKDFDNNTCMQGIQYVDLKKINGKLVLLKEFPQKYKEHIMYIFYNDYIKIYNKRNQLKASGYYQGVANINQGKIYCVPSNKPELNRDKLKISLSKSDQIYKYDVSLLGRLGGEVKCGEQLLSVEVKN

SEQ ID NO: 4893 - protein, 1080 aa, unidentified
  REGION 1..1080: note = Description of Unknown: Cas Enzyme sequence
MDKKIRIGLDIGIGSIGWAVLSDDAETQKVEDCGVRLFDSSENIRDRENNNQERRRARAGRRLIRRRHHRRERLKKHLENIGLISVATLQEWYEKNNPNPYELRCNALDAKIKPEEITASLIHICNHRGYRDFYELQEDDATKEEKEEAQKENEAIEGFNNLYKTTSFRTPGEFFFKHKGLSHIRNKATSEQRLLVPRKLLKQETESILKKQSRFYPCLTEDAIKITLDIVFSQRDFETGPGNPDDPNRKYKGFLDTIGYCIYYKDKKRGCRNTVLADLYAATNAISQYMFINTETGAIELKSETANKIINHILHSGNINLTELKKLIKEDGLTLSSGVNLDNKALPNAIKYLRHTKSILEDSGFDWTDFINEEQFDISNPSRLHLLGKILSSYQTPERKEKELRKLDFLNEKAIKLFGSKKFSGTSNVSYEYMIDAIEAFKRGETYGNFQAQMFDKQGERTKNKYLPQICDEDIIKNPVVHRALCETRKVLNAIIAKHGSPETIVVEVASDVSRSFEQRLEIMRDQRKKQKENERVRNTLMELFGLEEKEVTPVLTDKYKLYESQGGKCLYSNREIMLERINTDDYEADHIIPFSLILDNTLNNKALVLSSENQYKKQRAPLEYLHGEKREKYIETVKDMLKHKKITLKKYQYCMTENLQNEGLLDEWKSRNINDTRYVTKYIIGYIKNNLQFSTDKPQPIYGIKGGITSQFRRLWLDRETWGKPDKDKSREETTLHHAADAIVIANLTRPYVEIGSDALKLREIYKRQGDGEAYRDYLKKCLDKMQKYYGFNPYYTESTLTKRGRIPSFVPNLRYEVDALLNEENAPITSYKTERKYRGEISAQNAIGIKKIEGELWQISSKPIRNISKKDLDNIYSDDGLLLKKLHEIFDKRQDTEYTLGDYMDETGLKEFSPNGRQAIHKLKIKVKKANDVFVKQINDKNNTILDVRKYYCIEIYKTKGNKTAARGIKYTDITKEEKRLYLKSLYPEDYEEHIMYLFKNEYIEISKPNGDTKFAGNYCSVKNINNGVLWMKEINKPAAQAVSIAQSDTLKKYAIDVLGKKGGEIKCSVPLSSIKES

SEQ ID NO: 4894 - protein, 1149 aa, unidentified
  REGION 1..1149: note = Description of Unknown: Cas Enzyme sequence
MSEKYSVGLDIGIASVGWSVLSVDNENIEDLGVNLFSARSSAENKERREARGARRLTRRRVTRLNDAKSYLNDNEFIRQEQYKHACPYTLRVNGLSQELTKGEIYNVITHIIKKRGISYLTDVDEENNDGKNYKAQVQKNKALLKEKTPGQIQLERLHEGGRIRTGINDKGEYILNVFNVSAYGSELERILKTQSQYHPEITEAFIKYFTDPKEGLIYRKRPYYHGPGNENNPSEYGRWADYPQTGEPKENIFDQLIGTDLQGKVRASTNSVTAQRYNLLNDLNNLTFTNRSESKLNTEEKVFILNYLMTEDINRFGAKNFIKLLIDEEIIPDDSTVKSVKGWRLGGTEKKPETIHSMASYRAWRKLFAEKAIDIATIPDHVLDEIAMVTTINTELDAVKRTFDLKQKNHGLVIDPRVREVVEENFMELRKKKDTSQSWHSFSLDTMQQLIPELLHTSEEQNTILERLGIKKDLRNKYADHTTLPINKIIEDIYNPTVSKSVRQSLKVLNAIVKKYGKENLEHVVIEMPRDKNEGEQKKTIRKIQKSNKNRREESRKYFQKKIGWSDKEFEDRIQSGGFAKKLYYYYEQDGICAYSGRPIQPSDLLGQHTEIDHIIPLSISLDDSLNNKVLVFSKANQEKGQRSPKQAYDEGAKLGQTWEGYRAWVNNNERFKKHKKKYLLETRNIFDPEVAAGFIARNLNDTRYASRTVLNAVQSFFYNSDTKVRVINGSYTHTLRKKWGEALDKQRETHHHHAVDATLCAISPYVREEKYRYMGRKDDGKVYMLDEITGELITYQDYKNKDLYGRKNYVPEWDGFIEQLVPLKLHPRIKFSHQVDRKWNRKISDATIYSTRDRQVTNKKGKLEQETLVLGKTANIYTSEGYEDFVKHKEDLLMKELDVQTFDKLCKIEAEYPDFKEVEQSNGKIKKVDVSPFKRYCEVNNVPAIRKYSKKGNGPFIKQIKYYYKTLGKHLNITKDSTGQSIEQTKRNKKVILLNQNAWRTDVYYDEKQNKFILVGIKYYHLKFVNGQYGIPQQTYNELLAEESIPATAEFRFSLYKNSGLRVEDDGVVDLLFSSRNETGKNYFEAKPIEKSKFAKSELLPVFDKVAASGRFLKSIKSGMKLTKFHTDILGNKHFVTHERLKGIISES

SEQ ID NO: 4895 - protein, 1441 aa, unidentified
  REGION 1..1441: note = Description of Unknown: Cas Enzyme sequence
MRSTGMCRGNHTTVFMLMRRGLGFEMNKFIKQASKKQKYTISLDIGTGSVGWAVLTEPACTSQQNQNKHGEVLAFLAKARKKVKVMDGGTALTKKKRTNLWGVRLFDSAQTAQDRRLKRRGRRRILRRTKRLKYLREIFERDIKEPDPNFFDRLSESFLVNGDEKKIYKTEKGKGPLFAGKLGDGESYSCDADFYKKYPTIYHLRQHLMETTHKVDLRLVYLALHHIIKYRGHFVNEKQSIAVEKFDIKDYLEKFINACIKLRHESDDEYEHRGSLASVGGFNKNSLLDGKLEKANDILVNKKLSKSRKVEELVGVFGKDCKDIFIAIVGNSINLEKIFSDPEYKHGNDENIPKPSDLKYSLEAEKLDDLMSKVSVVLSEAEFEILQLGKSVYSGIILSGILSKPTLSASMIDKYDLHKKQLKELKKFMRQNCSKKEYKAVFNDYDPADSKRSGIYALYIHETKSMSQEDFYKALKKILPSESMPQDILESMDMENYLPKQRYRVNGEIPFQIHEHELCKIIDNQKAHYPFLGEVHATLNDRDEYKIQTLMKFRIPYYVGPLATPEAISRKHATNAWVALKSEAANTKITPWSFDRVVDKDASNANFIERMTSFCTYLPDEKVLPKNSLIYQEFIIYNELMSCGYYIRGEGGKSKKQFFCSELKHQIMEALFKKEKNITVQKMLDFLDKEGYVPYIGKDQLFGVDKAKKGAKYNGSYSTYIDILRALKDDTHSEEQAVKTIEAHKSRFEEIIKWATIFEERDIRRRKIKLANVGEWGHFLTESQVSRLSKLKYKGWGSLSAKLLTGIKTSENKTILESLKSGTYKNFMRLLADERVEETIKKAEAEKGDIDKLDYALVESIAGSPAIKKGIWQSLQVIKELEEFLGRENIGKIVVEVSRDIGGQKGRRKKSRWQKLDALYSSFKEKTGEPIAASIRSELNDYKGNEKALDNEKLYLYFLQNGKCMYTGEPLHISSLSSYQTDHILPQTLITDNSIDNKVLVKAIENQKKDARVLDPKTIAKMIQFWGVLVKSGQMSERKLENLKRDNMTDSDIHGFINRQLVETRQITKHVANILLEHFNKDNDIEVLTPRAGLTSIFRTEFDLEKNRAINDYHHAHDAFLNGIVAIYAYKVFPELKDLWVYGNYVRKHKNMMSQNSKSVIAGMKESAWIESGSGEIIAKRDATMSMIKEVLGYRDVNIVKKTERVTGALYKETIKKKGRNKELVPMKKGYDTSWYGGKDREEAAFSIIVKNDKGEVKALPLHKPDESGYINALCKLSFLQSLYSEDKITEIVIEKLEKYTQYRLPNGGVRLLASYQEAQNGRQMKMYAPPTEKSSKDELLRIYDLLSEFIMSNRLFADVKIELLKGEMRNNFMNSESGVMLKAIEELMRITKGSNQTLKTLSDIGLGTTAQQLKSGNLISSGTTIIHRSTTGLYETQIKL

SEQ ID NO: 4896 - protein, 1439 aa, unidentified
  REGION 1..1439: note = Description of Unknown: Cas Enzyme sequence
MNNKFYLGLDIGTDSCGWALTDERYNLARISGKDAWGVRLFESADVAAARRQKRTARRRLQRRRLQNEWLREVFSQEIEKVDPKFFDRLKYSNLHLEDKEQMGMNSRYSLFNDILEEAYTDKEYYNKYKTVYHLRSELIKKPADDIRLLYLAVHSILTHRGHFLYTIESSKNIDETKMFNDLVDKLGEIIVAEDGSKIFNVNHASKDNFARLYQDLKEGTSLRQTKETFAEGIGAKSKKDKDIVKIVVDGKFKLKDLFAEIEKEDNIEVNFSSDKYETEVYGNIIKTLGDDDKLSIIDDFQKIYSSIQLKRLLGDHKYICQSLAEKYDIHNAQLKEFKDFIKKYYPSKNAFVFRYVKPKKSSDGKKNIVNNYAAYVYSNLTNGKKQVIDGKASKDDFYAFVKKEIFEKDPEIAADEEYANYKNKVTELMAKGEFLQKVRSHENTVLPNSLYTNELEAILDANKEKFTFLTEKDETGLTNAEKIKQIIAFKVPYFVGPIGESTEKFSWAEKQNDMPLRPWNLEKIVDFDKAEDKFIQRMTNKCTYLKDKDVLPNDSLLYSKFRVLNELNNLKINGDGITVELKQKIFNELFKKNKKVSVKRLKEFLVAENIVPKSEIANISITGIDREFVNTLSSYVTLAGRFGEDFVDNNVETFEKIIKYHTIISDKDRLVKRLKREFNIFSDDDIKFLKSLNYSKWGRLSKEFLTELKFVDKRKAQKISTDNFSEDYQDKCSNGEAFSVIEAMWETNNNLQQLFDQGNYTLAERIEDHYGKLDRDIVYADIDEMYCSPSVKRGAWQAIQIINEIKSRIGRYPDKIFVEVTRHDETKGDAGRKDSRKKKIEKLYNNAELKKVCEELCVEYNELMRQLLGEDGKSGKTDAELRSDRLYLYFMQLGKCMYTGEPLEIDKIYDDNIYNIDHIIPQSKIKDDSLNNKVLVKMQVNKEKDNSYPINEYNPQIQIKQKAFWKMLNEKGLLSNEKLARLCRTEPFNEREEIAFVNRQLVETNQESKAVTDLLRRVVDNPTSVVFSKACFVSDFRKKFDIFKSRTVNNLHHAKDAYLNVVVGNIMDNRFTIPFWNNTKDDINKSITRNTSKVFERIVKSPIDGLVIWNGCLQEDINKCENDIKRIKEICSKNTCIVSVMPFVNNNGLFYDETIYKSAKNDPNTKASVPLKGEKKFLSNVQNYGGYNSLKYAYFIVVESIDKKGKTKKTIESVPIMIEYTYRNAPDKEQKIIEYLEKQNNIKITKVILPVLKYKSTLKINGGLFTITGKTGERYKLIKQNQWYIDNEHVGYIKAIEKYLNLSDTAKAGLERDENSIVVSLAKSKDAKEITLTKEENLQLYDMMTKQLSKEFYCLDSIKEIANKLIQAREKFEDMPIEDQIKLLNNIVGYIGGIYSIDLKIVGGSGEGGTTTISKNITDLDISVIMQSVAGFSKKEIKL

SEQ ID NO: 4897 - protein, 1341 aa, unidentified
  REGION 1..1341: note = Description of Unknown: Cas Enzyme sequence
MKMKYSIGLDIGIASVGWACMTHDYRIPKFNGKYAMGVREFEAANTAEERRIQRGTRRRYNRRIKRIQLLQRTLAPLYLNDPDFFYINNEQEKHFWRNSNEFENHSLSETLTYLGENKRKYPTIYHLREALIKENKPFHPRLIYLALHHLTKFRGHFLNENMSWNSHENSNDLVSNLENYFEILKEKLDYPEVTLTDDVLNKIVIILEDKDSTNSDKRRDIQKLLHKDYKDAISLLVGLNANAHQLFANSPQAEIYQEEKVKLDLTKDSFVESYEKLLEDEQIIVDQAHVIYQEIILKDLLGETAYVAEAKVSSYNQFRKDLTELQEIYNTYFDEATYRKMFITSSKNKTIYKNTRDEKVLCEFDQFLKVKSKYEDKFYNNLKKKLEKLVKDNHIKSEKITNVINRLDKNQFLQKQKGQMNAAIPHQNNVYEAVTILKNQQKHYPEITNEMIQRVEDIISFRIPYYVGPLVKEDNKGEFGWLKRKDNTAILPWNFDEVVDRSASAEEFINRMTGMCTYLLNEKVLPKHSLMYEKFEVLNELNGIQIRSEAEPKHNDYRLDSEVKAWLLENVFMNTKSVTHKRVIDALKNKYPGIVYDPNTGEIRGIYGTQDENRFSTNLSSHIDMKQIFGKISQENYKMFEELIYWISVFEDKDIIELKVKEKYPHITNQQIKQLQAKSYAGWGRVSRKLLGEMPIDSVKKLTYLEIMENEPKVFMEILHEEKYDLKDRIAIMNQTSDKEKMKIHYRDIESLHGSPAIKKGIWQAIRIVEELVDIYGEPEHIMLEFAREDQVSKRTKSRKKQLEDIHKNISNTEKELKRFLKDQLSREEAEYKDPRLYLYITQEGKCLYSGESLKINQLHTYEVDHILPQSFVKDDSYHNLALVTKEMNQKKSGTKMPLEIINSSQKANQMRQWEKLLKHNLISRQKYSRLLKESFSDQDKESFFARQLVETRQITKHVKDLLDERFKDTEVHTVNANLVTNLRKNSGAYKIREMNNKHHDVDAAFTNLIVQFIINTYGSNFLNFNFKHQEARQKWRDMIFKYKKNFFLFEKIKESSDFKHYQTNEVLTGKEYLKLINDVMPWQTTKKIGSGEAAFYKETLYSPKVKVAKYDSPKLSKGVYDEVKTHSSYLISYKDKNKKGKEKNYSLIVDLTVIENYQTKGFTDKEKAIFLAKKVAKNEVIDAVIHQKILKYQTVINNNHKFNYVSSREMHNGKQLVLNQAILQKLYKTIDKPQDLNQEMYQSLYKEITETIINNYSEIITDNNINKIKESVEKIDGKETFNDLLEELFKLTSASATRSTMFGGRYVKKPKIDQLKFVNESTTGLRYRKPKSYKNELWSK

SEQ ID NO: 4898 - protein, 1326 aa, unidentified
  REGION 1..1326: note = Description of Unknown: Cas Enzyme sequence
MAKNKDIRYSIGLDIGTNSVGWAVMDEHYELLKKGNHHMWGSRLFDAAEPAATRRASRSIRRRYNKRRERIRLLRDLLGDMVMEVDPTFFIRLLNVSFLDEEDKQKNLGNDYKDNYNLFIEKDFNDKTYYDKYPTIYHLRKELCENKEKADPRLIYLALHHIVKYRGNFLKEGQSFAKVYEDIEEKLDNTLKKFMSLNDLDNLFVDNDINSMITVLSKIYQRSKKADDLLKIMNPTKEERAAYKEFTKALVGLKFNVSKMILAQEVKKDDKDIELDFSNVDYDSTVDGLQAELGEYIEFIEMLHSINSWVELQDILGNNSTISAAMVERYEEHKNDLRVLKKVIREELPDKYNEVFREDNPKLHNYLGYIKYPKNTPVEEFYEYIKRLLAKVDTGEAREILERIDLEKFMLKQNSRTNGSIPYQMQKDEMIQIIDNQSVYYPQLKENREKLISILEFRIPYYFGPLNTHSEFAWIKKFEDKQKERILPWNYDQIVDIDATAEGFIERMQNTGTYFPDKPVMAKNSLTVSKFEVLNELNKIRINGKLIPVETKKELLSDLFMKNKTITDKKLKDWLVTHQYYDTNEELKIEGYQKDLQFSTSLAPLIDFTKIFGEINASNYQLIEKIIYDISIFEDKKILKRRLKKVYQLDDLLVDKILKLNYTGWSRLSEKLLTGIKSKNSKETILSILENSNMNLMEIINDESLGFKQIIEESNKKDIEGPFRYDEVKKLAGSPAIKRGIWQALLVVQEITKFMKHEPSHIYIEFAREEQEKVRTESRIAKLQKIYKDLNLQTKEDQLVYESLKKEDAKKKIDTDALYLYYLQMGKSMYSGKPLDIDKLSTYHIDYILPRSLIKDDSLDNRVLVLPKENEWKLDSETVPFEIRNKMMGFWQKLHENGLMSNKKFFSLIRTDFNEKDKKRFINRQLVETRQIIKNVAVIINDHYTNTNVVTVRAELSHQFRERYKIYKNRDLNDLHHAHDAYIACILGQFIHQNFGNMDVNMIYGQYKKNYKKDVQEHNNYGFILNSMNHIHFNDDNSVIWDPSYIGKIKSCFCYKDVYVTKKLEQNDAKLFDLTILPSDKNSENGVTKAKIPVNKYRKDVNKYGGFSGDAPIMLAIEADKGKKHVRQVIAFPLRLKNYNDEERIKFIEKEKNLKNVKILTEVKKNQLILINHQYFFITGTNELVNATQLKLSAKNTKNLFNLVDANKHNKLESIDDANFNEVIQELICKLQEPIYSRYNSIGKEFEDSYEKINAVTKQDKLYIIEYLIAIMSAKATQGYIKPELAREIGTNGKNKGRIKSFTIDLNKTTFISTSVTGLFSKKYKL

SEQ ID NO: 4899 - protein, 1110 aa, unidentified
  REGION 1..1110: note = Description of Unknown: Cas Enzyme sequence
LHNRYTEYKPFDCFIIGGKTGIRMDKWNYAIGLDIGIASVGWSVVALDSQGDPYGIIKLGSRIFDKAEQPKTGESLAAPRRQARGLRRVIGRRALRKEDIYKLLAKHNIVTKEQMMEIFRTGHLEDIYELRTKALDELVTRTDFARILIHLAQRRGFKSNRKSESSDEGKLKDAVRRNQILMEEKGYRTVGEMFAKDELYSRHKRNKGSEYTSTVLRDNVIGEAVLIFESQRSLGNSWASEELQESYIEILSRQRSFDEGPGEPSPFHGNQISRMVGKCTLEPEETRAAKATASFEKFTLLQKINHIRVSNEDGEMVPLNVEQRQKVIDLAYKTPDVTFLKIRKALELHEYDRFNLARYRTTDSVEKAEKDEKLKCLNAYHEMRKALDGIEKGHIQKFSDEQLNKAAEILTRYKNDSTVINLLQEEGFSPEEADALSVLSFSKFGHISVKACRKLIPFLEQGLTYDKACKEAGYDFRGHNSAKSMYLPANTEQGAPELQDITNPVVRRAVSQAIKVINAIIREQGCSPAFINIELARELSKDFAERNQITKDLEKNTAENERLKEELLELVHGKTIGGQDLVKYRLWKEQDGRSAYNGKPIEIERLLEPGYAEVDHIIPYSISFDDRRSNKVLVFAYENREKGNRLPLQYLEGKAREDFIVRTETTVKQYRKKQNLLKEKNTEETAEFRQRNLTDTQYLAVLLYNFITDHLEFAEGTEFGKRRVFTVNGAITSFLRKRWGLTKVREDGDLHHALDATVIACTTNRMIQLISGYYARIEGTPYLSKKGKELFPQPWDHFRDDLVLRLSDTITPESLYLVNPVFYHSFGAENIKPVMVSRMPRHKVTGQAHKETLKGTKALKDGYLTTKKSLRDLKLNKDGEIADYYNPESDLLLYHALKEQLQKHSGDGKKAFPEGSHFYKPKSDGTPGPEVRKVKLIEKSTLNVSLNDGTAFADNGSMVRIDVFRVPEEGYYFVPVYVADTKKKQLPSKAVIAGKPYSKWKEMDDKDFIFSIYPNDLLFFEHNKGINWSVKHKNSTLPNQKEATELFGYYIKAGIATATISIINHDNSYMLSSLGIKTLKSLKKFQIDILGNISEVKHERRTGFNQRSGG

SEQ ID NO: 4900 - protein, 1094 aa, unidentified
  REGION 1..1094: note = Description of Unknown: Cas Enzyme sequence
MYYRLGLDIGTASVGWCVVETDEYGEPKRIVAMGSRIFDKAEKKDQNGSKAKSPAVGRRTARGARRRLRRRGYRMARAKMIFLKHGVIPNAGDRDVNALRAEGLNKKLTPEEFAAVLMLLIKRRGFQSTSKAQEGDEEKKLKKALDENAALMAAKGYRTVGEMLAAECTQKVVGEDGKERTIYRTRNKDGDYARCVKREAIRDEAEKLFEAQKGFGNALATDEVRDAILDVLMRQVGFDEGPGKGSPYSAEYKVGRCTLIPEEERAPKCSVTFEKFVMLQKVNHLRVVSNGKVRALTPEEREKVLAVAEKNVRTDYKRLRKLLCLAEDDRFFGLRYYDKKKKKEDVAGAEKKAFVSFERSREILNRLSEEHRNDEIADGAAYVLSHAKSDDKRRALFASREETKCLTEEEAEALLSLNGSKFGHISVKAAKALIPHLRAGARYDEACRAEGFDINAARETERGDLLKWDALTDETDDITSPVVRRAVSQTIKVLNAVIRKYGAPLAVNVELARDMSNSAKKREEIEKEQSENKKRNDRIRDSIRKEYGHTPTKERVDIYKLYEEQCGKCPYSGTSIDKSRLYESGYVEVDHILPYSRSFDDGFNNKVLVKTKENREKGSRTPFEWLFATDRWNRFFDDVCVMYANNAKKKANLLREEIDENERKASALNDTRYICRFMLGLIDEHLRFAEGRMGAKRTVAVKGMMTAALRRRWGIGKVREDGDIHHAVDAAVIACVTPSVVNKLSVAYKAEQEEEKTEKKRSVFIAEPYRGFSEELAARCLPDAEQMRERLLSLGQGEEEANEAKPVFVSRVPTRKATGSLHKDTLTSLKYAEKEGVVVKKVAITELKLGKDKNGNQIIQNYFHPDADRRTYELLFSKLVETAKTVSDQEKCAKIAFEGGVYKPAGEGKQSNRIKKVKVYEPVGGGTFTNVREGAAGNETMVRVDVFSKDGKYYCVPVYAIDIYKGRLPQKAAVAHKNIRDWKVMDETYKFEFALYKNDLIWIKGKSDITFKKTKQSEKSRMPDSYTMKEGFVYFSSFDISSANMTVITHDNCYERRGLGVMTLPEIRKCTVDVLGNISFVGSEKRPPASRKNK

SEQ ID NO: 4901 - protein, 1144 aa, unidentified
  REGION 1..1144: note = Description of Unknown: Cas Enzyme sequence
MKTDYIFGLDIGIGSVGWAVIAYNRETVHIENFGTNLFDPGEISNGRESKCQVRRSFRGPRRLIRRKALRKLRLKKYAAKIGLCDYESINEFCETGGAEVYSIKVKALNEKISPEELLMCLIHTCNHRGYKDFYSATYDVKSDSGNEIKDDEDDEEGKIREAIGNFNLVYSSGKYNTISECIIDNFRYLNNGIRFRNGNFSDKHYLIKRELVYEEAKKILESQKEYYDMLNEESIEMILKIMFSQRDFEDGPGDASDKYRRYTGFIDKIGMCPFYKDQIRGFRSTVIGDIFSVVNALSQYVYIDEVSGEYFISKEAAQEIIQSVLSNASANITKITKILKKYKITIKKSDVSDNKNLQKAIRFLSIAKKIIDVSDCTFDWETLINEPQFDINNPSRLHMISEVLAKYKTPSRRINELKKLKFLDNALIDKFSKVKLSGASSTSYAYMNDSINAFLNGESYGCFQARFIKNYQDNDNCEKFYKLPISCIDSDIKSNPVVFRAINESRKVINALIGVYGSPKHINVEVASGLNRSYLERKKIEKLQNDNEKKNDKIKEKIIDLLGDYTAATGANIEKYKLYEIQEGKCLYSGESLGDIKDVLTNRSGMYEIDHIVPYSLILDNTLENKALVFGSENQIKRQRTPLMYMDKNKADKFKATVNEMRQRKTNSISEKKYKYLMLETLYSEEAQNLLKEWKSRNINDTRYITKYIVGLLSKNLQFSGDSRLPVYGIKGSITSKFRRIWLNKDTWGADEKNRDSNLNHAADAVVIACLTPMWVEIASNNIKIRQMMRRTKGQLTEEVEKYVNSCVSYIKRYRGFYNETYLKDLLLGLNTVNNRIPSLVPNLSEEVDIRFNTTDKKKFDKDTKKYYGKEVEFIIPPYMPIVPHKQERKFRGKIADANPIKIREIDGKTFKIMRKSIKDLKKADMAKLYCTDGMLRDRLISIFEGKKDTYTIEQYLKDNNLKEFIMDGRPPVHKVSVTSTESNYYKVQKNEHNYSYLGMAKYYCTVIYKNNKGETDVWCVRYVDLIKKNKKLYVKADRVPKDYKEYVCYLIKNDYVKIVEKDGSTKIEGFYAGVKNINRHQIYLLDKTLNLINTTSENSKIEKVYTPGITKSDSVQKYSIDILGRIGGEIKCSEPFLFMTENI

SEQ ID NO: 4902 - protein, 1343 aa, unidentified
  REGION 1..1343: note = Description of Unknown: Cas Enzyme sequence
MVTKKEYNIGLDIGTTSVGWSVVETNNQKVMRKGNKALWGVRLFDEATTAESRRIQRSTRRRYDRRRERIKLLQEEFKQEIDKIDKDFFRKLQESKYQESDKNNKSIILTKEEKKELKDYQNKYKTIYHLREELINNQEKKDIRLVYLAIHHIIKYRGNFLYQNSNFNTDNLDIKEQLKELFALLYNNIQALGIPDEYTEIINFDKLEHDLLNNSKNDTKVLLKEDLEDIINRNFSIEFGKLMVGNKGNLNKLLMIEGNKIEISFSGTDYDDRYDEYQSVLGENIDILDILKQIYDCIFLKKIFKGNQNTSISSLMVKYYNKHREDLYFLKELFRKNRKIYNKMFRTGKDLCVYEKYITNKIDYDEFRKEINKLLAELFDCGVNINQDLIDKYTLDIKVKIENGEFLPRITTTDNGKYPYQLNKSELIKIIENQGKYYPFLLERTSDNKTYKLVKLLEFRIPYYVGPLVSSKKSKNAWLERRIDNVKITPYNFDEVVDKEKTAEEFIRRMMSHCSYLLNEYALANNSILYSKYKVMNELKQIRINDRKIELNFQQILLTEFFEKTTGTITEKKFKNFLVSSGQYSMDSGELRITGYSAENKFANNMQSYIDFFGENGIFENTSYDIEDAEKIIEWITIFEDKDILENKIRENYKKLNESQIQQILRKKYSGWGSLSKRLLTTKYYKDKETELYKSILDLMEETDENFMQIINNDKYNFQQMIQEFNNIEDDKKLNYKLVESLATSPATKRGIYQSLKVVEEIVDYIGYEPKNIVIEMARSNEDKVRKDTKKEYIKKLYDGCKDSIENYKKLKHELDSHEITSQRLFLYFIQEGKCLYSGETLNIEDIENQSLYEIDHIIPRTLIKDDSIDNKALVKRECNQNKSANYVLPREYRNINQKKWWKHLKDNGLMSAKKFHNLIREKYSDEDINGFINRQLVETRQITKHVANILKSYHKKSNVIYLKAELSHNYREKYDLFKFRDINDYHHAHDAYLAAVLGEYKENFMKKKINFEMVKELNSKIIEMNEGKRKSLRYGFVINSLDENLSDIVCKISENLIDKETGEILFDAHSFNKKVEDTLYRNDIIVSRKTEVKTGRFYKETIYKKGLGTINIKSNMPSELYGGYSNTITKNLMLIKYNDNQKKIIGLPMAIAARNNSNEIDMFIKSQINLKKNSTYEIMKDVIPFETEILYNNQNVFIKGYSVGHKNCEISNALQLKIKKSQMIKWKYALQYILNNKKQYLSDAENYSDEIIDFLVNLDIYPLFKKELDKIKNKLEFGSLNLDQKKKIIIELFKIYHCNSVNANLTEYGLGDRIGRMSGNNITSGTIISKSVTGIWESKYEF

SEQ ID NO: 4903 - protein, 1350 aa, unidentified
  REGION 1..1350: note = Description of Unknown: Cas Enzyme sequence
MATKKEYNIGLDIGTTSVGWSVVETDNQKVMRKGNKALWGVRLFEEATTAESRRMQRSTRRRYDRRRERIKLLQEEFSEEINKVDENFFQKLKESKYVENDKINKKIVLTKEEKQELKDYQNKYKTIYHLRDELINNPEKKDIRLVYLAIHHIIKYRGNFLYQNANFNIDNLDIKDKLNVLFSILSNNIQELEIPEDYINIIDFDELEADLLKDTKNDVKALLIDNLTELTNKSFATEFGKLMIGNKGNINKLLMLETDNKIEISFSGTDYDDKYEEYQEALGGNIEILDILKQIYDCIFLKKIFKGNKNTSISSLMVKSFEQHKKDLNFLKELFKDNRELYNEIFRTKKGLCLYEKYITNKIDCDEFRKEINKLLESLFSNENIKQNLLDEYNLEVKERIENGTFLPRITTTDNGKYPYQLNKSELIKIIENQGKYYPFLLNKLNDNKTYKIVKLLEFRIPYYVGPLVSEKRSENSWLERKINNVKITPYNFDDVVDKEKTAEKFIKRMISHCTYLLDEYALANNSILYSEFKVMNELKQIRVNDRKLELKFQQQILEDFFKKTSGTITERKFKNYLISTGEYSMEGGNFRITGYSADGKFANNMQSYVDFFGENGIFADTDYDFENAEEIIEWITIFEDKDILEKKVRDNYSKLNENQIKKVLAKKYSGWGSLSKKLLKTKYYKDKDTELYKSILDLMYETDKNFMQIINDDKYNFQEMIKKFNNKEENKKLNYSIVEELATSPATKRGIYQALKVVEELVDYIGYEPKNISIEMARSEEEKVRKDSRKDYINNLYKGCKDSIENYKKLKHELDSHEITSQRLFLYFIQEGKCLYTGTPLNIEDIENQSLYEIDHIIPRSLIKDDSIDNKALVLKECNQDKKASYVLPSKFRNSKQKIWWKHLKDNGLMSAKKFHNLIREKYNEEDINGFINRQLVETRQITKHVANILNNLYKDTNVIYLKADLSHNYREKYDLFKFRDINDYHHAHDAYLAAVLGEYKEKFMKRKINFDMVKELNSKIVEMDEGKRRNLRFGYVINSLDENLNDIVLKISENLVDNETGEVLFDAHEFNKRVEDTLYRNDILISKKVEFRSGELYNQTKNKKGGAGVPLKATMPTELYGAYTSLNPAYAVLIKINKKGKESQRLVGFPIYLINKSEDIINNYYKKLLNLSNNDSFELGKKHIPFYSIISWNNQIGSLVGASETVEVCNPIEFNLDKSFMKTHKYTLKKVYDKKYTKDVANYEHNLDEIITYIIDKMESKYHLYSNLISDLKDMVNYRNYEIYDIETKENIIKQLFNLLKFNSTNANFKFLNQKYSSAFGKKHHRIIEHATIISKSVTGIRESKYEF

SEQ ID NO: 4904 - protein, 1347 aa, unidentified
  REGION 1..1347: note = Description of Unknown: Cas Enzyme sequence
MKKYNIGLDIGTNSVGWAVVESEKQKVLRKGNKKLWGVRLFDEAVSASSRRNFRSNRRRYDRRRYRIKLLKVEFQNEINKVDPNFYQIMKESFYNKNDKVNKTIELNKEEKDFFNSYQKNYPTIYHLRNDLINKDKKFDIRLVYLAIHHIIKYRGSFLVQGEFNTESLNIEESFHNVVSLINNYCEEFDVDENIDYTDLEKILLLDSKNDKKVKLTSYFNFMPKEFTNEFIKMINGNKFNFIKMFLFDIDSAKVELSFSTTEYDDKYDEYEKLLGERIELLEALKNLYDIVYLKKIFKESKTPSLSNLMIGYYDKHKEDLKFLKQVFNVDRTLYDKLFRTKNNAKKENYCLYDRYITNGITYDDFQKELKKLFDSVNWNNVDSSLLKKYNEEILMRLENGDFLPRLTSVENGKFPYQLNKNELVKIIENQKKYYPFLGDEYNGINKLVQLLEFRIPYYVGPLTTTEKSNFAWMIRKSGQESIRITPYNFDEVVDKEASAEEFIKKMISSCTYLLNEKAIPANSILYSKFKVLNELKQIKINDNPLSKELQEQIYNDLFLNTSGTITDKKFKEYLYANKVTDIYGDDILVKGYSADEKFANSMKSYVDFFEIDGVFENTNYTLNDAEKIIEWITIFEDKNILKVKLNREYPDLNEEKVNKLLKTKYTGWSSLSRKLLTGVLYFDKETNTSKSIMDLMIETKENFMQILNNKKYKFLELIDKINGEQITKKVNYDLVKDLVTSPATKRGIYQALKIVDEITNYIGYDPEYISIEMARNEDKKERKPDRKKYLESLYKEYKNKIDNYNDLNKELKNQEKIDSEKLFLYFIQEGKSLYSMTPLKIENLSDYEVDHIIPRTLIKDDSIENKALVLKEENQNKAASFVLPSNFKTETNRKWWSHLKSIGLISNKKYYNLIRKEFNSKDIEGFINRQIVETRQITKHVANVLANLYENSKVIYLKANLSHNYREKFELYKFRDINDYHHAHDAYLAAVLGEYKEKYLRKNIDFDMVKELNKDLIANKDYKSLKYGYVINSLDDKMNYLINDIIPMQIDEETGEVITKEFDSKVFNKNIENALYSNDILISKKVEYKSGEFYNQTKQSKGNKGVPLKENLSTKLYGSYTSLNPAYAIMVTYLNKGKETKKIVGMPIYVLSTSKKDEMKTTDYLVNLLKLKDNKDILKISKPIPFYSLLDWNGQICYLVGASDKVEVINAKEFKFEKEFFIKYKNTLNKLFNNHGVEVENYDINLNKIIEYIVDKIEKEYVLYSNLIPELKSMINYANLDINSTEIKGKIIIELLKLLKCNSATANFKFLNDKYSSAFGKKHGRTIENVIVKSNSYTGIWSKYNEL

SEQ ID NO: 4905 - protein, 1354 aa, unidentified
  REGION 1..1354: note = Description of Unknown: Cas Enzyme sequence
MKKYNIGLDIGTNSVGWAVVESEKQKVLRKGNKKLWGVRLFDEAVSASSRRNFRSTRRRYDRRRYRIKLLKEEFQNEINKVDPNFYQIMKESFYNKNDKVNKTIELNKDEKDFFNSYQKNYPTIYHLRNALINEDKKFDIRLVYLALHHIIKYRGSFLVQGEFNTESLNIEESFCNVVSLICDYCQEFDIDENRDFKDLEKILLLDSKNDKKVELTSYFNFMPKEFTNEFIKMINGNKFNFIKMFLLDIDSVKVELSFSTTEYDDKYDEYEKILGDKIELLEALKNLYDIVYLKKIFKESKTPSLSSLMIGYYDKHKEDLKFLKQVFNVDRTIGGKKESLYDKLFRTKNNAKKENYCLYDRYITNGITYDDFQKELKKLFDSVNWNNVDSYLVKKYNEEILMRLENGDFLPRLTSVENGKFPYQLNKNELVKIIENQKKYYPFLGDEYNGTNKLVQLLEFRIPYYVGPLTTTEKSNFAWMIRKSGQESIRITPYNFDEVVDKEASAEEFIKKMISTCTYLLNEKAIPANSILYSKFKVLNELKQIKINDNPLSKELQEQIYNDLFLNTSGTITDKKFKEYLYANKVTDIYGDDILVKGYSADEKFANSMKSYVDFFGIDGVFENTNYTLNDAEKIIEWITIFEDKNILKVKLNREYPDLNAEKVNKLLKTKYTGWSSLSRKLLTGVLYFDKETNTSKSIMDLMIETKENFMQILNNKKYKFLELIDKINGEQITKKVNYDLVRELVTSPATKRGIYQALKIVDEITNYIGYDPEYISIEMARNEDKKERKPDRKKYLANLYEKYRNEINNYNNLNKELKSQEKIDSEKLFLYFIQEGKSLYSMTPLKIENLSDYEVDHIIPRTLIKDDSIDNKALVLKEENQNKAASFVLPSNFKTETNRKWWSHLKSIGLISNKKYYNLIRKEFNSKDIEGFINRQIVETRQITKHVANILANLYENSKVIYLKANLSHNYREKFELYKFRDINDYHHAHDAYLAAVLGEYKEKYLRKNIDFDMVKELNKDLIANKDYKSLKYGYVINSLDDKMNYLINDIIPMQIDEETGEVITKEFDSKVFNKNIENALYSNDILISKKVEYKSGEFYNQTKQRKGNKGVPLKENLPTKLYGSYTRLNPAYAVMVTYLNKGKETKKLVGMPIYVLSTSKKDEMKTADYLVDLLNLKDSKDILKISKPVPFYSLLDWNGQICYLVGASDKVEVINAKEFKFAKKFLVKYKNTLNKLFNNYGVEVENYDNNLNKTIEYIVDKIEKEYVLYNNLIPELKSMINYENLDINSIENKEKIIIELLKLLKCNSLNANFKFLNDKYSSAFGKKNDRTIENVIIKSNSYTGIWSKYNEF

SEQ ID NO: 4906 - protein, 1337 aa, unidentified
  REGION 1..1337: note = Description of Unknown: Cas Enzyme sequence
MKKYNIGLDIGTNSVGWAIVEDSTNKVLKKGKKSLWGVRLFETAETAEERRKHRSSRRRYDRRRQRIKLLQKEFCNEINKVDDKFFTKLKESKYHEKDTLNKTVKLTKTEKQMLKDYYEKNPTIYHLRNYIANTTEKVDIRLVYLAIHHIIKYRGNFLYPFKNINIDKLDIAAQLQNAFSLLYDTTAIEDEAFIEEIDFNELEKDLLLQSKKDTMVEIDKIVNKFLDKKTTSEIKQMLVGNSFSISKLFNKEEDKDFKIKFSNNEYEEKYAEIEQNYPENIEVLNEFKNVYDMIFLKKIFKDTDDVSISSYMIQKYNQHKKDLKFLKKIFSQDNKNDSKELIKLRRKHYLEIFKSNSKRICLYDTYIHNKIDYETFIKNIVKAAKEILNDEQYNTTIKRIENEKFLPRITEKENSAFPYQLNKEELIKIIESQSKYYPFLKQKIDEEYKLVKLLEFRIPYYVGPLNNTTSKASVKNTNSWIVKKSNENITPYNFDEVVDLDETAEKFISKMQASCTYLLNEKSIPNNSILYSKYKVLNEIKQIRINGEKVSVNLQNKIYNELFLKKAGTITDKVFRNYLKQTNEIRMYDGIKITGYSADGKFANNMQPYIDFFGENGIFKNTNYKLNDAEVIIHWMTIFEDKKILKRKITKTYPELSSDAINKILVKKYKGFSRLSKKLLNGIYYTEKDTKNTKTIIELMEETNENFMQILNNKKYEFQKQIDDLNDIKQDDKISYEIVNELATSPSTKKGIYQALKVVDELVKYMGYDPNIISIEMARGNRKSRRTIDRKNFLINLYNKYRDDIENYDLLFKELKETETISMKLFLYFIQQGKSLYSQEPLRIEKLDSYEIDHIIPRTLIKDDSIDNKALVLKEENQDKAASFVLPAKYRTITRIDWWKKLLDNGFISKKKFYNLCRREYSDSDIEGFINRQLVESRQITKHVANILKNFYKKSKIVYLNADLSSNYRKKYELYKFRDINDFHHAHDAYLACVLGKYKQDYLKVIDYEELKEKNKELFDKKEYNTLKYGYIINSLEENIYHKDTGEILFDATHFKKIVENSLYQNDILISKKTEIRNGKLYDETINKKGAKGVPLKKNMATERYGSYSSIKPAYAVVVKYHYKNEDLQKIIGIPIYIEAFTKKDKVIKEKYIKELLNLEENDRIDIIHDKIPFYTTIEYDGKICFLVGATDKVEVCNAKEFYFSKEKMKEWKHTLNKLLNKEESLKENDNENKYEEDLENIIKYIVSKMEKEYKLYSELVEKLKNMIINKIDKFSLEEKKRIILELFHLLKVNSTTANFKFLQEASAFGRMNNKTIRSGKLVNNSITGLRKNIHEF

SEQ ID NO: 4907 - protein, 1123 aa, unidentified
  REGION 1..1123: note = Description of Unknown: Cas Enzyme sequence
MTRKYRFGFDIGIGSTGWAVLSYTNNDDVRIEDVGVHLFSSGEDPQTSKNLNQTRRGYRGVKRLIRRRHYRKIRAKSYLVKIGLLSAQELQLATEKNGNQNIYAIRLKGLTEKLSKLDILNCVIHICNHRGYNEFYEEDSSDTEDAGKIQEGLATFEQIYSSKGYKSVAEMILKDDVFKAHMPFPDYRNRKNNGRYILLKRKYLKEELTNILRHQQQYYQKQLTNANIEFLVNEIVFAQRDFEEGPGDPDDAKRKFKGFLDSMGQCMYYKDQQRGFRSTVISDLYSLVNSLSQFSYVNKETGEIYLPPKAAKEILQTALLNGCINEADVKKILNKFEIEIIKSSKLNETIPDTVKTIKILKNMLSDAGYSWAELINEDQLDLDKPSKLHKLCVLLSSNITPHRRNKAMKVSGWNDKLQEAAKRKKFGGSASVSYKYMIEAIHAFENGETYGNFQARRMNELESRAEKHLSKVLPPFTLTEDEDLVKNTVVFKAVNETRKVINALVRKYGSPDYINIEVANDLGRSLIERREIEKRQNDNRKTKEKIIKKIAELRLGGINSEADVKGAMIERYKLYQLQNEHCLYCGSPIKLERLLTKDYEVDHIIPQSLILDDSLENKALVCAACNQKKRQQTPLQFLTEEQGKEFLKTVSELFRKKKISSRKYKYLIQPNLYDGALLDEWKSRNLNDTRYLSKYISNYLQNNLEFANTKGKNVYSIKGSITSRMRRVWLNKKTWGAEVKDRETSALHHAADAVVIANLTPAYVEIATDNLRLIRIFKAHNKVVDTEYTEYLNACVRKMKKYYGFSENYTKNLLEHKDRVPSFVKNLRDEIDIRLPSEEIEDIVFKANVNSFYSADTSFAKTITRPLVSYKQDHKYKGALTDDNPIRIKEVGGSLVKVTTKSIRDLDSGSINKINSNDTELKSALDDILNKQIDEYGKKYKNIDAYLKKKNLDTFVLPSGRLVRRVSMVGTKVENVFKKVISENNYTAINANKYYCIEVYKTKKGKVNIRGIRYVDLVKKNKKLHLRISYPDDYQQHVTYLFANDYVRIFDVVSGMQKFEGYYKSIKTIGRKQLYFTKNNRQQTDIITINQTDDVKKFVVDILGKIGGEVKCSVPLPLLVGKQ

SEQ ID NO: 4908 - protein, 1117 aa, unidentified
  REGION 1..1117: note = Description of Unknown: Cas Enzyme sequence
MASKIRIGLDIGIGSIGWAVISGKQNNSRIENFGVRIFDSGELENGKSRKSQVRRGFRGARRLIRRRHYRKEWLKAHLTHIGLLDDKALTEYETIKDQNVFFLKVKGVDNKLTPAELYKCLIHTCNHRGYRDFYENDSTLDSDDETSVNRRAANEFEIMFRNSGCTTVSQFICNNFINEAGQIEFRNRDSRQDSYLLIRRSLLQDEVRTILNKQAEYYPCLTPKNIEYIDKIMFSQRNFEDGPGDKDDKFRRYTGFLESLGSCPFYAGDKRGFRSTVIADVFAVVNTLSQYRFVDRSTGEYWLDPNVAKQLIDYLLQNANLTMTDVKKILKSNDFELLKSENSDDKALAKAVKYLRIAKSSIENAGENWSEWISEEQFDCEKPSRLHLIGKVLSKYQTPSYRVTKLKELDFMSPALIKEFSGKKISGTSAAGYRYMCDAIQAFLSGDIYGNFQANKLKQMSQEAGESKRSKKLLPQHIDDDDIKQNPVVFRAINETRKVLNAIIELYGSPETIVVEVASELNSSFLERNRIARLQKENEAKNDKAKQVISELLNISIEEVTGAMLERYKLYQEQQGKCLYSGRPLGELTEVLKNLDKKYEIDHIVPYSLILDNTLNNKALVWSVENQAKGQRTPLMYLDAERAAAFKARVNEMKSRKENYISDRKYRYLMLKSIYGKEAEDLLSQWKSRNINDTRAITKYIVSLLSKNLEFSGDSGQPVYGVKGALTSKFRKLWLNPKTWGDPEKNRDNYLNHAVDAVVVANLTPAYIEIASDNIKLQQIYRKYRTKTAPEYQSYLEKCLEKMQKYYGFSREYTKTLLTRTERVPSYLPRIAEEVDIRFNDEDEELFKTKVQSFYEDLSDFVVPPHMPITSIKQERKFRGEIADSNPIRVIEIDSEPHKISRKRINEVTKKDLDRLFTNDKALVSTLERIFEGKDDKYTVEKYLKENNLAKFKTDLGQPVYKVSVDDGKVSNFFKKTISDNNYTILGGLNYYCVEVYKDHKGNTRLWGIRYVDIKHKDKKLYVMRERLPKDYCSHVMYLFKNDYIRIYKDGKIKFEGYYKSVYNINQAQLYYSKKNSPTEPRKCISISRKDDIRKISIDILGRLGGEVRCSEPLSLI

SEQ ID NO: 4909 - protein, 1122 aa, unidentified
  REGION 1..1122: note = Description of Unknown: Cas Enzyme sequence
MKYRIGLDIGIGSVGWAVISAEEAGHLARIEDFGTRIFDSGEDPQTSESLCKQRRGFRGVRRLTRRRRFRKELLKNHLLNIGFLNATFEDELAECRNADVYQLKLRGLDEKLSPAELYKCLVHTCNHRGYLEFYEPEENDKEAGENLRAANRFESDFSASGKRTVSEFLLDGFSENGFVKYRNRSGGDVPHLLIRRELLKQEIRQILLCQKRFYPCWNENNIDRALEIIFAQRDFEDGPGNPDDPTRRYHGFLETLGKCPFYKDDARGFRGTVISDVFAVTNTLSQYRYCNVKTGEFSLEKTVAKEIVDFLLLNGKINLTDVKKILTAHGFKLLKSDLADANALGKALKFLPLAKKAVEESGESWESVIAEEQFDVTVPSRLHQIGELISKYQTPRRRKEEMKKAGVDPRLIAAFANKRISGTASCGYRYMCDAIVAFLNGDIYGSYQANRIQSDAETDPVVKSVKLAPSAIDDPEVRENRVVFKAINETRKIINAIVDIYGSPEEIVVEVASELGKSVEARDELIKRQRANEKENAEAKRLLSELLGIEATKVSPSMIERYKLFNEQEGKSAYSQKPLGELKDVVENRDRVYEIDHIVPFSLILDNTLHNKALVFAEENQKKGQRTPLMYLGAAEQKSFVAFVNHLYARKKDGISRKKYAYYRCETLYGQEAEKLMNEWKTRNINDTRYITKYVAGLIERHLLFAGDKKQHVQTVKGSVTQKFRREWFRDQRWGSDEKDRETYLNHALDAVVAANLTRPYIEIGSDSLRLLSIFKRSRGRYTEEYNEYLEKCVSKMKKYYGFDEDYTRKLLCRAGRIPSFVPRLAEEVAVRFVVDQEEKDEKTFTEEVNAVYRLDSEFVVPPHFPVTSCKQDKKFRGTIADSNPVRVEMIDGTPHKIKRTDVREIKSDDLEKLFTTDASLRTKLGEILNGKDKNYTVGKYLDENGLTHFTASDGTVIRKVSLDGGVFSNYWRQELGDGNYTNLSMLKYYCVEVYEDQDGKTRIYGIRYVDLIRRNKKLYQKADSYPSGYGKHIMYLFPNDFVRILNEKNEIKFEGYYRSVKNINRSQLWLRKPNNREMIVKSIALSDRVSRVDVSILGKKGGEIRCSVPFPSTGEKNLGKG

SEQ ID NO: 4910 - protein, 1346 aa, unidentified
  REGION 1..1346: note = Description of Unknown: Cas Enzyme sequence
MNEKKNYSIGIDIGTDSVGWAVIKNDLTLVRKRMKIYGNTDKKFIKKNFWGSLLFKEGNTAKDRRLKRTNRRRYQRRRNRILELQHIFLNEISKVDANFFYRLNESFLVPFEKEHSKYPIFATEAEEKEYHKKFPTIYHLRKYLADTTEKADIRFIYLALAHIIKYRGHFLIEGNFNFDNMSIIETYKTFLNIFNETFYNEYVNPDDFDYEKLESILKEKISRKGKVDKILKEYPDIKNNKLFCNFLSIIVGIRVDFKKYFELEDNAKIKFSDENYNESVKELLDKTSEDYEEVFDKAKAVYDSIEISNFLQSNGKKTKARLSSQMVNMYEEHEKQLKAYKEFVKRNLPEEYNVTFKDSNKDGYAGYIEGKANQEKFYKYVKGQMENAKGVAEEEKEYFLKLIEKEKFLRKQRSFYNGVIPYQVHLAELEAIVSGQMKFYPFLKDNFEKIKLLLTFRIPYFVGPLANGNSKYAWIERKNNEKIKPWNFNDIVDIDKSADKFIERLIGEDTYLFGEKVLPKRSLIYQKFAIFNELTKVTYKDERNVTNYFSVKEKKEIFEELFKTHSSVSEKLLKKFIENNYQIDNPIIQGLEEKFNSNFSTYIDLKKVYGIKNIIDDDQYLEDIEEIIRILTVFEDKKMRKKQLSKFSSFLSEEDINKLSQKHYKGWGKLSKKLILGLRDKNEHKTILDYLIYDGKNRNFMQLINDDTLSFKEQIEEYQKINIKQDLEDVVSELHGSPTIKRGVLISLKIVDEIIKIMGYNPSNIVIEMARENQTTKEGKDNSKKRIKKIQDSLKKFGSELLKENKLEENVLNNDKLYLYYLQNGKDMYTGEDIDILNLKNYDIDHIIPRSFIVDNSIDNIVLTNQISNRGKLNDVPSKEVVDRMKAFWIKLLDCKLISERKFSNLTKADRGGLTEQDKDRFINRQLVETRQITKNVAEILNSMLNSKENEDKDKTEILLLKAKMASDFRKTFGLYKIRELNDIHHANDAYINALIAIKLLEFYPSLANKFVYGKYIHKGKHMKNKATCEKNFMSNLLNKFKNEYVLDEDGVVIWDRDKDIAKIRKVLLSNQVNVVKKVEEGKGKLYKETINKKGDSDALMPIKNNLNTKLYGGFIEESTAYFVAIKYLGKKNKLNKTIVSISIKDRKIFEKDSIQYLETLGFKNPKVLLKLKKYALFELYTGERRLLTGATKQSDNSGELQKANQMSMPPKLVDFLYKLKHLDRINKENETNAEFVKKNMYLFDEVLQYIVEFSNKYIKADSNIKKVQDKYKSELEKGEIDIEALANSFIQLLKFTKCGAPSEFKFLGENVSRKRYNSLGDLWKSEVIYQSLTGLYETRIDMGKL

SEQ ID NO: 4911 - protein, 1353 aa, unidentified
  REGION 1..1353: note = Description of Unknown: Cas Enzyme sequence
MQTKKVDEYYVGFDIGTNSVGYAVTDKNYNLIKHGGEPMWGSHVFEAALTAQERRAFRTARRRNDRKKQRIVLVSEIFAPEIAKVDPRFFIRRRESALFRDDVNINDRYVVFNDSDFTDKDYYDMYPTIHHLIYDLMSNKEKHDIRLVYMACAYLVAHRGHFLSEVSKDNIDSVLDFDAVYNNFLSIMENLAEIPWECDISKFKEILKKKQTVTNKERDFLQLLNEGKKFKTSEEDDVSREGLVKLLSGGTYELGKLFPKLTFEEKVSVSFNMTEEDFAMVLQQLGDEGDIISSLRNVYDWATLSDVLNGKNSVSEGKITVYEQHKKDLSFLKYFVKKYIPNRYYEVFRDGNIVGNYVSYSYNLKNVQNVSKFKGAKKDAFCDYIKKVVKDIKVDDEDKVEYEDMMFRLDTYSFMPKQVENDNRVIPYQLHYYELKKILDNASSYLEFLDEKDMDGYTSREKLLSIMEFRIPYYVGPLRTDNGQHGWMKRKTEGRIYPWNFEDKVDLDASEQEFINRMTNSCTYLPGETVVPKYSLLYCKFNVLNEINNIKINDCSIPIEHKQEIYKLFERYRKVTPKKIKDYLVSNNLLHPEDVISGIDVTIKSSLKSYHDFKKMLESGVLKEKQVEAIIERLTYSEDKGRIIRWLHIEFPDLSDDDVKYISKLKYSDFGRLSRKLLVGIRGCNKDTGEVDSIMGMLWSTNDNMMKLLSNSYTFVEEIEAIKNEYYVEHPANLDSMLDEMYVSNAVRRPIHRTLDILSDIRKVCGKNPSKIFVEMARGGGEKGVRTKSRRDQISELYKNMDKAEVRELSEQLEGKTDNELQSEVLFLYFMQLGKCAYTQKTIDIDKLKTNIYNVDHIYPQSYVKDDSITNKVLVISEENGQKGDKYPISKDIREKMQPFWYRLLSNKLISEEKYRRLTRCTSFTEEELTGFINRQLVETHQSTKAVTTVFRTLFPDVEIVYSKAGLVSDFRKEFDMLKTRSVNDLHHAKDAYLNIVVGNVYHCKFTKNFYVTQKYSLKTKTLFTHNVKSGDVMIWDGQESIGEIRKVLTKNNIHYTKYSFMRKGKLFAQNPIKAKEGLIPRKEGLSSEKYGGYSDTTATAFLLVKFRDRKGTDAMIIPIDLMYSNKVFSDKKYAIAYAKDRIKKIWGMSEGQITDVTLPLGLRMLKINTMLSFDGFKSCITGKASLGKQLGLTSMMPLVIGNEWENYVKKIDRFIEKKQNNKKLLLNTIYDNITKEKNEQLYQILVNKVVNGIYNSAFKSQIKILKNGHEIFNKLELEEQVMALANIILLLKSGRAGNCDMTLLGGSKKAGTYVCSTKISNLQKNYKEVWLIDSSASGIYESKVCNLLEVIE

SEQ ID NO: 4912 - protein, 1148 aa, unidentified
  REGION 1..1148: note = Description of Unknown: Cas Enzyme sequence
MNGNFTNENQNNNKYLIGIDLGVSSCGWSIIKSGSGEIIKAGSALFNNSNDAKGRRGFRAVRRLKKRKLHRIERLAVLLNESGINPHRTIDEKLIFKRKQGLTEKISLQDIINIIYYFSIHRGYIPFDDEKQERETYCFKENEYPCDYYISCLDTLNKYRNNEKQVKLEDNIREFKAIMNTQKKYYKEINDELIEKIITIIKSKRKFYEGPGGIREDQLSPYGRVQSLEELEDEKNNPEKYKYLYERLIGECRIAKGEKKAPIFNYYAEKFNFLNDIINMHIKAGYTTDSPYFNKNGKLTKQGVEKILDYVFTENITLKRLVKLLDVNEDILEGYRVKKDKTAEFSNFEFYKAMLKEFSTKKLSTDWITSEDKTIYNQVVYIMTVIPSSTDLESALKERMGNHSVSKFAKRDFSDSEIKSLEAIMKKFKSKFSFHSLSEKVLRRALADMEKSDYALNYMQIMKRNNYEEEMLKDIKENYSKQNKPPYLIESKYVDEIIANPQVKKSLRKAMKIINTIIIEQGDYPESICIESAKEMNSKEKKKKIEQEQIDYEKKKKNAEDFLEKHNYVISLSNIRKMMAYQETNGECIYCGKKIPMDKFFELEIEHILPISKSCDDSFDNITCSCLECNKNKGQRTPFQFKNSEHAFSEFKRKVENLNISEIKKQNLLYDGDIDKDDKRFINRNLRDTAYETVALIEELKKYNYWLTEKLGLENKAGGKINIVSIPGQLTTTVRTKMNLDDKDRSNPLHHAVDATIIASIINTEGVGNIIARVQNDPTIWINKNKNEIFKQMEFFIKYIQLKNISEIKKLRLGYDSPNYTFEDYDKDKYVIKRSYEVYKDPKQSISHDNIIKVIEKNGQTYAVDSFSNIYEIDFSKKRKAFEETLYGNIEQSEKAKKKMFLCALEDKKTYQRIVDIYEKYKDEKGNPFKNYCLSKFGLEETPEKFNPYIHGIRKYSKLGNGPIIKTLKYISVINNPYFINKKSANAKKNNFGEFVVPDKKEKTKIALESLSQYCTEIYKEKEIGKFIFMPIAVLCINKKGKDYDIDYSNEYYKKEYKNYIGNKNVVYVGRLYNGNMVRIYKKTGEVMEGIFSGTYRNNYKDYLKIYLDGIKDSKAIQKFHQLDLRIIIYNTNILGKRYKTIDSDEIK

SEQ ID NO: 4913 - protein, 1394 aa, unidentified
  REGION 1..1394: note = Description of Unknown: Cas Enzyme sequence
MGNKVWYLGLDIGTASVGWAATDTEYKIIRKNKKRLWGVRLFEEATTAQERRTYRSNRRRLARRKWRLNLLEELFSEEIAKVDPSFFLKLKESKYHYEDKTHKLPYTIFNDKDYTDKDYYKEYPTIYHLRSSLMTENEPDIRKVFLAIHHILKNRGHFLLQGQSFKDGNINNLIKELLELDILHHDIEVNDEIVENIKNIAIEKKNLTEKVNGLKKLFPKEKQLLEVFRVILGGKSSLDKIFAIEEYKELDASVKSISFKEKVYEEVRHDYEQILSNYIELLDLAKLVYDSIILSDVKKEGKTLSESKVELFEKHKNDLAKLKALVRNDSKLSEEKREELYRIIFKEDNDKGTNYVNYIKDSKEGKGCSYEDFKKFLVKELAKLQDSEEKNIILTELELETFLPLQRTKDNSVVPYQIHREELIKILENVEKYYSFLKEKDESGYTVKEKVIQLLEFRIPYYVGPLNSHKKANEGGYAWSVRNKGEENTPVTPWNYSNVIDESASAEKFITNLTNKCTYLKGEEVLPKHSLLYSEFALLNELNALRYDGNRISIEARNTIIEKLFKEQGKKVTKKSIKELLKTEGYIDGKGEISGIDITVKNDLKSYRDFKKILGDKFNTEHVENIILWITLYGESRKLIKAKIEAVYGDKYTKEEIAKMSRLPYKDWGRFSRKLLTEIVSEKLFNEETGECLNIINAMRNNNILFMELLADRFDYMKQIEDFNKTLQKEVTEITPEILEDLYVSPAVKRSIWQTIRIVEELKKIIGCAPAKIFVETTRSNTADKKPTDSRKKQLEAVYKNIKDKEIQELEREINSTIDFSIKKDRLNAVEPSKLKAKKLYLYYTQLGRCMYSGESIDINELFDNNKYDIDHIYPQSKVKDDSFTNTVLVKKVSNAEKTDKYPLGLDIQTKENKRFWKFLKEKKLITEEKYNRLVRTEEFSDEELSGFIARQLVETSQSVKAVASVLGELNPETAICYSKAENVSSFRQNFGKIKAGNRKSKNTEQLIKVREINDYHHAKDAYLNVIVGNVFDVRFTRNAYNFIKDKKDGRKYSLNNMFYTDVRNTNTIAWEMGKTVHQVDKVMNNNNILVTRRTSEQKGALYNATVYKAKVAAKAKEGSYYPLKTSDKIINDVTKYGGFTSIGIAYYSIFEYILQTNKGEEKITRIIPIPIYISQNIVDDNTLIEYAKKQIILKSNEKLKDFKLKYKKLSIGNLINLDDYIYVIGGKTGDRFYYDAAVQVVIDKNSELYIKELSKYQNWKKENKDGLLWESITAEKNINLYNTLVEEMNTGIFIKKKPNKYNELNSEEIRNNFISISEEEQGKVLLEILNLITNKKSTFDLKSIKLGAARGMNNFNISNQNKFSIIEQSVTGFYEKEITIIGEKVNDVENSNS

SEQ ID NO: 4914 - protein, 1402 aa, unidentified
  REGION 1..1402: note = Description of Unknown: Cas Enzyme sequence
MVNKVWYLGLDIGTASVGWAATDMEYKIIRKNKKRLWGVRLFEEADTAKGRRVYRSKRRRLARRKWRLNLLEELFSEEVAKIDPNFYLRLKESKYYSEDKTHKLPYTIFNDKDYTDKDYYKEYPTIYHLRSSLMTEKEPDIRKVFLSVHHILKNRGHFLYKDLSVERNNLIDLIKELLETGKFIDIEEIDMLLLNRIEEISYSKISKKDKENEIAKLFKREKNVNNVKQLNKVFKLIFGGSSSLSDLFDDESYKDVDSKVKNISFVEKNYEEIRYMYEEILKEDEDIEILNLAKKCFNCITLDKITQEGNTLSESKVELFEKHKADLAKLKAIVKNDSILPEEKKDELYRIIFKEDNDKGTNYVNYIKDSKEGKGCSYEEFKKFLVKKLDKLEDSEEKKIILSELELETFLPLQRTKDNSVVPYQIHKEELIKILDNAEKYHSFLKEKDESGYTVKEKIIQLLEFRIPYYVGPLNSHKKANEGGYAWSVRKKGEENTPVTPWNYSKVIDESASAENFITNLTNKCTYLKGEEVLPKNSLLYSEFALLNELNALRYDGNRISIEARNTIIEKLFKEQGKKVTKKSIKELLKTEGYIDGKGEISGIDITVKNDLKSYRDFKKILGDKFNTEHVENIILWITLYGESRKLIKAKIEAVYGDKYTKEEIAKMSRLPYKDWGRFSRKLLTEIVSEKLFNEETGECLNIINAMRNNNILFMELLADRFDYMKQIEDFNKTLQKEVTEITPEILEDLYVSPAVKRSIWQTIRIVEELKKIIGCAPAKIFVETTRSNTADKKPTDSRKKQLEAVYKNIKDKEIQELEREINSTIDFSIKKDRLNAVEPSKLKAKKLYLYYTQLGRCMYSGESIDINELFDNNKYDIDHIYPQSKVKDDSFTNTVLVKKVSNAEKTDKYPLGLDIQTKENKRFWKFLKEKKLITEEKYNRLVRTEEFSDEELSGFIARQLVETSQSVKAVASVLGELNPETAICYSKAENVSSFRQNFGKIKAGNRKSKNTEQLIKVREINDYHHAKDAYLNVIVGNVFDVRFTRNAYNFIKDKKDGRKYSLNNMFYTDVRNTNTIAWEMGKTVHQVDKVMNNNNILVTRRTSEQKGALYNATVYKAKVAAKAKEGSYYPLKTSDKIINDVTKYGGFTSIGIAYYSIFEYILQTNKGEEKITRIIPIPIYISQNIVDDNTLIEYAKKQIILKSNEKLKDFKLKYKKLSIGNLINLDDYIYVIGGKTGDRFYYDAAVQVVIDKNSELYIKELSKYQNWKKENKDGLLWESITAEKNINLYNTLVEEMNTGIFIKKKPNKYNELNSEEIRNNFISISEEEQGKVLLEILNLITNKKSTFDLKSIKLGAARGMNNFNISNQNKFSIIEQSVTGFYEKEITIIGEKVNDVENSNS

SEQ ID NO: 4915 - protein, 1130 aa, unidentified
  REGION 1..1130: note = Description of Unknown: Cas Enzyme sequence
MKAYNKINFRGDNMANYVLGLDIGIGSVGVGLIEKETGEIIHKSVNLFPSGDAASNVERRGFRGAKRIKRRKTHRIKRTEDLFEKYDIDVDLHSVPINLNPYEIRVRGLNEKLSLTELFVALKNMVKHRGISYLDDAIDEDNAATSGSDYKKAIEINARELKNKTPGEIQLERLEKYGQVRGDFSVKLEDGTERRLINVFSTSEYRKEAERLLKTQQQFYSELTDEFISDYLEILTKKRKYYHGPGNEKSRTDYGRYRTNGETLDNIFSILIGKCTYYPDEFRAAKASYSAQEFNLLNDLNNLTVQTETKKLSLEQKEEIIQFVKDAKTCGARNILSKIAKMIGCKIDDITGVREDKDHKAEMHSFEAYRKMRQLETIDVTALTREQLDQLGRILTLNTEREGILESIHEYLPNTFTDEQIDELIQFRKKNTTLLNKGWHSFSLKLLNELIPELYHTSEEQMTILTRLGKQKTKNESAKTKYIDGELITEEIYNPVVAKAVRQTIKIVNKILQERGEIDTIVVEMARDKNDEDQKKRIQEGQKKNKNEKDAAILAAAMDYSNSKELPSTVFHGHKDLALKIRLWYQQEKRCAYSGREIPIAKLINNQGQYEIDHILPLSLTFDDGLDNKVLVEHVANQEKGQRTPFQAMPLLTNSWSWGEFKHYVINNSRFSKKKREYLLFEEDINKFEVRSKFIARNLVDTRYASRVVLNALQDFFKQRGANTKVAVVRGQFTAQLRRKWGIEKTRDTYHHHAIDALVIAASSQLKLWKKTKNTLIRYSENELLDTETGELISDDQYKEAVFKSPYDNFTKVLKSKELEDSILFAYQQDSKVNRKISDATIYTTRKRGDEEITVAKIKDIYSIEGYDEFLKVYQKDPSKFLMAQHDPVTFEKVIKVIVETYPDKEINENGKEVKVSPFKKYYDEHGYVRKYSRKGNGPVIKQLKYLDKAVGKHIDITPENSSRKVALKSLKPWRADVYFNPETKRYEIMGLKYSDLKFQKGGNYGITKEEYDVIKKREKISENSVFKYTLYKNNLILVKDTETNEQQIFRFGSRNETNFNYVELKPYDKAKFDSKEKLVKFGTVASSGQFIKSINIDNLSLYKIETNILGKKYIIKNEGEDPQLTFKNF

SEQ ID NO: 4916 - protein, 1344 aa, unidentified
  REGION 1..1344: note = Description of Unknown: Cas Enzyme sequence
  MOD_RES 421..433: note = Any amino acid
MSIVKNREKIKYYIGVDVGTNSVGWAVIDENGYLLNKGKHHLWGSRLFDQAQTAQNRRNYRSSRRRYNKRRERIRLLQMIMSDMVLKVDSSFFIRLEKTTFLDKEDKKAILKDNYKMNYNLFCDEDYNDKDYFKNYPTIYHLRKKLCESDEKAEPRLIYLALHHIIKYRGNFLYEGQELHLEPSNKEDDLKILFDVLGKNNDTIYNISDEQIQFILKTVVENISRTAKVSKCISQLKLNNEDKKVVKEFINGLVGNKFNVSKLYIRDEDLQFDNEDLKMQFSNKSYEENITEYENILKEKMEFIDLMQQFYSWIELSKIVGSDSQHASISDAMVNIYENHGKDLRILKEMMLKIGKEEYDEMFKPTSKNIVNYYNYINPVAWSGDKTDGFYKYVKKAIEKSDDSRKDEILEKIANETFMLXXXXXXXXXXXXXAYIPYQMQKDELIKILDHQEKYYPVLKENRDKIISILEFRIPYYYGPLNGNEQFGWLKRKKGKENERILPWNHQEIVDIQETAAQFINRLTNYCTYLPMEKVMPKKSLTCSMYEVLAEVNKIRIDGKLLPIDTKNKMIEDLFYKSKRKTVKEKDLINWLKQNQLKVGEITGYQKEKAFSSSLATWIDFKEIFGEINDSNYNLIEKIIEDMTIFNEGSILKERLKNVHNLDQNKIKKIMKLKYSGWSRLSKKLIDGIRADNKFGSSVSVLDVMKESHMVLMEIINDKELGFKQIIEKENFKDETDSFTYEDIENLAGSPALKRGIWQTLQVIEEIKHYMGYEPKNIYIEFAREDQEKVRSTTRVKKLKSIYKDLKNLLDNHGNEVFANLNKQDEKNSIETRLYLYYTQLGKCMYSKEELDIDKLSDYEIDHIFPRTLTTDNSLDNLVLVKKKENQRKLDDLVLSLEIRNKMEVFWKKLYDNGLITQTKYYRLIRNEFRPDQIDKFISRQLVETRQITKHVANIIENHYKGTKVFTVRADLSHEFREKYGIYKNRNVNDFHHAHDAYIACIIGRYIQVRFPGLEAKYIYGQYMRNLKKKKYDVDKENHGFIINSMKYECIDEDTGEVIWNPERILDYIKCFNYRDVYITKKLDTNNDKLFDVKILKNDKNSLKRETFAKIPVNKFRKDIHKYGGFSSLKNDIVAVEGKKGKKIERKVVNLPILLRNASIEEQQNYIMENNGYSDVKIIKKIKKNQLIEIDGICYYLKSADELDTAYQLILSRDDNEMIYRIDRAIQNNDFSYFDNKKENIDELYRLICHKMIENYPKYKKKVYGFIKEREEKFFELDNPQKCIVIFEMISIMKRGEQYINIPFEPYNLKNERKGRLNGQSILLDNTYFYDVSITGIYSKKYKL

SEQ ID NO: 4917 - protein, 1356 aa, unidentified
  REGION 1..1356: note = Description of Unknown: Cas Enzyme sequence
MSGENEKKYYLGLDIGTDSVGYAVTDKKYNLLKFHGEPAWGTTIFDAAALNTERRSFRTARRRLDRRQQRVQLIQELFASEINNTDSRFFIRIRESHLWREDTEDRYVFFNDAAYTDHEYFAQYPTIHHLISNLMESTEPHDVRMVYLACAWLAAHRGHFLSNINEDNIEEIRDIAAIYEKFLDYFRDNGYAAPWQEIDVTAFGNALKEKVSVTQKYKKLVQVLLKGEKPEKEGREDFPFSTEAVIKLLAGGTCKLKDIFQKEEYEEYGSVALGFDDDKLGEIMTGIGEDYELISALRMLYDWSLLVDVLNDAGTISEAKVAVYEQHKKDLATLKYFIKKYCPDNYNEMFREVKPDNYAAYAFHSDEKNHEELKKADLDTFSKYILKTVRTFKPEDEDMLQYEDMVHRLELKQFMPKQKTTDNRVIPHQLYLYELKKIIQNASTYLPFLEEKDNSGLTVGEKVVSVFKFRIPYFVGPLNENSSHAWIERKAGKIYPWNFEEVVDLDSSEQNFIQRMTNYCTYLPGEPVLPKDSLCYHKFMVLNEINNIKINGCAISVEDKQRIYQELFMQMKKVTRKKLISYLVANGLIEKGEEESVTGIDVEIKSNLAPQIAFRRLLENGTLQESDAEKVIERASYAEDKTRLGKWLTKNYPQISEEDRRYLCNLKFKDFGRLSAKFLTELEGADKETGEITTILKAMWDTNNNLMELLSDKYTFKENIDVIRNEYYTEHKATLQQRLDDMYISNAVRRPIYRTLDIVGDVYKAFGAPEKIFIEMTRGSDESQKGKRTKSRRQQILELYEQCQDEDVRELKKQLEAMGEYADNKLQGDKLFLYYMQFGKSAYSGKAISLEKLGSKEYDIDHIYPQAYVKDDSIINNKVLVLSKENGDKEDKYPINKDIREKMRGYWDFLKKVNAISEEKYKRLTRTTPFTDEEKYGFINRQLTETSQSTKAVAGLLKEKFPETEIVYSRARLVSEFRNEFELYKSRTFNDLHHAVDAYLNIVTGNVYHMRFSKQWFNVNSRYSVKTKTLFTHPVECNGELVWDGTDMLGKVKQTAVKNNAHFTKYAAFKTGGLFDQMPVRKKEGLTPLKKGLPTEKYGGYNKAGAMFFIPVRYKAGKKSDIIIMSVELLYGKQFLESEEFAKEYSFTRLKHILGKEVSEVSFPMGIRPWKVNTMLTLDGFRVCIAGIGSGGKTLVAQPIVQFSADQYWKFYLKKLEMFVEKLGKNPNYYYDETYDKVSKEKNLELYSLYIDKLEHSIYQKRINSPLDTLIKGREKFEKLCVEEQAKVLLNIQQVFGRMTGGCDMEAIGGKKKGASTVNFSSTISNWKKNYSDVRIIDSSVSGLWEKQSKNLLELL

SEQ ID NO: 4918 - protein, 1362 aa, unidentified
  REGION 1..1362: note = Description of Unknown: Cas Enzyme sequence
MYYLGLDMGTNSVGWAVTDKNYVLLRAKGKDLWGIREFEIAETAVERRTHRISRRRRQREVARIGLIKSYFEDAVLAEDPYFYIRMDNSKYFMEDKDKRLSGKNCLFEDEDYCDADYYKQFPTIYHLRKALIRDEIKDDKKYARLVYLAVLNLFKRRGHFLDASISDKTDERSGLSEAYARLIEKLDKITDNEFCVSLPKSPDYSQLEKVLANRKISKTKKTEELLNIMEIDKKDKISSEMVKAICGREIDAKKMFPIKDVEESIKINFSSESFDENCAIYQQLLGEDYFDVIESLKEIYDIGALASILGDFTFLSEARVFAYEKHKSDLKLLKKVMRKYNSDDEYNNMFRSEADNSYSSYVKSYNSGVKGRRTSKGRTRSDLYDAIKKVSKSWDQNDSDVDMILTQIDSESFLIKQLSFENGVIPNQVHAKELRKILDNAQKRLPFLNEKDESGLTVSERIFSLYTFHIPYYIGPVSSKSKENKGNGWVIRKNSGRVFPWNLEEKIDIAETSKEFIEKMVRRCTYIEGEMCLPKDSLMYQKYCVLNEINNIRINDERISVELKQDIYNDLFKKGKRVTRKALCKYLANRGLLKEETQLSGIDTNINSCLASYGKFQRIFGDDIDKDSCKCVVEDIIYLSTIYGDDKKLLKNKLIDKYSEILDQTAIKTILGYKFKDWGRLSKEFLELEGTDENGEIMSLISAMWNTNYNMMELINSDNFYFKQALADKQNKALKLLESFEAEDLDEYYFSAPVKRMIWQTLKIIKELKEVLGEYPDRIFIEMTRSEEEKGDKGRKDSRKKMFLDLYKKVKDENNNWAKIIEDADKSGKIRSKKMFLYLTQMGRCMYTGNPIDLDRLFTPDYDIDHIYPRSQVKDDNLSNNLVLVEKKSNADKSDVYPLDVSIRNNDKVRNHWKMLREKKLITDEKYKRLTGINPFTDDQRADFIARQLVETSQGTKGVADLLKQLLPDTTIVYVKSRNVSDFRNENDMLKSRVVNDFHHANDAYLNIVVGNVYFTKFTQNPKNFIEKEFRNNKNKNHYNLSKMYSWDVVRNGETAWIAKKDGNLGTIQTVRKMMSKNTPLMTRMSFERHGSIANETLYSAKDAKKNAYIPFKSSDSRLADVEKYGGFTKVSTAYLFLVEHEDKKGKRIRTLETVPIIFSKKIGNDISLLLKYCKENLGLINPDIRIPKINMQSLIKKNGYEFYISGKTENRYVVKNAVNLKISYEWVKYIKELEKVTMSENIIADSDEKITIANNVALYDILTKKHSDGIFAKRPNPVGDKLQEGKEKFLVLSLLEQAKLLMQILNLNVIGNTKADLSAIGQSKDSGVMLISKKISEEDNIYLVNQSVTGIYEKYIDLLTV

SEQ ID NO: 4919 - protein, 1375 aa, unidentified
  REGION 1..1375: note = Description of Unknown: Cas Enzyme sequence
MKKQQFSDYYLGFDIGTNSVGWCVTDLNYNVLRFNKKDMWGSRLFDEAKTAAERRVQRNSRRRLKRRKWRLNLLEEIFSNEILRVDSNFFRRLKESSLWLEDKSSKEKFTLFNDDNYKDYDFYKQYPTIFHLRNELIKNPEKKDIRLVYLALHSIFKSRGHFLFEGQNLKDIKNFETLYNNLMAFLEDNDIYKNIDSSCIANLENIICDSKKGLKDKEKEFKEIFNSDKQLVAFFKLSVGSSVSLNDLFDTDEYKKEEVEKEKISFREQIYEDDKPIYYSILGEKIEFLDIAKSFYDFMVLKNILADNQYISEAKVKLYEEHKRDLKNLKYIIRKYNKENYKKLFNDNKKDLKNYTAYIGLNKVDRKKEILIEKKVKIDDFVKVIKGYLPDIKKIEEKDKVILNEILNKIELKTILPKQRISDNGTLPYQIHEAELKKILDNQAKYYDFLNHKENSISTKEKLLMTFKFRIPYYVGPLNSYHKNKGGNSWIVRKEEGKILPWNFEQKVDIDKSAEEFIKRMTNKCTYLNGEDVIPKDSFLYSEYIILNELNKVQVNNEFLNKEIKNKIIEDLFKKSKKIFEKNFKEYLLVNQITNKIVELDGIKDAFNSNYLSYIKFKDIFGDKLNLDIYKEISEKSILWKCLYGDDKKIFEKKIKSIYGDILTKDEIKTINSFKFNTWGRLSEKLLTGIEFLNLETGECYSSVMDALRRTNYNLMELLSSKFTLQENIDSENKEVSEFSHRDLVEESYVSPSLKRAILQTLKIYEEIRKITGRIPKKVFIEMARGGDETMKNKKIPARKEQLKKLYDSCGKDISNFSIDIKEMKNSLNSYDNNSLRQKKLYLYYLQFGKSMYSGKEIDLNRLLQNNDTYDIDHIYPRSKIVKDDSFDNLALVLKDENAKKGNEYPIDKDIQANMKSFWKFLKEKNFISDEKYKRLTGTDEFELRGFMERQLVNVRQTTKEVGKILQQIEPEIKIVYSKAEIASSFREMFDFIKVRELNDTHHAKDAYLNIVAGNVYNTKFTEKFFNKKEKNKENYDVKKIYNYDIKNAWDKEKSLEIVKKNMEKNTVNITKFIKEEKGELFDVTILKKGNSKEIVAIKPKLYNGELDNLSQKYGYYTSLKAAYFIYVEHEKKNKKVKTFERITRIDTALIKNETDLIKCLVSQKKLVNPKIIKKIYKEQTLIIDNYPYTFTGVYSNKKVELKNKKQLYLEKKYEQILKNALKFVEDNQGKTEENYKFIYLKKRNSTEKNETIDAVKERYNIEFDEMYDKFLEKLNSKDYKNYINSKLYTNFLDSKEKFKKLKLWEKSLILREFLKIFNKNTYGKYEIKDSQTEEKLFSFPEDTGRIRLGQSSLGNNKELLEESVTGLFVKKIKL

SEQ ID NO: 4920 - protein, 1378 aa, unidentified
  REGION 1..1378: note = Description of Unknown: Cas Enzyme sequence
LNTSIGPVLELYGATADSYAKMNLGISKLQAQEVADRGFNVIVRPTNYRNVTSEDLQYVFKRLEGIPHVTGMIFAGKEALGAPNLTDETLELLHKNHIPLVGIEAVNQLQYEPQQGFLEMAAKDEYSVGRVYTIAKDELKKITPEEAAQRFYISDIERNIRFNLFPMYETGVNNETVLQTTINYIGMATEKLAAKGYEFGPADIYPPYTPNPLLVVLTMTGAIALFVYVVQMLIPMPKHTQLVAFFKLSVGSSVSLNDLFDTDEYKKGEVEKEKISFREQIYEDDKPIYYSILGEKIEFLDIAKSFYDFMVLNNILADSQYISEAKVKLYEEHKRDLKNLKYIIRKYNKENYDKLFKDKNESNYSAYIGLNKEKGKKEVIEKSRLKIDDFAKIIKGYLPKAEKIDEKDRSIFNEILDKIELKTILLKQRISDNGTLPYQIHEAELEKILENQAKYYNFLNHEENGVSTKDKLLMTFKFRIPYYVGPLNSYHKNKGGNSWIVRKEEGKILPWNFEQKVDIEKSAEEFIKRMTNKCTYLNGEDVIPKDSFLYSEYIILNELNKVQVNDEFLNKEIKNKIIENLFKKSKKISEKNFREYLLVNQIANKTVELKGVKDAFNSNYVSYIKFKDIFGDKLNLDIYKEISEKSILWKCLYGDDKKIFEKKIKSEYRDILTKDEIKKINSFKFNTWGRLSEKLLTGIEFIDLETGECYSSVMDALRRTNYNLMELLSSKFTLQENIDNENKEVSEFSYRDLVEESYVSPSLKRAILQTLKIYEEIRKITGRIPKKVFIEMARGGDETMKNKKIPARQEQLKKLYDSCGKDISNFSIDIKEMKNSLNSYDNNSLRQKKLYLYYLQFGKCMYTGKEIDLNRLLQNNDTYDIDHIYPRSKVIKDDSFDNLVLVLKNENAEKSNEYPLKKEIQEKMKSFWKFLKEKNFISDEKYKRLTGKDEFELRGFMARQLVNVRQTTKEVGKILQQIEPEIKIVYSKAEIASSFREMFDFIKVRELNDTHHAKDAYLNIVAGNVYNTKFTEKPYRYLQEIKENYDVKKIYNYDIKNAWDKEKSLEIVKKNMEKNTVNITRFIKEEKGQLFDLNPIKKGETSNEIIAIKPKFYEGSTEKLNEKYGYYKSLNPAYFLYVEHKEKNKITRSFERVNLVDVNNIKDEKSLIKYLIENKGLIEPKLIKKVYKRQVILINNYPYSIIALDSNKLMDFENLKPLFLEKKYEKILKNAIKFLEDNQGKTEEYYKFIYLKKNDRNEKNETIDSVKERYNIEFNEMYDKFLEKLDSKDYKNYINNKKYSELVNVKTKFIKLNLFDKAFTLKSFLDLFNRKTMADFSKVGLTKYLGKIQKISSNVLSKNELHLLEESVTGLFVKKIKL

SEQ ID NO: 4921 - protein, 1364 aa, unidentified
  REGION 1..1364: note = Description of Unknown: Cas Enzyme sequence
MEKQEYYLGLDMGISSVGWAVTNTKYELLRKKGKDMWGIREFEEADSSAERRTHRVNRRRRQRQVARMGLLKEYFSDAIEKVDSNFFIRMENSKYFSEDKDERLSSKNGIFDDADYKDVDYYTEYPTIFHLRKTLLDIEDTGKEYDVRLVYLALVNMFKHRGHFLLNTEGDALSSEQVGTTYLELLEVLENNYEISLESRDIKDVIDIISNRDNGRKKKHEQILELFEVKKSDKRAKELLKCLCGLSVNAKLIFDENPEEKVDLCFHDFSYTDKIPDLMEQLSEDEYLVVEQLKSIYDYAILAGTLKGYDYLSCARVELYKKHREDLKLLKSLYRRYKTKEEYKDMFKSDKEGTYSAYVNSFNSSDSPVKIKKYRRNMKGRTIENLYATIKKAFKDNIDDEDVQSMIESIDKEQFLPKQLTGANGVIPNQVHKKEMERILRNAQNYLSFLKEKDESGLTVSERILRLFTFQIPYYVGPLGENSKTGWIVRREEGRVLPWNIDEKIDMSATSEAFIGNLIRKCTYLSDEKVMPKASLSYERYCVLNEINNICIDGERLDTELKQKIYTECFMKGKRVTRKQLCNYLVAQGCIKSDEQVTGIDINVNSSLSSYGKMFAIFGERLKEDAIRKVAEEIIYWGTIFSDSKKMFRKHLTKYVEQDILSESQVKRILGYKFKDWGRFSKALLTLQGIDKSTGELLSLENAMWEYSLNFMELINSEDFTFKDELANKKTTSIKSLSEFTYEDLEDTYFSVPVKRMIWQTILVVREIEQIMGYVPKKIFVEMARSEEEKGDKGRKDSRGTQLLELYKGIKNTDNHDWKKEISEANASGKLRSKKLYLYYTQMGRDLYTGEEINIDMLYDDSMYDIDHIYPRHYVKDDSIINNLALVNRRANQDIKKDLYPIPDQIVSNPKVQELWKMLHRQNLITDEKYKRLMSRSPFTEKQLGDFIARQLVETRQGTKGIAELLGQLFKDTEIVYAKATNVSDFRRDNGFFKSRLVNDFHHAQDAYLNIVVGNVYYTKFTKNPWNFIKKDLNKDRDKNRYNLAKMFEWDVVRGDDVAWVASKDGNKGTIETVRKMMRKNTPLMTRMSFEQHGGIAKGTMYSAKVVKEKNYIPIKSSDTKLSDVTRYGGFTAVTVAYYFIVRHKEGKKEITTIEALPLYCKKKVENEENGLVKYCEEVLGYRNIKILFNKLKIQSLLEINGYQAHLSGKTGDQLTLRNAVNLCVPEKWITYIKKLEKIDTSKIKEEMITAEKNCELYDLLVDKHLNTIYARKPTPNAKKLLDYRDNFLGLGLKQQCEVMLNILKLTSIGLTGTSLKLIGGDKDYGKMRISKNLDCSTKPAIICQSVTGVYERKIYIFGEQLDK

SEQ ID NO: 4922 - protein, 1062 aa, unidentified
  REGION 1..1062: note = Description of Unknown: Cas Enzyme sequence
MELKLGLDIGVASVGWGIIDENYNVIDSGVRLFPEGSAEENLTRRTMRSSRRRIRRMHHRLQRMRILLSNTLAINFPEPQGNIYEIRSRGLQELLSREELFLAVMHLTKRRGTHFLTAEDIEGKNNNGKSTEEILAEQEACLAKKYVCEIQYERYLTDNGKVRGIENRFRNKDYLRELEQLLAVQSKFYDEIEKNADAILEIYKSKREYYEGPGSEKSPTPYGRYRYDENGNVIKIDLIDLMRGRCTYFPDEKRIAKGAYTACLFNLLNDLNNLKVGERKLTEDEKKYFVKEFIDKGKNITLKIIAKKVVKDENEITGYRIDKNNKPLFTEFKQYKSILKIYQAFDKADYAEGNLDLCDNISEILTRLKSVEERKIALMNYGIEKEIAQELSKVSGFTEYHSLSKKAMDLIMGDLWATDKNQMQIFYDAGMTEVNKNDYIGEEIKFDGSDWIVSPITKRAVAESVKVINAARKLVRRKYGQEFSHIIIEMAREKNSAEEKQNKQKIQRINEERGNAIRELTLGKKITPRQFEIIGLLKEQDMKCAYSGKSVSLTQVYENMLEVDHIIPRSLSFDNSRNNKVAVLVSENQKKGQRTPFQYLNSGAGAITYADYKAMVLKNNSYSARKKANLLYEEAPEKELRGFINRNLVDTRYACREVLNMLQNYFNANEINTKVKVVNGSFTFDFRKKAKLDKDRDATYAHHAQDALIVAGLFNTDLIKKINSIIKMSDSFLDEKKTIIFDNGMVVNTVTGEFVSEADFSANKYIQFIKQIELRPQKYSHKVDRKPNRQLYDQQIKSTRTCLNAKGKEEIYVVTKYKNIYTVGLGSCGDKLKKRILEKPESLLMYRNDQETFKKFREIVDFYNDAKNPFAEYFKEHGPIKKFAKKDNGPEIFDVKFLDGRLGVHRINSRQQGKNKSVYLQIKSFRVDIYQEGEQYKFVNVPYDMLKFPSGVYKIDMEKYLQSKQNKKITKQAIFLFSLYHGEVFSYEKEGVKYWWQFSCLNNDTSNVIEVKYIDKPSPAATQGKRMITIGSKIKNMKKYHVDVLGNIYPASKEILQTEIKL

SEQ ID NO: 4923 - protein, 1064 aa, unidentified
  REGION 1..1064: note = Description of Unknown: Cas Enzyme sequence
MGYILGLDIGVASVGYAIIDENYNILISGVRLFREGTAEENVARRGFRSSRRGVRRSRHRLDRLKELLSDVLGGSGNKSYTNLYEIRARGLSNKLSPDELIAAIIQLAKHRGIFYLSPEDLAAEDGSGQSSADIIRANEHKLKDGIYPCHVQLEKLNTTGIVRGIENKFTHESYRNELIKLLEVQSEFYPKLKGITDDILCIYDSKREYYEGPGSYKSPTPYGSYQLDESGNVIKINLIDKMRGKCTYFPKELRAPKWSYSACLFNLLNDLNNLTIQGIKITEPQKQELINEYVNKGKSVTIPAIAKVCDVKKEDIFGFRIDKSEKPVFTKFEGYNELLKIAKSVNEEATIEGNKQLVDDISEILTKEKSIEIRERTLIDDLKLSTSLAKEIAKSGGFTTYHSLSFKAINLILDDLLKTGKNQMELYTEAGIKPYNHNFSQNNQLCANLSDWIVSPVVKRSINETIKVFNALRKYLKAQNGDDAEFSDVVVELAREKNSQEKKDLIKKIQKANEEKRYKIMELVENRKLTRAEFERISLLLEQDFKCAYSLEPIELADVFKAGILEVDHIIPLSISLSDAQSNKVLVYQKENQAKGQRSPFQYFSSGKAKIAFEIFKEYVTRNSNFSNAKKRHLLYLGNPVEDMKGFIDRNLVDTRYASRETYNLLKSFFDYHKIDTKVKVINGSATSYFRKKAYLSKNREETYAHHAQDAMIIAGFANTKLMKFFSKIGAFSENLNNKESIVEVDGNIINSETGEVLEQELFDKAENVSNYIQFLKRIESIEPLYSHKVDRKPNRALYDQQIKATRKFVEDNKEVTYIITKYSDIYNTGTGNSGSKLKKMILESPDKLLMYHHDPKTFEIFLKIVEQYGEESNPFAAYKEDHGFICKYSKKGNGPIIESVKFRDKQLGAHRVNAKQDGHNKSVFLKIKSLRTDVYQDGENYLVLNVPYDMVSFVNGRYIIDKDKYYKSKQVQKIPESATFVTSLYRGDYITYEENGETVECIFKCINNEKTHRIEISYVNRPTDKQVMKAIKTSIKNLTKYNVDVLGNKYKVTDEKLEFDVTI

SEQ ID NO: 4924 - protein, 1064 aa, unidentified
  REGION 1..1064: note = Description of Unknown: Cas Enzyme sequence
MGYILGLDIGVASVGYAIIDERYNVLISGVRLFREGTAEENVARRGFRSSRRGVRRSRHRLDRLKELLSNVLGRSGDQSYTNLYEIRVRGLSNKLSPDELIATIIQLAKHRGIFYLSPEDLAAEEGSNRSSADIIRNNENKLKTGIYPCHVQLEKLNTTGTVRGIENKFTHESYRSELIKLLEVQSEFYPKLKEMVEDILCIYDSKREYYEGPGSYKSPTPYGSYQLDESGNVIKINLIDKMRGKCTYFPDELRAPKWSYSACLFNLLNDLNNLTIQGIKITEAQKQELINEYVNKGKSVTIPAIAKVCGVKKEDIFGFRIDKSEKPIFTKFEGYNELLKIAKSVNEEAIIEGNKQLVDDISEILTKEKSIEFRERKLVDDLKLSASLAKEIAKSGGFTTYHSLSFKAINLILDDLLRTSKNQMELYTEAGIKPYNHNFSQNNQLRANLSDWIVSPVVKRSINETIKVFNALRKYLKTQMGEDAEFSDVVVELAREKNSQEKKDLIKKIQKANEEKRYKIMELVENRRLTRAEFERISLLLEQDFKCAYSLEPIELADVFKAGLLEVDHIIPLSISLSDAQSNKVLVYQRENQAKGQRSPFQYFCSGKAKITFERYKEYVTKNLNFSNAKKSNLLYLGNPVEDMKGFIERNLVDTRYASRETYNLLKSFFDYHNINTKVKVINGSATSYFRKKAYLSKNREETYAHHAQDAMIIAGFANTKLMKFFSKIGAFSESLNNKESIIEIDGNIINSETGEVLEQELFDKSENVSNYIQFLKRIESIEPLYSHKVDRKPNRALYDQQIKATRSFVEDNKEVTYVITKYSDIYNTGTGNAGGKLKKMILESPDKLLMYHHDPKTFEIFQKIVEQYGDESNPFAAYKEDHGPIRKYSKKGIGPIIESVKFRDKQLGSHRINTKQNGYNKSVFLKIKSLRTDVYQDGENYLVLNVPYDMVSFVNGRYIIDKDKYYKSKQVQKIPESAIFVTSLYRGDYITYEENGKTVECIFKCINNEKAHKIEISYVNRPTDKQVMKGIKTSIKNLTKYNVDVLGNKYKVTDEKLEFDVTI

SEQ ID NO: 4925 - protein, 1064 aa, unidentified
  REGION 1..1064: note = Description of Unknown: Cas Enzyme sequence
MGYILGLDIGVASVGYAIIDQNYNVLINGVRLFREGTAEENVARRGFRSSRRGVRRSHHRLARLKELLTNVLGVSGDQSYTNLYEIRARGLNNKLSPDELIAAIIQLAKHRGIFYLSPEDLATEDGSGQSSADIIRTNEYKLKEGVYPCHVQLEKLNTTGIVRGIENKFTHESYRNELIKLLEVQSEFYPKLKGIINDILCIYDSKREYYEGPGSYKSPTPYGCYQLDENGNVIKINLIDKMRGRCTYFPNELRAPKWSYSACLFNLLNDLNNLTIQGVKIAEDQKQELISEYVNKGKSVTIPAIAKVCGVKKEDIFGFRIDKSEKPIFTKFEGYNELLKIAKFVNEEATIEGNKQLVDGISEILTKEKSIEVRERKLVDDLKLSTSLAKEIAKLGGFTTYHSLSFKAINLILDDLLRTSKNQMELYTEAGIKPYNHNFSQNNQLCANLSDWIVSPVVKRSINETIKVFNALRKYLKTQSGDDAEFSDVVVELAREKNSQEKKDLIKKIQKANEEKRYKIMELVENRKLTRAEFERISLLLEQDFKCAYSLKPIELSDVFKAGILEVDHIIPLSISLSDAQSNKILVYQRENQAKGQRSPFQYFSSGKTKITFERFKEYVTKNSNFSNAKKRNLLYLGNPVEDMKGFIDRNLVDTRYASRETYNLLKSFFTYHNINTKIKVINGSATSYFRKKAYLSKNREETYAHHAQDAMIIAGFANTKLMKFFSKIGAFSENLNYKDSIVEVDGNIINSETGEVLEQELFDKSENISNYIQFLKRIESIEPLYSHKVDRKPNRALYDQQIKATRSFVEDNKEITYIITKYSDIYNTGTGNTGSKLKKMILEFPDKLLMYHHDLKTFEIFLKIVEQYGEESNPFAAYKEDHGFIRKYSKKGNGPIIESVKFRDKQLGAHRVNTKQDGHNKSVFLKIKSLRTDVYQDGENYLVLNVPYDMVSFVNGRYIIDKDKYYKSKQGQKIPESATFVTSLYRGDYITYEENGETVECIFKCINNEKTHRIEISYVNRPTDKQVMKAIKTSIKNLTKYNVDVLGNKYKVTDEKLEFDVTI

SEQ ID NO: 4926 - protein, 1064 aa, unidentified
  REGION 1..1064: note = Description of Unknown: Cas Enzyme sequence
MGYILGLDIGVASVGYAVIDNQYNIITSGVRLFREGTAAENADRRAFRSSRRGIRRSHHRLERLTALLSTALDSKDDRSYTNIYEIRVKGLSDRLEPSELKAAIIQLAKHRGIFYLSPEDLAVEDGCSQSSADIIRSNEHKLKSDIYPCHIQLEKLKTTGTVRGIDNKFTHESYSKELVKLLDVQSKFYPQLEDIRKGILDIYDSKREFYEGPGSDKSPTPYGSYQLDENGDVKKINLIDKMRGKCTYFPDELRAPKWSYSTCLFNLLNDLNNLTINGEKITKTQKKDLIDEYVNKGKSVTLPAIARICGVKKEDILGYRIDSSGKAIFTKFDGYNEILKIAKSINEETLIVGNRKLIDDISEILTKEKSLKIREEQLSKELGLSAPLAKELAKATGFTAYHSLSFKAINLILNDLLQTTNNQMALYTAAGIKPYNRNWAQGNQLSANLVEWIVSPVVKRSLNETIKVFNALRKYIKKEFGEATEFSDVVVELAREKNSQDQKDRIKKFLKDNEEKRYQIMKLVEGRKLDSADFQRISLLMEQDFKCAYSLEPIELADVFKPGLLEVDHIIPLSISLSDAQSNKVLVYHSENQKKGQQTPFQYFSSGKAKVTFEKFKEYVNQNSNFIKAKRENLLYLGNPVENLKGFIKRNLVDTRYASSEFYNLLKSFFNYHKLDTKVKVINGGATHYFRKKAHLSKNRDETYAHHAQDALIIAGFANTKLVKFFSKIGAFSDSFEDKNALIEVDGDIVSTETGEVLNLDLFNKKENISAYIQFLKRIEEIQPLFSHKVDRKPNRGLYDQQIKATRKFVEGNKEETYIITKYSDIYNTGTGNSGSKLKKKILESPEDLLMYYHDVKTFEIFKKIVEQYSEEANPFAAYKADHGPIRKYSKKGNGPIIESVKFRDKKLGSHRINMKQEGKNASVFLKIKSLRTDIYQDGSNYLVLNVPYDMVQFTNSRYIINQKKYNEAKHKQEISDSAKFVTSLYRGDCISYEYKDVIKYCIFKCMNSEKEHKIEISFIERPTTKQERVSLKTSVKNLTKYNVDVLGNKYKVTNEKLKFDVTI

SEQ ID NO: 4927 - protein, 1064 aa, unidentified
  REGION 1..1064: note = Description of Unknown: Cas Enzyme sequence
MGYILGLDIGVASVGYAIIDEKYNVLISGVRLFREGTAEENAGRRGFRGSRRSIRRSRHRLDRLTDLLSRVLNISGNQFCTNLYEVRVRGLSSKLSPDELLASIIQLAKHRGIFYLSPEDLAVEDGSNQSAADIIRTNENKLKAGVYPCHVQLDKLKTTGIVRGIENKFTHESYRSELIKLLEVQSTFYPQLQTIIDDILRIYDSKREYYEGPGSFKSPTPYGSYQLDESGNVIKINLIDKMRGKCTYFPNELRAPKWSYSACLFNLLNDLNNLTVQGAKITETQKQELINDYVNKGKSVTLPAIAKVCGVKKEDIFGFRIDKSEKPIFTKFEGYNELLKIAKSVNEVDSVEGKVQLVDDIAEILTKEKSIDIRERKLVDDLKLSITLAKEIAKSVGFTTYHSLSFKAINLILADLLKTSKNQIELYIEAGIKPYNHNFSQGHQLRANLSEWIVSPVVKRSINETIKVFNALRRYLKVKYGNDTEFSDVVVELAREKNSQEKKDLIKKIQKANEEKRYKIMELVQNRKLTSAEFDRINLLLEQDFKCAYSLKPIELSDVFKPGLLEVDHIIPLSISLSDAQSNKVLVYQRENQEKGQRSPFQYFSSGKAKITFERFKEYVNKNLNFSNAKKRNLLYLGNPIEDMKGFIDRNLVDTRYASREIYNLLKSFFDYHQIDTKVKVINGSATHYFRKRAHLSKNREETYAHHAQDAMIIAGFTNTQLIKFFSKIGAFSESLNNKDTIVEVDGNIINSETGEVLERALFDKPENVSSYIQFLKHIEAIEPLYSHKVDRKPNRALYDQQIKSTRSFIEDNKEVTYIITKYSDIYNTGAGNSGAKLKKRILESPEALLMYHHDYKTFEIFQKIVEQYSEESNPFAAYKLDHGPIRKYSKKGNGPIIESVKFRDKQLGAHRINKKQQGQNKSVYLKIKSLRTDVYQDGENYLILNVPYDMVRLVRGRYIIDQDKYYKSKQIQKISDSAKFVTSLYRGDYITYEDKGGEAECIFKCINDEKTHRIEVSYVDRPTDEQKRLSLKNSVKNLTKYNVDVLGNKYKVTDEKLKFDVTI

SEQ ID NO: 4928 - protein, 1120 aa, unidentified
  REGION 1..1120: note = Description of Unknown: Cas Enzyme sequence
MKKYTIGLDLGINNVGWAKYDLEAKKVIDKGIVRFKESSAAQDRRDRRGSRRLRKRRQHRVERLAVQLSNINFCTSRSYEPELLNKRIKGLNESLSEQEITNIIYWFAIHRGYIPFDEEKLEREVHNFAEDEYPCQYISNFYKEYGVYRGQCDLIFLKDNIRELKKILITQQKYHSKLTDEVVDNILDIIKSKREFWEGPGAPKENQLSPYGRYRTLEDLEKYKKDSNYHKYLYEMLIGKCELSMGRDGSIDNVAPKCNYYAEEFNFYNDFINMSVKEPSQIDEDYRNKITLKGKFIEETIEEFKKEILNAKTVSLEKLIKKVLGLELKDIQGYRIDKKYKPEISQFKFYKYLVNQFKNKNLNPTWLEDEDKTIYNQVIYVLTVAPSTYAVEDMLKERVKEIEFKKEEIDVLKNIKSKKNPDLNYHSLSESILKKALNDIKKYNCEYNFIQIMKKLEYEKEMKEYFQNNYSNKTEKPYTIEDRYIDNLIANPQVKKTLRKAIKVINAIIKEEKNYPEAIVIESATSLNSKERKKQIEEEQKTYDELNEEAKKELEVNGYETNDKNIQLLINWKETNESCIYCGKHISLKEVLTTEIEHILPKSKSMDNSHNNTTCSCLNCNKEKNNRTPYQYMTSQNKYESFKDCVIKKYDKMSQIKKSNLLFEGDIEKYSIKFINRNLRDTSYASVALVQELKKYNEYLEAKEGYKIHIVTSPGQLTSRIRRYLKMNKNRDYLYHHVVDAMILASIPDTEIGKVLIDAQNDNQYWFKHKDDEYKEKVYNMLDNVWLVNRDQIQKFNQDCDNMPEDNKDGLIKRSYEVSKNPVQQFIQYTEYTKYIKQDDSYYKISQIDNIYNLLIRKKDGSADKVKKDLDELFGLSNKKTKILLCEKKDPKLYQKLKDIYIKNASSINPFIDECKYMYGLEEGNQFNYLKHGIRKTDNPNSPLVIRLRYLEKVTNPYIKNTITTKRRNLYHEFTINQPKKNTLIGLDGLKQVSTSIFYAYEDKKFIFLPICAISFINGKLNEKENNYQTTYNRLIGNKKVTKIGNIYTGEWVGVYKKNGQYLEGRYKGYHKKNNCLEYYINGLDTLSCSTISSSDSRIIIYTTDILGNRYIRLDTDKII

SEQ ID NO: 4929 - protein, 1119 aa, unidentified
  REGION 1..1119: note = Description of Unknown: Cas Enzyme sequence
MKGDNMGTIIGLDIGIASVGVAVVDKDTLEIKCVVSDLFDSADASKNIERRNARQARRLNRRRKTRVGDFNTLWLKEFGEIPEEHDTDVLLLRNAGLEEQLTLDEIYCVLKYMLKHRGISYLEDALNEENVTGSYQKGIAINQRESEYMLPCEIQLERFRKYGQYRGECEAENENGEKITLSNVFMTSSYRKEIDKFLNTQGKYGIINQEFIDEYLKIFNRKRKYYEGPGNEKSRTDYGKYTTRKDLDGKYITEKNIFEKLIGKCSIYKEELRAAGASYTAQEFNILNDLNNITVNNKKLTTQQKKDIIEIVQNSDRINMEKIISSCIGEKIEKIEGARIDKNEKNIYHTFEQYNKMRRAFAEKSYDIKKLTIEQLDEIGRILTINTEREGIEDAIMDSELLNLNNEQIDLLIELRRKNSSLFAKWQSLSIKAMREIIPDLYERNVNQMNIFTERGVFKDKLNLFENSVYLPKEPVLEEIYNPVVRRSISMTIDALNALINKYGYPEDIVIEMPRDRNDAEQKDRIKKFQKTRENELKNIKKKIKEEYGIEITDEHFRKHKGLELELKLWVEQNEKCPYSGKHINVQDILYHHELFEIDHIIPLSISYDDSRNNKVLVYKEENQDKGNRTPLMYLSTVNRQYDQHEFMNYVLSTKTLPRKKRELLLNYEDITKIDVLKGFINRNLNDTRYASRSVLNAMQLFFGGKECDTKVRVIRGAVTNQLRIKLNLPKDREKSYSHHAIDAAIMCYSQMGLMNFRNTQNKFIDFENETYLSDDKNSCFDNKYYDEALFGQVLKMRKNLLKAEGEPQRSVQSKGVFDEEEKNNGIVRYHHKVDKKPNRGLSKASIYGTRKIDGKIYKIVGYDIRNNKDVEAIINIIKKGKSDNFLMSKHDPETFKNLMEIYEQYKEEKNPFLAYEQETGDYIRKYAKNHNGPIIKKIKYVDSEVGSCIDISASYGYKNGDKRVIMDTLTPYRADVYYNYKDGTYRIIGVKYADFKYSNGKYVLDEDAYVSILIKEGLLKNGDRLENLSSVGYEYRLSFYKNDIIEYTKNDIVYKERFLSRTMPKVKNYIETKPISAALYEKRNPIGLTNATNICKICTDVLGNETKIYKEKFKLSVD

SEQ ID NO: 4930 - protein, 1425 aa, unidentified
  REGION 1..1425: note = Description of Unknown: Cas Enzyme sequence
MYNIGLDIGTGSVGWCLTDNNGHLLKINRKGDNGKTYRNSAWGVRLFASADTAADCRIKRSTRRRYNRRRTRVIELRKIMSEMIMPVDPNFYARLDEAFLWNEDKSDKAKAPFLLFNDKKLYDIKYYTDYPTIYHLRKYLLETKEKADPRFIYLALHHMMKYRGHFLYEGQTFEAIDNIKDTFIELEQLINVYVKEKEETEYNNKNNNQYEAIKNCLADNKVKNKDKKENITDIFIKVGYDNKYSKELAAAVLGYEFNVGIIVNDNSLTDEDCKALKAKFADAKYEEQEEKLSDTLGERYYIVEALKKIYSWKVLHSILGDSMFLSCAMVDKYEKHGEQLKALKNLFHKYVSQDEYSEFFHQEKNKEGKYIVNYANYIKGIKRLNNETNKNSNANQQLYQSIKKILDKRAADDEVYKNILTEMEQETFLEKINNVDNSAIPYQLNLIEMDKILTQQGVYYKELKDNKELLLKMLTSKIPYYVGPLNNNNKGNRNFAWMTKKAGKENEKVYPWNVKDVVDIDVTAEDFITRMTNYCTYLPNEKVLPEESLLYQRYMLLEELSQIRIDGKKLSKEDRKAIIDDLFIGKGRVKVSDKDFKEYLDKVNYVKVNGKGYDVTGYQSDDGFACALSSYNKFRRILGYVDERNEKMIEDIIYWLTVFEDKDIVKRKINKQYADKFSDEQLKKILKLKFKGWGRYSAKLLNGIKGDMGTTIIEMLEDADERFAYCEYCPNFMRIINKDAKIKQIIDDNRPIYDGTKDLLEVIQDMHTSPANRRGIWQTMKVIEEIIEYIGEKPRQIYIEFAREDDFKAKNKRTDSRKKTVDKALKKLKKEVVDEYNENVYKKLKQYENRLDEEKVYLYFMQNGKSLYTEEKLNLNEPENLEIDHIIPYSLSDDDSLDNKALVLKDENQKKGNKIVKETFLQSFSDIKMINYWKNLKKVGLISEKKYNNLQKNNVDDILTKGFINRQLVETRQIVKSVANLILDYYNEQIDVIEVKASLSTSVRKMLTYEKKDNNGFWEENKDNCMFYKNRDMNDYHHAHDAYLANIIGMYIQKNYPHLQKELNYSQYRRVWRKYYENTKNNNGVNWFATLGKFSSNNEEADWYGQDIIAYMRKIFCYRDVIISKKVEENTGAFYSETKYPREDKAGSKLVPLKQGNNMRGADNLKELDTRKYGGYKGGEKAYFVLVKYCIEKALKKKVKKEYHMEFVEIPVYIARDIKNKDINLYDYVCDILNEAYKNSVVDVEILRNKVPKYQMIIGENGEEYYLVGATEVINSKQFVLGGANQQYNRLLNYIMYGKNDKWQYIQTELLDEQLTGLYDLLLSKIKDEYKGFSKEAIRIQEDNSFYKLDVKNKKEFIAEMIKLVQPDSNYPYLGKYSTGLSDRMGRKSKEKVGKKITLVDKSVTGLYERRTTFELEDDSSTKSR

SEQ ID NO: 4931 - protein, 1446 aa, unidentified
  REGION 1..1446: note = Description of Unknown: Cas Enzyme sequence
MYNIGLDIGTGSVGWCLTDNNGHLLKINRKGDNGKTYRNSAWGVRLFASADTAADCRIKRSTRRRYNRRRTRIIELRKIMSGMIMPIDLNFYARLDEAFLWNEDKSDKAKAPFLLFNDKELYDIKYYKKYPTIYHLRKYLLETKEKADPRFIYLALHHMMKYRGHFLYEGQTFEAIDNIKDTFIELEQLINVYVKEKEETEYNNKNNNQYEAIKNCLADNKVKNKDKKENITDIFIKVGYDNKYSKELAAAVLGYEFNVGIIVNDNSLTDEDGKALKAKFADAKYEEQEEKLSDTLGERYYVVETLKKIYSWKVLHSILGDNKYLSYAMVDKYEKHSEQLKALKYLFHKYTSQDKYNDFFHKEKCYKNDKDEKDANEEKNNNEKKCDKWKYIVNYANYIKGIKRLSNETNKKYNTKQQLYQSIKEKLGESAADDEVYKNILVEMEQETFLEKINNVDNSAIPYQLNLMEMDKILTQQGVYYKELRDNKELLLKMLSSKIPYYVGPLNNNSNGNRNFAWMTKKAGKENEKVYPWNVKDVVDIDVTAEDFITRMTNYCTYLPNEKVLPKESLLYQRYMLLEELSQIRIDGKKLSKEDRKAIIDDLFIGKGRVKVSDKDFKEYLDKVNYVKVNGKGYDVTGYQSDDGFACALSSYNKFRRILGYVDERNEKMIEDIIYWLTVFEDKDIVKRKINKQYADKFSDEQLKKILKLKFKGWGRYSAKLLNGIKGDMGTTIIEMLEDADERFAYCDYCPNFMRIINKDAKIKQIIDDNRPIYDGTKDLLEVIQDMHTSPANRRGIWQTMKVIEEIIEYIGEKPRQIYIEFAREDDFKAKNKRTDSRKKTVDKALKKLKKEVVDEYNENVYKKLKQYENRLDEEKVYLYFMQNGKSLYTEEKLNLNEPENLEIDHIIPYSLSDDDSLDNKALVLKDENQKKGNKIVKETFPQSFSDIKMINYWKNLKKVGLISEKKYNNLQKNNVNDILTKGFINRQLVETRQIVKSVANLILDYYNEQIDVIEVKASLSTSVRKMLTYEKKDNNGFWEENKDNCMFYKNRNMNDYHHAHDAYLANIIGMYIQKNYPHLQKELNYSQYRRVWRNYYENTKNNNGVNWFATLGKFSSNNKETAWYGEDIIDYMRKIFCYRDVIISKKLEENTGAFYSETKYPREDKADSKLVPLKQGNNMRGADNLKELDIRKYGGYKGGEKAYFVLVKYCIEKALKKKVKKEYHMEFVEIPVYIARGIKNNDINLYDYVCDILNEANKNSVADVEILRNKVPKYQMIIGENGEEYYLVGATEVANSKQFVLGGANQQYNRLLNYIMYGKNDKWQYIQTELLDEQLTGLYDLLLSKIKDEYKGFSKEAIRIQEDNSFYKLDVKNKKEFIAEMIKLVQPDSNYPYLGKYSTGLSDRMGRKSKEKVGKKITLVDKSVTGLYERRTTFELEDDSSTKSR

SEQ ID NO: 4932 - protein, 1104 aa, unidentified
  REGION 1..1104: note = Description of Unknown: Cas Enzyme sequence
MSRYVLGLDIGITSVGYGVIDIDNDLFVDYGVRLFKEGTAAENETRRTKRGSRRLKRRKSNRLNDMKNLLKKNNLYFDNYRNYNPYEMRVKGLKEKLSSEELCTAIMHITKSRGTTLEALADESQDDEGTKDTLSKNAKELNNGKYVCEVQLDRLNSEYKVRGTENNFRTEDYIKELKEILKYQDLNEELCNQIIEMVSRRRRYDQGPGSEKSPTPYGSYRMVDGTLKHVNLIDEMRGRCSVYPNEFRAPKQSYTAELFNLLNDLNNLTIKGEKITVEEKEKIIAFVNEKGNITIKQLLKLLDVQEDEVTGFRIDKNEKPLITEFKGYNKVLKVFKKYNQQELLEDKSIVDQVIDICTKSKGIDERKKDIKELYPEFDNELIEELASIKGVSAYHSLSFKAMHMINKEMITTEMNQIQVLHEIEMFDKNRKSLKGKKNIEPDEKAILSPVAKRAHRETFKVINALRKKYGEFDSIVIEMTRDKNTREQTKRINDNQKRYENINKEVDEIIKNAGIDPERVNGKTKTKVRLYLQQECKTAYTQQDIDLHTLIFDDKAYEIDHIIPISVSLDDSLTNKVLASRLENQQKDNLTPMMAYLKGKFTGGNLEKYKLFVTSNKNFNGKKRNNLLTEQDITKEDVARKFINRNLVDTSYACRTVLNTLQHYFKDNEIDTKVHTIRGQSTNIFRKRINLQKDREQDYFHHAIDALIVASLKKMNIVNSYLMYYNYSDLYDEETGEVFDVLPDKQFIDQRYISFISDLKNIYRESNQYNLGYITQEQMHYPLIKVSHKIDTKPNRQIADETIYSTRNIEGQDMLVEKIKNIYDPKEKKAIELVNNIINDDTDKYIMKHKDPQTFEKIKEVVLNHFNDYKDSKEYYVIDKKGKYSLKGESPLTSYYNENGAITKYSKKNNGPAITSIKFYSEKLGNHLAITSNYNTNNKKVILKQISPYRTDFYVSPEGKYKFVTVRYKDVFYKETIHKFVIDENWYHEEKTKKGIQDDWKFVCSMHRDELIGLIKPEGKKFVYDASINGGQTQYHDGKHYEILKFTATNDDKANKFEVKPLNTICKKQLMIYTGGFIKIQKIATDVLGNIYEVKDNRLKLEFD

SEQ ID NO: 4933 - protein, 1084 aa, unidentified
  REGION 1..1084: note = Description of Unknown: Cas Enzyme sequence
MNQNYIIGLDLGINNVGYAVVDENTKTIEKKGVRLYKASDKAEDRRVARNTRRRMKRKTNRIQDSLSLFKHIGFPKENTIDEKLLQKRIKGLKEKLEPQDIVNVVCYFMRHRGYIPFGDEERELIQLNGMFPCEYYNKLHQDLGKHRALEQVVNHIDLIHELKTILLTQTMYYPEIGDIIGDYEKQNGLLWIFSRKRKFWEGPGSEKSFSPFGRFVNQDDVLEYQQMKLEGKEKFLFEDLIGHCKIYREEKCAPKANFFAEKFNLLNDFINIRITNIENIKKVEYISITKDKTYKLTTEALEELVNYCINYNEKTLTYTKVLKEVLGLTKNDITGYRVKKDGSIEFNLMKTYQYVVREFKKNDLDSTWLLENSCENYNKLMNILAVAPGIVEITHMLAGSIRVCSEKEQSVIKTIHDKLKKDGMLQYHALSEKALVKAIHDMQSTCLNFMQVSKKFDYEKESREYFVKNYGSGKGRLLMSSKYVDEIIASPQVKKTLRQAIRVINAIIKEKGNYPSVIAIESTKDMNSDEKRKEIEKEQSINEKNRKDAKALLEGVTTPDKVTENMIQRVMFYQEINGVCPYCGKPININDVLNNTVEVEHILPISQSGDDSQNNKTLSCRSCNANKKNRTPFMFLNEKEFDDFTKRINALKISARKRNNFLTQEDLNKYQIRFFNRNLRDTSYATKELVNQVHLFNEYLKANTKDIEILTLSTPGQLTHSIREDLEIKKDRDDGVFHHAVDASIIAGIATTTIGKKIVEAQNDPQYWVTKKEEAKEIPKLLEDFYFIDMKDEIMKIQSDEDILISMQVNKDANRSISNANIYSYIKKGEDFYKIEQISDIYSIDLIRQKKDLLDTLFDENNSKSVLLCQEQNPKLFQYLQKIYFNFAKEKENPFLNYCMEQLSEKENFDYLKHGIKTPSKNGNGVLIKKLRYMSSVSEPFLLEKKNIKKKDNTLIGLDSVSIYCTRLFWDKDSKKIIFIPVYVPTVDFKTKRINENHPLYQNYFQKMLNGKNVEFIVDLFNGDYVEIEKSDGTILKEYIKGYDKSSKAIQCKSGKRITSKDRFTLYDVDVLGNKKKRLTWPKD

SEQ ID NO: 4934 - protein, 1062 aa, unidentified
  REGION 1..1062: note = Description of Unknown: Cas Enzyme sequence
MARVLGLDIGISSVGWGIIDHETGEIIDAGVRLFEEATRNANEERRSFRGSRRLKRRRVHRLERAKALLESAGFPLDGIGKVNPYQARYNAIYDSVSGEELAAALYHLVKRRGTVLDSPEDDDKNKNELSTKEQLKRNKRLLEGKFICEVQLERLQNKYEKMRNHENRFRTEDYVKEAKAILNQQQKFYPQISNEFINQYIDLIERRRQYYEGPGSEKSPTPYGSYYVDENGQLAYRSMIEKMRGKCTYFPEKYRMAKMSFTAELFNLLNDLNKIQIEGEYLTPEDKKYLVDHFIKKGKNVTLKQILKYKNVSEDADVRGYRVDLKTGNPLFTEFKGYKEINKVVDTNNLPKDLLDRIDVLDEIAEILTAEKSYTRREKQLGDLFTRYYSDPHIIEKMVNAFKELTTFTGYHALSKDAVMAILDDLWETNKNQMELFTEKGLEQKRFKQLAQRKNIEFDDRAILSTVAKRAHREAIKIVNEVRKRYGELDAIVVETAREKNSEEKRKMYADFQKQMGKFEKEMANLLGVKNLSELKLNAKQHLALKLWQSQDGKCIYSGKSISVNDIVDNPDLFEIDHIIPVSISFDDSQSNKVLCYHGENQKKGQRTPYQYFSSGRASRTFDQFKVDVLNLYKSKRINNKKKEYLLEMRDVKNNEELQKEFINRNLVDTQYAMRTFSMTLRTFFKTHGINTKVFSIKGSFTSALRRRAHINKDRDENYAHHAIDALIVAAIGKMPVFKFFKEFAIDDNGVIVNFDTGEILDENKFFDHAFINFIRNLKNVESKVKYSHKVDRKANRSMSNQTIYGTRKKDGEVFYLGRTPNLYQMDKKQADAVIKKIKKNPENFLLFQHNIDTFQLIQKIIDEYKNHDNPFKAFYDEHGYIMKDRKVPVKRLKYYDRKLGVHMKITDKYPNAKNDVVLLTIKGVRIDVYKNSDGHYKYLGVPYYWFKRQGNKYVLDMERYEAEKQQPYKNIDDSYEFQFSLYKNDRISYEKDGVYTERVFRGDNNPRQNIIEVDYIYKKKEERKEGLLTPSTIKNFYKYNVDVLGNTYKIEKENFKSTLQL

SEQ ID NO: 4935 - protein, 972 aa, unidentified
  REGION 1..972: note = Description of Unknown: Cas Enzyme sequence
MKTLGLDLGIKSVGWALIESDENRENYRILDLGIRLFSSGQAIENGKVVGPPALPRREARSSRRTIRRKRARLIRIKKFLHNYGLIKNIKDLFYNNKITDVWELRALALNEPLSPEDFSRILIHIAKHRGYMMSVDSDDDEIDGDKDGKKDDKKKIKKAIAETERAIKELNYRTYGEYVYKSALDSKKPMRNRGGEYRYFPSNNLLKKEIDIIFKKQFELGNKFATEELKNKYWEIASSIKDSKSFEDMVGACTFFKDEKRAPKNCYSAEKFVLLTSILNTVVIDEDLKEIKIINIKHIDEIINFAENEDGGISYKKLRKFLSIPDTAMFKGISYEKKKKAKGKKETDPEDKVFVNMYGLNALKKICGEKIAKDKGLSLKIMRVLTYFKGVEQRRSKLLEIEELNADMASQLAKLENIKEFVSLSAKAIEILLPYMESGLRYDEAVKTARIDGKIPYEENLKQDLLPALDPKTNIRITNPTVLRTLSEARKVINAVIRKYGKLDRVNIELARDIKTKKERLKAIQTQNKNIESKKQAEQLLKEKDLNNPSPKKDISKKDILKARLYNQQDGISLYSGEPIKLERLTEDGYCQIDHILPRFKSMDNSFNNKVLCLAEENQNKANDIPYDWLSKTGQFDEFKARVLSMKDKLSYQKVKRLLTEKIDAEGFIERDLNDTRYASRTLKKYLETYLKIGEDDNKVKVLAVNGYLTAELRHQWGLEKDRDANDIHHAVDAVVIALANAGIVKKLANYYKEREYRKHPKFTEPLENFRKVLNEKLVNLPVNRLLVSRPPRKKVTGQAHKETVISPKNKDHSMIEIHKGRGYAEQSLMPRVDVFKKGGKFYYVPIYVADFAKKELPNKIITIGKEKNEWNVADDSYEFLFSLFKDDLIKFKQKGKAEVMGYFLNIGISNCQITYQNINGSKEKNSKGKEFDPYFGGTTLEYIKKYQIDPLGFYYEIKKERRLPVSMKKNN

SEQ ID NO: 4936 - protein, 1105 aa, unidentified
  REGION 1..1105: note = Description of Unknown: Cas Enzyme sequence
MGITIGLDLGVSSVGWAVVNDDYEILESCSNIFPSADASKNAERRGFRQGRRLTRRRKNRIHDFKKLWLDNGFAIPNQGTEDVLATKIKGLSEKLSEDEVYWVLLNSLKHRGISYLDDADSGDNSSDYAKSVSRNEEELKEKLPCEIQWERLQRYGAYRGNISIIEDGETITLRNIFTTSAYKKEIEQFIDTQAKYNAQYSGDFKADYLEIFNRKREYYEGPGNELSRTDYGKYTTEINTDGEYITVDNIFDKLVGKCSINPDERRAAGASYTAQEFNVLNDLNNLTISSGSSYIEDGKLTEDAKRKIVETIKSSKTVNVKKIICDVIGDKKCQISGARIDKNEKEIFHSFEAYNKMRRALEEIGFDISSLSREDLDLIGDILTLNTDRESILNAFNRNGIDLADEVKDILVKVRKTNGSLFNKWQSFGLSIMNELIPELYVQPKNQMELLTDMGVFKSRGDRFLECKEIPGDFIVDEIYNPVVSKTVRITVRILNALIKKYGYPDRVVIEMPRDKNSEEEQQRLKKEQRDNENEIKDIKARVKTEYGREITEEDFRQHSKLSLKLKLWNEQQGICPYSGKSIRIDDLLDNPHLFEVDHIIPLSISFDDSRNNKVLVYANENQDKGNRTPMAYLAAVNRQWDIHNFMDYVLKTYSGAQKRKKRDNLLNEQDITKVEVLQGFVNRNINDTRYASKVVLNSLQEYFSSKDCDTKVKVIRGSFTHQMRVNLKLKKDRDESYVHHAVDAMLIAFSQMGYDAYHELTNKYVDFETGEIFDKEGFNELLNNDLAYKNTMYESKWLRIKGNIEKAAEKNKYWYQVNKKCNRGLCNQTVYGTRESDGDVYKISKLDIRTDDGFKKFKNIVDKGNESVFLMYQNDPKTFELIMDIYKNYSDSKNPFVQYEKETGDIIRKYSNKNNGPKISQLKYKDGIVGSCIDISHKYGFEEGSRKVVLDSLNPYRMDVYLKKDENQYYLVGIKQSDIKCEGNLFVIDEDKYAETLVNEKMISTGQSRKDLENLGYEFKLSFYKEDIIEYEKNGDIFVERFLSRTMPKKRNYIETKPIDSAKFDKQNLVGLAKTSRIRKISTDILGNRFYIDKMNFCNVVGKQ

SEQ ID NO: 4937 - protein, 1104 aa, unidentified
  REGION 1..1104: note = Description of Unknown: Cas Enzyme sequence
VGITFGFDLGIASVGWAVVNDDYEVLESCSNIFPAANASENATRRGFRQSRRLTRRRKNRISDFKKLWKSAGFDIPEGSKTDVLELRIRGLSEQLSDRDVFFVLLNSLKHRGITYLDDAESGDQSSDYAKSIAYNETELKSKLPCEIQYERMQKYGAYRGNNTVDVDGEPVTLRNVFTKSAYKKEVEAFLSKQSEFNPMLTAGFMSDYMELFSRKREYYIGPGNEKSRTDYGVYTTELDESGKYKTEANLFDKLIGKCSVYTDERRAAGASYTAQEFNILNDLNNLTIQSDSSKLEDGKLTESAKREIIEQIKTANVVNVKRIIGDVLGDKNCTISGARVDKNEKEIFHSFEAYNKMRRELSDVYDIKTIPREDLDDIGEILTLNTDRESILNAFAMRGLKYPQEVVDVLIKVRKSNGALFSKWQSFGLTIMKELIPELYAQPKNQMQLLTEMGVFKNQSDRFMEYEEIPADVLTEEIYNPVVAKTVRITVRVLNALIKKYGNPDRIVLEMPRDKNSDEEQQRIRKEQRDNENELNNILAKVKKDYGREITKNDFINHSKLTLKLKLWNEQDGVCPYSGKPIHIDDLLDNPSLFEVDHIIPLSISFDDSRSNKVLVYSEENQKKGNRTPYAYLTGVNRDWDFHNYMSFVLDHYSGALKRKKRDNLLNDEDINKVEVLKGFVNRNINDTRYASKVVLNSLQQYFASKDCNTKIRVIRGSFTHQMRMNLQLEKVRDESYSHHAVDAMLIAFSQMGYEAYRKLTEEYIDYDNEEVLDKDGFNHLLDRDEAYKNALYQAKWVAIRKTIQNAEKRNKYWYQVNNKCNRALCNQTVYGTREIDGKTCKISKLSIRTDDGIKKLKGILAKGKPERFLMRRNDPKTFELLMDIYQRYEDAKNPFLQYEEETGEKIRKYSKKGDGPVITYLKYEDGEVVSCIDISHKYGFEEGSKKVILDSLNPYRMDVYYNNTDGRYYFVGVKQSDIKCEGDVYAIDAEKYTRTLINEKMLEEGQTLADLPKLGYEYRLTFYKEDLIEYEKAGEIKCERFLSRTKPQSRNYIETKPKDAPKFEKQNQFGLAQTNHIRKIVTDILGNQYYVDQMRFNMVVSRR

SEQ ID NO: 4938 - protein, 1142 aa, unidentified
  REGION 1..1142: note = Description of Unknown: Cas Enzyme sequence
MSIPMDYILRDKGGGSDWEKHPFYTQSIVLGLDIGIRGIGVWLRKGPEPLFAQTFLVNIPDAAPLADRRQKRALRRSRRSMKIREKKLREWIVRFGLLSKHQVDQMWRNTSAFQSALDLRHRVVNEGKTLGSPQALVSVLRQVIKNRGYDYHMTDEGQFPWGEATDPKEIIKWAKWSWVEKKNVDGWKQQILELAGGEEGKSYEEICQALDEAVDRSKKDTLEKRLAEHMREKKQNLRAPFRGLHNNFPREAIKSHTRQIISKHQSLFRNPGEYNQAVLELLGEKDNICYEHPKTGSIIDFHRKSIEQVKELWERKTNDCPYIGRLKSAGLAQTEKTKCSGNDDQDVQQWKLLVFLAERTFVDSNSVRRNIPGSLLKYLLLLQKTIIEARKTKQPATKILLDSIFAEHLNSEAPKTTGKGKIKRVTLRKKDELNKDYLDQLKELLKPKAALLKKRSGMCAESARIMYGLGTDNGKTFEPEQIRENLADTFYQWRRNIESQAPGYPQVEFLLGSRKHYDDGGQPRDLKGRQDGQPQHHGILRRLFHNQLKDAHGRLVDIQNQLAGKQVPDYVVVEVIGQIPRNSEERRSIQNDQKSRRDAKEEITKEFGEKLSSPQIRKVLLFNQQLNDDGHGICPVTGSDLGKNPLSTDLEIAHIFPQDSGGIGEMDNLFITKREINGAMGERTPKMITGSTSGRIKFLPFDQMMQTASRFRWGKAKRTFFAHEGSQVPDFQNLTRQSQLARQLRREVVRWLGIERNHNGAKDADKKIAGEIWERIGSPSGYLTSICRDSWREALPDFMKDKKERGNLRHHLYDAAVVSFIPPGAGLNSVNCGGIFRFATDKDGTIKGKAIEGLLPDLHKFDQKHQRTCLVNKPKQTKSKAKRTKETIYNLPSADPLKDNKLRVRTALDPANMQPKLFDPKSTGISAEALPAKAVTQWLEKNGEKPLLLKDGTPVRRIMVEGNAQALSSLVPHRNHENKIIGCKVYIDASETCEIWQGFKKNKDGKPVLDKGGKPVPDYRSVLIPPLRNQKSYEKLFGKKWIPEEKLDKYYKSIGQIRKGDVFLIPMNALGEICQPGEKPIYELWYRAVSLKTAGEITFVPAEFDDALPGHLAKIPRATSQRPSSATKHAAIVLHTQSVMHG

SEQ ID NO: 4939 - protein, 1373 aa, unidentified
  REGION 1..1373: note = Description of Unknown: Cas Enzyme sequence
MKKQKFSDYYLGFDIGTNSVGWCVTDLDYNVLRFNKKDMWGSRLFDEAKTAAERRVQRNSRRRLKRRKWRLNLLEEIFSDEIMKIDSNFFRRLKESSLWLEDKNSKEKFTLFNDDNYKDYDFYKQYPTIFHLRNELIKNPEKKDIRLIYLALHSIFKSRGHFLFEGQNLKEIKNFETLYNNLIAFLEDNGINKSIDKDNIEKLEKIICDSGKDLEDKKKEFKEIFNLDKQLVAIFKLSVGSRVSLNDLFDTDEYKEVEKEKISFREQIYEDDKPIYYSILGEKIELLDIAKSFYDFMVLKNILADSQYISEAKVKLYEEHKGDLKNLKYIIRKYNKENYKKLFNDNKKDLKNYTAYIGLNKVNGKKEILIEKKAKIDDFAKIIKGYLPKGEKIEEKDRAIYNEILDKIELKTILPKQRISDNGTLPYQIHEVELKKILDNQAKYYDFLNYKENGISTKDKLVMTFKFRIPYYVGPLNSYHKNKGGNSWIVRKEEGKILPWNFEQKVDIEKSAEEFIKRMTNKCTYLNGEDVIPKDSFLYSEYIILNELNKVQVNNEFLNMKNKKKIIEDLFKKSKKISEKNFKEYLLVNQIANKTVELNGIKDFFNSNYVSYIKFKDIFGDKLNLDIYKEISEKSILWKCLYGDDRKIFEKKIKSVYGDILTKDEIKKINSFKFNTWGRLSEKLLTGIEFLNLETGECYSSVMDALRRTNHNFMELLSSKFTLQENIDSENKEVSEFSYRDLVEVSYVSPSLKRAILQTLKIYEEIRKITGRAPKKVFIEMARGGDETMKNKKIPARQEQLKRLYDSCGKDIANFSINIKEIKKSLDSYDNNSLRQKKLYLYYLQFGKSMYSGKEIDLNRLLQNNDTYDIDHIYPRSKIVKDDSFDNLALVLKDENARKGNEYPIDKDIQNKMRSFWRFLKERNFISDEKYKRLTGTDELELRGFMERQLVNVRQTTKEVGKILQQIDSEIKIVYSKAEIASSFREMFDFIKVRELNDTHHAKDAYLNIVAGNVYNTKFTEKFFKKQEKNKENYDVKKIYNYDIKNAWDKEKSLEIVKKNMEKNTVNITKFIKEEKGELFDVTILKKGNSKEIVAIKPKLYNGELHNLSQKYGYYTSLKAAYFIYVEHEKKNKKVKTFERITRIDSTLIKNEKNLIKYLVSQKKLLNPKIIKKIYKEQTLIIDSYPYTFTGVDSNKKVELKNKKQLYLEKKYEQILKNALKFVEDNQGETEENYKFIYLKKRNNNEKNETIDAVKERYNIEFNEMYDKFLEKLSSKDYKNYINNKLYTNFLNSKEKFKKLKLWEKSLILREFLKIFNKNTYGKYEIKDSQTKEKLFSFPEDTGRIRLGQSSLGNNKELLEESVTGLFVKKIKL

SEQ ID NO: 4940 - protein, 1367 aa, unidentified
  REGION 1..1367: note = Description of Unknown: Cas Enzyme sequence
MKKQKFSDYYLGFDIGTNSVGWCVTDLDYNVLRFNKKDMWGSRLFDEAKTAAERRVQRNSRRRLKRRKWRLNLLEEIFSDEIMKIDSNFFRRLKESSLWLEDKNSKEKFTLFNDDNYKDYDFYKQYPTIFHLRNELIKNPEKKDIRLIYLALHSIFKSRGHFLFEGQNLKEIKNFETLYNNLIAFLEDNGINKSIDKDNIEKLEKIICDSGKGLKDKEKEFKGIFNSDKQLVAIFKLSVGSSVSLNDLFDTDEYKKEEVEKEKISFREQIYEDDKPIYYSILGEKIELLDIAKSFYDFMVLNNILSDSNYISEAKVKLYEEHKKDLKNLKYIIRKYNKENYDKLFKDKNENNYPAYIGLNKEKGKKEVVEKSRLKIDDLIKVIKGYLPKPERIEEKDKTIFNEILNKIELKTILPKQRISDNGTLPYQIHEVELEKILENQSKYYDFLNYEENGVSTKDKLLKTFKFRIPYYVGPLNSYHKDKGGNSWIVRKEEGKILPWNFEQKVDIEKSAEEFIKRMTNKCTYLNGEDVIPKDSFLYSEYIILNELNKVQVNDEFLNEENKRKIIDELFKENKKVSEKKFKEYLLVNQIANRTVELKGIKDSFNSNYVSYIKFKDIFGEKLNLDIYKEISEKSILWKCLYGDDKKIFEKKIKNEYGDILNKDEIKKINSFKFNTWGRLSEKLLTGIEFINLETGECYSSVMEALRRTNYNLMELLSSKFTLQESIDNENKEMNEVSYRDLIEESYVSPSLKRAILQTLKIYEEIKKITGRVPKKVFIEMARGGDETMKNKKIPARQEQLKKLYDSCGNDIANFSIDIKKMKSSLSSYDNNSLRQKKLYLYYLQFGKCMYTGREIDLDRLLQNNDTYDIDHIYPRSKVIKDDSFDNLVLVLKNENAEKSNEYPVKKEIQEKMKSFWRFLKEKNFISDEKYKRLTGKDDFELRGFMARQLVNVRQTTKEVGKILQQIEPEIKIVYSKAEIASSFREMFDFIKVRELNDTHHAKDAYLNIVAGNVYNTKFTEKPYRYLQEIKENYDVKKIYNYDIKNAWDKENSLEIVKKNMEKNTVNITRFIKEEKGELFNLNPKKKKKNSNEIIGIKPKLYNGKEEKLNEKYGYYESLNPAYFLYVEHKEKNKRIKSFERVNLVDVNNVKDEKSLIKYLIENKKLVEPRIIKKVYKNQCLLIDDYPYLIIGIESTKKLEFKNNKSLYLDKKYEKILKNVIKFLEENQGKSEENYKFIYLKKKDRYKKNETLESVAERYNTEFNEMYDKFLEKLDSKDYKNYMNNKKYQDLLNVKEKFLKLNLLDKAFILRSFLKIFTKETISDFSKLNLSKTLGRLNGKSSNTISKNGLYLIEESVTGLFVKKIEL

SEQ ID NO: 4941 - protein, 1367 aa, unidentified
  REGION 1..1367: note = Description of Unknown: Cas Enzyme sequence
MKKQKFSDYYLGFDIGTNSVGWCVTDLDYNVLRFNKKDMWGSRLFDEAKTAAERRVQRNSRRRLKRRKWRLNLLEEIFSDEIMKIDSNFFRRLKESSLWLEDKNSKEKFTLFNDDNYKDYDFYKQYPTIFHLRDELIKNPEKKDIRLIYLALHSIFKSRGHFLFEGQNLKEIKNFETLYNNLISFLEDNGINKSIDKDNIKKLEKIICDSGKGLKDKEKEFKEIFNSDKQLVAIFKLSVGSSVSLNDLFDTDEYKKEEVEKEKISFREQIYEDDKPIYYSILGEKIELLDIAKSFYDFMVLNNILSDSNYISEAKVKLYEEHKKDLKNLKYIIRKYNKENYDKLFKDKNENNYPAYIGLNKEKGKKEVVEKSGLKIDDLIKVIKGYLPKPERIEEKDKTIFNEILNKIELKTILPKQRISDNGTLPYQIHEVELEKILENQSKYYDFLNYEENGVSTKDKLLKTFKFRIPYYVGPLNSYHKDKGGNSWIVRKEEGKILPWNFEQKVDIEKSAEEFIKRMTNKCTYLNGEDVIPKDSFLYSEYIILNELNKVQVNDEFLNEENKRKIIDELFKENKKVSEKKFKEYLLVNQIANRTVELKGIKDSFNSNYVSYIKFKDIFGEKLNLDIYKEISEKSILWKCLYGDDKKIFEKKIKNEYGDILNKDEIKKINSFKFNTWGRLSEKLLTGIEFINLETGECYSSVMEALRRTNYNLMELLSSKFTLQESIDNGNKEMNEVSYRDLIEESYVSPSLKRAILQTLKIYEEIKKITGRVPKKVFIEMARGGDETMKNKKIPARQEQLKKLYDSCGNDIANFSIDIKKMKSSLSSYDNNSLRQKKLYLYYLQFGKCMYTGREIDLDRLLQNNDTYDIDHIYPRSKVIKDDSFDNLVLVLKNENAEKSNEYPVKKEIQEKMKSFWRFLKEKNFISDEKYKRLTGKDDFELRGFMARQLVNVRQTTKEVGKILQQIEPEIKIVYSKAEIASSFREMFDFIKVRELNDTHHAKDAYLNIVAGNVYNTKFTEKPYRYLQEIKENYDVKKIYNYDIKNAWDKENSLEIVKKNMKKNTVNITRFIKEEKGQLFDLNPIKKGETSNEIISIKPKLYNGKEEKLNEKYGYYKSLNPAYFLYVEHKEKNKRIKSFERVNLVDVNNIKDEKSLVKYLIENKKLVEPRLIKKVYKRQVILINDYPYSIVALDSNKLMDFENLKPLFLENKYEKILKNVIKFLEDNQGKSEENYKFIYLKKKDRYEKNETLESVKDRYNLEFNEMYDKFLEKLDSKDYKNYINNKKYKNLLDVKEKFIKLNLFDKAFTLKSFLDLFNRKTMADFSKVGLTKYLGKIQKISSNVLSKNELYLLEESVTGLFVKKIKL

SEQ ID NO: 4942 - protein, 1374 aa, unidentified
  REGION 1..1374: note = Description of Unknown: Cas Enzyme sequence
MKKQKFSDYYLGFDIGTNSVGWCVTDLDYNVLRFNKKDMWGSRLFDEAKTAAERRVQRNSRRRLKRRKWRLNLLEEIFSDEIMKIDSNFFRRLKESSLWLEDKNSKEKFTLFNDDNYKDYDFYKQYPTIFHLRNELIKNPEKKDIRLIYLALHSIFKSRGHFLFEGQNLKEIKNFETLYNNLITFLEDNGINKSIDKDNIKKLEKIICDSGKGLKDKEKEFKGIFNSDKQLVAIFKLSVGSSVSLNDLFDTDEYKKEEVEKEKISFREQIYEDDKPIYYSILGEKIELLDIAKSFYDFMVLNNILSDSNYISEAKVKLYEEHKKDLKNLKYIIRKYNKENYDKLFKDKNENNYPAYIGLNKEKGKKEVVEKSRLKIDDLIKVIKGYLPKPERIEEKDKTIFNEILNKIELKTILPKQRISDNGTLPYQIHEVELEKILENQSKYYDFLNYEENGVSTKDKLLKTFKFRIPYYVGPLNSYHKDKGGNSWIVRKEEGKILPWNFEQKVDIEKSAEEFIKRMTNKCTYLNGEDVIPKDSFLYSEYIILNELNKVQVNDEFLNEENKRKIIDELFKENKKVSEKKFKEYLLVNQIANRTVELKGIKDSFNSNYVSYIRFKDIFGEKLDLDIYKEISEKSILWKCLYGDDKKIFEKKIKNEYGDILTKDEIKKINTFKFNNWGRLSEKLLTGIEFINLETGECYSSVMEALRRTNYNLMELLSSKFTLQENIDNENKDISQFSYRDLVEESYVSSSLKRAILQTLKIYEEIKKITGRVPKKVFIEMARGGDESMKNKKIPARQEQLKKLYDSCGNDIANFSIDIKEMKSSLSSYDNNSLRQKKLYLYYLQFGKCMYTGREIDLDRLLQNNDTYDIDHIYPRSKVIKDDSFDNLVLVLKNENAEKSNEYPVKKEIQEKMKSFWRFLKEKNFISDEKYKRLTGKDDFELRGFMARQLVNVRQTTKEVGKILQQIEPEIKIVYSKAEIASSFREMFDFIKVRELNDTHHAKDAYLNIVAGNVYNTKFTEKPYRYLQEIKENYDVKKIYNYDIKNAWDKENSLEIVKKNMEKNTVNITKFIKEEKGELFNLNPIKKGETSNEIISIKPKLYDGKDNKLNEKYGYYTSLKAAYFIYVEHEKKNKKVKTFERITRIDSTLIKNEKNLIKYLVSQKKLLNPKIIKKIYKEQTLIIDSYPYTFTGVDSNKKVELKNKKQLYLEKKYEQILKNALKFVEDNQGETEENYKFIYLKKRNNNEKNETIDAVKERYNIEFNEMYDKFLEKLSSKDYKNYINNKLYTNFLNSKEKFKKLKLWEKSLILREFLKIFNKNTYGKYEIKDSQTKEKLFSFPEDTGRIRLGQSSLGNNKELLEESVTGLFVKKIKL

SEQ ID NO: 4943 - protein, 1055 aa, unidentified
  REGION 1..1055: note = Description of Unknown: Cas Enzyme sequence
MKKILGIDLGTNSLGWALVATENAIVDGGVIIFPRGNNVDAKNGKESSFSQQRTVYRGARRRLYRRKLRRRRLLDMAARYFHLTEKAIFNDSSPLTLYQLRAESLHRNLSAGELFRVCLYFAKKRGFLSNRKEAMRESTKEQGVVKKGISDLEKKLNEAGAPTLGAYYYQLICDHYAGKRLDERILERWTSRQMYKDELAAILEAQSRLGNPLLNPKLAAELQKQVFYQRPLKSAKNLVARCRFEPSKRCMPRSHPVFQEFRSWQIATNLTWTNPDTAEFGTLSPPQKQKLVDFLHTETKPTEAKVKSLLGLSKRVLFNDVELKCASTICQLNALFEKYGVPKPGVDALNSIYHSLLYTADDAFLKMQTYLKDKFDIPNELSAALWEIKLEQDYANISHKAAHKILPWMRKGMRYDEACVQAGYHHSHEIKFRDLPEVRLMKTNELRNPVVQKAVSACIRLVNQVIRTYGKPDEVRIELARELKKPKKVRERIRSEQFQKQKKRELYQDVLLNNHYSRVQAMSDSLLKKYELWLELGCESDDWRDFDAFTREVSRFDLEKYRLWLEADRISPYTGKVISLSTLMSPEIEIEHILPFSRSLDNGFMNKTLSERSFNAAKGNLTPLEYYSGRPHEELEQFRKRIATFSNPAKRSVFLKESLPEDFANSQLSDTAYIATQAIGRISECIQKVYATKGGVTHIIRKSLGLNSILHYDGNAELISEMKNRGDHRHHFIDAVVIATTSTSMIQQISRANERGDGSLDAELRAPWSSFRSDVEDKANSLLIVHRFPKKLTKTSINRYKHDKRTSIKPQLQRVPRGSMHEDTLYGKIVNPYTGNQNYVVRKPLSGLDEKNIDKIVDGGIRNMLKSEIERQGSWAKVVKEPVFFNGKPLRRVRWINSSNELPLLREETQTFIEPGNNYILVIYQDDKGKRDYLSITFFDALRNRQAIGSIYPAEHHGKKLLYSLTHYDKFILYKDHPEEIDWNNPQELNERLYHVIKFTGNSIYLGRSILSKIQADKDKMPIKLKCGTNTIKAVKVKLDLLGRICWRSDVGPVG

SEQ ID NO: 4944 - protein, 1050 aa, unidentified
  REGION 1..1050: note = Description of Unknown: Cas Enzyme sequence
MKKILGIDLGTNSLGWALIEEETKLVDGGVVIFPRGNNEDLKTGKESSYSQQRTTYRGARRLLFRRKLRRKRLLNIAHDIFHIKPEDIYSDTDPFNLYRLRKEGLDRVLNEKELFRICLYFAKKRGFLSNRKSEARANDDSGVVKKAISELDEKFHSLGFRTLGEYYFHLASEHRSGRLLEERIVGRYTSRAMYQSEFDLIINRQLSLKSKFLTDDIARELKKEIFYQRPLKSAKHLIGKCRFEESKRCMPRSHPIFQEFRAWNIINNLRWVNHDTAETDGLTADQKMKAFQYFNSEIKLTETKLKKVVGLSTRVKFSDIELKPCKTRIEIYKALSQDNINLNDEAFLKLYHCLLFTQDQNFDKFKDYVSKTWQISSNTAQVLWDIKLEPDYSNISCKAASKILPFITKGMRYDEACIEAGYHHSKKIAFKNLEKIPFLKTNEMRNPVVQKAISTTIALVNKIITVYGKPDEVRIELARELKRPRVEREKMRSRNKAKSERREQYQEILEKHFGRTVAYSDSILNKYELWLELGCKEDGMTDFEDFARNTKKVDLTKYQLWLEADRISPYTGRVISLSTLLSPEIEIEHILPYSRSLDNSFMNKTLCERSFNVHQKQNMTPLEYFNKRPNHEKDEFVKRISLLSNSAKRNMFLCEIFPDSFSNNQLTDTAYIALKAIEKIQLAIEKVYPTKGGVTAILRKQLGLNSILHYGDDANIAAEYKNRGDHRHHFIDAVVIATTTNTLLKQLSSANASFGKIEVDIQAPWQGFRSDIEEKANQILVVHRQNIKLVKSNINRYKHGNKGVKDQLTKSIRGSMHEDTLYGKITNPYTQEENYVIKKNINSLDEKQLEKIIDVKIKEFLKEQIAMKGSWAEVLKNPIIFHGKPLRSVRWRNTASELKLLRRDTNTYVESGNNFVLVIYESEDGKRDFETVSFIKAVERKTKQDDIYPRVKNDKKLLFTVQALDKFIMYHVDKDEINWEDKTELAAKLYHIRKFTKDNFYVGKSTVAKFDTAKFVMPFSKYYSVNTAKIIKIKLDLLGNIVWRSDKGKL

SEQ ID NO: 4945 - protein, 1059 aa, unidentified
  REGION 1..1059: note = Description of Unknown: Cas Enzyme sequence
MKKILGIDLGTNSLGWALVAENEALLDGGVIIFPKGNNEDPKTGKESSYSQLRTQYRGARRRLYRRKLRRRRILEIAKKFFDLNENDIFKNTSPLSLYKLRYEGLERILQPDELFRVCLYFAKKRGFLSNRKDLMKENNKDLGTVKKGISDLEELIRNSGSRTLGEYYFNLISDHFKGKRLEERILERWTSRHMYEEEIDKIFNTQINLSNPHFNTELGSEIKKQIFYQRPLKSAKNLVGKCRLESSKRCMPRSHPVFQEFRAWQNINNLKWANPDTSEFGELNLDQKLKLVQLLKSDLKPTEAKIKKSLGFSTRIKFSEIELVPCRTEIQINKILQDEGLNLSDETILKIYHCLLFTGDVHFKKLSEHLRTKFNLELPVVEKLWSADHLKLEQDYSNISHKAAQKLLPYMKKGMRFDEACIEAGYHHSFENKFKNLPKVRSLKTNELRNPVVQKAVSVCIALVNQLIGKHGKPDEVRIELARELKKPKAIREQIRYKNILKQTKRDQYREVLENFFNRTIAYSDSILTKYELWLELGCTGNDFDDFDAFTKEVKKSDLEKYRLWLEADRISPYSGKVISLSDLISNQEIEIEHILPFSRSLDNSFANKTLCERSINSFKTNLTPLEYFERRPEKEKSDFQKRIARFSNPFKKSIFLTENLPDSFSNSQLSDTAYIARKSVEKLSECIEKVYTTKGGVTHMIRKDLGLNSILHYEGTPDLIAEMKNRGDHRHHFIDAVVIAATSQALIQKISRATESGNGNFKLNLEPPWPRFRRDLEDMVNGLLIVHKFPKKLVRSSINKYKHDKRPDKKQLIQKALRGPLHEDTLYGKIMNPYTGEENYVVTKRIINLNEAQLDKIVDEKIKQHFKGLIEKKGSWTQIIKEPILFNGKPLRRVRMINNSSNLPILREDTKTYIEPGNNYALVIYEGENGKRDYLSISFYNAIKNKKEIGLLYPKELNGKKLIFSLTHFDKFILYNEHPDEVDWTNQENLNNKLYHVIKFTGNNVYLGKSILSKIQADKDKMPIKQYSNSNTIKAVKIKLNLLGEIYWRSDIGLIKKA

SEQ ID NO: 4946 - protein, 1052 aa, unidentified
  REGION 1..1052: note = Description of Unknown: Cas Enzyme sequence
MNDKDLIYSFDLGSGSLGICVRQGKEVKYIDSLLIDKDFASIKESANRRRQIKTRIAHKQREKWWKEEAKKAGLEVLSTEQPTKNNPKAKPDERMLRQFPKDGDNTIYSSTLLRIALLQGQKLESWQIFKAIWSAMQRRGYDKIPWGFDSDKEENIVAVNEYDKKLEEFFGSQKEYYYPCYYEAFKQGIWSPKEPYNLSGKLSSNPLPARNKDKQTLATPSRELVSNELKNLLQRASKQFPKLIGKEDFIIYGPAQKPYASYDKNGEYTKFRGKDWDWQGLLGQKIPRFDNRIISKCKLISRFNVCKANKILNKEVTFLLALKNMRFTKDDKTSVSLNSEQIKYLFDLYKSNFNSKENKTQKALINSKTWKKYIKEELHGIPNPNQTEIPQPKLGGRSSFCKPALNILHSLLLSGKNPNDYYNELVKNIKNINPVKGLIKEDFKFLLNMSNDWNSISVQDTREELKKLSKEESHKQIQKVISGIQNRIVRHRLLILLLQFEKLNEKYGQPDKIIFEIAREDFVGKDREKEYVSLQNANKKEIESAIKKLQDAGIKINQKNILRARLFLQQDGKDVYDISENRNLSFQNLEQYEIDHIVPTTRGGSDSFSNFVLTKLQNNQNKENLTPYEWFYKKNSDKWNEYIKNVESIKNLGKHKTELLISDAAIELESKRTDLHATSQIEKLAQQIASLYFGFGLNTKDDKRRIIFFTGGNTSDVRKGLDLNRILFPNLSDDEYKELKKQKNFKDKNRSNARHHALDALVLNFLPEIKMDKKSIIQKPYFFDKVFCENALSLVYPKTIKTVTPKLRETVYSLKCRIENGIKKYYFISKFNSSIDNFKDLEPKKKGADSAKTNVKKVFSFQIKKDFENIMQNENLKQEEWSKFLEQYTDNYKKIKKISIIDSKAFSSEDVFDNNGNFKKNIGEYKQNEGTPNQWIKGKEGHQGQIVFKNDKNKWQVVPVYAFDSLYKKLKEYQKKFNDVRFFSSGQLIRLIKKHEYFRKKEKFTIEIGIYKLTTIKTNGQTKIINLSTQKEEIQQINIFIEECGMVSYENK

SEQ ID NO: 4947 - protein, 1067 aa, unidentified
  REGION 1..1067: note = Description of Unknown: Cas Enzyme sequence
MKKEYMQNKNANICAFDIGVASLGLCVRRGQEVSLLESLLIPAEYASTKEAAKRRRLIRTRIAHHKREAWWRQCCEKYGIETLESRQPIYDAAGKLVSHKPDPRMLREFSAAGDNTIYNSALLRIALLQGQKLEGWQVFKAVWSAFQHRGYLPAAELPWAKRSKRNIDEEDAGKTGKGDKDGEAEDEKKNAEAASAYTAILKTYPEDCQLPCYFEAERMGLWSPAKPKEFKLRHETPAPGAARNKDGVGHVAPRALVEKEIRLLLQQAGKLFPKLKGREAYVMYGEPGIAFPSVTDPKKWGSIRGGEGEAKGVLSQKTPRFDNRAVNKCRLIPRLNVCKANDELNREVSFLLALKNMRYSFGDKPDCALDPEQLKELFGVFTADKSKSFHITPTKWRKWVQERLKSEVNPAHPAVTAAKLGGRSSFCRPALRLLKELILSGQSPVEFHAAKAKEARNEDPRKGLVKAEYDFLRDLGDSWYSIHIPDNRLADARAVTAETERRARIDEIINDVRNPVVRHRLRVLIDQFKRLKDRHGAPDRIYFEFIREDFMGEKARREYEARIRTNKKERDEAHKAAEELKLKGDGLLKMRLYREQGGVDYYASGESEKIAQTDIDNCQIDHIVPRAQGGPDAFYNLILTSRANNSAKGDRTPWEWLKGDKDAWARLSEKVGRNNRSLSPKKKRLLLSAEPQKLVEKYTALAETAYIAKLAAKLASLYFGWPESVKGSEKRIFISNGAQTARIRRRYKLDRLLHPDIEKEEDFVKLVRDGKLDKKNRDNPRHHALDALVISMGEDLKYDANGDMTLPAWFHSGYVKSELEKVAPANIRFEKPTIAQTIYGMRKTKDGYVMVATAKTSQAKPTRLEDWGKLSLEQARKRVKDIYSEQIRSDFEAKLGEEALTSEQWAAFVTGYRCKNGTRPRKISYVEARDINAGEDGKAPAQSGEILEARKRSMPGQYIKDLKAHQGQLVYKDGGKWKVEPVYVWESLHSKTVAIHAKYGKGNVRFFRSGQSVEVSMPCRVPAGRYVWKSIEAERGRVELKGGDGKEYKRIPVSDLIDNGRLEVIGQ

SEQ ID NO: 4948 - protein, 1053 aa, unidentified
  REGION 1..1053: note = Description of Unknown: Cas Enzyme sequence
VAERIFSFDLGSGSIGECVREGSEVKHAHSNLIDADYADIKEIVKLRRQYRTRQAHQTREALWREHAKAAGIETPSTTQPLAGKPAPKEPADERMLREFPKAGDTTIYNSALLRIALLRGQKLAGWQIYKAVRSAIQRRGYDNVPWASSSDKDNQENTAAVSEYETRLKHYFGDRKEFYFPCYYEAYRMGLWSPDKPDIFNLRLSSAPNSAHNKTEGDPQATAPRKLVEAELLAMLENAAKQFPELTGKAKEILYGTTCEPYKSVKAIGGILDQKHPRFDNRIIGKCCLIPRLNTCKAKEPLCSEVKFLLALKNMRYTYKGNTTAALEPPQFRLAYEQFKGNIKTPDSKSAKKLITARDWKKFIQTNISEDANPNETQAEIPQPEQRGRSKFCRPALDIMRRLLLSGKGPHEFYAEEIKNPRTGLTREDYAFLLAMPPEWDKICVPDGRLEEQKLDEKARLARIERIIGGVTNRIVRNRLQLLFGRLRSMTANFGKPDKVFVEVARSTFLGEDRLKEHNRMQKEGEKEWKTAREAAGEQSSLRMLLFRLQNGKDLYDTTENNALVETNLGDYEIDHIVPRSRGGSDSPLNMVLTKHELNIDKGNLTPYEWFQRKRTPAEWTAFVDAVKKINVVPDTRYGKRKRTKIELLTSPEAGELARRNTDLQATMQLEKLALQIVSLFFGWPMNAKDEKRHVFAVKGGLTAEIRRDCHLNNLLNPPLSDEDFKALRAQGPDAVKAKERELNEKNRDNPRHHALDAIVISLAGAARIDEKLNKYTLPAGISRETIAQAIQRVYPQELRTCTPKLRDTMYALRCRMENGEPTYYMTTRFNNSIKTISTLKVLKKSVLESIFDRRISHDLLEKFHEDGLTEESWRKFVLDYARTDGRRIRALCKIDSAPFTREEALAENGSPRRVVGDFMQVGKMRGQYMRRKENHKGQLVYIARRMRNNVPMWKVAPVCVFESTQKKYKDYLGKYDSVLLFKANQTVELLDSIPDVKDGIPKGLYTVKIKSDGKCQIKSVDYLKIYECSINELMNIGRMRSFRNEFSSNPHS

SEQ ID NO: 4949 - protein, 1099 aa, unidentified
  REGION 1..1099: note = Description of Unknown: Cas Enzyme sequence
MNSTETVFAFDCGLASLGEAVRQGQSFPLVESWLIPDKFAETKSAAMRRRMMTTRDAHKERELWLLKTFEDLGIEVLRGKEVSKTPAGWTVTRKADPRLTREFPKPGDDTCYTSCLLRIKLLRGEKLAPWQIYKAIRSAIQKRGYDPDIPWKNREEKQQKKEEEEEAAAVLFDEKLLRKTVGDNPDWLYPCYLDAFRMGLWNPAHPTQLGMRIDHKAQSTRKTIMLRALVEKELRDLLHQAAQQLPALAGKEEFVLYGPNGKYTSSSVRAGALAQKVPRFDNRIIDKCALIPRLNVCKIRMEGTQPHPASQIIFEITFLQKLKNMRVQGSAGIRGLTPAEIALAAFSQKNSLPPKAWAAFCEECGLHPVPAFKKLVFKDISPVLAPEVFRSALLEKLASVSVLDSGKRVRNLTDDERAALLALMQKPRDSFSITASKWADFCGDLGVSPLPGHEEVKPPKAAGRARFCRPAAQILKRLILSGQAPAAFHAAEILNLGGNADPRKGLVAADLDFLLHMGDSWDAIRIPDGKLDAIADQYTDADEAIRKLIGSQNNPVVRHRLGVFAQRLRELKRRFGVPDQVVLEFVREDFMGDKARMELKKFQNDRAKARAEARARVAELGISEKNSLRYELWKAQGGRCLYTDDPLAATELDNYHVDHIVPRAKGGPDSRLNYVLTLNQTNDDKADRTPYEWLSGNPARWLAYVNRVESRLKAADGISRKTAQLLTLPNAVELAERYTALAETAWISRLAQKIADLSFGWRNGIDAAGQKRTVVVSGGLTARIRRKYGLNRILNPGAASEEEAEKKNRSDKRHHALDAMTISFIPQWARDPDKTGFFRFPKAIRDNPLPFFQARIDAVVPRQLCYEKAPLAETIYGLRKTPEGNQVVKRTDLRDLAYQTVNMKTVFNIDYAVKNGIPKILDERIQSALLEFARSKPTEEEWNRFAADFAPFGSRVRRVRLVETALPPDTMGEFKNMSKDGTAMLRKPLKANKGQYVFTEPDGKIKVCPVHSFESPFQIRTLLLAKEPGRVIQGFYQTGCLVALERDMEAGKHKIPKGVYRLSTIRADAFVGIFNTHGNLLGPVGIQHLLRAGFKRIDG

SEQ ID NO: 4950 - protein, 1049 aa, unidentified
  REGION 1..1049: note = Description of Unknown: Cas Enzyme sequence
MNQETSVTGKTIWAFDLGKGSIGEAVRCGNRFLHKASLLIPAEFAETKTAAGRRRMWRTRQAHKAREKWLDEVMREAGFQVLHGRNYDGTGKWKSSEPADERLEREFAEPGDPTCYTSCLLRIKLLRGERLEPWQIYKALHSAIQRRGYDPDIPWKTRNRRKVKPGEADDDDEAGTETRMQQFEKDLEVMSHGKIEYKFSCYFDAWKMGLWNPDKPNELKDHIDCHAESTRNQIVPRKLVDNEIRALTEAASKHYPKLKGQADFLLYGPAKTPYASFDAKLRKQYNLKEGSATDWQGVLGQKIPRFDNRIIGKCVLIPRMNVCKADVRLDKNDNPIPETLLASEVSFLMKLKNMRIQRGKRTEGLTAGEIKSIFESPDFQKMAITESAWKKKVCAQLGAFPLPGHGLVDAPKFSGRSRFCRPALDILKRLILSGTPPKEFHMAEVARLNGNKNPLKGLVEEDLRFLLKMGETWQGLYIPNQKLDALVRNADNTDEAIRTLIGSQNDPIVRHRLNLFVERLNELNERFGQPENVVLEFVREDFMGKKAKIEYNRFIKERAAERVKFRKEAEEAGATERAAGLKMELLRAQSGRCLYTTAALIPEELDEYVIDHIVPRAKGGPDAVINYVLTTKNANDDKADRTPYEWLFGKEGWDAYVSRVRERAGALRNKKVQLLTSPDAETLVQKYTALAETAWISKLAQALLDLRFGWQNGNDKAGIKRVIIVSGGLTGRIRRKYGLNRILNPDAEDEEEADQKNRDDDRHHALDAMVISFIPNWARDTKKTGFFKFPEGFNREFFAKEIAQVDPRNIALEKPAFEETFYGHRTIDGKDFIVGRESLGDLAAKFVANKRVLKARKDIDSRRIVSPTIRYAVESFLNATPNLTLETWDKWCADFRCGEGGPRVEKILMTKSKANSVEEYKDVSKDKTGQFRRGAKHRGYFVFERPAATKKEPNKMQIDVQPVYVFQSKLQIARILLKEPGVVLLGYFESGCLVRIPKEWEFQRTKYPAADYICTSIWTNRNAKLRHPRYGEIGPIGLRILFDAGLKRV

SEQ ID NO: 4951 - protein, 1051 aa, unidentified
  REGION 1..1051: note = Description of Unknown: Cas Enzyme sequence
MKTIWAFDLGKASLGEAVRQGDNFLHKASLLIPEDFAETKTAAARRRMWRTRLAHKAREAWLVKVSRECGLEVLNGRNYDAKGQWQPGHPADPRLEREFAAPGDPTCYTSCLLRIRLLRGEKLEPWQAYKALHSAIQRRGYDPNIPWKNRPNRKAKPGDPEDDAAGTKARMDQFEKELHAMAPDQPDSHYPCYFDAWKMGLWNPKSPALLNDRIDCQAESTRNQVVPRKIVEAEIRALVDSAARHYPKLKGKADYLLYGPSGTAYASHHPALRKKYDLKEGGDNDWQGVLGQKIPRFDNRIIAKCVLIPRLNVCKIRTDESGDLHPRSRLAAEVSFLMKLKNMRFQRNRKQDSLTAPEIASIFANPAFQNLAISTTAWKKKICVPLLAVPLPGHESVEAPKASGRSRFCRPALDILKRLILSGQPPKEFHRQELHRLNGNTDPLKGLVESDLKFLLQMGENWEGIYIPNQKLDALVRNAEDPASAIRTLIGTQNDPIVRHRLSVFAQRIAWMASEFDEPDTIVLEFVREDFMGRKAKLEYSKFIKDRAAERAKARQEAAEVGATASAAGFKLELLKSQKAICLYTGDPLVPTSLDQYCIDHIVPRAKNGPDAAVNYVLTTRTTNDAKADRTPFEWLSASSGWDAYVSRVRERIGSLRNKKVQLLISPDAETLVQKYTALAETAWISKLAQAILDLQFGWLNGNDSQGSKRVVIVSGGLTARIRRQYGLNRILNPNAENEEEAEKKNRDDDRHHALDAMVISYLPGWLRDPRKQSFFRLPEGIHREFFAKHIQEVIPANLCFEKPALAETIYGSRGEGEAKTIVQRAEVLSLAQKPIAPSKTKFDLDYARKQIQSIRDSRIRELLAVFVAEEPSEQAWIQFCGSFALPRKEGGQGSPVKFVTVDVGEAAEYKDLSKDGTGAYRKGLKGHKGQVVYLDQFGKLSVDPIYAHGSVAKTKSKIDEAGGKSKFIEFFQSGCAVGTAHPIPAGSYSLVILNEEKKKRRIAPAQPLPPSQLTLRTIITKAMVAEMTLANSSRVVAKLDVWIQAGLYRI

SEQ ID NO: 4952 - protein, 1050 aa, unidentified
  REGION 1..1050: note = Description of Unknown: Cas Enzyme sequence
MNSGNPLIHEKTIWAFDLGKASIGEAVRLNDTFLHKASFLIPAEFAETKTAASRRRMWRTRIAHQERERWLGEVMLKAGIEPLIGRQTIKIDGKWQATVETEVQKLSRHRLEREFAAPGDPTCYTSSLLRIKLLLGEQLEAWQVYKAFHSAIQRRGYDANIPWKTRSQSKAKPGNAEDDEAGTQARMEEFIRQLEEMAPGKPVFHFPCYFEAWKMGLWDPAKPTQLKDRISCRAESTRNHIVPRKLVEKEIAALMEGAAKHYPQLKGLTKYLLYGPSETAYASYDAKLRRQYDLKEGGANDWQGVVGQKIPRFDNRIIGKCVLIPRMNVCKVRTDSKGAIHPQSKLAAEVAFLMKLKNMRIQRAGKSTSLSAKEIKAIIENPAFNNLAITEAAWKKKICAPLLAVALPGHESVEAPKISGRSRFCRPALDILKRLILSGESPKHFYDAEVAELKGNTNLLKGLVKDDLKFLLRMGETWEGIYIPNQRLDALVRSAESPDKAVRSLIGLQNDPIVRHRLSVFAERLTVFTAKFGEPESVVLEFVREDFMGRKAKLEYNKFIRDRATDRARAKKEAAEAGNSERAAGFKLELLNAQKGICLYTGDGLIPTELDQYVIDHVVPRAKGGPDAALNYVLTTRRTNDDKSNRTPYEWLSTTNGWDAYVNRVRERLTTLRHKKAQLLLSPIAETLVEKYTALAETAWISKLAQAILDLHFGWRNGTDMKGQKRVVIISGGLTGRIRRKYGLNRILNPDAEDEEEAEKKNRNDDRHHALDAMVISFIPTWARDPKKTGFFRFPENVNRQFFEREIKDVIPENICFEKAVLAETIYGARYSGERRIIVRRTEVITLAQKPVGPSKTKFDLEYAKKQIQTIRDFHIQQQLANFVSTGPTETMWNDFCRNFYLRRKNGLPGSAIRFVRVNVGDADEYKDMSKDGSGAFRRALKGHKGQFIYFDSKRKPKVRPVYAFESAPRVRIELIQNVGATAMVGFFQSGCLVELEKSISHNSTPLIPGKYKLNTILTDGRAKVTDSSGKMSLPISLEKMLAAGFKRVS

SEQ ID NO: 4953 - protein, 1071 aa, unidentified
  REGION 1..1071: note = Description of Unknown: Cas Enzyme sequence
MSTIWAFDLGKGSIGEAVWNTQTKQFDHVASLLIPPDFASTKEAATRRRMWRTRQAHKAREAWLDEVWKAAGLTPLVGRRVGKVDADGNWIEPKDWNKKGPDGKKRKLTWKLRHEGDPRLEREFPAKGDTTCYTSCLLRIKLLRGEKLEDWQIYKALHSAIQKRGYDPDIAWKSRENRRTRNKKSEDEDKGTAERMAAFENELLAMSPENEDHRMPCYFDAWMMGLWNPAQPDELKDRIDHRSGSTRNRILPRHLVEREIRLLVEAAGRQLPALAGKAWYVIYGPAGRAYASYYKVERDQFKLREGGESDWRGVLGQKIPRFDNRIVEKCVLMPRFNVCKVRSDEQKAHGERGTLPQEVTFLLKLKNMRVQRSPTLQNGLTSVELAQVFNTYCDKGWKLTETQWRKFCASIFTVPVPPSLEVEPPKLAGRSRFCRPALEILKRLILSGQSPKTFHASEVGRLNGNADPRKGLVEADLKFLLDMGDTWEGIHVPNQKLDALAQRTQDSDAAILELIGSQNDPIVRHRLGAFWKRLQWMEEQFGDPQEIAIEFVREDFMGEKALMDYRKFIKDREKERKQARSDAEAAGSMERSAGLKMELLRLQGGICLYKGTPLAETALDEYEIDHIVPRSQGGPDSAVNYILTTKVANDEKGNRTPFEWLSATSGWDTYVSRVKGRQTALRNKKVRLLLLPDAAELADKYTALAETAWIAKLAQTLAGLHFGWKNGNDEQGRKRVTVISGGLTARIRRKYKLNSLLADEDASEEDAEKNRKDDRHHALDAMVLAFIPGWARNESKQKWFRFPEGVTRENTFKHWLSRTLPRNEYLEKPKLAETIYGTRRDGLETVVVQRAELVKLTYRQINPSKTVYDLKYAKEQFKSVRDPVIKRLLLDWCDRGESEEAWKKFAAEFRVPMKNGGNGPLVRRVIMNVGKVDEYVNMSKDRSGAWRKAKKSHRGQVVYLLRTQTKAGKVNESAKVCPVYVFESAQEVMRRLKKEHGANMTVHGFFQSGCMVQIDEDVPHEKMPLPAGSYLLNSIRTDGVVKLTRQDGKTYPDIPRYSVAALIKAGLSRED

SEQ ID NO: 4954 - protein, 1597 aa, unidentified
  REGION 1..1597: note = Description of Unknown: Cas Enzyme sequence
MTTRNSETSVWAFDLGLGSIGEAVRVGTEFKHVASLLIPAEFAETKTAASRRRMMRTRQAHKAREEWLDQVWTASGLDPLKKRKPYQDPITKKWIPEKCQKGDPRLEREFAGEGDDTCYTSCLLRIKLLRGEKLEPWQIYKALHSAIQKRGYDKDIPWKRAEAKRAGKKIEDLEKEEARAEAELAKKDLAYQAALGAWKQFISLVPKEFHFPCYYDARKMGLWNEAKPFELKTQIDHNADSTRNVRFDRSDVTKEIHALATATGEQIPALKGKVDYLLFGPAGEPYASHDAGLRKQHKLRLGSKDDWQGVLGQKIPRFDNRILTPCALIPRLHVCRVMPKFKKAEPQTKRELETKSLLPAEVIFLMQAKNLQVDDKNTEVVRFLETGEIQELLDKATTDVLDAVRDEKTEAQILECYKITVSEWKHWCAGKNFRYLNDAQGTKTKNPAIDEEKSEGGKTTDIVKAPRPSGRSRFSRPALSILRHVLLNASPELPPDKIIEKLHKNDLELFDLLGLDVLEKEPLLNGKKGVYEKRPRTWILISDLVFLPFIWKQRLDDDKIPLSYSPNQIRIPDLALRFLRRKHEITNKPFSEILRDKDPEVNRRAKAILELIGEQNNPIVRDRLTRFWQRLLHFNNPVVNPDTKKQKPGLGLDDPECLVLEFVRDDEDNSLDGKARKGAIKDAIDNNTKERERIRKLLEDGNLPTSDDHILRRRLWEDQGCQCIYTGKGIGCTDYQNFELEHIIPRSKGGPDAYWNWVLADPEANAEKDSRTPYQWFHDEKADSEWLDYKNRVLNFKGKLGSRKADLLLSADAVELVGEKYTALADTAWISRLAQSIARLHFGWPLDDDQGKERVITISGGLTARIRRKYLLDSLLGPTNRSGEHSEDDPDPAVVRNRIDEALQELETLKSKHPTTDPELSEVKEERRELLQTLRDLAAQSNKNRKDKRHHALDAMLLTFLPNWARDKNKEDFFRLEEIGDNTIYSEEGSRRKKAHQERIGKLYNENEAVFSQIREAKKEGDDATMERLKKSILPARKEMAVLYQSIDKQKQPRNIKAVREWFKNQLATANDGNKVLPQNIARSRPEIEKTIYADRNMIQLAKQQKSVALCNFGLRPEFHDESISIFDARYLRTQLQAIIGIKGSKEKEALKKLKRLLHSKVSAEFPLDTTQWITFCEQSEVLSHFPKMGKKKTLPTTAECLLDLRKIEIWATSRSLGHTGLINLAYSDGTSLVLDMEELGLKVPKFAKRIERPKKSSFKKETKPSTLVLICLEDQCEKWPGFVFDRISQSKITNPDFQKSLEELSGFLPGPKPKDKDAKVDWGQRDETWKQKSKEFLKAHSLPSNLFLYEVGKTEPRPREKSSIWGVLFRKVERQFSLPELKKQTKKITCINSAKAIDLFADSLNSIPQIKDQERLWKEFCSVWKSTTKQAWEQFESPGKLTSQKWIDFHKSQSGPLVHKIKQKKGDSLEKYFDLSKDGTGQWFEGNNQGYLLAKKGDKYHPHAIRFFEKESDVTMRLKRNQWELLDETPWRWGMLLKLEKQAGTEKRPILSGHYFFGSCTDAKVNLNSCFGEKVPQGISLKSLWENGLRRMTNKL

SEQ ID NO: 4955 - protein, 1110 aa, unidentified
  REGION 1..1110: note = Description of Unknown: Cas Enzyme sequence
MHPPPRPKIWSFDIGVASLGLAIRGYETDPNDFSLVESLRIPEEFAATKPAASRRRMWRTRLAHKAREQWLRQIFEEAGLEVLQGRQLIPKANSRPGEPSCDVIPGDPRLEREFPEPGDNTAYCGAALRILLVQGQHLEPWQVFKAFHSAIQKRGYDPNVPWKNSRAQSSENDENQITLQRAMAMQGEIEATSPDEVHHLPCYWEASRMGLWTPDRPDEVRLRIDHTAMSTRFGSQEDPSSESRGRPVPAVFPRRLVEEELRQLVAAAEKQYPQLTGKASLIIYGPAGESYASYKATRYGNETRQRLESSTGDRLVEGKASDWKGVLAQKIPTFENRCPNNCGLIPRLNVCRSAPRISGEGIPYAESMLSAEVTCLMKLKNLRFHDTVIGDQRGLSADELANAFQALREKADIDALKHDDVRKAGESAVRALQFTRAGLRKWLATVDCEPSKNHELVAPPKPSGRSRFSRPALRIIRGLLFSGQSPAEFHPIAETRYVGTNDDPTRGIVSSDLAFLTGGGMGDDWDGIYLPNEALGQFRNAAVKGDTDTRHAAVHQLIASQKDPIVRHRLDHFYRKVCALRNGTETHPPFGEPDFVALEFVREDFMGDKAKLELQKFQNQRKKDRKTAREKSGGDNKLALKWQLWKDQNSTCLYCNKNIGRTELEASTEVEHIVPGSQGGPGAYYNLMLSCAICNAAKGMNTPYDWWHGARSESTPRGWDSYVESIHSQRSALRNKKVRILTEPDAADQVERYHMLAETAWISKLAQTVLCLTFGWPLDFAGEERRIRVIPGALTNRVARKYGLYKLLGSEDTIANLVEEVRQGKKDERQLDNKVREDKRHHALDAMVLSFIPSWAVNKGKRVYLKLPEGVHQGWFKKHLDAVVPTWVAHERPTLEETIYGRREDKTTIRREFRSIAYTGQTPKFSPSTLKKNIAKIVSPEIRDATLEFYSAEREPNELTWKAWAEGLILKNGSRVRRVLMTGDAIHECADLSKDGTGAWRKGSRHKGYFLLKAPSGRVSVKPVYAHQSVREIQSLLGSSDDILYGYFQSGDAVSLSSEVNQGSTMIPRGEYLLNSIWSDGRAAISSANGDQWRAINIQRLVEASLMKIS

SEQ ID NO: 4956 - protein, 1078 aa, unidentified
  REGION 1..1078: note = Description of Unknown: Cas Enzyme sequence
MKSASKKLGGDIWSFDIGLGSIGEAIRDPKTHEFKHVASLVLPAEFASTKTAATTRRMFRTRLAHKKREEWLDHVWRGAEQEPLKRRTTWRNPKTGKFELKHPGDPRLEREFPAKGDETCYTSCLLRIKLLRGEKLEPWQIYKALHSAIQRRGYDPDIPWKAKSASKASVEELKEQEEDEAKLLKFEQELRAMTKDEAYQLPCYFDAWKMGLWNPQKPDKLSLRIDCTAESPRNHVIPRTLVEKELKLLTVAAAKALPKLKGKEDYLLYGPAGRPYASWYPDFRKQHGLRLGSHTDTQGVLSQRIPRFDNRIISKCALIPRLNVCKITAASATAPAPQSEIVFDAVFLLKLKNMRVAQPNGDQRGLAADEIRTIFEDPKRKTWSFTAKQWARAIAHFGLVPVAGHEEIKAPRTAGRSRFCRPALEILKRLILSGQSPKVFYAEELARLGGNKDPLKGVVPEDLEFLLKMGDSWDRIHVPDQQLDAVLQMSSVPEQAVRLIIGKQNNPVVRHRLQLFFDRLKHLKDRFGEPQTVALEFVRWDFMGEKARKEYSKFVSEQTKLREQARKEAEEAGLDGKGAALKLALFKEQGGICLYTGEPLDISKIDSYEIDHIVPHSRMGPDAPYNRVLTTRSTNKDLKKDKTPFEWLGATSGWESYLERVKGRAGQLRNRKVRLLTSQDAEDLVEKYTTLAETAWISRLARAVLDATFGWRNGVDRDGKKRVVFVQGGLTARIRRKYRLNSLLAPTPEGVDARDWESKAEKNRTDKRHHALDAMVINFVPQWARDEAKESFFKFPKALGTDPRTFFAGVIDETSPLEVAFEKSVLADGIFGGRSKGPERFAVQRSPLLDLGYSTQNQKRRFDTRYLCKQVQSICDKGIREHVAAHVTTHTSEAEWNSFCANYRLKRRSGGVGPRVVRVAMKIGSLEHYADLSKDRSGSFRQGKKRHKGQLIYRNATLDSLEVMPIYAHASFRSERIRLQNEPGNQVLAFVQSGCRIQTHAPISSANYKLVTISADRREKRITPTQCLAADIYTWRTIDSRTKSVEIESRRGQRLALPLRHLVNAGFSRASAISGANT

SEQ ID NO: 4957 - protein, 1058 aa, unidentified
  REGION 1..1058: note = Description of Unknown: Cas Enzyme sequence
MPAKEYSLQRSGSAENAPSPHHVWAFDLGKGSIGEAVRVGTVFKHKASLLIPGDFAETRTARDRRRMWRTRQAHHAREQWLREVFQAIGLPVLYGRNHDTKTGEWKPGEPGDPRLEREFPTAGDDTCYTSCLLRIKLLRGEKLEPWQLFKAFHSAIQRRGYDPDIPWKTREAKKTKEADGEDDDAKTGERMKKFEEELAKMAPGQADYQFPAYFDAWKMGLWNPAQPADLKLRVDCHAESTRNQIVPRRLVEAEIRRMVEGAAKHYKALAGKANFLLFGPAQKPYASYNANPSKPPYLREGAATDWQGVLGQKIPRFDNRIIAKCALIPRLNVCKLREGCKGEPHPKSLVAVEVVFLMKLKNLRFQRGNKQEALSAAEIRSILEDPKRTKWAITKAAWKKQCAAIGAIPLPGHEEVESPRLSGRSRFCRPALEILKRLILSGQKPSDFLREELARLDGNKDPHKGLLAADLKFLGDMAARKDTWEGLYIPNQQLDALVQSTVGPDEAIQRLIGQQNDPIVRHRLDTFAKRLKALNVHGQPDHVVLEFVREDFMGKRAKMELSKFMKQRAEERIKAREEAAKAGATERSAGLKLELLRAQGGRCLYTDAELDPSRLDEYEIEHIVPRSRSGPDAVFNYVLTTHAVNEEKGDLTPYEWLSSTGGWDAYVNRVRSRSLALRNKKVQLLISPNAEELTERYTALAETAWIAKLAQTIVGLHFGWRNGVDEQGRKRVTVISGGLTGRIRRKYGLNRILNPNAQDEEEAEKKNRDDDRHHALDAMVISFIPGWARAAKKEGFFRFPEGVNCEFFAKEIADVIPQNLCFEKPALAETIYGARGEEAERVIVQRVELFKLAMKGIAPGKTKFDLDYLAKQINAVRDGNIRRKLTEFHAKSPNEAQWKKFCEDIRLDGKRGLPGSHVRRVLMNVGEPTQYKDLSKDGTGAWRKRKKDHRGQIVVAESGDSWRVMPVYVFESPAQKLAAFKQAHPQGKTHGFFQSGCLVAVSDEVPHRKKPLPPGTYKLRTLRDDGYVQIEDQQGRTYPDWPLYGLANMIAAGFRRVD

SEQ ID NO: 4958 - protein, 1054 aa, unidentified
  REGION 1..1054: note = Description of Unknown: Cas Enzyme sequence
MCSKVFAFDIGTGSIGIAVREGNEIIDARSYLIPSDFASIKEQRERRRQYRTRESHKKREAWLKQECKKAGIKVLEGRIPRNKEKGIESQKGDPRLEREFAQKGDKTVYTSCLLRILLLRGEKLQGWQVYKALHSAIQRRGFDPEVPWKRKSVKGNKKTKDEDNREKEKNDGDSDEKENRKKSQEYEKKLEKITQGRKDRTYPCYYDAYKMGLWIPETDELKYIQKHEAKRARSNELAPPRTLVEKELRDLIDAAAHQFPALSGKADYIIYGPTGTPYASINPELRDKFGLKEGGETDWQGALSQKIPRFDNRMPDKCSLIPRYNVCRAHDHLAMQFTFLMKLKNMRYRDSDNHEQILTHEDIKSIFYEKRKDANKKKIECTTKGFTKREISEEIAKVYSITKTNWKKWLRGNKNGYPRDILKQGEKPVEAPKPGGRTRFCRPVMRLMRELILSGESPHQFYDTKLNEINNTDLSKGLVSDDIEFLLKMPDDWNNIYIPQFSLAEQYIKHGDSKDSAVQKLITKQRNPVIRHRMEIFKSYLDRLTDQYGVPGKVVIELVRQDFTSEKKKREFEKWQRENRKKAETARNEAKELGDNSYKGRLKIRLLKQQSYCCLYEGDDLGLSDLSALDIDHAVPQKGGYNGSDSMYNKVVTKASTNRKKGNRTPYEYLSTSGKWDAYCERLQKYSTSLGKKKVALLSSEHPEELDEKYTQLAETAWIARIARDIVCLTYGWQYGAKGENEKAIVVDGKMTANVRRHLKLNSLLDHGGETDPAKLEEKCRDDKRHHALDAMVISFIARNKPELPEGIHKERFQEWLEKVVPEQIAFKKPELEQTIYGKRMIYESGRKKEIAVKRENLKDIAYANSKYDIKKARKNTKDIIDPGIRVRIETFLDTGPDRDMWDSFIDDFRQHEYVGSKVRKVSMYAGELKEFTNLSKFDDRGQYRKAAKHRGQFVYIDGKGKPKVQPVYAFESKAHVKAELVQNGYHIVDFFFAGCLIELDNDIDLGNRVIPKGKYRLGTLMTNGQVKLMSTLPELKNPVGIARLLSHGFHRVR

SEQ ID NO: 4959 - protein, 1052 aa, unidentified
  REGION 1..1052: note = Description of Unknown: Cas Enzyme sequence
MDILGNKVWGFDMGKGSLGEAVRIGNEFKHVCSLLLDADFGEIKTAASLRRQYRTRKAHKAREKWLEDCLRKCGIEVLQRRQVAFVDGKWQLVSKGDIRLEKEFPTDDENICYNSIALRCKLILGEKLESWQVFKALNSAIQNRGYDSEIPWKETEVKSKDNSDYAIKLQAFEREKDELLLNLPSIDEAIRSKFDYPCFFKAYKIGLWNPVNPNQVDSKISHTANKAKGYVIPRNYVEKEFIKLVEMASLQYPKLRNKALFILYGITEKPYASFDFDLRKKFNLKRGAESDWTALGQKIPRFDNRIVDKCKLIPRFNVCKVKHIDEIQQDKDFLYYEITLAMKLLNLRFYRNASVQSLNYDEFKILFEIGKANKFKITKTNLKKFLNSINAEILDENQAEVAQPKDSGRASFSRPAMQLIKELIFSGQSPADFYARKVSSISNVETKKGLVVEDLDFIKLMGDVDWNGIFIPDVETYKFAKNFSEDNSAQINKLIGMQNDPIVRHRLSFFYDRIKYLEAKFGVPDKVVLEFVRDDFIGKEKKKELNIAIKKRYSEKLKIAEKLDEIGFKGSKMLMKLELFQKQGDICLYTGEPLLPTEIPSLEIEHIVPRSRGGPDSAYNFVLTREATNKEKANRTPFEWLSGDSQKWVSYSDRVMSRSKELGKKRCQLLLKENAEELVEKYTALAETAWIARLAQRIVCMHFGFPMGALIGKKRVFTVSGSVTSRIRGMYGLNKILHNTEIDKTLSEVDILKLNDSLETKNRTNKKHHALDAMCLCFAPTSKEVLNKNREILPVEIAKDAENYFRRYLDNIIPNKVATMKPRLEETIYSKRKIGKKEYIVRKYDLESLAYKGINPKYDVEAIKKLANSENIINVVAKKIIRDFVNDNPTEQEWKDFCNTVKMPSKNGNGSRLKRILLLVGNTAEYKDLSKDGCGAYRKGDSHKGQIIWKTKSGKFKVEPIYAHSSRAKVSKELMKKPEFDSVAGIFRTGCLVEFTNDVMNDKDEFLLERGIYSLNTIRSDGMMKCTTSNGIPSKPININYFMEAGMRCVIL

SEQ ID NO: 4960 - protein, 1133 aa, unidentified
  REGION 1..1133: note = Description of Unknown: Cas Enzyme sequence
MVRRTALSVNLLMNSLPNQFVPLHQKWLTDPFYRTAVVLGLDVGLEGIGVCVRRGPEILYAKTWKYDVPEASRLEARRLLRSARHCRANRKTRMHRLRKLFEEHGLPWFAEDSEALRKTDPFLLRHRAVNGENPLASKEALSIAIRHCVAHRGHDYHYFNDEGAYPWGEAIDFKKVKQELEKLWLSPEEARRVLDDVELFEWKDSEVAEFRELVPQRIATADIIEQHLAKHAKGSKNHVRERAKGQAFPQKLVWAHLEKIIRRHAQLIHDVDGFLEKLAVKPTTPEKKEKAIFYYHRKTPGEMREHFERKRARCGYAEWLGLPSAQVDKRGHLAIRRWALLEFAANRDVEVQSKTMRWRVGLGGDLVKKLIEWLEQNPDAKTAASLGEIKKLVETTLKERHGTKLAPTSGKNGSELNVRFWKTFRDLLAPTAAKREENAPMCVAAAEKLFAIATAKGFEREAINACLKTCRPEEPNVPSSLYDFRRASAVDLYGVYPQVEFLLGQRVKKDRTRKHKRGDLAVKGRLRRLFEEELAPLLDGVSAPEYAVVEVARDLPRNLKAKREREKEILENEARRKRLYAKYGYHDAEKLKRSARRRIELHDQQNGICPFTGEELGDDPLDANLEIEHLFPATRGGLSVNENLVLTFRRINKAKDNRTPREFAAHLGQSFEVMKSHTEEMRWGALKREVFEWEDGNKIPNFGNTTRLAQLARQLVAEMAAWMGCRGDADVIAARIGCPSGLQTSACRRAWNLVKKDRADLTHHLVDAVILAHIPPREGQNYVHSGGIFFPMPDDKGEWSILSALPLGPVPDAVANLAGHDSEDCPLVEHRSSSKARSIHDKTHYRVLPDGSLAYRVEFPPREEIESAAKLRQMLLDTKIPLALIPPDHALNAWLDAKDGAPFRLLNGTPVRAIWKKAQKGDLKKDPSGFHASWNEKGCLQNVKSVIGGRWERLEIWRGWNEKKERWEYFKRLIPSRNLRRALRALGYSWEKKSKRPWREGAPMLTEPLKKVLGGKLPPFARRAVHPATGEPIVIQTGDAFLAGFTASGKLAKRGEAVAKREWIKVSAVMAEGGGRIRFLKLLSNEAWKAEPMAVDDLAFVAGLPPADDSSSYPDQRKPGAPRSSGKTDFRLE

SEQ ID NO: 4961 - protein, 1300 aa, unidentified
  REGION 1..1300: note = Description of Unknown: Cas Enzyme sequence
MEMQVPSGWRRFYDKALVLALDVGIEGVGVWLRKGWKPLFAHTFLVSLPEAAPLARRRAKRAWRHARESRKRREKMLKEWIVRHGLLTQTMLDEMWANPKAFERPFEHRHRAIHNGVPSAHCLVICLRHLVKRRGFDYHLTEEGAYPWGEELDAKEIVKWAKYAPCAPEYRVKLLVEIQSDAPWAKDTKGEPTEKYQTVVAALDRAVEEYRNRPIERMLERHMVEKGHPNLRERARTHNFPRELVKDHLFEICEKHQAFFAAGSFEQAMLELLGKRSGSGTWTTSDGGTQVVLDYHRRTRPEAERLWLRKTNDCPYAEELHRRGRVPAAKIKCDLRSDGAVRRFNLAMFLAERRVELADGANSRDYLPVNVIETMFADLEQDISATEQMLAGESEAQVQRPKKPGANAFKKRFKDLKLAGKRKETGECFNDDFFDQLADLIHPELRMLRGRASLCAESARAIYEEMTAGGTILDPAKMRAQLKDCGYYDMRKDRDRSPGVYPQVEFLLGQRKHYDDEGRPRDVQGRKDGDGRAQHHGVLRKLFAGQLRLDDGTVVDLSEELDGAETPEFVIVETIGDMPRNEDERREMKKQNKESRARKNAIIEGKYGLKLRELSDSQIRRVLIFDQQANEKGEALSPYTGEPLGRNPLDPNLQIEHIFPEKRGGIWIMDNLAITTRGENGTKGNRTPFEWLERNVNNHLAAMNWNKAKRAQFCREESSCPQWDNTTRMAQIARHLRGEVIHWLGIRQKCARIVDGGKRAVETSREIAERIGTPVGGQTAACREEWLPRILFPQMYREVTAKDGRTYWSKNRLNLRHHLWDAAVLSHIPPGVGMNSVECGGIFLTKLDASGDTKITVLPGLGPDLGAFEKENAERCLVSKPRQAKSKKSRYKETIISLPDAEGKTWAREALAKIAAKEMSPGRKGDALTKVKKLLNRPGLLQPTTSKKGRSIAPLLTEKDVEAWWEGVQALAVNRQEFRAVLSESGIEREEIPPAAVEKLFANREKIAFKKPATLIAFIRKQCGKKAEDIPDARIEEVLSARAARAELRARSIKPGKPGQPIRAIRREQDEVAFSGAHHTPGGREPIGGMKAVDNSSSITYLRRDIWAGTRCVVRNGKATTEIFYEHRLIPHPRHLAAHKKMHHREWRAEPLPDGLDPQNPLCSLSVGDLICVPLKLAKRNRKDSLFAGRKEPYPGGIRFYRISALKSDSTVEMKQAEFDPPKIEKGKEPTSEQARQLATHMLSASRDEDLAWLCEFTKCKKGEPTVPLPDPKSDDSSSNPCQRKPGPSCAGRAPDFRLE

SEQ ID NO: 4962 - protein, 937 aa, unidentified
  REGION 1..937: note = Description of Unknown: Cas Enzyme sequence
RDATGFDWRQDEVEEFERVLSARTAGPEKINERLAAHARQGGGNCRIRAKGEAYPRRFVWLHLKEIINRHEHLIEDVAGFVTALSLKPTDAGSKERAIFYFHRKTPEEMRAHFETKKASCPYAAWLGLPTGSVANRAHLSIRLFSLLEFAATRDIELLGGRRVPLGEEQTQKLLDWVKRHPEARTLKEAKPVLDELVTSLAKTFGSKVAPQSGKNKSELNVCFFTILRDLLAPGAANRNQNASMSAVSADRLFSIATTGGLSREAVVEALRDYYDARKRRLPDLYGVYPQVEFLLGQRVKKERTRHGKTRGMLAHPGQLQRIFAELAERLDGAAAPDFCVVEVARDLPRNQKQKAEREKEIGDNRKRREDLFKKFGLTDDAKGSARRRVELFDQQRGVCPFTGKELGGNPLAEDLDIEHLYPQESGGLTVNENLVLTFKAVNARKAKRTPREFATSLGVPFEEMVQHSTKMQWGKFKCSVFSWEKPDEIPAFGNTTRVSQLATQLSAELADWMGIQGIADAGQRENERARRIGTPTGFFTAACRRAWELPIKDRADLTHHLVDAVILSHIPPREGQNYLASGGIFFPEWDMTAKRQILGVLPLGPLPEQVARITAADAEVCPILRHRSSSNARSIHDETQWRVREDGALVAREELPAKDTLDPAKLRQKLIDSGIPLTYRDVEGTENPLIPSTTALERWLNSGDDSPLRLLNGTPVRSVWKFSGKGDLEKNPAGFHARRNEQGNLAGVKAIGGRWQALELWRGWDAKRGRWSYFKQLVPSKEVLRGRRAMGISWKKKGKRPWRSGTDVSNLPLKKLLAGSLPPFACRAVHPDTHKPVVLHLDDTCLAGLAVDGKLAKRGQTPARREWLRIAAVMAEGGGRLRFVSLVHNDGKRYEPMSADDLACLAGLPPADDSSSYPRQRAPGPARAGGTADLRLE

SEQ ID NO: 4963 - protein, 1222 aa, unidentified
  REGION 1..1222: note = Description of Unknown: Cas Enzyme sequence
MKYVLHSPLSKNASTPAAEIEKLSAKWLEHPFYKSDLVLGLDIGIEGIGIWLRKGPTPLFAQTIVVELPEASPLAKRRANRAARRSRVSCKKREAMLKNWIVKYGLLTEVRVNEIWENPSIFQRGFEHRYRAIQKSGALKSHEALVSCIRHCLQHRGFDYHMSNDSAFPWGDGMDDASQIIQWAKRAICPPGAVKNWKQLFSDAAWSDKEEKWEKVMAALDETVRRYGSQPIETHLEKHFREKNHPNLREAARGENFPRELIKEHLRLICNNHESFFGSKEKLDAALTELLGESDQKLIPGSIIDFHRKTQSEIESLWKRKTNDCPFIPFLATATSPAKEKCSPNSSPEIRRFKLLQFLAERTFVAMDGNRIERTYANADLYAALMGLLETDISATLAATPAPSRTKLGKRDLKKLVETAAKAKLAPDSVSHNADFFEQLSDLLFPKLSVLKERAALSKTAARHLIEEGMEKLSEFQADRVRGNWAETYYQWRRNVTLGGPIYPQVELLLGNPRQYDNEGKTKDRNGSNPQQHGILRRLFAGQFKDAHGNTVDLSPHLGGKMVPDFIIIETLGDIPRNATQRRDLQREQKDRREAKDKIFEKYGLPKDANSDQIKRALLFDQQTGKDGRAVCPYTGADLGDSALATDLEIEHIYPRELGGISEMLNLVLTKRQTNGDKGKNTPFQIAGKTIGHTSFSSWTDMKKRVESSMKWKKAKRELFCREETTCPDWSNTTRVAQLARQLRDQVIRWLNLDCSLDENERANEIARRIGTPSGAMTAACRESWKEALPDFMSGKKDRSNFRHHLYDAAVISHIPPREGMNLASCGGIFVSDFASERGWMTIALPGLLPDLNSFQKATQNVSLVSKPKSGKSKASRYDSTIYSPADSEGERWTRFKGDLAEWRVDPKMSLEKIKQCLRAAGITADKLPDKLIEKWYHQEPPKDASAQPLRFPSFKDGVHGQKIESVTRKSTKPCAEPAYGPHFDAKGNIIGWKVAQESFIRCEIWMTENPGKNGVPEAKFYQRRTFHPRHLVNLRKRQLADGRFLSLKLPLSELDLHEIGLVAEAEELKKLQDRLAAKVQKGVKKCEKNGAGIDLFESGDVGLPAALPLTTSLQEIYCEPTPIPTTATKVGCFRKGQVLVVPLDSSGKFHKRGTLRKNAEPAGGWWAYAVTSIKSGGEIEMKLAEYKPAKPDEQSSRRKAPDSLRPTSSDDLAFLLELQGR

SEQ ID NO: 4964 - protein, 1281 aa, unidentified
  REGION 1..1281: note = Description of Unknown: Cas Enzyme sequence
MSTIDYPLKPFPSATPVYDWAHDPFYETAVVLGIDIGLEGIGVWLRQGHKPIYTRTFLFDTPEAAPLEGRRGLRAGRRCRQAERRREVMLQNFCADFGLPWVSITDKGHDDGPFRFRWIATRKDTEGLRDVKAFSACLRHIIRHRGYDWHMPEDGGEYPWGDEAKAKDAIQWAKDAFCKSEHAEDLRYRLTDCGWLDKDRQAFDVALAGAVHRYNTEGIGAVLANHFAEVKNNLRPAARRFNFPREMVQDHLEEIVKRHSKFIGGESRVAAALAQLDKIINDHRKDEAERARLFQRKVKPCPLSEILFSVPTKCDPGKLRPIRRFKLLEFLATRTFVQKGGTRLLPSADIFKWLLDDVLETDIKALDSKDKVQRPKIDRREFKKQFAAKFDADGEIELAGDTQSHNGEFFTQLADLLWPKMSELGGRASLCARSAEALFDYAVKDSYDAGKIAARLKEKRFNGGSKPMSFYEIRQSAAAGFGVYKQVEFLLGRWTKKGDRLAVPGKLRQVFTQLIREGKLPASQTAPDYVVVETIGDMPRNREQAREIQDEQKKRREFKDKLRDKFKDYQRGNLSKEEANKRLLLYEQQLGLCPYTGKELGENPFALDLEIDHIFPRQGGGLSIMENLVLTHRNTNGEKGKRTPYEAFGGKTQSPQWKDILQRIRQMQWNKQKQELFAWGTLAEHYDGSGKLLVPDFNNTTRMAQLARQLRYEAARWLGIADDDAKVRQFIGTPTGYQTSVCREAWLDKNYVSRGFRLAEKNGLQEIVKDRDDLRHHMIDAAILSHIPPGKGLNRVNCHGIFDSKTDYNGDIQMTALPSLGPDLKQFEKEAAGQCLVEKIQPASDKQSRYQQTIYSPPDKNGVMWARDSLAQLVTKKDMTGDKLLGLLRKAGVEEKQLSADRFNNWWEGMQARYFTKQEMQELISALEIPATKSINEEVFARWWGKGEKKVITEKSLRKLLKDANITPNEVSDLRLQNALTGHSDPGPLTRKDGTVIRGVSGFPNALTPMSVVPHRNHSGETIGFKLATESFIRAEIWTTEKRDKNGKLVLEYHRRLIPHPRGLKNLRLRVLKSTGKQLTWERQLTDKELIELGLGKQLEKLQTEWTSLKCEHEKALEKWEKSETKKKNSDALALGKYKANPAPQKPVEPYLSLRRIYAGLPPHAKRLTNSHGVDISKFTKGDLLLVPLNQVGDICNETESPYRKMWYRITAINANGQVEMKLAEYKQVKKLTEKDKAEGKQLSPEQEWLMNAFQQQPKTKKMAFLLRLTSENDQSPHPAQ

SEQ ID NO: 4965 - protein, 1220 aa, unidentified
  REGION 1..1220: note = Description of Unknown: Cas Enzyme sequence
LQHEFYRTAVVLGIDIGLEGIGLYLRKGPQEIFARSVILELPKAEALADRRAKRAWRHCRKNRKRRLHRLRLLFAKHGLPWLPAERMSRSNPFKERLRAVTTGVASREALSICLRSCVAHRGFDYGGTEEGQYPWGGSSKLSDATQWLHTAVVTNDLKELIEDKLDELEADKSPEERRAAFREELRQRLDWSRAHDIETILRLHSKGGHDNLRPRARGVNFPRKQVWEHIEKIVRHPRHREFLPDPEAFLNELGINPNEAGGATARERLANAARARRKAIFFYNRKARPEMERHWAKKVNDCPYAHQLDPGLAGSKITCGEKGELPIRKWSALEFSATRRVEMETIFGKGKEKRIRRSLHSLSGRVVGKILETIERHDRALNSGDKAAAPSWDEVKAIIEDDLPTLADAKVKLATSKKGDWNETFLAQLRNLTLPSLANRKQRASLSALAAERLFALATQDGGDIAPAQFAPRLKAIGFYDWRRAATVDFNPYRQVEVLLGRRIKRGKKRRQLAESCQGLLRRIFAEHREALDGSAAPDYCVIEVIGDAPRTSRQALEIKSAQDERGQERRELFAAHKLEDSGVASKRRRITLWHQQKGVCPYTGNELPKDPLDPSLELEHIFPAEMGGLSTDENLVLTWRTVNGDKGKHTPLQFAVMLRVPFEKMLAHTKDMRWSAKKREIFAWGTLRDDKNDQKSHYLPDGLNLRVPDFGNTTRTAQLARQLRAEVMRWMQVEDQPDEAARRIGTPSGWLAAQARKSWLAASDYQKVRNNLTHHLIDAAVLAHIPPREGLNSVICKGIFYDVRERVRDEATGITSHRLVTKALPELSPLPRLKHWLPDNGEYAVCPVLKPRRESKTQSLGDATFWRQVHPDQPTLAQRMALDTAALTKLGITDGGQLQAHLQRMGIEAAKIPGRAALQEWIDVATPASKVDKDKPLPPLKLTDGTPVKSLWKFAGRSAEGKGGGGKGGLSSPVGWSGKRDADGTLRELRSISLKFDRLELWLGYDDRKAEQARKAKTPDWEQAGWVYQKRLIPDARALRHLKRMGFSFGRDKRRKAPSFMQAKPDKPDTHLSVRDLVLGDRLLPFSCKVGAIKKGDEFLLHLLPDGSIRKHTPAGQPEPAAAFSTFYAVSALEHKGGNPRIELKSRLFKEKEKTPLDRFEGDVVSRTAQVPDDLAFLLGLPPAAVGAQQRALRIPPPQNGMAKIPAEGAASNASPRLL

SEQ ID NO: 4966 - protein, 1252 aa, unidentified
  REGION 1..1252: note = Description of Unknown: Cas Enzyme sequence
MLGPFDWKNDSFYTKALVLGIDIGIEGIGVWLRKGREPVYTRTFWFDTPEAAPLKGRRSLRGGRRCRQSEQHREAMLKEFCAKFDLPCTEVRDERNADGPFKVRLRAVRSKLASKEALVVCLRHIIKHRGYDYHETEGGSFPWGDELKPDAAIAWARAAYCSPADAGEILHDISDCGWKEKPMAAFQRALNAAVARYKEGIEAGLDKHFAQDKNNLREPARKKNFPRSLVWEHTENICRQQADYFGGQDRLPGALAELKKILDYHRKKPGALAERKVNRCPLASLLFNIHPPKCDPCGDERIRRFKLLEFLAKRTFVTEDGNRVHANEPLMKWLLDEVLAEDIRVLEANKVNGAPKQPRRKFDSFRADFIAKFDEAGKTKLASNTVSHNKDFFEHLTDLIRPKLTVLAKRASLCGQSADELFKRAAKNGFDAELIRRNMSEKQFGDLSYYEVRQAAAAGFGIYPQVEFLFGCRVRRGKHKDQQAVPGMLRQIFALPEVVECIGSDKKPDYAVIETVGDPPRNAEQARAIQEEQKARRKFKDDLFDKFGIADDKQDSEKRKRVLLYDQQGGSRDKAICPYTGKSLGGDPLSRDLEIDHTFPERRGGISEMVNLVLTHRKTNNERKKNQTPYEAFGGRDNTGEWRDLVARVQKMGWNKQKRDLVLRDESTCPEWDNMTRMAQLARQLREEAARWLGILGNDAKVRERIGTPTGYQTSVCRESWSDKLPADLYPKKNRYNMRHHLWDAAIISHIPPGKGLQHVRCGGIFERAGVDEHGNIAMRALPGLGPDLLGFEKAHEADCLVIKPMPRKTKKSRFQQTIYGHPDECGIMWARDPIDTLAGKQGQSPEKLKQLLRDAGIDENQLPDRRFDEWWERRQAQFFTYDEARSAVGALGLAKERQISDTDFDEWWNKGAKGDKKKLTDKSLRALLAQAHIPKDLVSNEQLQGALLNRGDPGPLTRKDGTEIRGVSGTASTMTPMAVIPHCNGKGETIGFKLATESFIRAEIWTTEKRHRNGEVIRAGDGKPELAYHRRLIPHARGLKNLSLRILKRTGKRLTWERPLTEEEIVELGLKDNPEVKRLRKDYDRARAQHEKATAKSKLAECELTLMQPGSAAAKPKPPVISLRKIYTGLPPHAKRLTNAHGADISRFEKGDLLLVPVNRAGAICELSAPVYRERWYRVMALKANGQIELKLAEFKEIKRLSEKELKEGKFLTPEQEWLSDAFLQQPGSDEVIGRLLQRTRADDQPPHSVK

SEQ ID NO: 4967 - protein, 1224 aa, unidentified
  REGION 1..1224: note = Description of Unknown: Cas Enzyme sequence
LYYLALHHIIKYRGHFLFEGESIRDIGDIKQLFREFNETFADLFPDNYITLPEDKAVEFKKLALENKGLNDKKRESAELFGTNDSQVKEFLTLFLGGNAKASVLFGDEYADKYKGEKLNFRESKDEEFEAKSELFDDNFRLLEISRAIYNYLTFEKILCGNQNISSAMIKLYDKHKKDLELLKRFLRTQCAKGSYYKVLRSTNEESNYVNYIGYTITKGERKNVEKCKNKADFYKFIEKVIQENESNFTDPTLANYIREQITEDNFLPKILNSDNGLFPHQINGNELDSILKVLCSHFPDFEEKDIDGFSPAEKIWSIFLFKIPYYVGPLNNYHENVGNSWIVRKKGAIRPWNFSEMVDMKASNEKFIKRMTNKCTYLHGKDVLPKCSMYYQAYNVLNQLNKLKLNEIPISIGLKQELFNELFLKKKKVTKKMIKDYLASTAKLTKQEADELIIGGFDGELNASMSSYITLKKILGNLVDIKPEICENIILWHTLFTDKKLVEDAIKEEYSDIPVVTENVKLLKGITSFKEFGRLSKELLLSVSDGINPVTKTAYSILERLYNTNSNFNELYHSDEYKFKKLIERENGEYSDVVTYRDIEDLYVSPMVRRGIWQALIMCDEYVNAVGRTPDKIFVEVTRKADKDKQRTVSRKNQLLNLYKGLKKDCQEIDELNDELNRKTDSQLRQERLYLYFAQLGRCAYTGKRIDLTELSTDLYDVDHIMPRSITKNDSLDNKVLVLRQKNKEKTDIYPLPVGFTNQQAFWKMLNTKGLMSETKYALLTRTEPLNETDFKEFVNRQLVVTNQTTKVVAELLARKYANSGTKIVYSKASNVIDFKQRYDIVKCRETNDLHHARDAYLNIVVGNVYDTKFTNAYDYFYRNKDGAWREYNLKNLYSQPIKNAWNGSADIQRIKNVLVKPSMQVTRYSFTNKGGFYNETVFNKEDKGVSAPRKNKFPYNQTEKYGGYKSLNTAYFIILQSKDKKGKLVKTIEAVPILVDYNCKGDRQKLLEYFTDCGLIEPEIIVDKIKVKSLVSVNGYKVWIAGMTGNSVIVHNAQQWYTDEAVDSYVNNCLKLIEQERNGKISKEETKNELFIMSTNRFGKVKAKIDRLQNVELYRRIIDKLNKLNNVITADGKAKIRLTPINSFKEKLFAKTDLFEKLSVFKQAQVLLQLVQFMKCNASTADLSELEDGSRCGTLQISKNITNVKFEIINQSPCGLTTHTKSI

SEQ ID NO: 4968 - protein, 130 aa, unidentified
  REGION 1..130: note = Description of Unknown: Cas Enzyme sequence
MKKFYLGMDIGTESVGMACSDENYNLLRSKGKDLWAVRLFDEAKSAEERRTQRAARRRLARRSQRIDLLQEIFARFMTDELFFIRLNNSGFNFGDKDNSLKSPYSLFSDDNFTDKDFTRSIRRFFIYVRQ

SEQ ID NO: 4969 - protein, 1017 aa, unidentified
  REGION 1..1017: note = Description of Unknown: Cas Enzyme sequence
MENKIFAFDMGKTSIGYCVRNAHDILEANSFIIDKDYAEVISNRDRRRVFRSLEAHKARERYFVKIWTDCNLKPLDKEEPLFKKEFSSKDDNTLYNSCLLRIALIQNKPLADWQIFKALHSALQRRGYDANLPWKSAYDIDDKENEELVKKYTQKEGAELINSDDYKYPCYYEALRLGLWTENNPNQFNRFVSSDCTKVRSTDFVAPRNLVEKELRILWGNAQKQLPQLKKYTTEEFLYGEYKEAYGSYSNPVFQKYMGTERDWQGALGQKIPRFNNRIIAKCKLLPKRNVCKADTLENVSLVLLMKLKNLNITTVAGEKVKLNPIELKEIYNNWLEKVEKREGKLDTTITCDEVAKVIGSKIVDRFPPLKANISGRSSFCRRACQIMTDIILEGELYPENLDISKYIDKEGTPNGITESEIRTMLSKIGDWNNLYIPDNRDENAQDVDSIRQKTDIMIGDITNPVVRNRLQIFRDLIIELGERYGKPDEIIFEFARDSADNSLFGREKALAIELSMKNNEKENLEIKKELEEAQNYSPVNFDKWKLAKRQTCKCVYSGKPIGISDLDKCEIDHIYPRSKGGNDALYNRVLCYREENQKKLDRTPYEWLSHNEEVWAVYVKRLSDIKKSLGNKKFELLTSKPEVCEKLIEGQNALTETRHISKVAQQIAAFVFGWGLQVKDEKRHIFVNTGSSTAAIRRRYGLNAFLGNDKKKNRANDKHHALDAICISYSRDFKYDKDIKKDRIDGFNPLIVKKVIDEIIPYPYTNKKPLKSNIRPEETIYGIRSDGKKALITKRVTISSIEQKDKKIKSIVDEAIKQDLLEKLELKMSSKEWINMLENYIHPKKKTKVKKVLTIVSEGTIEKDSNGRERVGEYVDFGTKGTMHQFKRSKGHKGQILYFDKKGTVKVMPVYSNIKMSDVRNKIIDLGCKLYSGGEMFHSGCLIDVPNSFEATVYYPAIDENGKEKLKPQRETVPEGIFKVRTIKSDGEVKLENSSGNEIVTRATVLANVKFQRHKN

SEQ ID NO: 4970 - protein, 1035 aa, unidentified
  REGION 1..1035: note = Description of Unknown: Cas Enzyme sequence
MEKVFAFDVGTASLGIAVRKDFDMIRYESLLLPQEAGGMDELREARRQYRTRLAHAAREAYWKRICEEAGIEVLHSRIHGDASLHIPSSPGDPRLEREFAAPGDETIYTSCLLRIKLLQGAKLEGWQVFKAVRSALQRRGFDRNVPWKNRAASKTNADDDSKTAKNAMEYEKMLLEIVNQQREYLYPCYFDAFQMGLWNPRNNQILLRPSKISNRARGYTPPRELVIAELSALLQNAAKLFPKLVGKIDEVLWGPGKEQYASFFAEKRNALHLKEGSAGDWESLLGQKIPRFDNRQPGKCALIPRFHVCQASDTAIIESTFLLKVKNLRVLSPEGKEVFFSPETIRVILDTARIKARAKREELRLAQADKEAIQAAVASAYKITKTDLKKTLRSMKYDILPGNEEVEAPKISGRARLSRPAAKIMRDLILSGESPRAFYQKLLQCPPKDIPGATLSDDLQFLLMMPDSWEGIHIPDMAGKKIQESAQSPDDLVRQLIAEQRSPIVRLRLEIFDRELKRLLDDPAIGKPDRIVMEFVRGDFLGEEKKRKLEAEIKRRHKENLEIRTTATEQGYSSGTDLLKLKLLKEQAYVCPYTGDVLSCFALEDLEVDHIVPRHGGKNGSDGFTNKVVTSRTTNQLKGARTPYEFLHGSGKWTAYCNRVMAMKVSKRKQRLLLSPDAEKLDQKYSDLCSTAWIARVFRDIAAVRCCWPEGAIGSERHIVVINGAITAALRRRYRIDSLLAPECKSADEIEKKNRDDKRHHALDAMVLTFTTFWMRNPALRDKLALPDKIDRYYFQKYIDEVNPRNIIFPRAGLEKTIYGKREIDGQSKMTKREDIVSFGIDNKGKFVEKSVLSNFRDVCDEKLRSYLQTSFANAKIDSTEKWMFWCQNLKSPDTGMPIKKVRIVKGGIEEYKNLSKDGDVFGGQYRKGDQHKGYFVYLDTKNKPRVAPVYAHASVSLEREKLCKLGFTVVDFFQSGCSVEIKVHAISGKNHVSPGVYMLTSIWTQGTIALFKNGEKYLVSLSSISDIASNLKRC

SEQ ID NO: 4971 - protein, 1009 aa, unidentified
  REGION 1..1009: note = Description of Unknown: Cas Enzyme sequence
MKKIFAFDMGKASIGYCAREDNEIKSLGSLIIEKEHSTIEDNRRRRRAYRTLKSHKAREKWFYNLWKENKLNPLENTDEKFKKEFSKKGDSTIYNSTILRIALIQGKKLEEWQIYKAIHNAIQRRGYDSNVAWANSIDDKENKKAIEEYSYYKDTKTEMIKSEEFKYPCFYDALLLGLWNEETPYEYKNTMHLNPTKIRVSTRVAPRNLVIKELSKLWEEAKKQLPQLEKISVEEFLYGDYREAYGSYVNPEWIQYRGTNTDWQGVLGQKIPRFDNRIISKCRLLPKRNVCSSDTIENISLVLLLQLKNLRFIDNYTYEERRLAPFEINQIYKNKLPEWCEKLTQYRKKDIKNPSFTISKTDIENVIGKKTIKEKFDSLKANISGRSSFCRRACQIMIEIIISGINPLEINIEKYVDKQASPNPITKEEIKEMLIKIGKDWNSLTVNDNRYEINKLSQNNNTESDILIGNITNPVVRNRLQIFKNLLNDLISINGKPDEVIFEFIRDGEDNSLYGSIKAKATSNYMKEQEKENKLIKKELNDISAYSETNFLKHKLAKAQNFMCIYSGRKIGINDYSNCQIDHICPRSIYENDAFYNKILCYSNENQEKGARTPYEWLNNDKQKWAEYTTRVLGLKSTLGKKKTSLLIFPPEKCKKLLDNYNGLAETAQIAKIASLITHFICGWGVQVEGQSRHVFIETGSTTSQIRKTYKLNAILGNDKEKNRNNPKHHALDAICISYAKEYKFDKVKHEHYIKDFNRAYIEQKIFDLMPYPYTHKKILKSNILPNETIYGKRIIDNNAYITSRVDITTIKKDKKYIENIIDNVIKLDLSLKLEENFSDEDWKNLLKNYIHPKKKTKVKKVLTIISKGELEIDSNGRERIGEYADFGTKGTKGQYKHSKQHKGQILYYNEKGTIKVMPIFSNKSIKSIKEKLQEMNYKLYNGGEIYNSGCLIEIPLDFKNATITYSKGIYKLKTMKSKGDVELENNTGDKISTSAKNLVLAKFKRYKK

SEQ ID NO: 4972 - protein, 1367 aa, unidentified
  REGION 1..1367: note = Description of Unknown: Cas Enzyme sequence
METEKYYVGLDMGTNSVGWAVTDREYRIVRVKGKDFWGIREFEEAKTAVDRRSKRVSRRRRQRAQVRSGLVRSYFEPAVLAEDPLFYIRMDNSKFFEEDKDQVIGKNAIFDDEDYKDADYYSEYPTIYHLRKALLEDTVPHDSRYARKVYLAIHNMFKHRGHFLESGLSEKESMNSMTILYSEFVEQVDLVLDLSFPSGVAEEIKEILSDSGLSRSAKSDKIAEVCHFDKGNKKELLLIRAICGLKLDAKKVFDGLDDIEEKIEIEFSSASYEEKVEELASVLGDENFELIEIMKDIYDTGMLAKILHDYQYLSESRVALYEKHHADLKLLKEVYKEHFSEDIYDKMFRGGKEGAEDGKYSAYVNSYNTEKLNETGKPMRRTADSRTKEALYTSIKKDLKDLKDDRAEYILKQIDTDNFLPKQLTPGNGVIPNQVHRREMKAILKQAEKYLPTLREKDDSGLTTSERILKLFSFQIPYFIGPTTEKSKECGGNGWVVRKEEGQILPWNIEDKIDYQKTSEEFIKRLIRNCTYLSNEKVLPKASLIYERFCVLNEINNMKIDGEPISVELKQEIYTELFCKGKKVTRKQIENFLANRGCLSESAQLTGIDTAINNSLSSYGKFRGVFGEMLDTDEYQKIAENIIYLATVYGDSKKMLRECLQKEYQDILDEGQIKRILGFKFKDWGKMSREFLELQGCDTTTGEVKSLISAMWDTNENLMELLHSEQFTFGKELQAKQIKQLESLKDFQANDLDEFYFSAPVKRMVWQTILLIKEIIKVMGNPPEKVFIEMTRSEEEKKGDQGRKASRGKQLLELYKTVKNEERDWKKEIESADESGKLRSKKLYLYYLQMGRCMYTGEPIELDELFSTKYDIDHIYPRHYVKDDNLSNNLVLVKKESNAYKSDNYPLVEMKPEVYQLWKLLHAKKLISDEKYRRLTGKNPFTDEQKADFIARQLVETSQGTKGVADLLKQLLPEKTTVVYAKARNVSDFRRDNGFFKSRIVNDFHHAKDAYLNIVVGNVYFTKFTQNPLNFIKRELAMDQKKNHYNLGRMFDWNVERGGLVAWVARNEEKGIEGSIATVQKMMAKNTPMMTRLSFEGHGGITKETVHPSRKAKKGIYFPMKTSDERLANVERYGGYSDIATAYFFVVEHTMKKERVRTIESVPVYLSKAVENNPDKLEEYCVNVLELKEPSVRVRKIRIQSLMRYNGYEMYISGKMNGGKYYTLWNATNLCLCQEMVNYVKSLEKYGDEKIVSDNICREKNIELYNELREKHDTGVYSRRPVPISKILNDGLEKFEKLEIENQCNILLGILKLSYIGTPNADLEDIGGKKNSGKMYISKMITEKNAPVIVNQSVTGLFENTINLMTV

SEQ ID NO: 4973 - protein, 1364 aa, unidentified
  REGION 1..1364: note = Description of Unknown: Cas Enzyme sequence
MAYERYYLGLDMGTSSLGWAVTNEKYQLLRRKGKDLWGVRLFSEANTAADRRSHRTARRRLQREKARVGYLRELFAEEINKIDPGFYQRLADSKYHREDKESNQPFALFADTGYTDKEYYHDYPTIFHLRKALLDLNNTGKEYDVRLVYLAILNMFKHRGHFLNANLDEKSGSDLHKSVEQLNISMLDILGKRLEEVEQEKLENILSSKNYSNTARLEKLIELFQLSKSKNKQEVEILKLICGLKGTLSKIFENGDFNEDTVKMSISFRDANYEESITEVESILAEDEFEMLLIAKQIHDWAVLANIMSGEEYLSVARVKAYDKHKKDLEVLKRVLKSNSMDSYKKMFRIMEDNNYSAYVGSVNYKNEKVRRGAKHDTDEIFKKMKAIVSGCEDCEEKNYILCELDKGTFLPKQVTSSNGVIPNQVHKKELKRIIENAQKYLEFLTYKDESGLSVGEKIIKLFEFQIPYYVGPLSYKVGENEKMGKRGNMWSVRKESGAVLPWNFEQKIDIKKSAEKFINNLTNHCTYLNGETVLPKNSLLYEKYMVLNELNKLKINGEGISVELKQNIYNDLFKKGKRVTSKMLVKYLKDIGEVDANDNPEISGIDGDFTNRLANHKKFFEIFGKDNLTQEQINIAEDVIFYSTVYGDSRKFLSEKIREKYQNILDESQIKRILGMKFKDWGRFSRQLLELNGTDKQTGEVSSIISKMWNENYNFMELMAEDKFTYSEEIEQRVKKIEKTLSTMEYSDLDELYISAPVKRMVWQTILVLKELEKVMGYGPDKIFVEMAKGPGEKNQRKDSRKKKFLDLYKQCQKESRNWKSELEATEESKFKSKKLYLYYTQKGKCMYSGENIELTDLFNDNLYDIDHIYPRHFIKDDSIENNLVLVKKTHNAHKSDTFPIEESIRRNMHSIWKMLRDGNFITEEKYKRLMRNNEFTDKEQAEFISRQIVETRQGTKVITDLFEKTFPQSEVIYVKAGLVSDFRHKYGFLKCRNINDFHHANDAYLNIVVGNVYNTKFTKHPINFIKDYKRDPEKYKYHMDKLFEYPVSRGEENAWITKGGESFKMVRKMMAKNTPLVTRMNYEEHGGIADQTIYSAKEASKVNGDGYISVKSSDEKISDTCKYGGMKKYKGTYFVLVEHTEKGKRVRTLEDIPLYLKEQLDSREKLQQYFKKEKRFRYENPVVIYNRIKRHSLIKVNGFYLYLTGRTGKQLRVLNAVQLSLDAKMARYVKWITKVNDEYQSEAQYDEDEKITREKNLELYEVLKDKHMNKIYSKRPNAVGSKLNGGTEKFSDLPLSRQVYVLLQIIQLSQLINEGVDLREIGGSKASGTCKISKKISGNDEFKLINQSVTGLFENEIDLLTV

SEQ ID NO: 4974 - protein, 1361 aa, unidentified
  REGION 1..1361: note = Description of Unknown: Cas Enzyme sequence
  MOD_RES 154..166: note = Any amino acid
MATFKYYLGLDMGTNSVGWAVTDANYNLLKAKGKDLWGIREFNEASTAVERRTHRISRRRRQREQVRIGLLKDYFHDAIYEVDPVFFHRLTNSKYHMEDKDAEVRYKNNIFNDDNYTDKDYFNQYPTIYHLRRELLENTDKHDVRLVFLALLNXXXXXXXXXXXXXGHFLNSGLGENSGENNISNAYLELTSLLSELTPYNLNETIDCKKIEDLLSSKDMSRTRKAEGLAQILGVDYGNKPYKELIRGLCGLKFNAFVIFPEIQSDEVQKLDVCLSEASFDEKSDEMANIIGEDYFEIIMSMKEIYDIGSLAGIMKGHNYLSQARVTLYENHKEDLKILKDVIKKYCDKDEYDSFFNSDADGSYASYVGSYNSKIKQRRVGNKRSSEELYKTIKKILKNAPAEDVDVQSILKAIENETFLPKQLTASNGIIPNQVHAKEMKKILSNAESYLSFLNEKDETGLSVSEKILKLFTFQIPYYVGPTTEKSNKDGGNGWVVRKEEGQVLPWNINEKIDMKATSEAFISRMVRRCTYISDEPVLPKASLEYQSFCVLNEINNIKIDGERISVELKQDIYKDVFQKGKRVTQKQLCKYLHTRGVIEAEEQVAGIDITINNALTTYGKFKAIFGDDMSKDSVQKMVEDIVFWCTIYGDSKKFLKDRIEEKYGEKLTKEQIKRIVGFKFKDWGNLSKNFLELSGADVSTGESVSIIRALWNNNLNLMELINSRLYDYKDRLAEYQNTMIKTLSDIEAEDLDEYYFSASVKRMVWQTILIIKELVKVLGCEPDRIFVEMTRRPDERKMRTASRRKKFEELYKKVKDEDVDWLKVIAHADETGNIRSKKMYLYLTQKGRCMYTGRHIELSDLFNNNLYDIDHIYPRHFVKDDNIDNNLVLVCKEKNAHKSDIYPLEDDILTSQKNMWSELRRSGFITEEKYNRLIGRNSFTDEQKAGFIARQLVETSQGTKGVANILQQLLPESKIVYAKASNVSEFRNTRDIPKSRLINEFHHAHDAYLNIVVGNVYYVKFTQNPLNFIKNDYDRDKVKNNYNLSRMFDWDIKRNGEVAWIAQKEGGEAGTIVTVKKMLGRNTPLMTRYSFEGKGGLSNETLYSAKKAKEEGYIPFKASDEKLQDVTKYGGFTSVTCTYFFLVEHSEKKKRIRTIETVPLYLAQKIEQDPSELEKYCEQILGLIDFDIRVRKIKIGSLINRNGYFFYLTGKTGKQLIVRNAVNMCLKKEWIKYISKLEKAVDKNIVDEIITKEKNELLYLELLKKFRTSIFSNRPNPVGDKVDKSKQKFLSLDIEKQCILLCQILQSSSVLGSECDMTLLGESAHCGKMLISKKIGDEDIYLINQSVTGLYEKKINLRTV

SEQ ID NO: 4975 - protein, 1071 aa, unidentified
  REGION 1..1071: note = Description of Unknown: Cas Enzyme sequence
VKQNDYVLGLDIGITSVGWGIVDANSKVVAAGVRLFDENQSEKKKTNQTRREHRSSRRVKRRRKQRVVEMKRLLKREGIISDNFKPLSNPYAIRVKGLTQQLSNEELATALLHLAKRRGSSLEVVEEETTADEEKKLKATLSDNTQFLHNNNIHVCQLQLKRLNERGFVRGVDNVFKTEDYVKEAEAILKNQNKSAQFNEHAVELIARRRHFSEGPGSYESPTPYGRFRKDENGKVNEEPLNLIELMRGRCSVYPEELRAPKESFSAELHNFLNDLNNLKIHGEPQKLTPEQKQKLVSIIKEKGYLSPKNNAEKAVSKVIGISPDLISGFRQDKNEKPIITEFKGYQKFLKVLGSNNPILDNIELLDQISEILTSTKVLDERIDKITNLNTILDKKTIKDLALLPGFTQYHSFSFKALRLLNKEMMITSRNQMQIIHDQKLIKKSPIEKLVLDESLILSPVAKRAHREALKVVNELIKEFGHFRKVIIETAREKNSKEQKTLLNRMQKLNEKRNKEAEALLEGTDLEHLELNGKQKLKLRLYKEQDGKCAYTYNSLNIRAIVTNTDDYEIDHIIPYSISLDNSYQNKVLVERRANQLKGNNTPFKYFQSGRAYGQVTSYEKFKELVLANNNYSKQKKLNLTNEQDITSFDSQRGFIARNLVDTRYATRAIMTTLKEYFDSNDVPTIVYTMKGKNTNLYRQIGSYEYFKRYKFAEYNALSKDRDQYIHHAIDALICAGLAEQASLKRMYQVDRSKEIDAETGEVLSYDTSPMEDTHFLDFLVSLGQLEDKDIRFSWKVDTKPNRRFSDETIYSTRNVDGEEKVVKKYKNIYEMKNSDLEKMFKKPDKLLLFHNDPKTYEILHGIYKQYKHTPQPFASYQEEHGEKVRKYAKNGKGPFITDIKYYDSNLGNHLDISHNYKTKNKKVVLLQITPYRTDFYRRPNGKLSFVTIRLKDIKPIGDPINGQYHIPEDLYKQKLQEAGLQDAKFLYSFHRNEIIEIVKKEKDGTISRSRYRFVATNDDKAKVIEVKEISKKTEKRETPYVNSLHDIVKYAYSPIGKIKKIDSEVLKLRV

SEQ ID NO: 4976 - protein, 1087 aa, unidentified
  REGION 1..1087: note = Description of Unknown: Cas Enzyme sequence
MKDYIANQTSESASNEIVWAFDLGKGSIGEAVRQGTTFLHKASLLIPADFAETKTAANRRRMWRTRQAHKAREQWLKEVMQKMGIEILHGRNYDKNGNWKPGEPADQRLEREFAEKGDPVCYTSCLLRIKLLRGEKLEPWQIYKAFHSAIQRRGYDPSIPWKTRASRVKTKDGDDDEAGTQKRMEEFEQKLAEISKGRPEFHYPCYFDAYEMGLWDGSSQLKDRIDCQAKSTRNQIVPRSLVEKEIHDMVAAAAKHYPQLGAQADYLLYGLARKAYASFDPKLRKQYGLKEGGANDWQGVLGQKIPRFDNRIIGKCVLIPRLNVCKIRKGDDGELHPNSRIAAEAVFLMKLKNIRFQQGIVRGLTAKEIDQIFNDPKRHKLGLTRTQWRKWCEKFGGKPMVGQHEEVAEPSFSGRSRFCRPALEILKRLILSGDPPEVAYEKELRKLNGNADLLKGLVKDDLNFLHLMRATWEGIYIPNQKLEALAHSAAEPRKAIQNLINSQNDPIVRHRLTLFAERLDELAKEFGTPDFIVLEFVREDFMGKKAKLEYFRFQRERANERAKAREEAAKAGAEERAAGLKMELLKAQAGECLYTGMPLIPEKLDEYAIDHIVPRKKNGPDSAVNYVLTTRRTNDDKGDRTPYEWLSATNGWAAYVERVKKRVSTLRNKKLQLLTSPDAETLVQKYTALAETAWISKLAQTIIGLRFGWPNGISNGERRVVIVSGGLTGRIRRKYKLNSLLNPDAQSEEEAETKNRNDDRHHALDAMVISFLPNWARNSRFSGFFKFPEAVHRELFGKEIADVIPQFLTFDKALLAETIYGREKADSGLIVQRVKLKDLTLKPISPAKAKFDLEYARKQIQCVRDERLKTILNEFLATEPDEARWNEFCVNLRLPHKDGRAGSKVNRIRVNVGKATEFADLSKDRSGAWRKAKQGHKGQIIYLDESGKPNIRPIYVFESQYRVSQEIKNSGGKIYGFFRSGCLVSIEKPIAHGITPLKPGIYRLNSIETVGRAKVTNSHGKRSLPIAIEKFIEANLKPMQALKATGALSPKKQKATSDRKEIGDALGASITTAQIPKSIERGDRHSP

SEQ ID NO: 4977 - protein, 1062 aa, unidentified
  REGION 1..1062: note = Description of Unknown: Cas Enzyme sequence
MKTYVLNEKSEPASNEIVWAFDLGKGSIGEAVRRGNEFLHKASLLIPAEFAETKTARDRRRMHRTREAHKAREKWLRRVMQEAGIEILHGRNYDAAGNWKPGESADNRLEQEFPSDGDKTCYTSCLLRIKLLRGEQLEPWQVFKAFHSAIQRRGYDPNIPWKTRETRKVKNGEDDEAGTMQRMHKFEQDLETMAPGKTDYHFPAYFDAWQMGLWNPAKPDELKLRSDCHAKTTRNQIVPRKLVEAEIRKMVEGAARHYPALTGKADYLLFGPTEKPYASFDPQLRKQHDLKEGGENDWQGVVGQKIPRFENRIIAKCALIPRLNVCKIREGEKGQPHEKSLVAVEVAFLMKLKNLRVQRPGGVGWLTADEIREIYKDPKRKDWKFTKSAWKKHCVGIGAVPLPGHEEVEAPRLSGRSRFCRPALEILKRLILSGKQPSEFLRDEMARLNGNMDPLKGLVESDLKFLADMAARNNTWEGIYVPNQQLDAIAQSSSDPSEAIRRLIGQQNDPVVRHRLTVFYQRLCELEKSTATRPDSVVLEFVREDFMGKKAKLEYNSFIKKRAEERIKAREEAAKVGATEKSAGLKLELLRAQDGCCLYTNEGLVPSKLDEYQIEHIVPRSQGGPDAVVNYVLTTQKANEAKDDRTPYEWFHQEMPDKWDAYVNRVRARATHLRNKKVQLLISPNAAELAERYTALAETAWIAKLAQTIVGLQFGWRNGVDEGGNKRVTVISGGLTGRIRRKYALNQVLNSNAKTEEEAETKNRDDDRHHALDAMVISFIPGWVRDAMKENFFRFPEPVHQNAKGFFEKEIRSVKPRNIALLKPVFEETIYGQRMIDGHKFIVGRESLVGLAVKKTQNSESIKKVSDIEFGRVVDARIQKNVRVFWEANPAATLEAWKQWCADYRLGANGPPVKFILVTKSKADAVDEYMNVTKAGDSSERGQYKRGAKHRGYFIYERPSPTRKEPDKMQIEVCPVFVFQSQKAVQEDLLKQAGIKMHGYFESGCQVRTQREWEFQGDKYPADEFILGSVWANRNAKLWHPIHQEIGPVGLRILLDAGFERI

SEQ ID NO: 4978 - protein, 1043 aa, unidentified
  REGION 1..1043: note = Description of Unknown: Cas Enzyme sequence
FDLGKGSIGEAVRQGPKFLHKASLLIPADFAETKTAASRRRMWRTRQAHKAREQWLDEVMRKAGIEPLRGRQIGKVDESGQPIPRAEWKKRKGKWAVIAKGDPRLEREFAEQGDPTCYTSCLLRIKLLRGEKLEPWQVYKAFHSAIQRRGYDPDIPWKTREQRKAKSGDGKDDEAGTQERMVEFEKRLAAISKGNPKFHYPCYFDAYEMGLWDGDSQFKDRIDCQAKTTRDQIVPRKLVEKEVSDLVDAAAEHYPKLAGEAKYLLYGPTETPYASFDSKLRKKYGLREGGMNDWQGVVGQKIPRFDNRIIGKCVLIPRLNVCKIRKSEDGELHPQSRIAAEVVFLMKLKNMRFQKLGGVYGLSAKEIGEIFNDPKRKKLSLTPTQWRKWCAHFGGYPLPGQFEEVAEPKFSGRSRFCRPALSILKRLILSGDTPSAAYSKELALLKGNTDPIKGLVESDLKFLQQMGDTWDGIYIPNQKLEALAQSSDDAHEAIRRLIGSQNDPVVRHRLTLFADRLDKLAEEFGEPDYVVLEFVREDFMGKKAKLEYLKFQRDRAKQRAEAREEAAKAGATEGAAGLKMELLKAQGGICLYTGEPLIPSALDEYVIDHIVPRAKGGPDAVVNYVLTTRRANDDKLDRTPYEWLSQLSGWDAYVARVKKCSVTLRNKKVALLTSPDAETLVDKYTALAETAWISKLAQTTIGLRFGWPGGIDKAEGERKVIVVSGGLTGRIRRKYKLNSLLNPNAESEEEAETKNRNDDRHHALDAMVISFLPNWARNAKVTGFFRFPDGIHRELFGEEIAEVIPETVCFERPTLAETIYGERVDYGERVIVQRTALLSLAMKPTAPGKTTFDRKYASKQAQSVRDTVIRDRVLEFLATNPDEAAWRNFCAEFRLRRKDSSNGPRVESVTVNVGEPTEYKDLSKDGTGAFRKALKGHKGQFVYSDAKGKLRVRPVYAFESAAKIKSELTRQMGAEAIKGFFQSGCLVELSAPVPHPSTPLSPGKYKLNTIKTDGRAKLTDSKGKVSFEIGLEKLFAAGFKRAE

SEQ ID NO: 4979 - protein, 1578 aa, unidentified
  REGION 1..1578: note = Description of Unknown: Cas Enzyme sequence
MDKTDYVLNKRPEPASNEMVWAFDLGKGSIGEAVRRGNEFLHKESLLIPAEFAETKTAAGRRRMMRTRDAHKEREIWLEKIWDAAPGLAEFRPKKRRWVKKRKCFDPVDTDYRLKREFAPAEFRRDSKTGERKKVEYPNGRANIDGAPAATREDFETCYTSCLLRIKLLRGDSGLKEWQIYKALHAAIQKRGYERVPWATKEAARQGLTPKEVEEKEHEELLKKELKYQETVTAWGKFLHEVLDTHSLNHEQFAFPCYYDAYRMGLWKPEQPLEILQLGHKHGAESTRNIRFDRKDLEREITLLVENADKLLKGKLEQGRLLLLKNFKQEKFDRVEILNSRVDGKNKTLPVEKQKQHLEPPKLENLASSASEFFLYGPAGKPPDETKNDFAKYLAFRRQAGLRPGTNDDWMGALGQKIPRFDNRIVEQCALIPRLNVCKATAKPGKDKSAPDPESLLHSEVTFLMKLKNVRVMPNVRPLTARQIALLLEEKRAEAAKLALDPANSSHAKKIAKCYSFSAAQWKKLGKQAAFNFEPHAEHTKIEPSLPLPNTLEGFADAFEKQLHKVRVLRAESVEALTAQQIEKILAAKRKELRSMCLDPADPKYAEIVAKVYSYETERAWAEVGESPEFAFWPAPNHEIIEAPKSGGRSRFSRPALRLLRALVLSGEKPSRFRQLLIDRDPVTLAKLEFPSDKPFALFPNCTDPKLSEQQREAQDAENGRKGLLESDLNFLLKMKKADATDDSWNDLFIPNEKLDGLVQEIQSGTDEPSLSQLRIQAAKDGCSIEAKSHCRLCASEKAIRDLIGEQNDPVVRQRLKYFWERLQTLEKEHKEPERIVLEFAREDFLGKKAKESWKKFNDRKRESNKKAAEYGGSEREQLKFKLWQDQGGECVYGIPAGAGGGETAAVRRGLPLPGSDAFRDKLEIDHIVPQAQGGPDAYVNWVLTYGEIANGVKRDMTPYEWFMRDRLKEWDGYVEFVRNKKETNEKPGLSRKKIALLTRPDAKDLVQKYTALAETAWISRLAQTIIRLHFGWPLDHQKGVERVLTLTGGQTADFRRRFRLNTLLGPNAKLDESASDISKADEEKAANEIQDNLMSERSKNRVDPRHHALDAMVLTLIPEWRHHQAKKFERWRAWKSRQELRPEILERPTPFFDFHSTLDKGKLNNDTVRNSLRDALGETHAEVVAFERPKLEQTHYARKKIESETCYVKREELRLMAYDVKGKPDVEFKMEFVLDDAKLIDTERPGMAQLRSEIENRIASNPTEGEKAFTAWLVEKCQQLPGKKIQMQPLASLHEEPDSKRRRAWKNAEDFGRRKQPMKFKYDRVVKRYRKICDKLIRDLIAKNFEIQGEGKKAKCRPFARDEWEAFCASFHKPTKFGGQGPRVLKVTIRAGGAEEEESEDEESPNAEEISESSGVESANQNSQVLARDEYKESTKSPKAFLKGESHKGYYLYLDDKGKARRWPVYAHESFKEGHERYEEVKRQMKAEPESKFQEIGFLKTGCKVELESATDNKVYLGKGKKMQKNVSLPKGFYRMNTLGDNLRMKLTTQNGNVAGAQVDVFIKAGLRVVKVQKDKI

SEQ ID NO: 4980 - protein, 1063 aa, unidentified
  REGION 1..1063: note = Description of Unknown: Cas Enzyme sequence
MKDYVLNEKPEPPSNDIVWAFDLGKGSIGEAVRRGNEFLHKASLLIPAEFAETKTAAGRRRMWRTRQAHKAREEWLEKVMLDAGIEVLKGRQVGKVDGKWTETAKGDPRLEREFPAPGDDTSYTSCLLRIKLLRGEKLEPWQVFKAFHSAIQRRGYDKDIPWKTRETRKAKDGEDDDAGTEQRMHKFEQDLENMAPGKSNFHFPAYFDAYQMRLWNPAKPDELKLRGDCHAKTTRNQIVPRKLVEAEIRKMVEGAANHYPALVGKADYLLYGIAQQSYASYKPELRQKFKLREGGATDWQGVVGQKIPRFENRIIAKCVLVPRLNVCKLREGEKGEPHENSLVAVEVAFLMKLKNLRVQRPGGNGWLSAEEIRAILENPKRTDWKFTKSAWKKLCVSIGAIPLPGHEEIESPRFSGRSRFCRPALEVLKRLILSGKKPSEFLLEEITRLNGNKDPLKGLVEADLKFISDMAAKNDNWEGIYIPNQQLDALTELSENSDEAITRLIGQQNDPIVRHRLSVFYKRLRELEQAIKSRPDQVVLEFVREDFMGKKAKIEYFSFIKRRAEERIKAREEAANAGAMEKSAGLKLELLRAQDGRCLYTDEGLVPSKLDEYQIEHIVPRSKGGPDAVVNYVLTTQKTNEAKADRTPYDWFHQEMPDKWDAYVNRVRARATHLRNKKVQLLIALNAAELADKYTALAETAWIAKLAQAIVGLHFGWRNGIDENGSKRVTVISGGLTGRIRRKYALNQILNPNAKTEEEAEKKNRVDDRHHALDAMVISFIPSWVRDTMKEKFFRFPEPIHQNAKGFFEKEIQSVKPRNIALQKPAFEETIYGQRTIDGHKFIVGRESLASLAIKTTQNSENLKKASDIEFDRIVDARIQKDVKVFWESNPAATLEAWKKWCADYHLGTNGPTVKFVLVKKSKEDAVDEYKNVSKTGVSSERGQYKRGAKHQGYYIYERPAPTRKEPSKMQIEVCPVFVFQNKKAVQENLMKQVGLKMHGYFESGCQVRTQREWEFQGETYPADEFILGSVWANRNAKLRHPIHQEIGPVGLRILLDAGFERI

SEQ ID NO: 4981 - protein, 1062 aa, unidentified
  REGION 1..1062: note = Description of Unknown: Cas Enzyme sequence
MKDYVLKNKPEPASNETVWAFDLGKGSIGEAVRRGNEFLHKASLLIPAEFAETKTAAGRRRMWRTREAHKAREKWLREVMREAGIEILHGRNYDAAENWKPGEPADKRLEQEFPAPGDDTCYTSCLLRIKLLRGEKLEPWQVFKAFHSAIQRRGYDKDIPWKNREARKAKDADADAAGTEQRMHKFEQDLESMAPGKKHFHFPAYFDAYQMGLWNHAKPDDLKLRSDCHARTTRNQIVPRKLVEAEIRQMVEGAAKHYPALAGKADYLLYGIAQQSYASTKPELRKKFKLREGGATDWQGVVGQKIPRFENRIIAKCALIPRLNVCKLREGEKGQPHEKSLVAVEVAFLMKLKNLRVQRPGGNGWLSAKEIRDIIENPKRTDWKFTKSAWKKLCVSIGAIPLPGHEEIDSPRFSGRSRFCRPALEILKRLILSGKKPSEFLREEIARLNGNKDLLKGLVEADLKFISDMAAKNDSWEGIYIPNQQLDALVELSNNSHEAITRLIGQQNDPIVRHRLSVFYKRLLELEQTTKSWPDQVVLEFVREDFMGKKAKIEYFSFIKRRAEERIKAREEAASVGATEKSAGLKLELLRAQDGCCLYTNEGLVPSKLDEYQIDHIVPRSKGGPDAVVNYVLTTQKANEAKADRTPYDWFHQEMPDKWDAYVNRVRARSTHLRNKKVQLLIALNAAELADKYTALAETAWIAKLAQSIVGLHFGWRNGVDENGNKRVTIISGGLTGRIRRKYALNQVLNPNAKTEEEAEKKNRDDDRHHALDAMVISFIPSWVRNERKEKFFRFPEPIHQNAKGFFEKEIQSVKPRNIALQKSVFEETIYGQRIIDGHKFIVGRESFASLAIKKTQNSESIKKVSDIEFSRIVDAKIQKDVSAFWDSNPSATLEAWKKWCADYRLGANGSMVKFVLVKKSKADAIEEYINVSKSDKSSERGQFKRGAKHRGYFIYERPAPTKKEPNKMQIEVHPVFVFQSKKIEEENLLKQAGIKMYGYFESGCQVRTKREWEFQGNKYPADEFILGSVWANRNAKLWHPIHKEVGPVGLRILLDAGFERI

SEQ ID NO: 4982 - protein, 1271 aa, unidentified
  REGION 1..1271: note = Description of Unknown: Cas Enzyme sequence
MPSPTTIWAFDLGKGSVGEAVRDIETNQFLHVAALLLPPDLARRGRADQTGTPASRYRAWKVRLAHRERERWLDTVWLAAGLTPLQKREVWRNPATGRWELKHPADYRLEREFAPAFGEKTKDGAPSDGAGANLCYTSCLLRIKLLRWKRGDPPLEEWQVYKALRSAMQKRGYGRVPWAVKQARAQGKTPEELEAEEQKQLEQADPRYREAAGKWPKFKRAVPAEFHFPCYYDAFHMGLWSPDQPDQLRLRPDHRAASTRNVRFDRADVRKELIALGNNAAAMLPQLQQAFERWQRDGWTFRHPVTGKALTKPVHARTFGEFLCDGPAGQPDETSFEAFLNQRREAGIRIGTFEEWMAALGQKTPRFDNRILAPCVLIPRYHACKVDARLEKDRAGRLTGKLVPDSLLATEVTFLLKLKNLLVADPVKGQRKLTVQEVRDIFAFAQRRLKSLPLVTPEGEPAKEWPRKVANCFAINPSDWPKIAVETECLKGLARLTVSDNGAPRPLTREEAEALLHAVAGGRRAAQTALPAHLLPLVKRAAAAWKQAKQQAEEMILRPLPGHEEVKAPRTSGRSAYSRVALRILKELILSGDAPSAFHARLVRREPDLLQRLGPAPGQPLAIFDDSTASNEAQRKQHDAENRKRGLLVSELNFLLQMRKDDGSPDSWENLFIPAQTLEALQQRHTEDGRLDADAAVRELLGTIKDPVVRHRLGVFDERLRKLRFGDARKGLRGFGVPEAIVLEFVREDFMGEQAKRELQTFQKRREQARAEAEAEAAKLGLESRSSALRYELFKAQGGICLYTGRPLSETQLDQYEIDHIVPRSLGGPDAMVNYVLTFPEVNSAKEKGKLTPYALLHRTDGWDAYVARVKARAAALRNKKVQLLTREDAPQLVERYTALAETACISKLAQTIVNLRFGWRNGVDYSGPQPVKRVIVVSGGLTARVRAKYGLDKLLYGEDTAPEVLAKKVKNRDDDRHHALDAMVMTFIPHWARDPNKQGFFRFPPAFRDANGREDYQQIQSLFARQLEKIVPRHLAYEPCALADTIYGRRLDKGEPVIVQRVPVRELAYKQEQQRPVFNLTYAKDQIAHVRDARLRRVLEAFVATGPDQVAWDNYSRALAAGTCPELPGRKVLKVTLNRDEDPAEFKDLSKDGCGAFRTRKGEHRGQFVYLDARGRVRVRPVRPFESLVAVKAEVERLAANGGLVGFFQSMCLVELDQPVTHGNFVLRPGTYRLNTIKKDGRARITSPSGEASPEINLAKLVAAGFRRIA

SEQ ID NO: 4983 - protein, 1382 aa, unidentified
  REGION 1..1382: note = Description of Unknown: Cas Enzyme sequence
MSNSGTIWAFDLGKGSIGEAVRKGNEFLHKASLLIPAEFAETKTAASRRRMWRTRQAHKAREKWLNDVMREAGIEILKGRQIGKVDAEGKEIPEDQWKRTKGEWVEIAKGNPWLEREFPAPGDSTCYTSCLLRIKLLRGEKLEPWQVYKALHSAIQRRGHDPDIPWKHREQRKRKSNEPDDDEAGTQQRMEQFEKDLEAMAPGKPEYHYPCYFDAWRMGLWNPGRPNELKERTDCRAKSRREQIVPRKIVEEEIRKLVEAASKHYPKLNGQARYLLYGPAETAYASFDAKLRTKYGLKEGGASDWEGVLGQKIPRFENRILNDCALIPRLHVCRNPSPEQYKDLPEDKLLPAHVTFLMKLKNMRVEEKTPGRKQRGLTAEQIKEIFGECNPRRKYNLTSTQWRKWCDKFDVLPITDAGEKTTSADDETGKKEKKDERDAVAAPLPSGRSRFSRPALRILKALILSGIKPSLLHERLVKRDPALVAEIGIDILDAPPVNEKKTDSGKRTIRNYVKQPRPWLLVSDLSFLLAMRKTGAQEDSWEDLFIPNQRLDQVVQEISGDGNRDTKVERQRKGKAIQELIGSQNDPKVRHRLATFWDRLKLLETLPDKNGKPIGEPGQIVLEFVREDFMGEKAKGKLKKFQDDRAEARKKAREHGGLKFELYEAQGGVCLYGKEVFKNGKCIGLENGLPMPGTPGWDTLVIDHIVPREAPYNGPDAAVNYVLTTPDANNAKRKRTPFDWFHQDRLGEWDCYKNFIASKIGTLGGKKVQLLTRSDAAELVGKYTSLAETAWISKLAQTLVRLHFGWPLEHERGKERVTVVPGGLTGRIRRKYLLNTLLDERFKNLATAEIKPEDEEEAEKDRTDLRHHALDAMMISFFPDWMRNPQKSDFFRFPPPLDKPFPGKRNKHAVREFFKTQLGEVLPENLFLEKAKLAEMAYGRSFQAEEASASATAVKYKTAKMSLSDLAYGNAASGKAAYDLKQARRMANGIADDGTREKVQGFLKSRPTEAGWSEFCRNFETEFACQQKRGKPVKIEVRKVGEIRTRRRKVKEMAYEQGNSREYDVEYARQNVSEIAGDVPEQENIKAKLGEFFAGNPSEKQWKDFAETLKPIGQTRLRSKLEEGGKKAKARTVKFAFFAHRPIPMKFNLEKAQGRIDKICDEGIRQRLRAFVNQNPPPDQSAWKAFCDTFAHERKDEDGNLLKDADGKVVYGAAIKKVRVNDGSPDEYKDFSKDGTGTFYKNKKEHKGQFVYLVDDGTADGVVSVRPVYVFESVQKVKKNVEAFPQFKRLIGYFQSGCTISIIQPVPVDSYKLVILNDEKKKRRIVANAPLVPGKFLLSTIITASQAVEAEMADGTVVVSTLAPLIRAGLHRVYHKSETTRL

SEQ ID NO: 4984 - protein, 1113 aa, unidentified
  REGION 1..1113: note = Description of Unknown: Cas Enzyme sequence
MSRSLTFSFDIGYASIGWAVIESASHDDADPSVCGCGAVVFPKDDCQAFKRREYRRLRRNIRSRRVRIERIGRLLVQAQIITQEMKETPGHPAPFYLASEALKGHRNLAPIELWHVLRWYAHNRGYDNNVSWSGGFSEDGGNKEDTERVQHAKDLMDKHGTATMAETICRELKLEEGKADAPMNVSTPAYKNLNTAFPRLTVEKEVRRILELSAPLIPGLTSEIMELIAQHHPLTTEQRGVLIHYGIKLARRYRGSLLFGQLIPRFDNRIISRCPVTWAQVYEAELKKGNSEQSARERAEKLSKVPTANCPEFYEYRMARILCNIRADGEPLSAEIRRELMNQARQEGKLTKASLEKAISSRLGKETETNVSNYFTLHPDSEEALYLNPAVEVLKRSGIGQILSPSVYRIAANRLRRGKSVTPNYLLNLLKSRGESVEALEKKIEKERHQQANRKKAKKTDPDYAATPLKPRYATGRAPYARPVLKKVVEETLDGEDPTRPARGEAHPDGELKAHDGCLYCLLDADSSVNQYQKERRLDTMTNNHLVRHRMLILDRLLKDLIQDFAGGQKDRISRICVEVGKELTAFSGMDSKKIQTELNLRQKSHTEAVNRLKRELPGKALSANLIRKCRIAMDMNWTCPFTGERYGAHELENMEMEHIVPYSFRQSNALSSLVLTRKEVNKMKGQRTGYDFVEQEQGKPVTGRTNLHICSLNNYREFVEKLDDKKWHEDDRKRKKKRKALLMVRGLSHKHQSQNHEAMKEIGMTEGMMTQSSHLMKLACKSIKTSLPDAHIDMIPGAVTAEVRKAWDVFGVFKELCPEAADPVNGRIIKEDLRSLTHLHHALDACVLGLISEIIPADRKNVLRRAIIKRRLDQKMKQDFLELRKKRYYKLREKDGQTGASLVDLPSGIKENIREKLMEQRVIQHVPADMGGALLKETIQRVLSVDGSGEDAMVSLSKKKDGKKEKNQVKASKLVGVFPEGPSKLKALKAAIEIDGNYGVALDPKPVVIRHIKVFKRIMALKEQNGGKPVRILKKGMLIHLTSSKDPKRTGVWRIASIKDNERGIAIDLQIPHSAVPGAKTHEFNWINVKLDTLLTKYRLEIYPTSYTGTPR

SEQ ID NO: 4985 - protein, 1118 aa, unidentified
  REGION 1..1118: note = Description of Unknown: Cas Enzyme sequence
  MOD_RES 238..241: note = Any amino acid
MSRSLTFSFDIGYASIGWAVIASASHDDADPSVCGCGTVLFPKDDCQAFKRREYRRLRRNIRSRRVRIDRIGRLLVQAQIITPEMKETSGHPAPFYLASEALKGHRTLAPIELWHVLRWYAHNRGYDNNVSWSNSLSEDGGNGEDTERVKHAQDLMDKHGTATMAETICRELKLEEGKADAPMEVSTPAYKNLNTAFPRLIVEKEVRRILELSAPLIPGLTAEIIELIAQHHPLTTEXXXXTEQRGVLLQYGIKLARRYRGSLLFGQLIPRFDNRIISRCPVTWAQVYEAELKKGNSEQSARERAEKLSKVPTANCPEFYEYRMARILCNIRADGEPLSAEIRRELMNQARQEGKLTKASLEKAISSRLGETETNVSNYFTLHPDSEEALYLNPAVEVLQRSGIGQILSPSVYRIAANRLRRGKSVTPNYLLNLLKSRGESGEALEKKIEKERHQQANRKKAKKTDLDYAATPLKPKYATGRAPYARTVLKKVVEEILDGEDPTRPARREAHPDGELKAHDGCLYCLLDTDSSVNQHQKERRLDTMTNNHLVRHRMLILDRLLKDLIQDFAGGQKDRISRVCVEVGKELTTFSAMDSKKIQRELTLRQKSHTDAVNRLKRELPGKALSANLIRKCRIAMDMNWTCPFTGATYGTHELENLELEHIVPHSFRQSNALSSLVLTWPGVNRMKGQRTGYDFVEQEQENPVPDKPNLHIRSLNKYRELVEKLDDKKGHEDDRRRKKKRKALLMVRGLSHKHQSQNHEAMKEIGMTEGMMTQSSHLMKLACKSIKTSLPDAHIDMIPGAVTAEVRKAWDVFGVFKELCPEAADPVNGRIIKEDLRSLTHLHHALDACVLGLISEIIPADRKNVLRRAIIKRRLDQKMKQDFLELRKKRYYKLREKDGQTGASLVDLPSGIKENIREKLMEQRVIQHVPADMGGALLKETIQRVLSVDGSGEDAMVSLSKKKDGKKEKNQVKASKLVGVFPEGPSKLKALKAAIEIDGNYGVALDPKPVVIRHIKVFKRIMALKEQNGGKPVRILKKGMLIHLTSSKDPKRTGVWRIASIKDNERGIAIDLQIPHSAVPGAKTHEFNWINVKLDTLLTKYRLEIYPTSYTGTPR

SEQ ID NO: 4986 - protein, 1114 aa, unidentified
  REGION 1..1114: note = Description of Unknown: Cas Enzyme sequence
LASYSTKKNGAIIRAAEQENSFIFEVPYERAVFKFEPLILSLIPFKINDNNLRMSTTNLSNFNLSFDIGYSSIGWSISSKPANAVFPNWLGAGVVVFDDDSCMAKSRAEFRRMRRNIASKRNRIKRMREVLSGLGVMGKDELDNAKTEHPWFLAAETLASGKILSWSELWSVLRYYAHNRGYDGNSMWAKFGDDSDGDSEREANAEKLMADLGTSTQAETICAYLGVDAKSPKPLRFKKYFKGQNLAFPREIVFKEVERIIDAHIGILPKCDENFKKLMIGNWREVPSNIKLPGRFTSDRGLLFGQYMPRFSNRIITKCPLSGEKTPNCHSREFLDFRWKSLLANMAFPDGTDLMETRRKIDDFMLLYGALSKNALKKILKEVIGELPSNYNGMFLASEMEKALEVDPVRALILRTVYPNISFSLPNAELVEKLWKLIPKFVFTRMFRLKEYSFADICALLSPEKSAELAEFVRVIFDSSPASKKSPKPDFETAFNFKMRVQKISGRSPYSRQLMKSASEEIMRGVDPRSEGGSLYPRSESTKKEVLSNIDTWTNNHLVRHRLKIFKRLYMDIVREYCGADKSLVKSVAIEVVKDITAFSGLDSKKKAAKLNDLVAHHKSVSAYLKKEYPEISPNGSILRKARIADDLGWVCPYTGCHFSPRQLFESGNMEREHIIPRSLRPSDSLESLVITWKEVNDMKGQCTAYEFIKECQGMKVPGRQNLSIVTPERFEAFVRRLKKPMHPAGKADIERIKIRNKLLLTEHYKKREGGFLPSDLTQTSHLNKLAFKVVKSLYADAEKAPELIHVPGIVTSVVRKNWDLLPCMGDACPEIYETLENGDKVLRLKDEIRSITHLHHAVDAVAMGLAASVFPRTRNFYEAVSKRRLNQADRQELLKTGLVLFSGDKWKLVELEKSYLKEISGRISENRVVKFLPRKMSGMDVEQTLWGVVKENENGTVTIRQYGAGKGESRRSIKKVYEPKLKLLGYESKNTAKSKLARNKAVIIIKGNFGVALANPPQIIPHHNVWQRLSELAEKNGGRFPKILRRNQIIEIPSGRYKGIWRITSIKNNSNYIGVDMIHPIYVRIKEKSKINVNLNTIIKDGMKIIDTRLIGA

SEQ ID NO: 4987 - protein, 1323 aa, unidentified
  REGION 1..1323: note = Description of Unknown: Cas Enzyme sequence
MKNNGNNLQQGNYYLGLDVGTSSVGWAVTDTDYNILKFRGKSMWGARLFDEASTAEDRRTHRGNRRRLARRKYRLLLLEQLFEKEIRKIDDNFFVRLHESNLWADDKSKPSKFLLFNDTNFTDKDYLKKYPTIYHLRSDLIHNSTEHDIRLVFLALHHLIKYRGHFIYDNSANGDVKTLEEAVTDFERYLNENDIEFKIENKKEFIDVLSDKHLTKKEKKTKLKKLYGDITDSEIINISVLIEMLSGSSISLSNLFKDIEIDGKQKLSLDSDIEETLNDVVDILGDNIDLLIHAKEVYDIAVLTSSLGKHKYLCDAKVELFKKNKKDLQILKKYIKKNHPEDYKKIFSSPTEKKNYAAYSQTNSENVCSQEEFCLFIKPYIKDMAKSENEDEVRIAKEVEDKSFLTKLKGTNNSVVPYQIHERELNQILKNIVGYLPFMNDKQKEISIVDKIKLIFKFKIPYYVGPLNTKSTRSWVYRSDEKIYPWNFSNVVDLDKTAHEFMNRLIGRCTYTNDPVLPMDSLLYSKYNVLNEINPIKVNGKAIPVEVKQAIYTDLFENSKKKVTRKSIYIYLLKNGHIEKEDIISGVDIEIKAKLKSHHDFAKIMEENKCTPDEIEKIIKGILVYSDDKSMLRRWLKNNIKGLSDNDIKYLVKLNYKEWGRLSKTLLTDIYTINPEDGEACNILDIMWNTNATLMEILNNKKYQFKQNIEDYKAENYDVKQSLHEELDDMYISPAARRSIWQALRIVDEIVDIKKSAPKKIFIEMAREKKSAMKKKRTESRKDILLELYKSCKSQADGFYDEELFEKLSNESNSRLRRDQLYLYYTQMGRSMYSGKRIDFDKLINDKNTYDIDHIYPRSKIKDDSITNRVLVEKDINGEKTDIYPISEDIRQKMQPFWEILKEKGLISEEKYKRLTRNYELTDDELSSFVARQLVETQQSTKALATLLQKEYPSAKIVYSKAGNVSEFRNRKGKELPKFREINDLHHAKDAYLNIVVGNVYDTKFTEKFFLNIRNENYSLKRVFDFNVAGAWDAKGSTFDTVKKYMAKNNPIITFAPYEVKGELFDQQIVPKGKGQFPIKQGKDIDKYGGYNKLTGSFLVAVEHTNKKSRVKTLETVYLKDINLYNKNPLKYCKEVLGLIDPCIIYPKIMIGSLFNIDNRKIVITGRSGNRFVCHHTYQLSINDEYARYLKNLAKYLEEEPEGDCDREASLSISSEKNLEMYYFIKNKLGTKTYSSVLLSLKNSVDDFEINFRKLTIHDQCEVLRQLLKAFKCNRETSNIEKLNKVKQAGIIIISNSITNSKSFKLIHQSITGLFEKEVDLLK

SEQ ID NO: 4988 - protein, 1323 aa, unidentified
  REGION 1..1323: note = Description of Unknown: Cas Enzyme sequence
MKNNGNNLQQGNYYLGLDVGTSSVGWAVTDTEYNVLKFKGKSMWGARLFDEASTAEDRRTHRGNRRRLARRKYRLLLLEQLFEKEIRKIDDNFFVRLHESNLWADDKSKPSKFLLFNDTNFTDKDYLKKYPTIYHLRRDLIHNPTEHDIRLVFLALHHLIKYRGHFIYDNSANGDVKTLDEAVTDFEEYLNENDIEFEIENKKEFINVLSDKHLTKKEKKISLKKLYGEITDSENINISVLIEMLSGSSISLSNLFKDIEFDGKQNLSLDSDIEETLNDVVDILGDNIDLLIHAKEVYDIAVLTSSLGNHKYLCDAKVELFEKNKKDLMILKKYIKKNHPDDYKKIFSSPTEKKNYAAYSQTNSENICSQEEFCLFIKPYIKDMAKSENEDEVRIAKEVEDKSFLTKLKGTNNSVVPYQIHERELNQILKNIVGYLPFMNDKQEDISVVDKIKLIFKFKIPYYVGPLNTKSTRSWVYRSDEKIYPWNFSNVIDLDKTAHEFMNRLIGRCTYTNDPVLPMDSLLYSKYNVLNEINPIKVNGKAIPVEVKQAIYTDLFENSKKKVTRKSIYIYLLKNGHIEKEDIISGVDIEIKAKLKSHHDFAQIMEENKCTPEEIEKIIKGILVYSDDKSMLRRWLKNNIKGLSDNDIKYLAKLNYKEWGRLSKMLLTDIYTINPEDGEACNILDIMWNTNATLMEILNNKKYQFKQNIEDYKAENYDMKQSLHEELDDMYISPAARRSIWQALRIVDEIVDIKKSAPKKIFIEMAREKKSAMKKKRTESRKDALLELYKSCKSQADGFYDEELFEKLSNESNSRLRRDQLYLYYTQMGRSMYSGKRIDFDKLINDKNTYDIDHIYPRSKIKDDSITNRVLVEKDINGEKTDIYPISEDIRQKMQPFWKILKEKGLINEEKYKRLTRNYELTEEELSAFVARQLVETQQSTKALATLLQKEYPSAKIVYSKASNVSEFRNRKDKELPKFREINDLHHAKDAYLNIVVGNVYDTKFTEKFFLNIRNENYSLKRVFDFNVAGAWDAKGSTFDTVKKYMAKNNPIITFAPYEVKGELFDQQIVPKGKGQFPIKQGRDIEKYGGYNKLSGAFLFAVEYKGKKARERSLETVYIKDIDLYLENPIKYCESILGLKDVCIIYPKILLGSLIKVNGIKKIITGRTAAQFVCHHPYQFIIDDATSQYLKDVSKYLQEITDETGERAENLGITFDKNIEIYKLFEEKLSRKEYSSVLYSVRKTVIDSKSVFTHLDLYDQCIIIIQLLKLFKCNRESSNLEKLNGKKQVGVIHLSQKLPINGEFILIHQSVTGLFEKEVDLLK

SEQ ID NO: 4989 - protein, 1083 aa, unidentified
  REGION 1..1083: note = Description of Unknown: Cas Enzyme sequence
MNNKNQYVLGLDIGIASVGWGIIDPDNSKIIDCGVRLFPESAPGENVKRRTNRGARRLKNRRKNRRDDLVKFLKAEGLMNDDFVFTSNPYQTRVKGLSEKLTNEELCSSLLHICKRRGNSIETVEEDEVKAQELGETKKTLAANTELLSAGKYVCEIQLMRLNSEDKKVRGTSNNFKTSDYVNELTKLLETQEISTELSAKITDIIGRRRAYYEGPGSEKSPSPYGRFIVVDGKITKIDLIEKMRGKCSIYPEELRAPKNGYSAELFNLLNDLNNLTVDDRKITEEEKQEAIQWIDINGNLTVSQLCKQILKIDASLVSGFRQNKEGKPILTEMKGFKNFRKTLGKESKIFDDKKVLDDIAAILTSVKGISDRKNRIADLNANMSELDMTKLSEMTGMTGYHSLSLKAIYEINQEMLVEPVNQMQIIAANNSRNIRKSSLVGKSKIDFDDSAILNPVVKQSQRQAIKVINQLRKVYGEFDSIVVETTREKNSAEEKKRIQENQKRFENRRKEALSLLQGKYEHVKVNGKLQEKLSLYLEQDAKCLYTHAAIDLNLLITDPTAYEVDHIIPISISLDDSFNNKALVTQSANQDKENLTPHMAITQGKLSTINYGSYESYILSLKSISRKKKEYLLFREDIRKYEVVSQFIQRNLVDTSYASRIIHNMLSDYFQVNEIETKVHTIRGGATGAFRKRLRLSKDRDYHQHHAIDALIISSIRKQPIIREMLSKYKLKAGEVVMPDTGEVIQVHDDNEYFDNQYMTFLKELIEYKVERFSYKVDRKANRQVADETIYSTRVFDGEDYVIKKYKNIYDPGFFTLAEDIIKNKVEKYLMYKHNPQTFTKLVEIVQSFIKEYGSLDMPLPGSDKKKKTNPFHLYYQEHGYVTKHAKKNDGPNIVSVKYRENKLGNHIPLKTNSSNKKVVILQISPYRTDFYITPEGQYKFITIRYSDVKYDNFSKQYYIEKDVYEEKKRHPKKKISDKDKFLFSMHRNEIIELIKEEDIQAGLLLSKSLEDLCKSNRYKWKFTATNNDETNQIEVKPIEYYEKKQLMPTIGKKIKKIFKYNTDSLGNYYKVEFEDLKLNWK

SEQ ID NO: 4990 - protein, 1103 aa, unidentified
  REGION 1..1103: note = Description of Unknown: Cas Enzyme sequence
MEKIILGLDIGITSVGWGVINSERKILGAGVRLFEEADAKKNLSRRTHRGIRRLKRRQKERINDLKNLFVELDLIGVDFQPLGNPYELRAKGVENKLNPQELATALLHIVKRRGSSLETVDNEHTKNEESPKFILNKHDYLLKKYKFVSKVQLSKLIEEGHVRGSENIFRLKDYVIEAVAILQNQDFNEETKNRIIKIISRKRHYSEGPGNWFSSSPYGRFRTVEGEELQSVIQYIKEKQQEKFGKQKFSIEFLDKQYTVLKSGEVINKKGLNLIDLMRGYCSLYPDELRAPKCSFSAELFNLLNDLNNISITSRENKKVTKEEKEQIIFQIISNGGFKPKGVKGLAKVLGCRYEDIEGLRIGTKETKIITEFTGYKKIFNVIQDKQMPEDVDKLDKIAEILTKTQVVEERIKELSTLLANQLDVHAISELTGFSGYHSFSFKAIKQLNHEMLVTNLNQQQIITSSQLKINRFETKLNFDEKLILSPVAKRSHREALKVVEALTKEFGNFDRIVIETTRDKNSSEQKKNIVKQQQEIKRNKDEAEQLILDSGYNDAITKGQIVLKLRLFKEQNGRCAYTNNPIDIHRLITDENAYEIDHIIPYSISLDNSYSNKVLVLPLANQLKGNQTPFGYFMSGKAKDSFNVRDFSSFKSIVESNNNYGYKKKKYLIAESTMDKFDDMEEFINRNLNDTSYAIRSIMTTLKNYFASNEIPTTVVTIKGKQTSVFRGIAIHEWNKNHSKNSSVENPMIKNRDHYMHHAIDALIIAGLSQQKLFSYLYGLENTKENIVYHKHTGELLNLNPLEDSALIRYLKDVSNIQSSDIRFSWKKDTKLNRSFSDETIYSTRLVEGKHIVVKKYKDIYSMKSADALKIFEDETKKKKLLVYINNRQTYDILESIYYQYKHEIYPFAAFKKLHGDVKKYAKEGNGPSVTSLKYYEDELGNHIDISNKYNTNKKKVVLLQIPTYRIDIYKNYVGDFKFVTVRYNDFKAIDGHMAIDKTHYQLLMDRKKIDQEYKFKFSLYRNDIFSITKLDKNKNPISNTYRFISTNNDKNNLIEFKPVVFSTSKQVISTIGKTIINMEKYNVSPSGVKSKVVNEVLLLSV

SEQ ID NO: 4991 - protein, 1071 aa, unidentified
  REGION 1..1071: note = Description of Unknown: Cas Enzyme sequence
VAKYILGLDMGITSVGWGLIDYDSGKIVDKGVRLFKEATAEDNLKRRTHRGSRRLKRRRQQRIIELKRLLKKENILTDDYTPLNNVYYLRCKGLNEKLTNAELVSVLLHIAKIRGSSLEVVEDDEKKANEDKSSKANLSVNETKLRTSKEEICEKQYKDLIENGKVRGINNIYKSSSYESELKKILANQGLSKEVNDKIINIIFRRRDFNEGPGSMESPTIYGRFIPHENGEIEIIPSMIEKMQGKCSIYQNEPRAAKMSFTADLFNFLNDLNNLEIQRADNYDNYITPDEKKLIINEYIIKKGKITIQKLCDVLQVKKENITGFRVNKGEPILTEFKGYQKVLKALNRIIDTEIVDAVIDVLTKYKDVEKRKEEIKKINNAEFSEEDIVKLSEITGIQQYHSLSYKAMKVIIPELYENPENQMEVITRLNLVKTSIDDLKGRTTIPSYSDRIYSPVAKRVHNETIKVVNAVIKKYGDLDSIVIEMARDRNTAEERKNIEQAQKRNQENREKAKEILDVNYSFSKLDSKLVQKIMLYNQQDGKSMYSGKPINLNVLISDPNAYEIDHIIPLSISLDDSIANKVLVYRSENQQKLNNTPLQYLRSGNSNGWSVDEFREVVIKMYNDKKISLKKLQNLLCEKDITKQDVRKEFIERNLVDTRYASRVVLGLLKDYFKANNKNTKVFTIRGQITSQFRKSRNLVKSRDCFYHHIVDALIIAYFRKFNYINELMQYNFSYKVKIDEETGELIQYNDTLFSTKDDDFTIQLRKLNDLNKYSEDIKISHKVDRKPNRQFSDETIYSARKINNDYMKISKYKDIYGEEGKKFAKVIKDNLQKEKDLDKFLMKKVDPETFNLLVSIVINTTCGEKENPFVKYCEENNIDFIRKKSKNGNGPIIRSIRYYDGKVNSHLDISQKYVNLSDDKKVVLLQISPYRTDFYLTKEGNYKFLTIKYANIKENHNGYYIPKDVYESLKKSKKINDSDEFLFSLYRNDYLRITTNDPTENAPMIYRFVGTNNDLENKVEVKPIYCDKNEENRIMKTIGKKVTKIEKFDVDVLGNKIAKKRDKCLQLEL

SEQ ID NO: 4992 - protein, 1109 aa, unidentified
  REGION 1..1109: note = Description of Unknown: Cas Enzyme sequence
VKKILGLDLGIASVGWGIINDQYEVIASGVRLYEEANSENNAKRRSQRSMRRLKRRKTERIKRVKQYLIDMGLIDISFKPLSNPYQLRVKGLTEALSSKELATVLLHIAKRRGSSLETVEGDVSSNEQSPKTILSKHDKELEIYGYISKIQVENLRSLGKIRGIQNVYRLSDYVDEALKIMKNSHIDESHQHAICDLIQQRRHYSHGPGSRFSPSPYGRFRELNAEEKTKVMSALKQSVFFGDYNKKTIKFEYENEYFTILKDGRVINYEPLNLIEMMRGHCSVYPNELRAPKKSPSAELFNVLNDLNNIKITNREEQKITVEEKNKIIETLKTKGDFTPKGIKGLAKLLVTDIEHLEGLRIDSSDKKIISSLEGFNKFRKIFQTNTQIIGDFNVLDRISEILTSTNVISERQEQLNQLGLLSNSEIEQCVNLTGFSQYHALSLKAIYELNTEMLLTSLNQQQIIVSRNQEDTQQKPSLDFTDEILNPVARRTQHEAMKVVIELIHEFGPFDDIIIETTRSKNSKEEANQIKKQQKKNKEQRDEVIQLLVDSGYQEDQINSQLILKLRLYNEQQGKCAYSGSSIDINRLIKDPHAYEIDHIIPYSISLDDSFYNKVLVLSDVNQLKGNRTPFAYFLSGKVYKNGPIQTFEQFRNFVQSNGSYEPLKKKQLLIEKSLTRFEEMEEFINRNLNDTSYAIRVFMSKLKSYLSYYGYNTKVKTIKGKQTNLFRKIGIQEWQRKYQTAFNRCPLIKDRKQHMHHAIDALIIAGLSQQKIFNFYYSLQAKDDKIINRYTGELFEYDPMGDSQLIKYLLTLSKIESSQIRFSWKRDSKPNRRFSDETIYSTRLIDNEDVVVKKHKNIYELDNEKLESIFYDEKKKTKLLIYKHDPKTFDIMKSIYDQYKHEKYPFKVYKDNHGPIRKYAKNNQGPEITSMKYLEDNLGNHMAITHKYTGGIDRTKHNKKVVMLQVSGYRIDIYANSNNQYRFVTVRYIHLKKSKNEYYIPQDIYQKLKEDKGIDDSYKFKFSLYRNDLFEVIKVDKNGESQLESYRLISVANDSTNKIETQYVHAKPDKRIMISIGKSIQEITKYNVSPAGRKQRVINEDLLLKIN

SEQ ID NO: 4993 - protein, 1063 aa, unidentified
  REGION 1..1063: note = Description of Unknown: Cas Enzyme sequence
MSNLILGLDIGITSVGWGIIDLDQNKIVDAGVRLFPEGTASLNVARRSRRSARRLLRRKQQRIKDLYDYLSKINIINVDFKPLENPYQLRVKGLREKLTNDELATVLLNICKRRGTTFKLIEDDAEKAKNQDSTKAILSKNERILMERNLFLCEYLLEKLNNGENIRGIENVFKSETYEKELDVILHTQELEESIINEIKKIIFRKREYYEGPGSKKSPTPYGRFYFENGELKYCDLIEKMRGKCSIFPNELRAPKMSYSAELFNLLNDLNNLTIDGEEITPDQKKDFIDYVNENPSITPTRLANFLGVDLINISGFRVNKKYEPQITSFTGYKIIKDIVDKHQFNKEIYHNKDYVDDIIEILTRLKGIEERKKELVNINPTIFTEEVVNELSNLNGITGYHALSFKAIKYMIPELLETSDNQMQILAKSGLLGTKKIVYQGLKNIPSDPDAILSPVAKRAMNEAIKVINAIRKRYGELHSIIIEMPRDRNSDEQKKRLKDEQLNGEKLNAEIAELVKGFNVKLNNKLKQKLRLYKQQDGKCLYSGEPIDLRTLILNENAYEIDHIIPISISFDDSLANKVVVKSEYNQLKSNMTPFGLFQSGLAKGWNYNEFETYVKTLYRHELINRKKLKYLLEKRNISKFDIMKEFINRNLVDTRYASRVILNTLSEYFRANNIDTTVHTIRGSLTNIFRKVARIQKERDESYYHHAIDALIVASMKKMNYLNKILAFNVDKSGNVSSKATGEIVDMINEEEFFDKDLIKFIVKLRELSDKDNSFISISHKVDKKPNRQLMDDTLYGVRNYDGINYRIAKYKDIYGKEGLKVAELIANGDDDKLLIKKLDEKSYELLKQIVKEYYHDDKINPFAEYFQEHGYIRKYSKKGNGPIIKSLRYKYEELGVHVDITRKYIKDAKEPRVILLHPRPYRTDFYRNQDGLYKFVTIRYNDIIKTDNGYKIDKEKYNSLKANKKITDDYEFQFSLHTNEIVEIYKKDKNYIEKYERRFLGTANDKINVIELKGIAYELEKRSMGMETIGKKIIKVEKYHVDVLGKKYKITKEDLHFDL

SEQ ID NO: 4994 - protein, 1332 aa, unidentified
  REGION 1..1332: note = Description of Unknown: Cas Enzyme sequence
MMGNHDKKQVSYSIGLDIGTNSVGWAVTDGRYHLLKKGSQHLWGADLFEEAMPAKDRRMHRSARRRYTRRKRRLILLQELMAETVSSVDPYFFKRLELSYLNQEDREQEPLMEHNTSILFSDNFNEKEYHTLYPTIYHLRYHLCNSDEKMDPRLIYMALHHIIKYRGNFLYQGQKLELNDSSQIEDKLKQVFEFFDEKNGTCYANIDVGKFIGIAKEHNRSLSDIKSALLSLYQGNAEETKVYKELVLAMVGYKFDAQKLFDIEEKTKLSFRDANIDEELDALASEAEEASEIVQMMQAIYSYLILVKMITVEAGCTSGKYSRSMILLYEKHKKDLKILKKLYREIGADAYKKMFRDKNVPNTYWSYVNRPKDAKIDDFYAEIRKTVQAHQSLENAEYILNEIENQTFLPKQNSLENGVVPYQINEGELIEILDHQRKYYPEIDRNAEHIKDILTFRIPYYVGPLTPKSKGGSFSWIVKKDESGVIRPWNFDSVVDVDATAAEFINRMRNHCTYILGENTLPKNSLLESEFEVLNELNKICLDGEPFDQKVKEGIIRDLFLSSNEVTEEKLRKYLINHQIMKENESHELTGFQKEGKFSTSLKPWRDFMEIYGSEFDSRKKEIEQIIEYLTIYNEKDIIRRRIRNDGYKLTEEQINRILNKKYSGYGRLSRKLLDGILGKDPEGNPATVIEVMRSTHMNLMQVINNSKLGFKDEINELNKEDLSGGVSYDMVSDLAASPALKRGVWQSIQVVHDIVNYMKHDPENVFIEFAREEKKKGKRIDSRLKKLQRIYDKICQDRIPLDGQPLEKSDDIYRELRNADEDMNDRLYLYYIQHGRSMYSGRPLNITQLDSYEIDHILPQSYVKDDSFDNRVLVLKEENQMKSGDLLLKHEVIQRMRPYWMSLEKCGLITSRKFDNLTRLSIPEKERIGFISRQLVETRQICVHVADFLNSEYQNTKIVVTKAGMSSEFREKYDLYKCRSLNDVHHAHDAYLACMLGAFMIGKYPYLLSASAFDCYSKLSGDILKNIEEDKKKARVHNGWIVRQLNDMPVMDTKTGEVLWNGKEEIEYIKKIFYYKDYFMNYMSRDYDGQLYNATVYSPLDKDMKKKGDLEAVSLKKNRDFRKYGGYSSIKVSRGIAVEYKKGKKLIRTVLPVPAYISTEEQKQQYLERVCETDNVTILRDSIRLGQEFIQDGCRYLMQSPSEWKCVEQAFLNEKDLRTLFLIEKGKVTADDQLIQLFHSLISVIKSKYPLLSDKASKMKEIDFAGLDNKDKEKVISLMLLGMGGTSADLNVSTFKISSSFGRLNNRKIDLKDVEFIFTSPSGIYSSRLTL

SEQ ID NO: 4995 - protein, 1385 aa, unidentified
  REGION 1..1385: note = Description of Unknown: Cas Enzyme sequence
MTKPYSIGLDIGTNSVGWAVITDSYKVPSKKMKVLGNTSKKYVKKNLLGALLFESGITAEGRRLKRTARRRYTRRRNRILYLQEIFSTEMAKVDESFFQRLDDSFLVPDDKRDSKYPIFGNLVKEKTYHDEFPTIYHLRKYLADSSKKADLRLVYLALAHMIKYRGHFLIEGDFNSRNNDIKKNFQDFLDSYNAIFESDLSLENSKQLEEIVKDKISKSAKKERLLKLFPREKNSGIFSEFLKLIVGNQADFRKFFNLDEKTSLHFSKESYDEDLETLLGHIGDDYSDVFLKAKKVYDAILLSGILAVTDNETEAPLSSAMIMRYKEHEEDLALLKAYIRKISLETYNEVFKDDTKNGYAGYIDGKTNQEDFYVYLKKLLTGLEGADYFLEKINREDLLRKQRAFDNGSIPYQIHLQEMRAIIDKQAKFYPFLAKNKEKIEKILTFRIPYYVGPLARGNSDFAWSIRKRNEKITPWNFEDVIDKESSAEAFINRMTSFDLYLPEEKVLPKHSLLYETFTVYNELTKVRFIAESMRDYQFLDSKQKKDIVRLYFKGKRKVTDKDIIDYLHAIDGYDGIELKGIEKQFNSSLSTYHDLLNIINDKEFLDDSSNEAIIEEIIHTLTIFEDREMIKQRLSKFDNIFDKSVLKKLSRRHYTGWGKLSAKLINGIRDEKSGKTILDYLIDDGISNRNFMQLIHDDTLSFKKKIQKAQIIGDQDNIKQVVQSLPGSPAIKKGILQSIKIVDELVKVMGRNPESIVVEMARENQYTNQGKSNSQQRLKRLEESLKELGSKILKENVPAKLSKIDNNALQNERLYLYYLQNGKDMYTGDDLDIDRLSNYDIDHIIPQAFLKDNSIDNKVLVSSASNRGKSDDVPSLDVVKKRKTFWHQLLKSKLISQRKFDNLTKAERGGLSPEDKAGFIQRQLVETRQITKHVARLLDERFNNKKDEDNKALRTVKIITLKSSLVSQFRKDFELYKVREINDFHHAHDAYLNAVVASALLKKYPKLEPEFVYGDYPKYNSFRERKSATEKVYFYSNIMNTFKKSITLADGTVIDRPLIEVNEETGEYVWNKESDLATVRRVLSYPQVNVVKKVEEQNHGLDRGKPKGLFNANLSSKPKPNSNENLVGAKEYLDPKKYGGYAGISNSFAVLVKGTIEKGAKKKITNVLEFQGISILDRINYRKDKLNFLLEKGYKDIELIIELPKYSLFELSDGSRRMLASILSTNNKRGEIHKGNQIFLSQKFVKLLYHAKRINSTINENHRKYVENHKKEFEELFYYILEFNENYVGAKKNGELLKSAFQSWQNHSIDELCSSFIGPTGSERKGLFELTSRGGAADFEFLGVKIPRYRDYTPSSLLKDATLIHQSVTGLYETLIDLGKLGED

SEQ ID NO: 4996 - protein, 1373 aa, unidentified
  REGION 1..1373: note = Description of Unknown: Cas Enzyme sequence
MEKTYSIGLDIGTNSVGWSVITDDYKVPAKKMKVLGNTDKKYIKKNLLGALLFDSGETAEVTRLKRTARRRYTRRKNRLRYLQEIFAKEMAKVDESFFQRLEESFLTDDDKTFDSHPIFGNKAEEDAYHQEFPTIYHLRKHLADSSEKADLRLVYLALAHMIKFRGHFLIEGELNAENTDVQKLFNDFVETYDKIADESHLSEVDASSILTNKISKSRRLENLIKQYPTEKKNTLFGNLVALVLGLQPNFKTNFKLSEDAKLQFSKDTYDEDLEELLGKIGDDYADLFTAAKNLYDAILLSGILTVDDNSTKAPLSASMIKRYEEHHEDLEKLKKFIKVNNFDKYHEIFKDKSKNGYAGYIENGVKQDIFYKHLKSIISEKNGGQYFLDKIEREDFLRKQRTFDNGSIPHQIHLQEMRAILRRQGEYYPFLKENQSKIEKILTFRIPYYVGPLARKNSRFAWVKYHSDEPITPWNFDEVVDKEKSAEKFITRMTLNDLYLPEEKVLPKHSHVYETFAVYNELTKIKYVNEQGKSFFFDANMKQEIFDHVFKENRKVTKAKLLSYLNNEFEEFRINDLIGLDKDSKSFNASLGTYHDLKKILDKSFLDDKTNEQIIEDIVLTLTLFEDRDMVHERLQKYSDIFTSQQLKKLERRHYTGWGRLSYKLINGIRNKENNKTILDFLIDDGYANRNFMQLINDDSLSFKTNIQEAQVVGDVYDIEAVVHDLPGSPAIKKGILQSVKIVDELVKVMGHNPQNIVIEMARENQITGYGRNKSNQRLKRLQDSLKEFGSDILSKKKPSYVDSKVENYHLQNDRLFLYYIQNGKDMYTGEELDIDHLSDYDIDHIIPQAFIKDNSIDNRVLTSSAKNRGKSDDVPSIEIVGNRKSYWYKLYKSGLISKRKFDNLTKAERGGLTETDKAGFIKRQLVETRQITKHVAQILDARFNTKRDENDKVIRDVKVITLKSSLVSQFRKEFKFYKVREINDYHHAHDAYLNVVVGTALLKKYPKLAPEFVYGEYKKYDVRKLVAKSSDNHSELGKATAKYFFYSNLMNFFKTEVKYADGRVFERPDIETNADGEVVWNKQRDFDIVRKVLSYPQVNIVKKVEVQTGGFSKESILPKGDSDKLIPRKTKKLQWETQKYGGFDSPTVAYSVFVVADVEKGKTRKLKTVKELVGISIMERSSFEENPVLFLEKKGYHNVQEDKLIKLPKYSLFEFEGGRRRLLASATELQKGNEVMLPAHLVELLYHAHRIDSFNSTEHLKYVSEHKKEFEKVLSCLENFSNLYVDVEKNLSKVRAAAESMTNFSLEEISASFINLLTLTALGAPADFNFLGEKIPRKRYTSTKECLSATLIHQSVTGLYETRIDLSKLGEE

SEQ ID NO: 4997 - protein, 1373 aa, unidentified
  REGION 1..1373: note = Description of Unknown: Cas Enzyme sequence
MEKTYSIGLDIGTNSVGWSVITDDYKVPAKKMKVLGNTDKKYIKKNLLGALLFDSGETAEVTRLKRTARRRYTRRKNRLRYLQEIFAKEMAKVDESFFQRLEESFLTDDDKTFDSHPIFGNKAEEDAYHQEFPTIYHLRKHLADSSEKADLRLVYLALAHMIKFRGHFLIEGELNAENTDIQKLFNDFVETYDKIADESHLSEVDASSILTNKISKSRRLENLIKQYPTEKKNTLFGNLVALVLGLQPNFKTNFKLSEDAKLQFSKDTYDEDLEELLGKIGDDYADLFTAAKNLYDAILLSGILTVDDNSTKAPLSASMIKRYEEHHEDLEKLKKFIKVNNFDKYHEIFKDKSKNGYAGYIENGVKQDIFYKHLKSIISEKNGGQYFLDKIEREDFLRKQRTFDNGSIPHQIHLQEMRAILRRQGEYYPFLKENQSKIEKILTFRIPYYVGPLARKNSRFAWAKYHSDEPITPWNFDEVVDKEKSAEKFITRMTLNDLYLPEEKVLPKHSHVYETYAVYNELTKIKYVNEQGKESFFDSNMKQEIFDHVFKENRKVTKEKLLNYLNKEFPEYRIKDLIGLDKENKSFNASLGTYHDLKKILDKSFLDDKVNEEVIEDIIKTLTLFEDKDMIHERLQKYSDIFTANQLKKLERRHYTGWGRLSYKLINGIRNKENNKTILDYLIDDGSANRNFMQLINDDTLPFKQIIQKSQVVGDVDDIEAVVHDLPGSPAIKKGILQSVKIVDELVKVMGGNPDNIVIEMARENQTTNRGRSQSQQRLKKLQSSLKELGSNIINEEKPSYIEDKVENSHLQNDQLFLYYIQNGKDMYTGDELDIDHLSDYDIDHIIPQAFIKDDSIDNRVLTSSAKNRGKSDDVPSLDIVRARKAEWVRLYKSGLISKRKFDNLTKAERGGLTEADKAGFIKRQLVETRQITKHVAQILDARFNTEHDENDKVIRDVKVITLKSNLVSQFRKDFEFYKVREINDYHHAHDAYLNAVVGTALLKKYPKLAPEFVYGEYKKYDVRKLIAKSSDDHSEMGKATAKYFFYSNLMNFFKTKVKYADGSVYERPIIETNADGEVVWNKQKDFEIIRKVLSYPQVNIVKKVEEQTVGQNGGLFDNNILAKPEKDDKKKLFPIKKSLSTTSYGGYARATIAYSILIVSEFGKNKELKLLGLPLLDKVKYEKNPIAYLNSIGIINVKSIFKLPKYCLFEFQEKNTNYRRYMVSNQELKRANQLFLTCKETELVYKHIKSDNDNTHLVGNEKTILSIWNKLVIFMERTKLIDKKLFASLKQLKDEVNLINILDIASKSIDFTKISAGQKKIVLNDSLSLPIKRWQFKSDEKMLKQLNDATLIHQSITGLYETRIDLSKLGEE

SEQ ID NO: 4998 - protein, 1388 aa, unidentified
  REGION 1..1388: note = Description of Unknown: Cas Enzyme sequence
MTKPYSIGLDIGTNSVGWAVITDNYKVPSKKMKVLGNTSKKYIKKNLLGVLLFDSGITAEGRRLKRTARRRYTRRRNRILYLQEIFSTEMATLDDAFFQRLDDSFLVPDDKRDSKYPIFGNLVEEKVYHDEFPTIYHLRKYLADSTKKADLRLVYLALAHMIKYRGHFLIEGEFNSKNNDIQKNFQDFLDTYNAIFESDLSLENSKQLEEIVKDKISKLEKKDRILKLFPGEKNSGIFSEFLKLIVGNQADFRKCFNLDEKASLHFSKESYDEDLETLLGYIGDDYSDVFLKAKKLYDAILLSGFLTVTDNETEAPLSSAMIKRYNEHKEDLALLKEYIRNISLKTYNEVFKDDTKNGYAGYIDGKTNQEDFYVYLKNLLAEFEGADYFLEKIDREDFLRKQRTFDNGSIPYQIHLQEMRAILDKQAKFYPFLAKNKERIEKILTFRIPYYVGPLARGNSDFAWSIRKRNEKITPWNFEDVIDKESSAEAFINRMTSFDLYLPEEKVLPKHSLLYETFNVYNELTKVRFIAESMRDYQFLDSKQKKDIVRLYFKDKRKVTDKDIIEYLHAIYGYDGIELKGIEKQFNSSLSTYHDLLNIINDKEFLDDSSNEAIIEEIIHTLTIFEDREMIKQRLSKFENIFDKSVLKKLSRRHYTGWGKLSAKLINGIRDEKSGNTILDYLIDDGISNRNFMQLIHDDALSFKKKIQKAQIIGDEDKGNIKEVVKSLPGSPAIKKGILQSIKIVDELVKVMGGRKPESIVVEMARENQYTNQGKSNSQQRLKRLEKSLKELGSKILKENIPAKLSKIDNNALQNDRLYLYYLQNGKDMYTGDDLDIDRLSNYDIDHIIPQAFLKDNSIDNKVLVSSASNRGKSDDFPSLEVVKKRKTFWYQLLKSKLISQRKFDNLTKAERGGLLPEDKAGFIQRQLVETRQITKHVARLLDEKFNNKKDENNRAVRTVKIITLKSTLVSQFRKDFELYKVREINDFHHAHDAYLNAVIASALLKKYPKLEPEFVYGDYPKYNSFRERKSATEKVYFYSNIMNIFKKSISLADGRVIERPLIEVNEETGESVWNKESDLATVRRVLSYPQVNVVKKVEEQNHGLDRGKPKGLFNANLSSKPKPNSNENLVGAKEYLDPKKYGGYAGISNSFAVLVKGTIEKGAKKKITNVLEFQGISILDRINYRKDKLNFLLEKGYKDIELIIELPKYSLFELSDGSRRMLASILSTNNKRGEIHKGNQIFLSQKFVKLLYHAKRISNTINENHRKYVENHKKEFEELFYYILEFNENYVGAKKNGKLLNSAFQSWQNHSIDELCSSFIGPTGSERKGLFELTSRGSAADFEFLGVKIPRYRDYTPSSLLKDATLIHQSVTGLYETRIDLAKLGEG

SEQ ID NO: 4999 - protein, 1145 aa, unidentified
  REGION 1..1145: note = Description of Unknown: Cas Enzyme sequence
LTPNFKTNFSLENDAKLQISSESYEEDLGNLLALIGENFIELFSAVKNLSDGILLAGIVSDESPHAPLSAKMVIRFKEHEEDLVALKQFIKNNLPAEKCVEVFSDQSKDGYAGYIDGKTTQESFYKYIKNLLSKFEGADYFLEKIEREDFLRKQRTFDNGSIPHQIHLQEMNAILRRQGEHYPFLKENKEKIEKILTFRIPYYVGPLARGNRDFAWLTRNSDQAIRPWNFEEIVDKASSAEDFINKMTNYDLYLPEEKVLPKHSLLYETFAVYNELTKVKFIAEGLRDYQFLDSGQKKQIVDRCFKEKRKVTEKDLIHYLHNVDGYDGIELKGIEKQFNASLSTYHDLLKIIKDKEFMDDAKNEAILENIVHTLTIFEDREMIKQRLAQYNSLFDEKVIKALTRRQYTGWGKLSAKLINGICDKQTGKTILDYLIDDDYNNRNFMQLINDDRLSFKEIIQKAQVVGKTDDLKQVVQELPGSPAIKKGILQSIKIVDELVKVMGHAPESIVIEMARENQTTVRGKKNSQQRYKRIEDSLKILASGLDSNILKENPTDNNQLQNDRLFLYYLQNGKDMYTGEALDINQLSSYDIDHIIPQAFIKDDSLDNRVLTSSKDNRGKSDNVPSLEVVQKRKAFWQQLLDSKLISERKFKNLTKAERERGGLNELDKVGFIKRQLVETRQITKHVAQILDARYNTEVNEKDKKNRTVKIITLKSNLVSNFRKEFRLYKVREINDYHHAHDAYLNAVVAKAILKKYPKLEPEFVYGDYQKYDLKRYISKSKDPKEVEKATEKYFFYSNLLNFFKEEVHYADGTIVKRENIEYSKDTGEIAWNKEKDFATIKKVLSLPQVNIVKKTEIQTHGLDRGKPKGLFNSNPSPKPSEGSKENLVPIKQGLDPRKYGGYAGISNSYAILVKAIIEKGAKKQQKTILEFQGISILDKINFENNKENYLLEKGYIKILSTITLPKYSLFEFPDGTRRRLASILSTNNKRGEIHKGNELVISEKYTTLLYHAKNINKALEPEHLEYVEKHRDEFAKLLDYVLDFNEKYVGALKNGERIRQAFTDWETVDIKELCFSFIGPENSKNAGLFELTSQGSASDFEFLGVKIPRYRDYTPSSLLNATLIHQSITGLYETRIDLSKLGED

SEQ ID NO: 5000 - protein, 241 aa, unidentified
  REGION 1..241: note = Description of Unknown: Cas Enzyme sequence
MTKKSYSIGLDVGTNSVGWAVITDDYKVPSKKMKVRGNTDKHFIKKNLIGALLFDEGTTAEDRRLKRTARRRYTRRKNRLRYLQEIFAEEMNKVDSSFFHRLDDSFLVPDDKRGSKYPIFATLAEEKEYHKKFPTIYHLRKQLAESNEKADLRLIYLALAHMIKYRGHFLIDDPKFKVQNNDIQGLFEKFVEEYDNVQETSLSKIKLNVTEILTAKSLSLKNRNNFLRTTQVKRRIPYSVI

SEQ ID NO: 5001 - protein, 1376 aa, unidentified
  REGION 1..1376: note = Description of Unknown: Cas Enzyme sequence
MSNKPYSIGLDIGTNSVGWAVITDDYKVPSKKMKVLGNTDKHFIKKNLIGALLFDEGTTAEDRRLKRTARRRYTRRKNRLRYLQEIFSEEISKVDNSFFHRLDDSFLVPEDKRGSKYPIFATLTEEKEYYKQFPTIYHLRKQLADSKEKADLRLIYLTLAHMIKYRGHFLYEESFDIKNNDIQKIFNEFISIYDNTFEGSSLSGQNAQVEAIFTDKISKSTKRERVLKLFPDQKSTGLFSEFLKLIVGNQADFKKHFDLEEKAPLQFSKDTYDEDLENLLGQIGDDFADLFLVAKKLYDAILLSGILTVTDPSTKAPLSASMIERYENHQKDLAALKQFIKNNLPEKYDEVFSDQSKEGYAGYIDSKTTQEAFYKYIKNLLSKIDGADYLLDKIEREDFLRKQRTFDNGSIPHQIHLQEMNAILRRQGEHYPFLKENREKIEKILTFRIPYYVGPLARGNRDFAWLTRNSDQAIRPWNFEEIVDKASSAEAFINKMTNYDLYLPEEKVLPKHSLLYETFAVYNELTKVKFIAEGLRDYQFLDSGQKKKIINQLFKEKRKVTEKDLIHYLHNVDGYDGIELKGIEKQFNASLSTYHDLLKIIKDKRFMDEPKNQEILENIVHTLTIFEDREMIKQRLAQYASIFDEKVIKTLTRRHYTGWGKLSAKLINCIRDRKTGKTILDYLIDDGYNNRNFMQLINDDGLSFKEIIQESQVVGKPDDVKQIVQELPGSSAIKKGILQSIKLVDELVKVMGHDPESIVIEMARENQTTARGKKNSQQRYKRIEDSLKILASGLNSNILKEHPTDNIQLQNDRLFLYYLQNGKDMYTGNPLDINHLSSYDIDHIIPQAFIKDDSLDNRVLTSSKDNRGKSDNVPSLEVVQKRKAFWQQLLESKLISERKFNNLTKAERGGLNERDKVGFIKRQLVETRQITKHVAQILDSRFNTKVNEKNQKIRTVKIITLKSNLVSNFRKEFRLYKVREINDYHHAHDAYLNAVVAKAILKKYPKLEPEFVYGDYQKYDLKRYISRSRDPKEIEKATEKYFFYSNLLNFFKEEVHYADGTIVKRENIEYSKDTGEIAWNKEIDFATIRKILSLSQVNIVKKTEEQTVGQNGGLFDNNIVSKKKVVDASKLIPIKSGLSPEKYGGYARPTIAYSVLVIADIEKGKAKKLKRIKEMVGITIQDKKKFEANPTAYLEEYGYKNINPNLIIKLPKYSLFKFNDGQRRLLASSIELQKGNELILPYHFTTLLYHAQRINKISEPIHKQYVETHQSEFEELLTTIISLSKKYIQKPIVESLLQQAFEQADKDIYQLSESFISLLKLTSFGAPGAFRFLGVEISQSNVRYQSVSSCFNATLIHQSITGLYETRIDLSKLGED

SEQ ID NO: 5002 - protein, 1369 aa, unidentified
  REGION 1..1369: note = Description of Unknown: Cas Enzyme sequence
MTKKPYSIGLDIGTNSVGWAVITDDYKVPSKKMKVRGNTDKHFIKKNLIGALLFDEGTTAEDRRLKRIARRRYTRRKNRLRYLQEIFAEEMNKVDSSFFHRLDDSFLVPDDKRGSKYPIFATLAEEKEYHKEFPTIYHLRKQLAESNEKADLRLIYLALAHMIKYRGHFLIDDPKFKVQNNDIQGLFEKFVEEYDNVQETSLSKIKLNVTEILTAKIPKSEKQEQLLKNYPSEKKNTLFGNLIGLALGLTPNFKTNFSLENDAKLQISSESYEEDLGNLLALIGENFIELFSVVKNLSDGILLAGIVSDESPHAPLSTKMVIRFKEHEEDLAALKHFIKNNLPEKYVEVFSDQSKDGYAGYIDGKTTQEAFYKYIKNLLSKFEGADYFLDKIEREDFLRKQRTFDNGSIPHQIHLQEMNAILRRQGEHYPFLKENREKIEKILTFRIPYYVGPLARGNGDFAWLTRNSDQAIRPWNFEEIVDKASSAEDFINKMTNYDLYLPEEKVLPKHSLLYETFAVYNELTKVKFIAEGLRDYQFLDSGQKKQIVDRCFKEKRKVTEKDLIHYLHNVDGYDGIELKGIEKQFNASLSTYHDLLKIIKDKEFMDDAKNEAILENIVHTLTIFEDREMIKQRLAQYNSLFDEKVIKALTRRQYTGWGKLSAKLINSICDKQTGKTILDYLIDDDYNNRNFMQLINDDRLSFKEIIQKAQVVGKTDDLKQVVQELPGSPAIKKGILQSIKIVDELVKVMGHAPESIVIEMARENQTTARGKKNSQQRYKRIEESLKILASGLDSNILKENPTDNNQLQNDRLFLYYLQNGKDMYTGEALDINQLSSYDIDHIIPQAFIKDDSLDNRVLTSSKENRGKSDNVPSLEVVQKRKAFWQQLLDSKLISERKFNNLTKAERGGLDERDKVGFIKRQLVETRQITKHVAQILDARFNTEVNEKNQKTRTVKIITLKSNLVSNFRKEFRLYKVREINDYHHAHDAYLNAVVAKAILKKYPKLEPEFVYGDYQRYDLKRYISKSKDPKEVEKATEKYFFYSNLLNFFKEEVHYADGTIVKRENIEYSKDTGEIAWNKEKDFATIKKVLSLPQVNIVKKREVQTGGFSKESILPKGNSDKLIPRKTKNILWETTKYGGFDSPVIAYSILLIADIEKGKTKKLKTVKTLVGITIMEKNAFEKNPIAFLENKGYHNVRKENILCLPKYSLFELENGRRRMLASAKELQKGNEIVLPVHLTTLLYHAKNVHKLDEPEHLEYIQKHRSEFKDLLNLVSEFSQKYVLAEANLEKIKNLYADNEQADIEILANSFTNLLTFTALGAPAAFKFFGKDVDRKRYTTVSEILNATLVHQSITGLYETRIDLSKLGED

SEQ ID NO: 5003 - protein, 1392 aa, unidentified
  REGION 1..1392: note = Description of Unknown: Cas Enzyme sequence
MSNKSYSIGLDIGTNSVGWAVITDDYKVPSKKMKVLGNTDKYFIKKNLIGALLFDEGTTAEDRRLKRTARRRYTRRKNRLRYLQEIFSEEMSKVDSSFFHRLDDSFLVPEDKRGSKYPIFATSAEEKEYHKKFPTIYHLRKQLADSKEKTDLRLIYLALAHMIKYRGHFLYEESFDIKNNDIQKIFSEFISIYDNTFEGSSLSGQNAQVEAIFTDKISKSAKRERILKLFAYEKPTGLFSEFLKLIVGNQAEFKKHFDLEEKAPLQFSKDTYDEDLENLLGQIGDDFADLFLVAKKLYDAILLSGILTVTDPSTKAPLSASMIERYENHQKDLASLKQFIQNNIQEKYDEFFSDQSKDGYAGYIDGKTTQEAFYKYIKNLLSKFEGVDYFLDKIEREDFLRKQRSFDNGSIPHQIHLQEMNAIIRRQGEHYPFLQENKEKIEKILTFRIPYYVGPLARGNGDFAWLTRNSDQAIRPWNFEEIVDQTSSAEDFINKMTNYDLYLPEEKVLPKHSLLYETFAVYNELTKVKFIAEGLRDYQFLDSGQKKQIVNQLFKEKRKVTEKDIIQYLHNVDGYDGIELKGIEKQFNASLSTYHDLLKIIKDKAFMDDPKNEEILENIVHTLTIFEDREMIKQRLAQYDSLFDKKGIKALTRRHYTGWGKLSAKLINGICDKKTGKTILDYLIDDGYSNRNFMQLINDDGFSFKDIIQKAQVVDKTNDVKQVVQELPGSPAIKKGILQSIKLVDELVKVMGHTPESIVIEMARENQTTARGKKNSQQRYKRIEDALKNLAPGLDSNILKEHPTDNIQLQNDRLFLYYLQNGKDMYTGEPLNINQLSSYDIDHIVPQAFIKDDSLDNRVLTSSKDNRGKSDNVPSLEVVQKRKAFWQQLLDSKLISERKFNNLTKAERGGLDERDKVGFIRRQLVETRQISKHVAQILDARFNTEVTEKDKKNRKVKIITLKSNLVSNFRKEFKLYKVREINDYHHAHDAYLNAVVAKAILKKYPKLEPEFVYGDYQKYDLKRYISRSKDPKDVEKATEKYFFYSNLLNFFKEEVHYADGTIVKRENIEYSNDTGEIAWNKEKDFATIKKVLSLPQVNIVKKTEIQTHGLDRGKPRGLFNSNPSPKPSEDSKENLVPIKQGLDPRKYGGYAGISNSYAVLVKAIIEKGAKKQQKTVLEFQGISILDKINFEKNKENYLLEKGYIKILSTITLPKYSLFEFPDGTRRRLASILSTNNKRGEIHKGNELVIPEKYTTLLYHAKNINKTLEPEHLEYVEKHRNDFAKLLESVLDFNDKYVGALKNGERIRQAFIDWETVDIEKLCFSFIGPRNSKNAGLFELTSQGSASDFEFLGVKIPRYRDYTPSSLLNATLIHQSITGLYETRIDLSKLGED

SEQ ID NO: 5004 - protein, 1363 aa, unidentified
  REGION 1..1363: note = Description of Unknown: Cas Enzyme sequence
MTKPYSIGLDIGTNSVGWAVITDDYKVPSKKMKVLGNTNKKYIKKNLLGALLFDSGITAEGRRLKRTARRRYTRRRNRILYLQEIFSTEMATLDDAFFQRLDDSFLVPDDKRDSKYPIFGNLAEEKAYHDKFPTIYHLRKQLADSSQKADLRLVYLALAHMIKYRGHFLIEGDFNLKNNDIQKNFQDFLDTYNAIFESDLSLENSKQLEEIVKDKISKSAKKDRILKLFPGEKNSGIFSEFLKLIVGNQADFRKYFNLDEKAPLHFSKESYDEDLETLLGYIGDDYSDVFLKAKKLYDAILLSGILTVTDNGTEAPLSSAMIMRYKEHEEDLASLKAYIRNISLETYNEVFKDDTKNGYAGYIDGKTSQEDFYVYLKKLLASLEGADYFLEKIDREDFLRKQRTFDNGSIPYQIHLQEMRAILDKQAKFYPFLAKNKERIEKILTFRIPYYVGPLARGNSDFAWSIRKRNEKITPWNFEDVIDKESSAEAFINRMTSFDLYLPEEKVLPKHSLLYETFTVYNELTKVRFIAESMRDYQFLDSKQKKDIVRLYFKGKRKVTDKDIIEYLHAIDGYDGIELKGIEKQFNSSLSTYHDLLNIINDKEFLDDSSNETIIEEIIHTLTIFEDREMIKQRLSKFKNLFDKSVLKKLSRRHYTGWGKLSAKLINGIRDEKSGNTILDYLIDDGVSNRNFMQLIHDDALSFKKKIKKAQIIGDKDNNKQVVKSLPGSPAIKKGILQSIKIVDELVKVMGREPESIVVEMARENQYTNQGKSNSQQRLKRLEESLKGLGSKILKENVPTRLSKIDNNALQNDRLYLYYLQNGKDMYTGEELDIDRLSNYDIDHIIPQAFLKDNSIDNKVLVSSASNRGKSDDVPSLEVVKKRKTLWYQLLKSKLISQRKFDNLTKAERGGLSPEDKAGFIQRQLVETRQITKHVARLLDEKFNNKKDENNRAVRTVKIITLKSSLVSQFRKDFELYKVREINDFHHAHDAYLNAVVASALLKKYPKLEPEFVYGDYPKYNSFRERKSATEKVYFYSNIMNIFKKSISLADGTVIERPLIEVNVETGESVWNKESDLATVRRVLSYPQVNVVKKVEVQSGGFSKELVQPHGNSDKLIPRKTKKMIWDTKKYGGFDSPIVAYSVLVMAEREKGKSKKLKPVKELVGITIMEKESFENNTIDFLERRGFRNIQDENIILLPKFSLFELENGRRRLLASAKELQKGNEFILPNKLVKLLYHAKNIHNTLEPEHLEYVESHRADFGKILDVVSVFSEKYILAEAKLEKIKEIYRKNIDTEIHEMAIAFINLLTFTSIGAPATFKFFGHNIERKRYSSVAEILNATLIHQSVTGLYETRIDLGKLGED

SEQ ID NO: 5005 - protein, 1369 aa, unidentified
  REGION 1..1369: note = Description of Unknown: Cas Enzyme sequence
MMKSYSIGLDIGTNSVGWAVITDDYKVPAKKMKVFGNTDKKYIKKNLLGALLFDSGETAEATRLKRTARRRYTRRKNRLRYLQEIFAEEMTKVDDSFFQRLDESFLKDDDKNFDAHPIFGNKAEEDVYHQKFPTIYHLRKYLADSTEKADLRLVYLALAHMIKFRGHFLIEGELSAENTDVQKLFTDFVGVYDRIFDDSHLSEITVDAASILTEKISKSRRLENLIKYYTIEKKNTLFGNLIALALGLQPNFKMNFKLSEDAKLQFSKDSYEEDLEELLGKIGDDYADLFTSAKNLYDAILLSGILTVDDNSTKAPLSASMLKRYVEHHEDLEKLKEFIKANKSELYHDIFKDKNKNGYAGYIENGVKQDEFYKYLKNTLSKIDGSEYFLDKIEREDFLRKQRTFDNGSIPHQIHLQEMHAILRRQGDYYSFLKENQDRIEKILTFRIPYYVGPLARKDSRFAWAEYHLDEKITPWNFDKVIDKEKSAEKFITRMTSNDLYLPEEKVLPKHSHVYETYAVYNELTKIKYVNEQGKESFFDSNMKQEIFDHVFKENRKVTKEKVLNYLNKEFPEYRIKDLIGLDKENKSFNASLGTYYDLKKILDKSFLDDKVNEEIIEDIIKTLTLFEDREMIQQRLQKYSDIFSPQQLKKFERRHYTGWGRLSYKLINGIRNKENNKTILDYLIDDGSANRNFMQLINDDTLPFKQIIQKSQVVGDIDDIKAVVHDLPGSPAIKKGILQSVKIVDELVKVMGHNPDNIVIEMARENQTTNRGRSQSQQRLKKLQNSLKELGSNILNVEKPSYIEDKVENNHLQNDKLFLYYIQNGKDMYTGDELDIDHLSDYDIDHIIPQAFIKDDSIDNRVLTSSAKNRGKSDDVPSLDIVRARKAEWIRLYKSRLISKRKFDNLTKAERGGLTEADKAGFIKRQLVETRQITKHVAQILDARFNTERDENDKVIRDVKVITLKSNLVSQFRKDFKFYKVREINDYHHAHDAYLNAVVGTALLKKYPKLASEFVYGEYKKYDIRKFITNSSDKATAKYFFYSNLMNFFKTKVKYADGTVFERPIIETNADGEIAWNKQIDFEKVRKVLSYPQVNIVKKVETQTGGFSKESILPKGDSDKLIPRKTKKVYWDTKKYGGFDSPTVAYSVFVVADVEKGKAKKLKTVKELVGISIMERSFFEENPVEFLENKGYHNIREDKLIKLPKYSLFEFEGGRRRLLASASELQKGNEMVLPGYLVELLYHAHRADNFNSTEYLKYVSEHKKEFEKVLSCVEDFANLYVDVEKNLSKIRAVADSMDNFSIEEISNSFINLLTLTALGAPADFNFLGEKIPRKRYTSTKECLNATLIHQSITGLYETRIDLSKLGEE

SEQ ID NO: 5006 - protein, 1392 aa, unidentified
  REGION 1..1392: note = Description of Unknown: Cas Enzyme sequence
MENKNYSIGLDIGTNSVGWAVITDDYKVPSKKMKVLGNTDKHFIKKNLIGALLFDEGTTAEDRRLKRTARRRYTRRKNRLRYLQEIFSEEISKLDSSFFHRLDDSFLVPKDKRGSKYPIFATLEEEKEYHKKFPTIYHLRKHLADSKEKTDLRLIYLALAHMIKYRGHFLYGESFDIKNNDIQKIFNEFISIYDNTFEGSSLSGQNAQVEAIFTDKISKSAKRERVLKLFSDEKSTSLFSEFLKLIVGNQADFKKHFDLEEKAPLQFSKDTYDEDLENLLGQIGDGFTDLFLVAKKLYDAILLSGILTVSDPSTKAPLSASMIERYENHQEDLAALKQFIKNNLPEKYAEVFSDQSKDGYAGFIYGKTTQEAFYKYIKNLLSKLEGADYFLDKIEREDFLRKQRTFDNGSIPHQIHLQEMNAILRRQGEHYPFLKENREKIEKILTFRIPYYVGPLARGNRDFAWLTRNSDEPIRPWNFEEVVDKARSAEDFIHRMTNYDLYLPEEKVLPKHSLLYETFAVYNELTKVKFIAEGLRDYQFLDSGQKKQIVNQLFKEKRKVTGKDIIHYLHNVDGYDGIELKGIEKQFNASLSTYHDLLKIIKDKEFMDDPKNEEILENIVHTLTIFEDREMIKQRLAQYDTLFDEKVIKALTRRHYTGWGKLSAKLINGICDKQTGKTILDYLIDDAYNNRNFMQLINDDGLSFKEIIQKAQVVGKTDDVKQVVQELPGSPAIKKGILQSIKIVDELVKVMGHNPESIVIEMARENQTTAKGKKNSQQRYKRIEDALKNLAHGLDSNILKENPTDNIQLQNDRLFLYYLQNGKDMYTGKAIDINQLSNYDIDHIIPQAFIKDDSLDNRVLTSSKDNRGKSDNVPSIEVVQKRKAFWQQLLDSKLISERKFNNLTKAERGGLDERDKVGFIKRQLVETRQITKHVAQLLDARFNTEVNEENQKIRTVKIITLKSNLVSNFRKEFGLYKVREINDYHHAHDAYLNAVVAKAILKKYPKLEPEFVYGDYQKYDLKRYISKSKVSNTIDKATEKYFFYSNLLNFFKEKVRYADGTIKKRENIEYSNDTGEIAWNKEKDFATIKKVLSLPQVNIVKKTEIQTHGLDRGKPRGLFNSNPSPKPSEDSKENLVPIKQGLDPRKYGGYAGISNSYAVLVKAIIEKGAKKQKKTILEFQGISILDKINFEKNKENYLLEKGYIEILSTITLPKYSLFEFPDGTRRRLASILSTNNKRGEIHKGNELVIPEKYTTLLYHAKNINKTLEPEHLEYVEKHRNDFAKLLECVLNFNDKYVGALKNGERIRQAFTDWETVDIEKLCFSFIGPGNSKNAGLFELTSQGSASDFEFLGVKIPRYRDYTPSSLLNATLIHQSITGLYETRIDLSKLGED

SEQ ID NO: 5007 - protein, 1371 aa, unidentified
  REGION 1..1371: note = Description of Unknown: Cas Enzyme sequence
MENKNYSIGLDIGTNSVGFAVITDDYKVPSKMMKVLGNTDKRFIKKNLIGALLFDEGTTGEARRLKRTARRRYTRRKNRLRYLQEIFFEEMSKLDNSFFHRLDDSFLVPEDKRGSKYPVFATLAEEKEYHKQFPTIYHLRKYLADSKEKADLRLIYLALAHMIKYRGHFLYEDTFDIKNNDIQKIFNEFISIYDNTFEESSLSGQNAQVEAIFTDKISKSAKRERVLKLFPDEKSTGLFSEFLKLIVGNQADLKKNFNLEEKAPLQFSKDTYDEDLENLLGQIGDDFADLFVVAKKLYDAILLSGILTVTDPSTKAPLSASMIERYENHQKDLAALKQFIKNNLPEKFVEIFSDQSKDGYAGYIDGKTTQEAFYKYIKNLLSKFEGADYFLEKIEREDFLRKQRTFDNGSIPHQIHLQEMNAILRRQGEHYPFLKENREKIKKILTFRIPYYVGPLASGNSDFAWLTRNSDQAIRPWNFEEIVDKASSAEDFINKMTNYDLYLPEEKVLPKHSLLYETFAVYNELTKVKFIAEGLRDYQFFDSGQKKQIVNQLFKEKRKVTEKDIIHYLHNFDGYDGIELKGIEKQFNASLSTYHDLLKIIKDKEFMDDAKNEAILENIVHTLTIFEDREMIKQRLAQYDSLFDEKVIKALTRRHYTGWGKLSAKLINGICDKQTGNTILDYLIDDGKINRNFMQLINDDGLSFKEIIQKAQVFGKTDDVKQVVQELPGSPAIKKGILQSIKIVDELVKVMGHAPESIVIEMARENQTTARGKKNSQQRYKRIEDSLKILASGLDSNILKENPTDNIKLQNDRLFLYYLQNGKDMYTGEALDINQLSSYDIDHIIPQAFIKDDSLDNRVLTSSKDNRGKSDNVPSIEVVQKRKAFWQQLLESKLISERKFNNLTKAERGGLDERDKVGFIKRQLVETRQITKHVAQILDARFNTEVNEKNQKIRTIKIITLKSNLVSNFRKEFRLYKVREINDYHHAHDAYLNAVVAKAILKKYPKLEPEFVYGDYQKHDLKRYISRSKDPKEIEKATEKYFFYSNLLNFFKEEVHYADGTIVKRENIEYSKDTGEIAWNKEKDLAIVKKVLSLPQVNIVKKREVQTGGFSKESILPKGNSDKLIPRKTKDILWDTTKYGGFDSPVIAYSILLIADIEKGKAKKLKTVKTLVGITIMEKAAFEKNPITFLENKGYHNVRKENILCLPKYSLFELENGRRRLLASAKELQKGNEIVLPVYLTTLLYHSKNVHKLDEPGHLEYIQKHRNEFKDLLNLISEFSQKHVLADANLEKIKNLYADNEQADIEILVNSFINLLTFTALGAPAAFKFFGKDVDRKRYTTVSEILNATLIHQSITGLYETRIDLSKLGED

SEQ ID NO: 5008 - protein, 1377 aa, unidentified
  REGION 1..1377: note = Description of Unknown: Cas Enzyme sequence
MKKPYSIGLDIGTNSVGWAVITDDYKVPSKKMKVLGNTDKHFIKKNLIGALLFDEGTTAEDRRLKRTARRRYTRRKNRLRYLQEIFSEEISKLDSSFFHRLDDSFLVPEDKRGSKYPIFATLAEEKEYHKNFPTIYHLRKQLAESNEKADLRLIYLALAHMIKYRGHFLYEESFDIKNNDIQKIFNEFISIYDNTFEGSSLSGQNAQVEAIFTDKISKSAKRERVLKLFSDEKSTGLFSEFLKLIVGNQADFKKHFDLEEKAPLQFSKDTYDEDLENLLGQIGDGFADLFLVAKKLYDAILLSGILTVSDPSTKAPLSASMIERYENHQEDLAALKQFIKNNLPEKYGEVFSDQSKDGYAGFIDGKTTQEAFYKYIKNLLSKLEGADYFLDKIEREDFLRKQRTFDNGSIPHQIHLQEMNAILRRQGEHYPFLKENREKIEKILTFRIPYYVGPLARDNRDFSWLTRNSDEPIRPWNFEEVVDKASSAEDFINKMTNYDLYLPEEKVLPKHSLLYETFAVYNELTKVKFIAEGLRDYQFLDSGQKKQIVNQLFKEKRKVTEKDIIHYLHNVDGYDGIELKGIEKQFNASLSTYHDLLKIIKDKEFMDNADNEEILENIVHTLTIFEDREMIKQRLAQYGAIFDEKVLKTLSRRHYTGWGKLSAKLINGISDKQTGNTILDYLIDDGNNNRNFMQLINDDGLSFKEIIQKAQVVGKTDDVKQVVQELPGSPAIKKGILQSIKIVDELVKIMGHAPESIVIEMARENQTTARGKKNSQQRYKRIENALKNLAPGLDSNILKENPTDNIQLQNDRLFLYYLQNGKDMYTGKTIDINQLSNYDIDHIIPQAFIKDDSLDNRVLTSSKDNRGKSDNVPSIEVVQKRKAFWQQLLDSKLISERKFNHLTKAERGGLDERDKVGFIRRQLVETRQITKHVAQILDARFNTEVNEKNQKIRTVKIITLKSNLVSNFRKEFRLYKVREINDYHHAHDAYLNAVVAKAILKKYPKLEPEFVYGDYQKYDLKRYISKSKASNTIDKATEKYFFYSNLLNFFKEKVRYADGTIKKRENIEYSNDTGEIAWNKEKDFATIKKVLSLPQVNIVKKTEEQTVGQNGGLFDNNIVSKKKVVDASKLIPIKSSLSPEKYGGYARPTIAYSVLVIADIEKGKGKAKKLKRIKEIVGIAVQDKKKFESNPIAYLEECGYKNINSDLIIKLPKYSLFEFNDGQRRLLASSIELQKGNELILPYHLTVLLYHAQRINKISEPIHKQYVEAHQNEFKELLTTIISLSKKYIQKPNVELLLQQAFDRADKDIYQLSESFISLLKLTSFGAPGAFKFLGVEISQSSVRYKPNSQFLDTTLIHQSITGLYETRIDLRKLGED

SEQ ID NO: 5009 - protein, 1069 aa, unidentified
  REGION 1..1069: note = Description of Unknown: Cas Enzyme sequence
ERYENHQKDLAVLKQFIKTNLPEKYVEVFSDQSKDGYAGYIDGKTTQEAFYKYIKNLLSKFDGADYFLDKIEREVFLRKQRTFDNGSIPHQIHLQEMNTILRRQGEHYPFLKENKEKIEKILTFRIPYYVGPLARGNRDFAWLTRNSDEAIRPWNFEEIVDKASSAEDFINKMTNYDLYLPEEKVLPKHSLLYETFAVYNELTKVKFIAEGLRDYQFLDSGQKKQIVNQLFKENRKVTEKDIIHYLHNVDGYDGIELKGIEKQFNASLSTYHDLLKIIKDKEFMDDAKNEAILENIVHTLTIFEDREMIKQRLAQYDSLFDEKVIKALTRRHYTGWGKLSAKLINGICDKQTGNTILDYLIDDGKINRNFMQLINDDGLSFKEIIQKAQVIGKTDDVKQVVQELSGSPAIKKGILQSIKIVDELVKVMGHAPESIVIEMARENQTTARGKKNSQQRYKRIEDSLKILASGLDSNILKENPTDNNQLQNDRLFLYYLQNGKDMYTGEALDINQLSSYDIDHIIPQAFIKDDSLDNRVLTSSKDNRGKSDNVPSIEVVQKRKAFWQQLLDSKLISERKFNNLTKAERGGLDERDKVGFIKRQLVETRQITKHVAQILDARYNTEVNEKDKKNRTVKIITLKSNLVSNFRKEFRLYKVREINDYHHAHDAYLNAVVAKAILKKYPKLEPEFVYGEYQKYDLKRYISRSKDPKEVEKATEKYFFYSNLLNFFKEEVHYADGTIVKRENIEYSKDTGEIAWNKEKDFAIIKKVLSLPQVNIVKKTEIQTHGLDRGKPRGLFNSNPSPKPSEDSKENLVPIKQGLDPRKYGGYAGISNSYAVLVKAIIEKGAKKQQKTILEFQGISILDKINFEKNKENYLLEKGYKEILSTITLPKYSLFEFPDGTRRRLASILSTNNKRGEIHKGNELVIPEKYTTLLYHAKNINKTLEPEHLEYVEKHRNDFAKLLECVLDFNDKYVGALKNGERIRQAFIDWETVDIEKLCFSFIGPRNSKNAGLFELTSQGSASDFEFLGVKIPRYRDYTPSSLLNATLIHQSITGLYETRIDLSKLGED

SEQ ID NO: 5010 - protein, 1304 aa, unidentified
  REGION 1..1304: note = Description of Unknown: Cas Enzyme sequence
YTRRRNRILYLQEIFTDSMNEIDESFFHRLDDSFLVPEDKRGIKYPIFATLEEEKEYHKKFPTIYHLRKHLADSKEKIDLRLIYLALAHMIKYRGHFLYEESFDIKNNDIQKNFNEFISIYDNTFEGSSLSRQNAQVEAIFTDKISKSAKRERVLKLFSDEKSTGLFSEFLKLIVGNQADFKKHFDLEEKAPLQFSKDTYDEDLENLLGQIGNGFADLFLVAKKLYDAILLSGILTVSDPSTKAPLSASMIERYENHQEDLAALKQFIKNNLSEKYAEVFSDQSKDGYAGFIDGKTTQEAFYKYIKNLLSKLEGADYFLDKIEREDFLRKQRTFDNGSIPHQIHLQEMNAILRRQGEHYPFLKENREKIEKILTFRIPYYVGPLARDNRDFAWLTRNSDQAIRPWNFEEVVDKASSAEDFINKMTNYDLYLPEEKVLPKHSLLYETFAVYNELTKVKFIAEGLRDYQFLDSGQKKQIVNQLFKEKRKVTEKDIIHYLHNVDGYDGIELKGIEKQFNASLSTYHDLLKIIKDKEFMDDAKNEAIFEKIVHTLTIFEDREMIKQRLAQYDSLFDEKVIKALIRRHYTGWGKLSAKLITGICDKQSKKTILDYLIDDGEINRNFMQLINDDGLSFKEIIQKAQVVGKSDNVKQVVQELPGSPAIKKGILQSIKIVDELVKVMGHDPESIVIEMARENQTTAKGKKNSRQRYKRIEDALKNLAAGLDSDILKENPTDNIQLQNDRLFLYYLQNGKDMYTGEPLDINQLSSYDIDHIIPQAFIKDDSIDNRVLTSSKDNRGKSDNVPGLEIVEKMKGFWQQLLKSKLISERKFNNLTKAERGGLDREDKVDFIKRQLVETRQITKHVAQILDARFNTKVTEKDKKNRTVKIITLKSNLVSNFRKEFRLYKVREINDYHHAHDAYLNAVVAKAIFKKYPKLEPEFVYGDYQKYDIKRYFSRSKDPKEVEKATEKYFFYSNLLNFFKEEVHYADGTIVKRENIEYSKDTGEIAWNKEKDFATIKKVLSLPQVNIVKKTEEQTVGQNGGLFDNNIVSKKKVVDASKLIPIKSGLSPEKYGGYARPTIAYSVLVIADIEKGKTKKLNRIKEMVGITIQDKKKFEANPIAYLEECGYKNINPDLIIKLPKYSLFEFNDGQRRLLASSIELQKGNELILPYHLTALLYHAQRINKISEPIHKQYVEAHQNEFKELLTTIISLSKKYIQKPNVELLLQQAFDQADKDIYQLSESFISLLKLTSFGAPGAFKFLGVEISQSSVRYKPNSQFLDTTLIHQSITGLYETRIDLSKLGED

SEQ ID NO: 5011 - protein, 1392 aa, unidentified
  REGION 1..1392: note = Description of Unknown: Cas Enzyme sequence
MENKNYSIGLDIGTNSVGWAVITDDYKVPSKKMKVRGNTDKHFIKKNLIGALLFDEGTTAEDRRLKRTARRRYTRRKNRLRYLQEIFSEEISKVDNSFFHRLDDSFLVPEDKRGSKYPIFATLAEEKEYHKNFPTIYHLRKQLADSKEKADLRLIYLALAHMMKYRGHFLYEESFDIKNNDIQKIFNEFISIYDNTFEGSSLSEQNVQVEVIFTDKISKSAKRERVLKLFPDEKSTGLFSEFLKLIVGNQAEFKKHFDLEEKAPLQFSKDTYDEDLENLLGQIGDGFADLFLVAKKLYDAILLSGILTVTDPSTKAPLSASMIERYESHQKDLAAFKKFIKNNLPEKYDEVFSDQSKDGYAGYIDGKTTQEAFYKYIKNLLSKFEGVDYLLDKIEREDFLRKQRTFDNGSIPHQIHLQEMNAILRRQGEHYPFLKENREKIEKILTFRIPYYVGPLARGNGDFAWLTRNSDQAIRPWNFEEIVDKASSAEAFINKMTNYDLYLPEEKVLPKHSLLYETFAVYNELTKVKFIAEGLRDYQFLDSGQKKQIVEQLFKEKRKVSEKDIIQFLHNVDGYDGIELKGIEKQFNASLSTYHDLLKIIKDKEFMDDSKNQEILENIVHTLTIFEDREMIKQRLAQYDSLFDEKVIKALIRRHYTGWGKLSAKLINGICDKQTGNTILDYLIDDGYSNRNFMQLINDDGLSFKEIIQKAQVVGKTDDVKQVVQELPGSPAIKKGILQSVKLVDELVKVMGHAPESIVIEMARENQTTAKGKKNSQQRYKRIENAIKNLAPGLDSTILKEHPTDNIQLQNDRLFLYYLQNGRDMYTGKPLEINQLSNYDIDHIIPQAFIKDDSLDNRVLTSSKENRGKSDNVPSLEVVEKMKAFWQQLLDSKLISYRKFNNLTKAERGGLDERDKVGFIKRQLVETRQITKYVAQILDSRFNTEVTEKDKKNHNVKIITLKSNLVSNFRKEFGLYKVREINDYHHAHDAYLNAVLAKAILKKYPKLEPEFVYGDYQKYDLKRYISRSRDPKEVEKATEKYFFYSNLLNFFKEEVHYADGTIVKRENIEYSKDTGEIAWNKEKDFATIKKVLSLPQVNIVKKTEIQTHGLDRGKPKGLFNSNPSPKPSEDSKENLVPIKQGLDPRKYGGYAGISNSYAVLVKAIIEKGAKKQQKTVLEFQGISILDKINFEKNKENYLLEKGYIKILSTITLPKYSLFEFPDGTRRRLASILSTNNKRGEIHKGNELVLPEKYTTLLYHAKNINKTLEPEHLEYVEKHRNDFAKLLESVLDFNDKYVGALKNGERIRQVFIDWETVDIEKLCFSFIGPRNSKNAGLFELTSQGSASDFEFLGVKIPRYRDYTPSSLLNATLIHQSITGLYETRIDLSKLGED

SEQ ID NO: 5012 - protein, 1377 aa, unidentified
  REGION 1..1377: note = Description of Unknown: Cas Enzyme sequence
MSNKPYSIGLDIGTNSVGWAVITDDYKVPSKKMKVLGNTDKHFIKKNLIGALLFDEGTTAEDRRLKRTARRRYTRRKNRLRYLQEIFSKEMSKVDSSFFHRLDDSFLVPEDKRGSKYPIFATLVEEKEYHKKFPTIYHLKKHLADSKEKTDLRLIYLALAHMIKYRGHFLYEESFDIKNNDIQKIFSEFISIYDNTFEGSSLIGQNAQVEAIFTDKISKSAKRERVLKLFPDEKSTGLFSEFLKLIVGNQADFKKHFDLEEKAPLQFSKDTYDEDLENLLGQIGDDFADLFLVAKKLYNAILLSGILTVKDLSTKAPLSASMIERYENHQKDLAALKQFIQNNLQEKYDEVFSDQSKDGYAGYINGKTTQEAFYKYIKNLLSKFEGADYFLDKIEREDFLRKQRTFDNGSIPHQIHLQEMNAILRRQGKHYPFLNENREKIEKILTFRIPYYVGPLARGNRDFAWLTRNSDQAIRPWNFEEIVDQASSAEDFINKMTNYDLYLPEEKVLPKHSLLYERFAVYNELTKVKFIAEGLRDYQFLDSGQKKQIVNQLFKEKRKVTEKDIIHYLHNVDGYDGIELKGIEKQFNASLSTYHDLLKIIKDKAFMDDAKNEAILENIVHTLTIFEDREMIKQRLAQYDSLFDEKVIKALTRRHYTGWGKLSAKLINGISDKKSGKTILDYLIDDGEINRNFMQLIHDDGLSFKEIIQKAQVVGKTDDVKQVVQELPGSPAIKKGIWQSIKIVDELVKVMGHAPESIVIEMARENQTTAKGKKNSQQRYKRIEDALKNLAPGLDSNILKENPTDNVQLQNDRLFLYYLQNGRDMYTGKPLEINQLSNYDIDHIIPQAFIKDNSLDNRVLTSSKENRGKSDNVPSLEVVEKMKAFWQQLLDSKLISERKFNNLTKAERERGGLNELDKVGFIKRQLVETRQITKHVAQILDAQFNKEVTEKDKKNRNVKIITLKSNLVSNFRKEFGLYKVREINDYHHAHDAYLNAVLAKAILKKYPKLEPEFVYGDYQKYDLKRYISISRDPKEVEKATQKYFFYSNLLNFFKEEVHYADGTIVRRANIEYSKDTGEIAWNKEKDFATIKKVLSLPQVNIVKKTEEQTVGQNGGLFDNNIVSKKKVVDASKLIPIKSDLLPEKYGGYARPTIAYSVLVTYKQNNKIKNTMIGIPVLTKLEFERNPNLYLKNLGINNVLHIIKLVKYTVLEFKHKYGTYRRFIVSNQELKRANQIFVTTKQMKLISQYITLDKNEHDSLLKNNQQLTQSIWNQFLEFMLATDLVNSKQYEELIATNIKTIEECRSIMNRVVTTLSFTNINAGQKKIIFDDTLSLPIKRWQFTDSNKMVKKIMDATLIHQSITGLYETRIDLSKLGED

SEQ ID NO: 5013 - protein, 1378 aa, unidentified
  REGION 1..1378: note = Description of Unknown: Cas Enzyme sequence
MTKKNYSIGLDIGTNSVGWAVITDDYKVPAKKMKVLGNTDKKYIKKNLLGALLFDSGETAEATRLKRTARRRYTRRKNRLRYLQEIFADEMAKVDESFFQRLDESFLRWDDDNKKLGRYPIFGNKADVVKYHQEFPTIYHLRKHLADSSEKADLRLVYLALAHMIKFRGHFLIEGELNAENTDVQKIFSDFVRVYDRTFDDSHLSEITVDAASILTEKISKSRRLENLIKYYPTEKKNTLFGNLIALALGLQPNFKMNFKLSEDAKLQFSKDSYNEDLEELLGKIGDDYADLFTSAKNLYDAILLSGILTVDDNSTKAPLSASMIKRYAEHHEDLEKLKEFIKANKSELYHDIFKDETKNGYAGYIENGVKQDEFYKYLKNTLSKIAGSDYFLDKIEREDFLRKQRTFDNGSIPHQIHLQEMHAILRRQGDYYPFLKENQDRIEKILTFRIPYYVGPLARKDSRFSWAEYHSDEKITPWNFDKVIDKEKSAEKFITRMTLNDLYLPEEKVLPKHSHVYETYVVYNELTKIKYVNEQGKDSFFDSNMKQEIFDHVFKENRKVTKEKLLNYLNKEFPEYRIKDLIGLDKENKSFNASLGTYHDLKKILDKAFLDDKVNEEVIEDIIKTLTLFEDKDMIHERLQKYSDIFTADQLKKLERRHYTGWGRLSYKLINGIRNKENNKTILDYLIDDGSANRNFMQLINDDTLPFKQIIQKSQVVGDVDDIEAVVHDLPGSPAIKKGILQSVKIVDELVKVMGDNPDNIVIEMARENQTTNRGRSQSQQRLKKLQNSLKELGSNILNEEKPSYIEDKVENSHLQNDQLFLYYIQNGKDMYTGDELDIDHLSDYDIDHIIPQAFIKDDSIDNRVLTSSAKNRGKSDDVPSLDIVRARKAEWVRLYKSGLISKRKFDNLTKAERGGLTEADKAGFIKRQLVETRQITKHVAQILDARFNTESDENDKVIRDVKVITLKSNLVSQFRKDFEFYKVREINDYHHAHDAYLNAVVGTALLKKYPKLASEFVYGEYKKYDVHKLIAKSSDDHSEMGKATAKYFFYSNLMNFFKTKVKYADGRVFERPDIETNADGEIAWNKQIDFEKVRKVLSYPQVNIVKKVETQTGGFSKESILPKGDSDKLIPRKTKKAYWDTKKYGGFDSPTVAYSVFVVADVEKGKAKKLKTVKELVGISIMERSFFEENPVEFLENKGYHNIREDKLIKLPKYSLFEFEGGRRRLLASASELQKGNEMVLPGHLVELLYHAHRGDSFNSNEHLKYVSAHKKEFEEALSCVENFANLYVDVEKNLSKIRAAADSMDNFSIEEISNSFINLLTLTALGAPADFNFLGEKIPRKRYTSTKECLNATLIHQSITGLYETRIDLSKIGDE

SEQ ID NO: 5014 - protein, 1130 aa, unidentified
  REGION 1..1130: note = Description of Unknown: Cas Enzyme sequence
MTNGKILGLDIGIASVGVGIIEAKTGKVVHANSRLFSAANAENNTERRGFRGSRRLNRRKKHRVKRVRDLFEKHEIVTDFRNLNLSPYELRVKGLTEQLTNEELFAALRTISKRRGISYLDDAEDDSTGSTDYAKSIDENRRLLKNKTPGQIQLERLEKYGQLRGNFTVYDENGEAHRLINVFSTSDYEKEARKILETQADYNKKITAEFIDDYVEILTQKRKYYHGPGNEKSRTDYGRFRTDGTTLENIFGILIGKCNFYPDEYRASKASYTAQEYNFLNDLNNLKVPTETGKLPTEQKESLVEFAKNTATLGPSKLLKEIAKILDCKVDEIKGYREDDKGKPDLHTFEPYRKLKFNLESINIDDLSREVIDKLADILTLNTEREGIEDAIKRNLPNQFTEEQISEIIKVRKSQSTAFNKGWHSFSAKLMNELIPELYATSDEQMTILTRLEKFKVNKKSSKNTKTIDEKEVTDEIYNPVVAKSVRQTIKIINAAVKKYGDFDKIVIEMPRDKNADDEKKFIDKRNKENKKEKDDALKRAAYLYNSSDKLPDEVFHGNKQLETKIRLWYQQGERCLYSGKPIPIHDLVHNSNNFEIDHILPLSLSFDDSLANKVLVYDWANQEKGQKTPYQVIDSMDAAWSFREMKDYVLKQKGLGKKKRDYLLTTENIDKIEVKKKFIERNLIDTRYASRVVLNSLQSALRELCKDTKVSVIRGQFTSQLRRKWKIDKSRETYHHHAVDALIIAASSQLKLWEKQDNLMFIDYGNNQVVDKETGEILSVSDDEYKELVFQPPYQGFVNTISSKGFEDEILFSYQVDSKYNRKVSDATIYSTRKAKIGKDKKEETYVLGKIKDIYSQNGFDTFIKKYNKDKTQFLMYQKDPLTWENVIEVILRDYPTTKKSEDGKNDVKCNPFEEYRRENGLICKYSKKGKGTPIKSLKYYDKKLGNCIDITPEESRNKVILQSINPWRADVYFNPETLKYELMGLKYSDLSFEKGTGKYHISQEKYDAIKEKEGIGKKSEFKFTLYRNDLILIKDTASGEQEIYRFLSRTMPNVNHYAELKPYDKEKFDGGQELMEVFGKVANGGQCLKSLNKSNISIYKVRTDVLGNKYFVKKEGDKPKLNFKNNKK

SEQ ID NO: 5015 - protein, 1345 aa, unidentified
  REGION 1..1345: note = Description of Unknown: Cas Enzyme sequence
MNQKYSIGLDIGTNSVGWAVVTDDYKVPAKKMKVLGNTDKQSIKKNLLGALLFDSGETAEATRLKRTARRRYTRRRNRLRYLQEIFAEEMMQVDESFFQRLDDSFLVEEDKRGSRYPIFGNIAAEVKYHDDFPTIYHLRKHLVDISQKADLRLVYLALAHMIKFRGHFLIEGQLKAENTNVQALFKDFVEVYDKTVEESHLSEMTVDALSILTEKVSKSRRLENLVECYPTEKKNTLFGNLIALSLGLQPNFKTNFQLSEDAKLQFSKDTYEEDLEGLLGEIGDEYADLFASAKNLYDAILLSGILAVDDNTTKAPLSASMVKRYEEHQKDLKKLKDFIKVNAPAQYDDIFKDETKNGYAGYIENGVKQDEFYKYLKNTLSKIDGSDYFLDKIDREDFLRKQRTFDNGSIPHQIHLQEMHAILRRQGEHYPFLKENQDKIEKILTFRIPYYVGPLARKGSRFAWAEYKADEKITPWNFDDILDKEKSAEKFITRMTLNDLYLPEEKVLPKHSPLYETFTVYNELTKVKYVNEQGEAKFFDTNMKQEIFDHVFKENRKVTKDKLLNYLNKEFEEFRIVNLTGLDKENKAFNASLGTYHDLRKILDKSFLDDKVNEKIIEDIIQTLTLFEDREMIRQRLQKYSDIFTTQQLKKLERRHYTGWGRLSYKLINGIRNKENKKTILDYLIDDGYANRNFMQLINDDALSFKEEIARAQIIGDVDDIANVVHDLPGSPAIKKGILQSVKIVDELVKVMGHNPANIIIEMARENQTTDKGRRNSQQRLKLLQDSLKNLDNPVNIKNVENQQLQNDRLFLYYIQNGKDMYTGETLDINNLSQYDIDHIIPQAFIKDNSLDNRVLTRSDKNRGKSDDVPSIEVVHEMKSFWSKLLSVKLITQRKFDNLTKAERGGLTEEDKAGFIKRQLVETRQITKHVAQILDERFNTEFDGAQRRIRNVKIITLKSNLVSNFRKEFELYKVREINDYHHAHDAYLNAVVGNALLLKYPQLEPEFVYGEYPKYNSYRSRKSATEKFLFYSNILRFFKKEDIQTNEDGEIAWNKEKHIKILRKVLSYPQVNIVKKTEEQTGGFSKESILPKGESDKLIPRKTKNSYWNPKKYGGFDSPVVAYSILVFADVEKGKSKKLRKVQDMVGITIMEKKRFEKHPVDFLEQRGYRNVRLEKIIKLPKYSLFELENKRRRLLASARELQKGNELVIPQRFTTLLYHSYRIEKDYEPEHREYVEKHKDEFKELLEYISVFSRKYVLADNNLTKIEMLFSKNKDAEVSSLAKSFISLLTFTAFGAPAAFNFFGENIDRKRYTSVTECLNATLIHQSITGLYETRIDLSKLGED

SEQ ID NO: 5016 - protein, 1343 aa, unidentified
  REGION 1..1343: note = Description of Unknown: Cas Enzyme sequence
MGKRTAGSYSIGLDIGVTGVGWSVAHSDGTLAKIKGKPAWGVRLFEEGSHAADRRMKRSARRRYVRRRHRLNMMQEMLSADMQKVDADFFRKMKESALWEEDRQIQNGLALLLKNVSVAGEPYHKKFPTIYHLRKYLLETKEQVDFRLVYLALHHTMKYRGNFLYEGQPLSAEGNLEEEVREATNAYLRFMMPSDDRDCTEEAVKTIKSAIADTALGRMDTRTAIRNVLAAQGCEEVSAAEYGKALAGSKFDATELFAFEGVEKIEIALSSEDLESDISSVPDEDAQVVLELMGRAYSASVLDEILGGCKGISRAMVKRYNEHAAQLRDFKDLVCEHAPDSYNEMLRQAGGNLKNYPNYITGENSTRKDSERKKYACSREDFLKSAKQLLISMPEEAHADTRHKRLLSAIDADTFLTKLRTRKNGAIPYQLHSQEMSKIIERQSVYYPALKAGYVDGEHKHRLVQILEFRIPYFVGPLSYNPDALESDRFDWLTRRVQGEKITPWNFNEVIDREQTAEDFITRMTGTCTYLLGEDVLPKHSILYQDFELLNELNKISIDGKPISVDVKKQAFNELFTSRKKVTHKAFADWLINENHHPEDTSIKITGTQKEAEFASSRSALIDMQKIFDGRAEENIGRCEDIILWATLFNEKDILKAKVEREYPEITKPQLKAIQKLRYKGWGRLSQKLLSGLRVQNRFDEKVSIIKIMRDTQMNFMEILNAKEYGFAGLIEQTNEENIGINPTLSPELLDDLVASPAVKRGIWQALLIVKELVQVMGAPPENIFIEMARGEQEKKRTVSRHNRLKELLKAVRSDSDYQDIIAEFDARKDNQKAFDNRALYLYFTQLGKCLYCGKDIHIDRLNRYQVDHIIPQSLTKDDSLENLALVHLECNQVKGDSLTINDDVRHSMDYFWRTLQGKRLIGSKKYNNLTRHEFSEHQIERFIARQLVETRQINKHVVEILHALHPESEVHGIKAGEVSDLRKRLELPKIRELNDTHHAMDAYLTALMGLFIQRRYPKWRSESNHGEYMKFAQNERKSCFGMFVNQFPKSHVNTETGEIIWDGELLEQTLRKLMEEKRYFFSRKTSVRGGAFYDETVYSPRAGIKALIPKKEGLAVERYGGYSREQKAYFVLIQYSEKSKTKVELVFVPVRVAICGKKRVHEYLEKNYQDCILLKDMVKPGQLIYYEGNLLYLVSEGQVANARPLFLPYGLQKDLKEILTADIKEDKDVASDEFNQKAVHICSEIAATIKHFYPIYVEIGERILGDIDGFKELSFADKQRFILELLKVTKTPSSAATFKRKVGDLPSFRNRAINEQKIDWDKAEFLDQSITGIFEQRYQVSE

SEQ ID NO: 5017 - protein, 1362 aa, unidentified
  REGION 1..1362: note = Description of Unknown: Cas Enzyme sequence
MKEVYNIGLDIGTSSVGYAMTDEKGRLLRFHKRPTYGSVLFEEAQTAKERRQKRSARRRLARRRKRIKLLQALVAPDVCAADPEFFLRMNESFLWAEDSKYEKLYAKLPKALFVDGTVSVETLPTIYHIRNELVKSTKQADIRYVYLAMHHIIKYRGHFLMEGQTLSDIGAEAPQKMHELLELLTDPESFACGLAPAENVAKEICHAMENHALRGMARKEQIQKLLYAGKKKESKEAAQSLASLLLGYKGSLKALIGYENQTDAPEKTSLGAIEGETEETYLAGMTEAQAEVFTRILELYRWQLFAEIRQNGQTISDTMVARYEKHGRDLEKLKAWVKAYQPDKFYALFRDDENAKGYAAYTDHLRKPKKFKKEKLQRCTQDEFYKVLKAMLTGNKDAEAAAAAQPMLEAIDEPNGFLPLQRINLNGQIPNQIQAEELAKILDAQGKYYPTLRENREKILSICTFRLPYYVGPLYQDKNSPFQKWIVRDMTQPAYPWNFFDVVNQTATAEGFIANLRNKCTYLPIEDVLPLHSLLYEEYLMLNELNRVRVKGNLIRDVQLKQRMLDELFAKNKSVSYKVFAKWLRQNSPYTDVTENDISGTQEPGKFTASLRTRYDLEKHGFTVNDQTMEQLETLVRWSTIFEDRSILKKLIQEKYPDITDTQLSFLVQRRYTGWGRLSEKLLTGVLGEYENQPATIMEVLRATNENFMQVLNNPQYHFQEEIAKERLMELGEPKEEIEYDEIRKLQVSPALKRGIWTAVRIVKELIEHQGCHPHAIYLENTREETPDEKKQRTQSRLNQVEQMYKELAEDKTAEKVPSECWEVLKNCRDKKKLDDQQYLYLLQLGKSLYSGKPLDFDQLSATTQIDHILPQCYIVDNSIENRALVLSGENQRKADNLLLADSIRDSQRLWWNYLRQKGLMGEKKFKNLTRSVVSEEDKQKFIARQLVETGQMVQCVTELFKRYYPDVHVSGIKAGLSSELREQYGLYKIRELNDMHHAYDAFLAATMGNFVERFMPWLDNESSAAIRVRKAQKANKGDDNKVDLSSKHGMILAKFSQDQEDPDTGEIIHNAQQEICYLKAVWGYHDGHVVFLKRQKSGKITEDSRYRAGNKSAKMPLKKGLPCQRYGGFDSINPAFMTAIQYTQGKKVYHRVVGIPIYANVPTGKADELIRAFAADKIPGVTVVRPRLLMNQMLEWDGGIFVLRGGQTIDILTSKKNAARVTITNGKQLFVSGKDMTTIALLFRGKKDDLNPEQLKETVLHLLEKFKTQYAVFYQKCKADDINRILKSIETPEQLTTADWTAMVSELLNAMGKQRKASKEWITCEDWRIRAIPTKDVELIDQSITGLREKRTKLWPDSEPS

SEQ ID NO: 5018 - protein, 1363 aa, unidentified
  REGION 1..1363: note = Description of Unknown: Cas Enzyme sequence
MKEVYNIGLDIGTSSVGYAMTDEKGRLLRFHKRPTYGSVLFEEAQTAKERRQKRSARRRLARRRKRIKLLQALVAPDVCAADPEFFLRMNESFLWAVDSKYEKFYAKLPKALFVDGTVSVETLPTIYHIRNELVKSTKQADIRYVYLAMHHIIKYRGHFLMEGQTLSDIGAEAPQKMHELLELLTDPESFVCGLAPAENAAKEVCHTMENHSLRGMARKEQIQKLLYAGKKKESKEAAQALASLLLGYKGSLKALIGYESQTDAPEKTSLGAIEGETEETYLAGMTEAQAEVFTRILELYRWQLFAEIRQNGQTISDMMVARYEKHKADLKRLKKWIRTYRKDEYVTLFRDDNDPSGYAAYTHHLTSPARFQQEKFTRCRQEGAKIKSIPEGFYNKCRRILESKKIDLPENARAEANEMLEEMKADNVFLPLQRINLNGQIPNQIQAEELAKILDAQGKYYPTLRENREKILSICTFRLPYYVGPLYQDKNSPFQKWIVRDMTQPAYPWNFFDVVNQTATAEGFIANLTNKCTYLPIEDVLPLHSLLYEEYLMLNELNRVRVKGNLIRDVQLKQRMLDELFAKNKSVSYKTFAKWLQLNSPYVDVTENDISGTQEPGKFTASLRTRYDLEKHGFTVNDQTTEHLETLVRWSTIFEDRSILKKLIQEHYPEITDNQLSFLVQRRYTGWGRLSEKLLTGVLGEYENQPATIMEVLRATNENFMQVLNNPQYHFQEEIAKERLMELGEPKEEIEYDEIRKLQVSPALKRGIWTAVRIVKELIEHQGCHPHAIYLENTREETPDEKKQRTQSRLNQVEQMYKELAEDKTAEKVPSECWEVLKNCKDKKKLDDQQYLYLLQLGKSLYSGKPLDFNQLSATTEIDHILPRCYIVDNSIENRALVLKGENQRKADNLLLADSIRDSQRPCWNYLHQKGFMGEKKFKNLTRSMVSADDKQKFVARQLVETGQMVQCVTELFKRYYPDVHVSGIKAGLSSELREQYGLYKIRELNDMHHAYDAFLAATMGNFVERFMPWLDSESSAAIRFRKAQEAKKGGDEVDLSSKHGMILAKFSRDQEDPDTGEIIRNAQQEICYLKAVWGYHDGHVVFLKRQKSGAIYDETRYRAGSVKAKLCLKKDLGTMKYGGYNKEYPAYIAAISYQRGKKRVGELVNVPIYLAETIEKNPNALLGYLEKDYPGVQIIRSKILMNQRIEYEGSELLLRSCSEMYNARELFIPTYLHHTLWKLYKAPKQLQPGDEEHLNTLISLLIEKMEKQYPIFNGVAKRMSVIDFDTLCFQEKCIFIVETMKVMAVNGQYAMYKTALSRKELSDNQGRITNKVLNLSHITLIDQSITGLREKRTKLWPDSEPS

SEQ ID NO: 5019 - protein, 1353 aa, unidentified
  REGION 1..1353: note = Description of Unknown: Cas Enzyme sequence
MKEVYNIGLDIGTSSVGYAMTDEKGRLLRFHKRPTYGSVLFEEAQTAKERRQKRSARRRLVRRRKRIKLLQALVAPDVCAADPAFFLRMNESFLWAEDSKYEKFYAKLPKALFVDGTVSVETLPTIYHIRNELVKSTKQADIRYVYLAMHHIIKYRGHFLMEGQTLSDIGAEAPQKMQELLELLTDPESFVCGLAPAENAAKEICHAMENHSLRGMARKEQIQKLLYAGKKKESKEAAQALASLLLGYKGSLKALIGYESQTDAPEKTSLGAIEGETEETYLAGMTEAQAEVFALMLELYRWQLFAEIRQNGQTISDTMVARYEKHGRDLEKLKAWVKAYQPDKFYALFRDDENAKGYAAYTDHLRKPKKFKKEKLQRCTQDEFYKVLKAMLTGNKDAEAAAAAQPMLEAIDEPNGFLPLQRINLNGQIPNQIQAEELVKILDAQGKYYPTLRENREKILSICTFRLPYYVGPLYQDKNSPFQKWIVRDMTQPAYPWNFFDVVNQTATAEGFIANLTNKCTYLPIEDVLPLHSLLYEEYLMLNELNRVRVKGNLIRDVQLKQRMLDELFAKNKSVSYKTFAKWLQLNSPYVDVTENDISGTQEPGKFTASLRTRYDLEKHGFTVNDQTTEQLETLVRWSTIFEDRSILKKLIQEKYPDITDTQLNFLVHRRYTGWGRLSEKLLTGVLGEYENQPATIMEVLRATNENFMQLLNNPQYHFQEKIAKERLMELGEPKEEIEYDEIRKLQVSPALKRGIWTAVRIVKELIEHQGCHPHAIYLENTREETPDEKKQRTQSRLNQVEQMYKELAEDKTAEKVPSECWEVLKNCKDKKKLDDQQYLYLLQLGKSLYSGKPLDFDQLSATTEIDHILPRCYIVDNSIENRALVLKGENQRKADNLLLADSIRDSQRPWWNYLRQKGFMGEKKFKNLTRNMVSADDKQKFVARQLVETGQMVQCVTELFKRYYPDVHVSGIKAGLSSELREQYGLYKIRELNDMHHAYDAFLAATMGNFVERFMPWLDNESSAAIRFRKAQEARKDDDDNKVDLSSKHGMILAKFSRDQVDADTGEIIHNAQQEICYLKAVWGYHDGHVVFLKRQKSGAIYDESRYRAGSVKAKLCLKKDLDTMKYGGYNKEYPAYIAAISYQKGKKRVGELVNVPIYLAEAIEQNPKVLVDYLEKDYPGVQIIRPKILMNQRIEYEGSELLLRSCSEMYNARELFIPTYLHHTLWKLYKAPKQLQPDDEEHLNTLISLLIEKMEKQYPIFNGVAKRMSVIDFDTLCFQEKCIFIVETMKVMAVNGQYAMYKTALSRKELSDNQGRITNKVLNLSHITLIDQSITGLREKRTKLWPDSEPS

SEQ ID NO: 5020 - protein, 1364 aa, unidentified
  REGION 1..1364: note = Description of Unknown: Cas Enzyme sequence
MKEVYNIGLDIGTSSVGYAMTDEKGRLLRFHKRPTYGSVLFEEAQTAKERRQKRSARRRLARRRKRIKLLQALVAPDVCAADPAFFLRMNESFLWAEDSKYEKFYAKLPKALFVDGTVSVETLPTIYHIRNELVKSTKQADIRYVYLAMHHIIKYRGHFLMEGQTLSDIGAEAPQKMQELLELLTDPESFVCGLAPAENAAKEVCHTMENHSLRGLARREQIQKLLYAGKKKESKEAAQALASLLLGYKGSLKALIGYENQTDAPEKNSLGAIEGETEETYLAGMTEAQAEVFTRILELYRWQLFAEIRQNGQTISDMMVARYEKHKADLKRLKKWIRTYRKDEYVTLFRDDNDPSGYAAYTHHLTSPARFQQEKFTRCRQEGAKIKSIPEGFYNKCRRILESKKIDLPENARAEANEMLEEMKADNVFLPLQRINLNGQIPNQIQAEELAKILDAQGKYYPTLRENREKILSICMFRLPYYVGPLYQDKNSPFQKWIVRDMTQPAYPWNFFDVVNQTATAEGFIANLTNKCTYLPIEDVLPLHSLLYEEYLMLNELNRVRVKGNLIRDVQLKKRMMDELFAKNKSVSYKVFAKWLRQNSPYTDVTENDISGTQEPNKFTASLRTRYDLEKHGFTVNDQTAEQLETLVRWSTIFEDRSILKKLIQEKYPDVTDTQLSFLVQRRYTGWGRLSEKLLTGVLGEYENQPATIMEVLRATNENFMQVLNNPQYHFQEKIAKERLMELGEPKEEIEYDEIRKLQVSPALKRGIWTAVRIVKELIEHQGCHPHAIYLENTREETPDEKKQRTQSRLNQVEQMYKELAEDKAAEKVPSECWEVLKNCRDKKKLDDQQYLYLLQLGKSLYSGKPLDFDQLSATTEIDHILPRCYIVDNSIENRALVLKGENQRKADNLLLADSIRDSQRPWWNYLRQKGFMGEKKFKNLTRSMVSADDKQKFVARQLVETGQMVQCVTELFKRYYPDVHVSGIKAGLSSELREQYGLYKIRELNDMHHAYDAFLAATMGNFVERFMPWLDNESSAAIRFRKAQGAKKDDDKVDLSSKHGMILAKFSRDQEDADTGEIIHNAQQEICYLKAVWGYHDGHVVFLKRQKSGKITEASRYRAGHASAKLPLKKGMSCQRYGGFDSIKPAYIAAISYQKGKQRAGALVNVPIYLAEAIEKNPKVLVDYLEKDYPGVQIIRPKILIRQKIEYEGNELTLGSCTETYNAKELFLPTFLHPILAKIYNASCVLTDADENQLNTLIDVLLEKLSSQYPIYSGALKALEAKKSEILSLSIADKGKFIAETMKITSAGKEYAKYSTSLPKLGIADKGRLNNKLPHPEKIILIDQSITGLREKRTKLWPDSEPS

SEQ ID NO: 5021 - protein, 1361 aa, unidentified
  REGION 1..1361: note = Description of Unknown: Cas Enzyme sequence
MKEVYNIGLDIGTSSVGYAMTDEKGRLLRFHKRPTYGSVLFEEAQTAKERRQKRSARRRLARRRKRIKLLQALVAPDVCAADPAFFLRMNESFLWAEDSKYEKFYAKLPKALFVDGTVSVETLPTIYHIRNELVKSTKQADIRYVYLAMHHIIKYRGHFLMEGQTLSDIGAEAPQKMQELLELLTDPESFVCGLAAAENAAKEICHTMENHSLRGMARKEQIQKLLYAGKKKESKEAAQALASLLLGYKGSLKALIGYESQTDAPEKTSLGAIEGETEETYLAGMTEAQAEVFALMLELYRWQLFAEIRQNGQTISDTMVARYEKHGRDLEKLKAWVKAYQPDKFYALFRDDENAKGYAAYTDHLRKPKKFKKEKLQRCTQDEFYKVLKAMLTGNKDAEAAAAAQPMLEAIDEPNGFLPLQRINLNGQIPNQIQAEELVKILDAQGKYYPTLRENREKILSICTFRLPYYVGPLYQDKNSPFQKWIVRDKTQPAYPWNFFDVVNQTKTAEGFIANLTNKCTYLPIEDVLPLHSLLYEEYLMLNELNRVRVKGNLIRDVQLKKRMMDELFAKNKSVSYKVFAKWLRQNSPYADVTENDISGTQEPGKFTASLRTRYDLEKHGFTVNDQTMERLETLVRWSTIFEDRSILKKLIQEQYPEVTDNQLSFLVQRRYTGWGRLSEKLLTGLLGEYENQPATIMDVLRATNENFMQVLNNPQYHFQEKIAKERLMELGEPKEKIEYDEIRKLQVSPALKRGIWTAVRIVKELIEHQGCHPHAIYLENTREETPDEKKQRTQSRLNQVEQMYKELAEDKTAEKVPSECWEVLKNCKDKKKLDDQQYLYLLQLGKSLYSGKPLDFDQLSATTEIDHILPQCYIVDNSIENRALVLSGENQRKADNLLLADSIRDSQRPWWNYLRQKGFMGEKKFKNLTRSMVSADDKQKFVARQLVETGQMVQCVTELFKRYYPDVHVSGIKAGLSSELREQYGLYKIRELNDMHHAYDAFLAATMGNFVERFIPWLDNESSAAIRFRKAQGAKKDDDKVDLSSKHGMILARFSRDQVDADTGEIIHNAQQEICYLKAVWGYHDGHVVFLKRQKSGAIYDETRYRAGSVKAKFALKKALGTERYGGFNSINPAFMTAIQYTQGKKVYHRVVGIPIYANVPTGKADELIRAFAADKIPGVTVVRPRLLMNQMLEWDGGVFVLRGGQTIDILTGKENAARVTISNGKQLFVSGKDMTTIALLFRGEENGLNPEQLKETVLHLLEKFKTQYAVFYQKCKADDINRILKNLETPEQLTTADWTAMVSELLNAMGKQRKASKEWITCEDWRIRGIPTKDVDLIDQSITGLREKRTKLWPDSEPS

SEQ ID NO: 5022 - protein, 1330 aa, unidentified
  REGION 1..1330: note = Description of Unknown: Cas Enzyme sequence
MEKEYTIGLDIGTNSVGWAVLTEDYRLVARKMSIQGDSNKKKVKKNFWGSRLFDEGQTAEFRRSKRTNRRRIARRRQRILALQGIFAEEVHKIDPHFFARLEESNRVEEDKRFAKFPIFSTLTEEKNYHQQYPTIYHLRYHLANSKEQADVRLVYLAIAHCLKYRGHFLFEGELDTENTSVNENYQRFLQVYQQFFTEPIGDLGGAVPILTEQLSKAKRVEKVIAHYPNEKSTGTFSQFLKLMVGNQANFKKTFDLEEEMKLDFTRDSFEEDLNELLEKTSDDYADLFLNAKGVYDAILLSKILSKSQDETKAKLSANMKERFEEHQRELKKLKELVRRRFPKKYDDFFKNRSKNGYAGYIEGKATQEDFYKFLRKELAGLDETQPIIAKIDQETYLLKQRTFANGVIPHQIHLAEMREIMDRQKRFYPFLKETQGKIEKLLTFRIPYYVGPLAQEGQSPFAWIKRKNLSQITPWNFEEVVDKENSAIAFIERMTNQDTYLPKEKVLPKQSLIYQKFMIFNELTKVSYTDERGIQHYFSSEQKCKIFDELFKKHPRVTEKQLKKFLELNEQIDTTEIKGIETSFNASYSTYHDLVKLPGQMDQLLEDPDMTSMFEEIIKILTIFEDREMIRVQLKPYETVLGLPAIKKLAKKHYTGWGRLSEKMIQGIREKQSQKTILDYLIDDDDFPRNRNRNFMQLINDDHLSFKETIANELIMSDSTALLDQVKAIPGSPAIKKGIWQSIKIVEEIVKITGKSPKNIVIEMARENRNTSRSSPRLKSLEEALKNIDSPLLKDYPTDNQALQKDRLYLYYLQNGKDMYTGEPLEIHRLSEYDIDHIIPRSFIVDNSLDNKVLVSSKVNRGKLDNAPDPLVVKRMRPHWEKLQQAKLISDKKLANLTKENLTDADKARFIQRQLVETRQITKHVANILHQHFAMPDEERASGKTRIITLKSTLTSQFRQMFDIHKVREINHHHHAHDAYLNGVVAMTLLKKYPKLAPEFVYGSYIKGDINQINKATAKKEFYSNIMKFFESEEIICDEQGEVIWNKKRDLSTIKKTIGAHQVNIVKKVEKQKGGFYKETINSKANPGKLIPRKSALDPFKYGGYGSPLVAYTVLFTYEKGKQKKVAKGIEGITVMEQARFEQDPREFLKTKGYEGVKQWLILPKYTLFEAKGGYRRMIASHQETQKGNSLILPEHLVTLLYHANHYDEINHKVSFDYVNAHREGFSEIFNCISDFESRYILAPQHLEKIKVAYDKNKEADTKEMIVAILSLLKFTSFGASIEFKFFDIKILKRYQSLTDIWDATLIYQSVTGLYERRVEVSKLWDGEQS

SEQ ID NO: 5023 - protein, 1469 aa, unidentified
  REGION 1..1469: note = Description of Unknown: Cas Enzyme sequence
WAVIDNNFNLVQGKKRIIAIDENGKTKTRKSRTNLWGARVFDEGQTAEVRRLQRGTRRRLARRTERLKLLREIFASEINKFDESFFIRLAESFYQNEDTKNKGVITEYPLFHGTLGSGETFAHDKAYHEKYPTIYHLRKDLLENPAQKDLRLVYLALHHILKYRGHFVNAGQTFDLAHGSIDIKKSFTDLYNAFIMHLNEQMTDEIQEPQSILPAAQQEAVQTILADRKKSKSWKAYELAEYLGLSNSGVQKQQKALFNAVVGNGIDLAKIFANKAYSNKTDAAIFPKAGDFKYSNDKYEEYITNISAVLTEEEMAIIEQGKVVYESIILSQILTQPTLAASMVEKYELHKQQLTDLKTLTKSIDDALYAQFFKADGVYTKYIDGVGNPRKKLTQEDFYKELKKLLESAIPQLVFPKKEGASFNFDDVTLNEQQKATLIALDEAMQLDNYLLKQRTSANGAIPYQIHEHELVKIIENQKMYYPFLGEELQITREDDAAGTIQKTEYKIQILMKFRIPYYVGPLAKYVGWKRDDTDSLIETEGYSTNSWVVRNSTEKLTPWNFDEVINKEASAENFIARMTGFCTYLPTKKVLPKNSLLYQEYTIYNELMSCGYYNKGKKEYFPPELKADIVKKLFQQQKKVAAKDMMKFLANEHGIQLTDEKALFGIDRHVKSPSYNSSFSTYIDLVHCGISARQIAENREKFEQIITWQTVLEDKAMLKKRIKQTNADVWHNLLTPEQVNKLANKHYTGWGRLSKELLDGIKTSEGLTIIDHLKKRPYRNFMRLLEDPKIAETIAKAQGDLGKQQTFNYELVEKLAGSPKIKKSIWQTLQIITELERYLGVENIDRIVIEMARDNSGGRTKTRQQQIEKFQKEFFANTKEVFEKLADEDIKKAKRGFEKVHAEFKDQTKEAFNDEKCYLYFLQNGKCMYSGQELSLESLSTYEVDHIIPQTYIKDDSIDNKVLVLKSENQNKGGDVPSQTIVNRMRPYWELLAKNHQVSPKKLANLTRGTLSDETKEGFIKRQLVETRQITKHLANILNEYFKDKQVDILTPRAQLVSQFRDGIVYLPAGEQGDMITNETKLEVLPAESDKFVKVRLHDKWHKNRELNDYHHAHDAYLVAIVGTYLYAVRPDLRGIWVYNTYKKDEYAKMGHYVGQRKEAYRQLLSGMVSPQWSNINLNTGEVSPCYPDVNNWSRDDVLRKIQKTLQLRNINIVKKTEMQDGKFGKEEVWQKTKNKKEATKIISLKKKNNPNLYGGRKSEESAFAVIVKNKKGEIANISVSAMQVRKYLKSTNKLSYLQQEVDKTITAIVRPQMTKYTKYILPDGAVRLMASYQEASNGLQLPMMKMPTNIKDDTITEAQEQQLMQTYKTLVQFIAKNKLFPAEKNKRLADDGLITDNFKLSTTEVKQKILNELFKTCKGSPRNLEALAAAGLGTKDIRMNTKRDLMQADTVVMDQSVTGLYETRRKL

SEQ ID NO: 5024 - protein, 1501 aa, unidentified
  REGION 1..1501: note = Description of Unknown: Cas Enzyme sequence
VKIERSTFMTETLDTKQEKKGKKGGLTIGLDIGTASVGWAVIDNQFNLVQGKKRIIDIDEDGVRKTRKSRTNLWGARTFDEGQTAEDRRLQRGTRRRLARRNERLKLLRGMFAAEINKFDESFFIRLAESFYQNEDEENKHVITDYPLFHGTLGSGETFANDKAYHKKYPTIYHLRKDLIYNPAQKDLRLVYLALHHILKYRGHFVNDGQTFDLEHGSIDIKKSFTDLYRAFNVYVNEPMTDSGEKLTRTLNRAQEEAVQTILADRKKSKSLKAYELAEALITSDNKLQKQQKALYMAIVGNGIDLAKIFANENYSNKVDEAIFPKAADFKYSNDKYDEHIANISAVLNEEEMAIIEYGKQVHESIILSQILTQPTLAASMVEKYELHKQQLGDLKTLTKSIDHALYEQVFKVGGVYTKYVDGVGNPSKKLTQEDFYNALKKLLEGAIPQLVFPKKEATTFNFDGVILNEQQKETLIAIDEAMQLERYLPKQRTNANGAIPYQIHEYELVKIIENQKVYYPFLGDALQITREDDAAGTVKKKEYKIQILMKFRIPYYVGPLAQSVGWVRDDDGELIETKGHSSNSWVVRNSTEKLTPWNFDEVINKEASAENFIARMTGFCTYLPTEKVLPKNSLLYQEFTIYNELMSCGYYHNSKKVYFSPELKADIVTKLFQQQKKVSAKDMVKFLINEHQIQLTDEKSLFGIDKHVKSPSYNTSFSTYIDLVRCGISVTQIAENREKFEQIITWQTVLEDKAMLKKRIKQTNADVWHNFLTPVQINKLANKHYTGWGRLSKKILDGIKTSDADGLTIINHLKNRPYSNFMRLLEDPKIAETIAKAQGDLGKQQTFNYELVEKLAGSPKIKKSIWQTLQIITELERYLGVENIDRIVIEMARENTGRRTKTRQQQIEKFQKEFFTNTGKKLDEQIKTAFVNETKEAFNDEKCYLYFLQNGKCMYSGQKLSLESLSTYEVDHIIPQTYIKDDSIDNKVLVLKAENQNKGGDVPSQTIVNRMRPYWELLAKNHQVSKKKLANLTRGKLSDETKAGFINRQLVETRQITKHIAHILSEYFKDKQVDILTPKAQLVSQFREGIVYLPAGEQSDVTTRTTNVEVLPAESDKFVKVRLHDKWHKNRELNDYHHAHDAYLVAIVGTYLYAVRPDLRGIWVYNTYKKDEYAMMGRYVGARKEAYRQLLSGMVAPQWSNIDLNTGEVSPCYPDVDNWSRDDVLQKITQTLQLRNINIVKKTEMQDGKFGDVSLFKSPHNIKDKKKAQQNNFAHGLKCRLDPIRYGGTKGAISAFAVLIKNKKGSITSVSVPAMQAHAYLKEKNKLSFLQQHVDENIIAIVRAQVTKYTKYVLPEGSMRLMASFQEASNGRQLPMMAVPANIKEDTITEAQGHHLLQTYETLVQFIRQNKLFVEAKLSLLNHDGVITENFKKSAPEQQQKILAELFRVVKGSNQNLKALQVAGLGTTAQQLNGAKDRMCAQTQIIDQSVTGLYETRRKL

SEQ ID NO: 5025 - protein, 1368 aa, unidentified
  REGION 1..1368: note = Description of Unknown: Cas Enzyme sequence
MQKSYSLGLDIGTNSVGWAVITDDYKVPAKKMKVLGNTDRQTVKKNMIGTLLFDSGETAEARRLKRTARRRYTRRINRIKYLQSIFDDEMSKIDSAFFQRIKDSFLVPDDKNDDRHPIFGNIKDEVDYHKNYPTIYHLRKKLADSDEKADLRLIYLALAHIIKFRGHFLIEGDLDSQNTDVNALFLKLVDTYNLMFEDDKIDTQTIDATVILTEKMSKSRRLENLIAKIPNQKKNTLFGNLISLSLGLTPNFKANFELSEDAKLQISKESFEEDLDNLLAQIGDQYADLFIAAKNLSDAILLSDILTVKGVNTKAPLSASMVQRFNEHQDDLKLLKKLVKVQLPEKYKEIFDIKDKNGYAGYINGKTSQEDFYKYIKPILSKLKGAESLISKLEREDFLRKQRTFDNGSIPHQIHLNELKSIIRRQEKYYPFLKDKQVRIEKIFTFRIPYFVGPLANGNSSFAWVKRRSNESITPWNFEEVVEQEASAKVFIERMTNFDTYLPEEKVLPKHSLLYEMFTVYNELTKVKYQAEGMRKPEFLSSEEKIEIVSNLFKTERKVTVKQLKENYFNKIRCLDSITISGVEDKFNASLGTYHDLLNIIKNQKILDDEQNQDSLEDIVLTLTLFEDEKMIAKRLSKYESIFDPSILKKLKKRHYTGWGRLSQKLINGIRDKQTGKTILDFLIEDGQANRNFMQLINDPSLDFASIIKEAQEKTIKSEKLEETIANLAGSPAIKKGILQSVKIVDEVVKVMGYEPSNIVIEMARENQSTQRGINNSRERLRKLEEVHKNIGSKILKEHEISNAQLQSDRVYLYLLQDGKDMYTGKDLDFDRLSQYDIDHIIPQSFIKDNSIDNIVLTSQESNRGKSDNVPYIAIVNKMKSYWQHQLKSGAISQRKFDNLTKAERGGLSEYDKAGFIKRQLVETRQITKHVAQILNNRFNNNVDDSSKNKRPVKIITLKSKMVSDFRKEFGFYKIREVNDYHHAHDAYLNAVVGTALLKKYPKLEAEFVYGDYKHYDLASLVVKSDTSLGKATAKMFFYSNIMNFFKKEVRLADGTVITRPQIETNTETGEIVWDKVKDIKTIRKVLSIPQINVVKKTEVQTGGFSKESILSKRDSDKLIPRKNNWDPKKYGGFGSPIIAYSVLVVAKVTKGKSQKTKSVKELVGITIMEQNEFEKDRITFLEKKGYQDIQESLIIKLPKFSLFELENGRKRLLASAKELQKGNELSLPNKYIQFLYLASRYTSFSGKEEDREKHRHFVESHLHYFDEIKDIIADFSRRYILADANLEKILTLYNEKNQFSIEEQATNMLNLFTFTGLGAPATLKFFNVDIDRKRYTSSTEILNSTLIRQSITGLYETRIDLSKIGGD

SEQ ID NO: 5026 - protein, 969 aa, unidentified
  REGION 1..969: note = Description of Unknown: Cas Enzyme sequence
YSGMCSKPIMKRCNREEFCKYCLNKLGDKFESDPEYATMCSRLKDCSFMPKQRTSDNSIIPYNIHLQELRRIISNVSRWYPFLSETNDDGFSISEKIEMIQCFRVPYFVGPLNPHSPYAWAIRSTNEKVLPWNIEKVMNYDASADVFITRMTNFCSYLVGEKVLPKNSILYSYFMLYNELNNLKIDGNTISVSLKRRIVKDLFEESDKKVTKKRLLTYLKTIGEIDNIESHEIKGIDEDVKSSLKPVHLLRSIIGDKINNRKMAESIIRTITVFEEPKRIEYILSRDYEKDLLPAEIKKLSKLTFSGWGRLSEKFLTGLFDTCRETGTTTNIMGMLESTQDNLMEIIHKYSFLKQANDLNMQNASAGGIEYMDLEKMSLPPAVKHGVWRSISVVRDLIDCIGHDPKKVFVETTRENLDPKKKIRTESRKLKLDALYKKCNEDAEWIASLSTQTDESLKSRRLFLYYTQLGKCMYCGRKIDIAELGNTDSVDLDHIYPQSKVVDDSIHNNMVLSCKKCNGDKSNAYPISLEVQHKMRKTWDQLRSKDYITAEKYSRLIRTDSFSDDELNRFINRQVVETSQAVKGTITILKRLMPDSDIVYVKAGMVSDFRHEMGFIKCREINDYHHAKDAYLNIVVGNVYDVKFTKDVAHFIHTKEQYNLKRMFEHPVSRNGTDAWIPGDNGSEKTVKKYMRRDNILFVRSPFIQKGELFDAQLMKKSDTLYPKKKGLSASEYGGYNKLTGACYSLVEYERKKKIVRSLEVVPVMDVKLLSDPSVLSAYFSERLSSDVKVIIPLIRMNSLIEWEGYPLHIGGRSGDTIVYVNALQLLVPDEVYEYSKILSKYSKDQKERTYHSASYYKITKEKNVSMFNYFVDKTFNLPYSKWFTALNSNLCKCKERFETSDELTQAAVLIEIIHSFQCKPIYTDLKKIGGVGLTGRIQIGKVLPSGVDISLVNQSPSGLKTNKMRLSL

SEQ ID NO: 5027 - protein, 1344 aa, unidentified
  REGION 1..1344: note = Description of Unknown: Cas Enzyme sequence
MSNRKDYIIGLDIGTNSVGWAVLSEDYKLLKKRIKIQGDSDKPYVKKNLWGVRLFDGGQTAADRRLKRTTRRRLARRKNRLKYLQCIFDAEMQKVDDSFFIRLEDSFLVPEDKRGNRHPVFATLEEEKAFHEEFPTIYHLRKHLADSREKADLRLIYLALAHIIKFRGHFLIEGKLETENTSIAKTFKSFYDTYLQLFASEANQSVSVDELADNTLESLFTAKVSPSQKADSVLNLFPNEKSNGALAQFVKMMVGNQGNFKGTFSLEEDAKIQFSKEDLEVDLESLYELIGEEFQDLFNKALATYNAVQLSGILTAKDTATRAPLSASMIERYSDHEEDLRKFKAFIKQHLPEAYFDMFKNESGKSDGYAGYIRKGVTQEDFYKYVKKVITGINGAEYFLDKIDQGEFLRKQRTFDNGVIPHQIHLEELKAILQKQAPYYEFLGVNQDKICSLLTFRIPYYVGPLAKKAGGFSWIVRTKEEHIRPWNFTDSVDSEKSAVEFIEKMTNIDEYLPTEKVLPKHSLLYEKFAVFNELTKTRYSDDTGREHLLSSDEKSRIFDSLFKTNRKVSKKDVENLLHNEFNIETPKVLTVEDKFNSSFGTYQDLIKVGIPNTVLDDPKNKDTLEKIVQILTVFEDRKMIRKQLEQFENLIDGKILKKLERRHYTGWGRLSRKMIDGIKDKDTGKTILDYLESDDGVHKNINRNFMQLINDDTLSFKLIISEAQKNKESTDIVQTVRDLPGSPAIKKGIVQSLKIVEELVGVMGYDPKTIVVEMARENQSTGQGKKRSQPRYKRLEEAIQKLGSQVLKEYPTDNKSLQDDRLFLYYLQNGKDMYDPNKNLDISQLYNYDIDHIIPQSFTTDNSIDNRVLVSSSTNRAKSNGVPSTDIVKRAEPYWRSLLSSGLMSKRKFENLTKGTHGGLSDEDRAKFIKRQLVETRQITKHVARLIDNRFNTEKDEKGRTIRHVQVVTLKSALVSQFRKTFEIYKIRELNDHHHAHDAYLNGVVANALLKVYPNLAPEFVYGDYRKFNSFKENKATAKKQFYTNIIKFFAETTVVDESTGEILWSSDALSIVKKVIGYHQVNVVKKTEKQKGSFYNITVNPHSNSKALVRIKRNLDTSKYGGYKGVFSSYFLVIKSTEAKSKKTVAELVNIPIIDREDFELNGIDYLSKRGFKNPTIIKEIPNNTLFRFSNGRKQLITGESEINKANQLVLPSKLVKLLFHAKEYCKDNRKLKSLEYLENQQNEFSELFAFIKKFASDFITTEKKMNHIEETFHSNIGAPLKITAQSFINLLNLTCTGAPSTIEFFDTKIERIRYRNTKVLLKAEIIDQSITGLYETRTKVDG

SEQ ID NO: 5028 - protein, 1400 aa, unidentified
  REGION 1..1400: note = Description of Unknown: Cas Enzyme sequence
MNLRGAEGYSIGLDLGTNSVGWAVVGPDGRILHVKGKPAWGARIFSGADSAANRRMNRSQRRRYARRRQRIDALQSLFAGEMDKVDSEFFIRMNASYLRPDDPDSHRTAHEPNPLFNGSDFTEHDYYERFPTIWHLRKYLMEAEGKEDIRLVYLALHNIVKYRGNFLYQDQPSLNAKNADMSLACKRLSEALTNRAEQLGLAGIAADPAEIEATFQKGAHAREISDQLGKQVIKTPGVPKMAAAIGKACAGYVANFVEALGLEKDEVGDANKFSLADEEKVNDFDCPDDAVELFEALRAVHSSYVLQELLSYAPGQTISNQFIKQYEAHRDDLKALKQLVRKYCPDRYAEFFRGPKFSDGAYDFNRVATPSYTAYILGEKLCNKKGCNHDSLVKAIRKMLDPEKVVGLTSDPVFLEIKDRLFAEDSDFLKKQKVRDNGAIPYQLHLEEMDAIIKNQGRFYPFLIEHRDEMERIVSSRIPYYVGPLGINPDQGAPFDTNPVDPTRKFAWSRRQPGKEHVRAYPWNIDEVIDKDATAELFIRRMTGTCTYLYGESVLPSHSLLYEEFCVLNELNGARWRMAGSDWERFDQKDREGIINDLFRQRATVPYRAISDWMRRKHGHEGVEVRGGQKEEGFASSLDSYRFFKGVLGVDDLDESLYPMIEDLVLWCTLFEDRDILRRKVEQRYGNRLSEKQIDKICKKRFTGWGRLSRKLLVELKVDDPQWGTISIMDVLRYGNPYNHGRTVIFQEVIRDRDLGFKDAVERENEGKSKDMKLDDLPGSPMLRRPINQALRIVDELVGIAGHAPARICIEETRDDDLEKRNSRTTTRERALRDAYKKLLEEVEGEQLRAAKEDDKQLKVDLDEYKGKLDSERVMLYFAQRGKSLYSGKTLDIRKLSSYEVDHILPRSYIKDDSLENKALVLHDENQLKSDDLLLDESIRRKMAKTWEALHAAGLMGDKKYRNLMRDHISDKAMEGFINRQLVETSQVVKFTRLLLAQRFPDTQIATVRANTSHGIRENANFPKCRIANNYHHAQDAYLACQASRFVNICYPDWENGINLSYVRRQFHKLAEERVGSNKLPGRSGFIADMFMRQQPDEETGELIWDGPAEIAAMRKELYCKQCFVTRMPEIRSGAFWNETIYSPRDAKKGENLEISLKKGLDPHIYGGPSGKDYAYFCAFVARNKKGKDEYYLAGVPLYLADSVADSKEGAMGFARSVVKPGSSDIRIIRARVPFIQKFELDGDELYIGGYKQVMPAREPSFSFEDYSTLCKVDDWLRDGKISGSELRLSDDDLTRIYDVLAEKIKKNCSRLYSLLKLKELRPSFAVATIEDRCSIISTLMQMGTGKITMADLEPIGGNKHSGYIQLTYTKNLGEMTFIDTSVTGIFERRQSVKDILHGL

SEQ ID NO: 5029 - protein, 1389 aa, unidentified
  REGION 1..1389: note = Description of Unknown: Cas Enzyme sequence
MNLRNAGEYNIGLDIGTGSVGWSVTDQDGNLLHFRGKPTWGSRIFPSAEPASEARTHRGQRRRYARRRWRLDLLESLFQSEVSEVDPDFFTRLRQTHLLKEDRDPQFANYAGMIFPQAEFSEKDYFKKFPTVYHLRQWLMEADEKADIRLVYLALHNIVKHRGNFLQQENEGLTSQNSSVKNSVNRFFCELQDYCDTLDISCDAQNVVDDVVAILEDTTSPKSGLQEKVSSRLGIGEGGLLDKQAAKRLSKALAAAIVGLKADMAHVFFVGEQAPEGAATNIYLSSDEQVEAFEMVLPDEGRALFEAMKATYSSYVLQEILSSKPGEGISANKVEDYNRYGEDLRLLKSLAKQYAPERYDEFFRGAFCTPTPLHPQKHVYDKYGKEQIKGYTRYNEIRKTKYEDFKKEVEALFKGTAAVEDPRYLAMMERFGSERFLRRLKTSDNGAIPFQLHLEEMQAIIDNQAEYYPFLEQERAKLESLVSFRIPYYVGPLTKKNARMTAGGKLRFAWVERQEGKEDEQIYPWNWEEIVDKDRSATAFIQRMTSTCTYLHGEPVLPKCSLIYEEYCVLNELNGAKLTQDGDREHRLDYKDRTEAVEQLFRRGRVTYKKMEEWLRRRGVSNPHVFGGQGEAAFESKMSSYIFFAKDIFNVDEIPESDYPMIEEIILWSTLFEDRSIFREKLKRNYGDRLTDEQIKKIVRKRFAGWGKLSKKLLCEMKAETDCGPRSIMDVLREGNPNRDKPSRAMVLMEILRDDNLGFEKLIDTRNRERMSDVGMSLEELPGSPALRRSVNQALSIVDEIAGIAGHAPANIFIEVTRDEDLRKKGTRTKRRYDGLKEKLATLKQETPEWWSSNVSCELADCAKANADLSEKLTLYFMQGGKSLYSGKPLEIERLSEYQVDHIIPQTYIKDDSFENKALVLSSENQSKSDQLLLSDEVRRKMRPYWGALHDAKLIGDKKYRNLLRDSISEQQMKGFIARQLVETSQILKVVQNSLRETYPDTNVMPVRAALSSELRHEIGLVKCREANDFHHAHDALLASEMGRFILKRHAAMYENPIGYTHVVRNFVRAESSQAKRGKMPGTASFVVASFIRSGFNEETGELFQDDWSAEREISRLKRYFNYRQCFISRLPEETSGAFWDATVYSPRDAGKKMTLPLKRGLDAEKYGSYSGEQFAYFFIYKAEKKGKDVLEFAPVPVSAAARLEGKNSGLEEYAASLCEAKGILFKKVVRRKILKYQLVEVEGSLLYITGADELRNANQVSLRAEELSACNKLFKGEEIEPREVLELYQGVIRSMRKYSTRLWDNLKVDSWMNEFELLEYDQQCKVIQSLLEVVNAKKNKVDLSLVGRAKTAGQLKIVFAKVLNRGGGITFIDQSVTGMFERRTHIGL

SEQ ID NO: 5030 - protein, 1390 aa, unidentified
  REGION 1..1390: note = Description of Unknown: Cas Enzyme sequence
MNLRNAGEYNIGLDIGTGSVGWSVTDEDGNLLYFKGKPTWGSRIFPSAEPASEARVHRGQRRRYARRRWRLDLLESLFQPEVSKVDPDFFTRLRQTHLLKEDRAPEFASYAGMIFPQAEFSEKDYFKKFPTIYHLRQWLMETDEKADIRLAYLALHNIVKHRGNFLQQENEGLTSHNSSIKNSVDRFCYELQGCCDALDVPCDTQNAVNDVAAVLEGTVSSKSSLQEKISSKLGIGEGGLLDKQAAKRMSKALAAAIVGLKADMAHIFFVGAEVPEGVATGIYLSNDEQVEAFEAVLPDEGRALFEAMQAVYSSYVLQEILSSKPGEGISANKVEDYNRYGEDLRLLKSLVKQYAPSKYDEFFRGAFCSPTPRHPQKYVYDKYGKDQIKGYTRYNEVRKMKYGDFKKEVESLFKGTAAMDDPRYLAMMERFGSERFLRRLKTSDNGAIPFQLHREEMRAIIDNQAKYYPFLQQERKKLESLVSFRIPYYVGPLTTKNARMTADGKLRFAWVERQEGREGERVYPWNWEEVVDKDRSAAAFIQRMTSTCTYLYGEPVLPKCSLLYEEYCVLNELNGAKLTQDGDREHRLDCKDRIEAVEQLFRHGRVTYKKMEEWLRKRGVSNPHVFGGQGETGFESKMSSYIFFAKDVFNVDEIPEFDYPMIEEIIFWSTLFEDRGIFREKLKRNYGDRLTDEQIRKIVHKRFAGWGKLSKKLLCEVKAETDCGPRSIMDVLREGNPNSDKPSRAMVLMEVLHDDNLGFEKLIDARNRERMSDMGMSLEELPGSPALRRSVNQALSIVDEIAGIAGHAPANIFIEVTRDEDPRKKGSRTKRRYDDLKEKLATLKQEAPEWWSSNVSRELADRAKANADLSEKLTLYFMQGGKSLYSGKPLEIERLSEYQVDHIIPQTYIKDDSFENKALVLSSENQSKSDQLLLSDEVRRKMRPYWNALHDAGLIGDKKYRNLLRENVSEQQMKGFIARQLVETSQILKVVQSFLGETYPNTRVMPVKAALSLELRHEIGLVKCREANDFHHAHDALLTSEMGRFILKRHAAMYENPIGYTHVVRSFVRAESGQAKRGKMPGSASFVVASFMRSGFDEETGELFRDDWSAEWEISRLKRYFNYRQCFISRMPEETSGTFWDATVYSPRDAGKNMTLPLKKGLDAEKYGSYSSERFAYFFIYKAKKKDKEVIEFAPVPVHVASVVGRKQEALIEFAKELSSSSELEFEELVRAKIYKYQLVEFDDSRMYLTGAKAVKNATQFAFSSEEMMALKEINESDGLVNENILEEIFHSIVRSLEQYSPKLMGLLGVAEWADDFTSVSYDDKVNLIKGLIAIGNGKTDRVDLRSVGRGKCAGNMQPAFSSLLTKGSGITFIDQSVTGMFERRTHIGL

SEQ ID NO: 5031 - protein, 1375 aa, unidentified
  REGION 1..1375: note = Description of Unknown: Cas Enzyme sequence
MNLRNVARDGIDYNIGLDIGTASVGWAVTDADGNLLHFKKKPTWGSRLFPQAMPASEARVHRGQRRRYDRRRQRLNLLQELFCDEMESVDSEFFIRLRQARLLPEDRDEEHRDYRWPLFNGADFTEKDYYEKFPTIYHLRTWLMEADEKADIRLIYLAFHNIVKTRGNFLHQENPGLSAKNANMEASVDRLCDALKAWCDEQEIDCDPKSEQLRKVLENNALHRAEKREQAMPFLGLGTEGKQRAKEIAGAVLGYKADFGKVFGIEAENAKFDFDNDEAVETFYSECPDEGVELYEALQAAYSAHVLAGILKGANGQTISYCKVGEYERYGADLKLLKQLVREYAPAEYDKFFRGEHYNDPRWAKDYDPSKVKGYTLYNLGTSKLNYEAFAKETKNLFSGTKAEDDLRYQQMMDSFEEGTFLRRLKTSDNGSIPYQLHLEEMQAIIRNQGKHYPFLLEEQEKLESLVTFRIPYYVGPLTTKNARRKGDQADGELRFAWSERIAGQEATPIRPWNWEEVIDKDKSAENFIRRMTGTCTYLQGEPVLPRCSLIYEKFCVLNELNGSRWTQDGDDEHRFSAEDRLDIFEELFKHGSVTYKKVEDWLVRNNRLNPHVRGGQGETKFESKLSSHIFFCKVLGVDDIDESLEPMVEELILWNTLFEDRDILRDKIKRAYGDRLTDEQIRAICKKRFTGWGRLSKRLLCELKAETANGPMSIMDILIEGNPEGKRVGSAMILMEILHDDHFGFDKLIDEFNLAKAKGQGGLALDELPGSPALRRGVNQAMRIVEEIVGIAGKPPANIFIEVTRDEDKKKKGKRTTRRYDGLKEALEALEAEGAHTLAELNGLSADQLNDALSLYFMQNAKCMYCGEPLDIHHAMSGDHAYQIDHIIPRSYVKDDSFENRVLVHAGCNQRKADDLLIDPAIQRRMRDHWRALHDAGLIGDKKFNNLRRDRITDKQMQGFINRQLVETSQIVKFVRLMLEDAYPETRVESIKASLSHQLREEQGFVKCREANNFHHAHDALLAAEIGRFIQLRHASLFDNPIGATHAMKEFIRSRSEYYRATHRMPGSATFVIGSFLTSGFDKETGEVYKDAWDAETECDKIRRYLNYKQCYISRMPEITSGAFWEATIYSPKGRPKKKPTLRVKKGLDVDRYGGFSGNQFAYFFVYKAKKRGRCVFEFAQLPISVANSVNKGLDVLREYARADALEKGLEFVEVSRKMICKYQLIEMGNERFYITGKKVMRSATELAFSTGEYALLAELFADGAVRDDDVLELFDSVVSRLESLAPKLCSQMKLRSLRAGYAQSDEQSRSAVLRDVVTIASAQTDMINLTAIGGVKCAGYMQPTYSKELSNGTITFIDQSVTGMFEKRQKLEL

SEQ ID NO: 5032 - protein, 1387 aa, unidentified
  REGION 1..1387: note = Description of Unknown: Cas Enzyme sequence
MNLRNVGEYNIGLDIGTGSVGWAVIDSDGEICHFKGKPTWGSRLFPSALPASEARVHRGQRRRYARRKWRLSLLQELFAPEVEAVDPDFFIRLNQSHLLPEDRQESHKDYLYTLFNGSSFDEKAYFEKFPTIYHLRKWLMETDEKADPRLIYLAFHNIVKHRGNFLQQDNPSLNSENANVKGSVEEFCEQLQEYCDNLDIPCTVQDHVDGIDKVMRDTRSTRSHIQEQLQPLLGIEACDLVDKSAVKKMTKALSAALVGLSAELGDVFFLSEEKPVDAKTKIYLSKDEDIESFGEICPDDAQALFESMNKVYSAFILQEILSGCPGESLSTNKIKDYEQYGEDLKLLKELVKEYVPEKYDEFFRGEFYEPSELHPQKHVYNKAKAKGYTKYNEVRGSSYDDFKKEVEKLFKGTAAVENSRYLDMIERFKEEKFLRRLKTSDNGAIPFQLHLEEMDRIIKNQARFYPFLEEEKKEFDSLVTFRIPYYVGPLTRKNARKDSKGKERFSWSKRIEGKEHEAIKPWNWEEIIDKDRSATEFILRMTGTCSYLQGEPVLPRCSLLYEEYCVLNELNGAHFTQDGDKERRFDYKDRSDMVKELFRKGKVSYKKVQDWMRQRGNSNVRVSGGQGENGFESKLSSYIFFAKDVFGVDEIPERDLPMIEDIILWNTIFEDRDILKDKIKRSFGDRLSDEQIKKIAKKRFTGWGRLSKKLLCDIKVDTDSDLRSIMDILREGNPNNTGLSKAMVFMEIIRDSDLGFDKKIDAINKEAMIGSAGLAIEDLPGSPALRRGVNQALGIVEEIVHIAGHAPSNIFIEVTREEDGRKKGHRTKKRYQALEEAMKKLHEEAPEFWDAATSSQLAEKAKESADLDEKLTLYFMQGGKSLYSGASLDIGQLSSYQVDHIIPQSYIKDDSFENKALVLASENQNKSDQMLLPAEMRRKMRSYWDALLSAGLIGKKKHANLLRDHIGEKQMKGFIARQLVETSQIMKIVQGFLEERYVETNILPVKAGLSHELRERIGLVKCREVNDFHHAHDALLAAEIGRFIQKRHPGMYANPIGYTHVMKQFVKNESNAVRKGHEPGTSPFVIASFLTSGFDEETGELFKDDWSASYEIAKLKSYFNYRQCFISRMPEETSGAFWDQTIYSPRDTKKNMTLPLKKGLDPKKYGSYSREQYAYFFIYKALKKGKQVLEFAPVPVSVAAEVKQDSNALRVFANRLAEDAGFEFVEIVRPKIYKYQLIEMDGSRLYLTGKKEARNGVQFALDVRETVIAQAVFGGKCDDISALDDLFFVVVESLSKYSPKLFSALKIDEWKDKFFALDAKEKSNVIRSIFAIGNGKVNMIDLVVVGSGKFIGNMRFTYGNILTKESGITFVDQSITGMFERRTHVGL

SEQ ID NO: 5033 - protein, 1435 aa, unidentified
  REGION 1..1435: note = Description of Unknown: Cas Enzyme sequence
MGLSASQIATYVAPASRHFWQSRILTRSVDPTGNRRQRHCTITERVVGVNLRNFKGDYSVGLDMGTGSVGWSVTDENGNLLHFKKQPTWGSRLFDSAQTAAEARTPRGQRRRYVRRRWRLDLLQSLLQEEIERVDPDFFLRLRQSRLVNTDPNKTTSDYRWPLFNGSDFTEVDYYNKFPTIYHLRKWLMETDEQADIRLVYLALHNIVKHRGNFLREGQKLSSENANPDDAVSEFCTALKEWCEGQEGDCGALKEADIVAVLTARGMRPSDRAADLLELLPVSFGDGDKQADKKLKKALASAMVGLKAEFKDIFGDFATEGTKISLSKDEESEALLEVCPDEDKVLFESLQRVHSAYVLQGLLSYAPGESISANMIAKYDQYAKDLRMLKLLVREYAPTSYGDFFRGPLCPNKGGYDKFDASVKGYTRYNLGVTSYDDFAKEVKKLFVGTGAEDDERYESMMDAFDDQRFLRRLKTSDNGSICYQLHLEEMETILDNQGRFYPTLANEKDKLLSLVTFRIPYYVGPLTQRNAREDAHGKLRFAWSERKPGTEGVTITPWNWEDVIDKGASAEKFITRMTGICTYLQGEDVLPKSSLLYEEFCVLNELNGMRWTSDGDEERRFDAEQREGMMRDLFRKTRTVSNKRIEDWLVQNGCAHSPKVSGGQSETGLESKLGSYYFFAKGVFGTDEIAEVDYPMVEEIILWNTLFEDRSILEEKLREKYGNAGEGRLSTGQIKKICKKRFTGWGRLSKKFLTGIKIDTQLGEKSIMDVLREGDPDADIRRGRTMVLMEVIRDDNLGFQKKIDSFNRAYFAEAGSALCVNDLPGSPAIRRSLNQAIRIVDEIAHIAGHAPTNVFIEVTRDDDMGKKGHRTARRYDQLKEALAAFKKDDPQIWKEIQAASPTNLDERLTLYFMQRGKCMYSGKPIDINQLSNAGLYEVDHIIPRSYIKDDSFENKALVLREFNQRKTDSMLLDDGVRRNMAGYWRSLHDAKLIGDKKFNNLMRTHVGENAMRGFIARQLVETSQMVKLAQSLLSAKYPDTKITPVKASMSHDLREAAGFVKCREANDFHHAHDAFLACRVGLFIRKWYPDMYDKPILYTRAMRKYVREQAEEFKKTRRAPGSSGFVVGRFMSSFVDADTGELWEGAEEVEGIRRVLNYRQCHITRMPMEDSGAFWNATIYSPRDPKMGSKLSLRLKGDLDPQIYGGYSSQQFAYFFIYEARDKKGRPAFRFSQVPVWLASRIASDEGALEEYAREQAASEQLEFVRIQRSKILKKQLVEIDGERFVVTGKKEMRNAVQIAFSGDEISCLREFISKKEEGPHYGNSVSVSPDELLRSIKSHKRFANRLLNQIKIDDIQSNNLSLDEDGKMEIVLRILALINGSANMVDLSLAGGSKYSGCLQPNYNKLLNDPNTDFFIVDQSVTGMFERRTRVGL

SEQ ID NO: 5034 - protein, 1403 aa, unidentified
  REGION 1..1403: note = Description of Unknown: Cas Enzyme sequence
MNLRKASDYSVGLDLGTGSVGWCAVDNNGYLYSFKRKPTWGSRIYKSAAPAANARQFRSLRRRYDRRHQRLNLLQGLFSEEMYHVDPDFFIRLNQSQLLKEDRDETCKDYACLLFKTAADEKQYYKTYPTIYHLRATLMHANQKMDLRLVYLALHNIVKYRGNFLYQEHTRLSAKDAGLSEQCSNFLASIGHFEDERRISFAYNPKEIIGFLNNLNTTRKQNCDEWQKLFVCEASNDISAKQAKVITECIAQAIFGYQADFSALFGTEQEKEKSKFKLSQEEKVTDFEKICPTEFLPLFNALKAMYSAYLLTTIIKNSNGGTISNAKIAQYNAYHTDLSKLKELVKRVLGKDEYKAFFQGSYYKNTKLYNKQKAKGYTAYDLGKLSYDDFVKELKKLIKKLENSEGLSAENSAWIKQIPSRLDNEEFLRRLRTSDNGSIPYQFHFEEMDAIINNQGKYYPFLLKEKEKIESLVTFRIPYYVGPLTLKNAARDIYGNARFAWIKKKEGTEKTRILPWNWEDVVDKHATAEAFIKRMTGKCTYLYAEDVLPKCSLLYQKFCAYNELNGMRWTTDNDQYNRFSADYREGIYNDLFVMSKGKVTYKKIEHWLEQQGELYPHVKGGQGEAGLESTLSSYHFFKDLLKFDVLTAQQEKVIEKIILWNTIFEDRTILKEKLKAQSFQAEFTASFSRVLTAEQIQKICKKRFTGWGKLSKKLLTGLSVDIDGERLTILDLLINGDVTDGRKGRALIFQEIVTMNQFKEAILKTNEEALSKCIIDIDDLPCSPADKRTVNQALRVVEEIASIASCAPSRIFIEVTRENDTKNKGKRTDKRTSKLEMGLKKLRDHEDTKAILDELKKHKTKLEAHENSDEKLTLYFAQNGKSLYSGTPLDINELSHYQVDHIIPQSYIKDDSIDNKALVLASENQRKSDSLLLEDSIRRKMSNTWNALCKSGLMSEKKLNNLKCSNITDRRLKSFINRQLVETSQICKYAMQLFKEKYPHCEVIPVKAGISSGIRKTWNIAKCREANDYHHAHDAYLACEVGRFIQLHYPKIYSNPTAYNKEVRGLIKSNIIHSASEGNGRYRLPGDSMWLTYSFVHGKTAKWNCEAEKNRLLKYVDYPDCFVTRMAYIETGAFWKQTIYSPHNEKAKDLIPLKKHLDTNKYGGYSSKKYAIFFVYASQNSKGVKECHLSGLLIAKLAVATDNATGKIDMHRLIKLEEQLVAARGTSIQILQPIVFKNQIIEFGKRREIITGLKERRNAKELAFKQQHMRLLKKWNDDIQEEGHKTTEVIDEDAQLNEMFDLILEKTDHCAPALHNKLLNIVGADVDDYARIEQKFAAISDKDTKKRVLFKIISNANAQENQIDLTAIEGSKHFGVISDWPKKFDIIEQSVTGMFEKRIHIGV

SEQ ID NO: 5035 - protein, 232 aa, unidentified
  REGION 1..232: note = Description of Unknown: Cas Enzyme sequence
VANLRNYKGEYNIGLDMGTGSVGWAVTDEDGRLLHFKKQPTWGSRLFDTAETAASARIPRGQRRRYVRRRWRLDLLQGLFDEEVSKVDPEFFIRLRQARLLKEDREEGHREYGHPLFNDSDFAEADYYKKFPTIYHLRKWLMETDEKADIRLIYLAAHNIVKHRGNFLRQESTNLSAKNAQPLDALRSLWLALADWCAELGYEFDPGAQDEKPKKILSILEEEHTANSDKKK

SEQ ID NO: 5036 - protein, 1156 aa, unidentified
  REGION 1..1156: note = Description of Unknown: Cas Enzyme sequence
MNEGAKESKACNDALAGAMVGLKAEFKNVFGEMAAEQTSIYLSNDEAVDALREAIPDEGAELFSALCGVYSAYVLQGLLSYAPGETISSNMVAKYRKYGEDLKTLKALVREYDPSEYDSFFRGEFYRDADGQVLNIYNASKAKGYTKYNLGTSKMAYEDFEKAVKKLFAGSAAEDDPRYQRMMADFGEQRFLRRLKTSDNGSIYYQLHLEELSAIIENQGKHYPFLVENASKIKSLVSFRIPYYVGPLTSKNARKDKRFAWSARKPGMEGVAITPWNWDEVIDKGKSAEAFITRMTGMCSYLQGEDVLPKCSLLYEEYCVLNELNGSKWSMDGDKEYRFDAADREAIIEELFKKKKTIKYKDVANFLERELGRTNVHVRGGQGESGYESKLSSYFFFRKDIFDVDVIDPADYPMIEQIILWNTLFEDRKILKEKLEETYGSKGNGRLNDEQIRKICRKRFTGWGRLSQKFLTGIKVDTDCGPRSIMDVLREGDPNAGSKGRTMVMMEILRDEDLGFQKKVDEFNQNYFGKRGKSLEVNELPGSPAIRRSLNQAILIVDEIAKIAGKDPKNVFIEVTRDDELDKRGKRTKRRYDALKEALAVFKKEYPEYCKGGNEALGELKGISPAELDERLTLYFMQCGKCLYSGEPIDINRLSSGDYEVDHIIPRSYIKDDSLENKALVLREFNQSKTDAMLLPQGIRHKMKPYWNALLDAKLIGPKKHRNLLRGRIDEKAMKGFVARQLVETSQSVKLAGSLLSVRYPGTQIIPVKASMSHDLREAAGFVKCREANDFHHAHDAYLACRMGLFIQMRHPKVYENPIAMTRAMEQYVRQQSKLFNRDHHAPGTSGFIVNSFMGSGFDKETGEIFKDAWDADAEVEGIRKALNYRQCYISRMPVEDTGTFWKATIYSPRDPKMGPKLALPLKKGLDPKKYGGFSSQQFAYFFVYEARDKKDKRVFRFAEVPVWLASQIEGDKGALERYAMELAEAEKLKFVRIERAKIFKKQLIEIDGDRLIITGAEEVRNGRQLSLTQHDQSIVRRVLTNDMSLGGKEIDSLLFKVIQQGEMIASGLLDKIKLSEKREAIVNATLVDKENLLVQLIAIVNASNRQIDLSAFGGAKTAGQYKVRFSKELSDPRVAFLIIDQSVTGMFERRTRIGL

SEQ ID NO: 5037 - protein, 1397 aa, unidentified
  REGION 1..1397: note = Description of Unknown: Cas Enzyme sequence
  MOD_RES 542..545: note = Any amino acid
VANLRNYKGDYNIGLDMGTGSVGWAVTDSEGKLLHFKKQPTWGSRLFDSAETAASARIPRGQRRRYVRRRWRLDLLQQLFQDEVSKADPEFFIRLRQSRLLKEDREEGHRDYNHPLFNDSDFTETDYYNRFPTIYHLRKWLMETDEKADIRLVYLAAHNIVKHRGNFLRQENTSLSAKNARPLDALREFRSALVDWCAELGYECNPDESGEISNEILSVLEEEHVANSDKKKRISSLIGVAMNEGAKESKACNDALAGAMVGLKAEFKNVFGEISAEQTSIYLSNDEAVDALCEGIPDEGLELFGKLCSVYSSYVLQGLLSYAPGQTISVNMVAKYEKYGNDLKTLKALVCEYARAEYDSFFRGEFYRDQDGHELNIYNASKAQGYTRYNLGTSKMSYEDFEKAVKKLFAGTAAEEDSRYLQMMKEFGEQRFLRRLKTSDNGSIYYQLHLEELTAILANQGKHYPFLMEDVEKIKSLVSFRIPYYVGPLTDRNARKDRHGKNRFAWSERKPGMEDAVITPWNWDEVIDRGKSAEAFITRMTXXXXCTYLQGEDVLPKCSLLYEEFCVLNELNGSRWGMDGDKEHRFDAADREAIIEELFKKKKTVKYKDVANWLEREPGHMNVHVLGGQGETGYESKLSSYYFFRRDIFDVEELDRADYPMIEQIILWNTLFEDRKILKEKLEDAYGPKGNGRLNDDQIKKICRKRFTGWGRLSKKFLTGIKVDTDCGPRSIMDVLREGDPNAGFRGKTMVMMEVLRDENLGFQQKVDEFNKNYFGQKGKALEVNELPGSPAIRRSLNQAIRIVDEIAKIAGKDPENIFIEVTRDDELDKRGKRTKRRYDALKEALTVFKKEDPEIWAELQATSPSDLDERLTLYFMQRGKCLYSGEPIDINKLSSGEYEVDHIIPRSYIKDDSLENKALVCRKYNQSKTDAMLLDPSIRQMRSYWDMLLDAKLIGPKKHRNLLRDHIDEKAMKGFVARQLVETSQSVKLVGSLLSVRYPNANIVPVKASMSHDLREAAGFVKCCEANDFHHAHDAYLACRMGLFIQMRHPKVYENPIAMTYVMRKYAQQQSKEFNRNHRVPGTSGFIVNSFMSSGFDAETGEIFKDTWNAEAEIEGIRKALNYRQCYISRMPMEDTGAFWNATVYSPRDPKMGPKLALSLKQGLDPKKYGGFSSQQFAYFFVYEARDKKDKQVFRFAEVPVWLASQIESDKTALERYATELAEAEKLKFVRIERAKILKKQLIEIDGDRFILTGKKEMRNGRELALSQEEILNLIVAGDENALPDDRGNASDVVFDAIVRQGDEIGLRLYKQLKIAEIAERYRSVGTDAKVGAVMSLLSSINASSNMVDLSMVGGSRYAGNLKPNYSNLLSDPETNFVIIDQSVTGMFERRTRIGL

SEQ ID NO: 5038 - protein, 1408 aa, unidentified
  REGION 1..1408: note = Description of Unknown: Cas Enzyme sequence
MNLRNYSGEYSIGLDMGTNSVGWAVTDEHGKLLHFKKQPTWGSRLFDAAQPASEARVHRGQRRRYVRRRWRLDLLQKLFEPAMNEVDPGFFMRLNQSRTVEGDPIFTKDFTKADYYERFPTIYHLRAYLMDTDEQADLRLVYLAIHNIVKHRGNFLRQGEKLTAKTAKTSDALKRLNGSLQTWCESREYEAQKINESAVAKILADEKSSRSQKAKDIQALVKVDTGDAAANKKLAKGLSNAVVGLQCEFKDVFGEFECEATKLALSDDEKLEALQAACPDDCVELFEAICGVYSACVLQGLLSYAEGQTISKNMIAKYKQYNRDLETLKYLVHGAPKDKADKFVGYAPGAYDAFFRGSTYHDANTDDPSRDYDVSKAQGYTAYDLHKLSYDDFAKSVKKLFTGTGAETDERYIAMMDAFDKQRFLRRLKTSDNGAIYYQLHLEELQAILKNQGRFYPFLKDEAGKIESLVTFRIPYYVGPLTPKNAAQDKHGKHRFQWSERKPGMEDTTITPWNWDTVIDKNKSAENFILRMTGDCTYLAGEKVLPKQSLLYEEFCVLNELNGVRWSEDGDDWQRLDAAQREGLVHELFHKKRRVTYKMIADWLVKEGDATNPVVRGGQGESGLESKMGSYIFFAKDIFGVDELSRAEYPVIEKIILWNTLFEDRSILKEKLQDEFGPSGNGMLDAEQIKKICKKRLTGWGRMSEKFLTGIRIDTQAGRSMSIMDVLREGNPSSERRLGETMVMMEILHDNTLGFQEKVDEHNRKYYAENEKSLGVNELPGSPAIRRSLNQAIRIVDEIAKIAGHAPANVFVEVTRDEDEKKKGKRTTKRWDAIEDALKAFKAEGGDLSVMGDFKELKAAGVDLDERLTLYLMQNGKCLYSGRAIDLNKLMAGSGEYEVDHIIPRAYIKDDSLENKALVYREENQHKTDQLLIDKSIRWKMGETWKQLHQAKLIGDKKYRNLLRSSINENAMKGFVARQLVETSQMVKMAQALLEARYVDEGTKIVPIKASVSHNLREAAGLVKCREANDFHHAHDAYLACRLGLFIQMRHPGMYENPIGYSHVIKKYVREQSELFKKTHRMPGSAGFVVNSFMTAGFDPETGEVFDDAWSEDDEVKRYRGKYLPDGWNAAAEVEGIRRALNYRQCYVSRMPQEDTGAFWDATVYSPRSGKSLSLSLKQGLAADRFGSYSREQFAYFYIYEALKKDKPFYKFCQVPVSMRLRVAQEPSLLDEIAARDAEESRLQFVRIDRDKIFKKQLFEINGCRLILTGSEEFRNGREVAFSIRQLEALSGSIGNAECEDLLDEIWMDFLSEMGPARGFLFKGLKLANYNERFYGLRAEEKRSVLLGLIKLVNADANVVDLSLIGGPKNAGKIRPPRSKLLNDRYTDFYIVDQSVTGMFERRTRVGL

SEQ ID NO: 5039 - protein, 1332 aa, unidentified
  REGION 1..1332: note = Description of Unknown: Cas Enzyme sequence
MQKNYTIGLDIGTNSVGWAVMKDDYTLIRKRMKVLGNTDIKKIKKNFWGVRLFDEGETAKETRLKRGTRRRYQRRRNRLIYLQDIFQQPMLAIDENFFQRLDDSFFVPDDKTYDRHPIFGSLEEEVTYHNTYPTIYHLRKHLADNPEKADLRLVYTALAHIVKYRGHFLIEGELNTENTSISETFEQFLDTYNDIFKEQLVGDISKVEEILSSKQSRSRKHEQIMELFPDEGKQGNFGRFMLLIVGNPSQFEPVFDLDDEYKLKLSDETYEEDLDTLLGMTDDVFLDVFMAAKNVYDAVEMSAIISTDTGNSKAILSNQMINFYDEHKVELAQLKQFFKTQLPDKYYECFSDSSKNGYAGYIDGKTNQEDFYKYIKEVMKTVKSDKKDYFLDKIDREVFLRKQRSFYNSVIPHQIHLQEMQAILDRQSQYYSFLAENRDKIESLVTFRIPYYVGPLTASDQSEFAWMERQSDEPIRPWNFDEIVNKERSAEKFIERMTNMDTYLLEEKVLPKRSLLYQTFEVYNELTKVRYTNEQGKTEKLNRQQKAEIIETLFKQKNRVREKDIAIYLEQYGYVDGTDIKGVEDKFNASLSTYNDLAKIDGVKDYLDNPEYTDMWEDIIKILTVFEDKAMRKKQLQTYSDTLSPEILKKLERKHYTGWGRFSKKLINGLRDEGSNKTILDYLKSDEGSSGPTNRNFMQLIRDNTLSFKKKIEDAQTIEDTTHIYDTVADLPGSPAIKKGIRQALKIVEEIIDIIGYEPENIVVEMARESQTTKKGKDLSKERLEKLKEAIKEFDGPTDIEVKDLKNENLRNDRLYLYYLQNGRDMYTNEPLDINNLSKYDIDHIIPQSFTTDNSIDNKVLVSRTKNQGNKSDDVPSINIVHKMKSFWHQLHKAGLISDRKLKNLTKAEHGGLTEADKAHFLNRQLVETRQITKHVANLLDSQYNTAEEQRINIVLLKSSMTSRFRREFGMYKVREINDYHHGHDAYLNAVVATTIMKVYPNLKPQFVYGQYKKTSMFKEEKATARKHFYSNITKFFKKEKVVDEETGEIMWDTEKHISIIKRVLSWKQMNIVKKVEKQKGQLWKETIHPKGDSSELIPVKEGMDPQKYGGTSYISESYAVAIKQIVGKKKKIKSELVSIPIVDREKYEQNPINYLEKNEYNESVIIGEVFKYQLFELEDGTKRMIATAKEFQKGNQMVLPADLVELLYHAKHFDKIKHPDSVEYIHNNLGKFDDLLAYVIDFSNQYINADKNVQKIQKIYKEHGTEDVELTVESFINLMTFTAMGAPADFKFYGESIKRSRYQSIKEFRGSTLIFQSITGLYETRYKLEDN

SEQ ID NO: 5040 - protein, 1077 aa, unidentified
  REGION 1..1077: note = Description of Unknown: Cas Enzyme sequence
MRKYVLGLDIGVTSVGWGIIDLEKNEPVCSGVRLFSESTAENNVDRRGFRSSRRLLRRRSFRLEQIKNLFIKNEIVPRDFFSKTPIGNPYEMRVRGLTQKLSYEELVTVVLHIAKRRGIDNIEIIEDDKELEKEQGETTKMVNENDVLLKGKYICQLQLERLQSKDKKIRGIENRFRTSQYIDELSEIFRHQDIAEDLKEKIISIVKRRRAYYDGPGSKNSPTPYGQWFYENGELQHIGMIDKMKGRCSLFPEEFRAPKMSYTACLFNLLNDLNNLNVQNRKISPEQKKDIIAHIVNEKGELSPQQLSKYLGVDINEISGFRINKSGDPLLTGFGGSQQGMKDFTKQTTGYKKLLTLVKKGEISKNIIENKEYVDRIFDVLSAHKDKLKRIEEIKRIDTNIFTQDNAEKISRMSGINGYHALSYKAMRLMMNDLIETSKNQMQIITEGGLKDKKYDNLKNRSTIPYNDDAVYSPVARRALHESIKVINAVRKKYGELDSIVIEMPRDRNSEEEKMRKRKEQKRNEEQKKDIDELLGEHNLTLTETQRRKLNIKIRLYKEQDAKCLYTGKPIDLKTLIADRDAYEVDHIIPISISFDDSLNNKTLCLSVANQEKGQRTPYQYLSSGNTSGLEYTFYKKFILSLRNLSRKKREYLLCENDITKYSVQKDFINRNLVDTQYTSRALLNHIMTYFRANEIPTKIHTIRGVVTSTFRKRARIEKDRDESFHHHAVDALIVAGIKKMQLFDHVLAVSLQKVDEETVTVHSGTGEVLTIANENEYFDSDFLAFVKHLRDTVKDTVKYSHKIDRKPNRNLSDQTIYGVHEIDGDEHTIKKYSDIYNDAVGEKVKKLFQDEKAEESLLMARHDPLTFQLLKKIVNEYSSAKNPFSAYRNEHGYIRKLGRSSGPIVQSLRYDGGALGSALDISHKYQNGKGGKVVKLQLVPYRIDIYKTSAGQYKFLRVRNSQIRKNKDGRYEVLSELYTAEKKNRQIDENDQFCFSLYKNDIFECRDISGKSLLVRMNGQGFQNNIEYKPIDRYEPKQLFLSIGKKTKEIVKYSTDVLGNRYRIERETCQMVLPVL

SEQ ID NO: 5041 - protein, 1346 aa, unidentified
  REGION 1..1346: note = Description of Unknown: Cas Enzyme sequence
WAVTDENGNLCHFKNRPTWGSRIFPSANTAAETRLKRGQRRRYDRRRQRLDLLQSLFDEEMTKVDPEFFIRLRQSKLRVEDREEGHREYRYPFFNSSDFTERMYYQSYPTIYHLRKHLIESDQQEDLRLIYLAFHNIVKTRGNFLYQDTPSLSAKDASMSEAIEELLNALVLWADAAYDFEIDEVDSEKLRKVFEDSSLTRAEKKDEALKVLTLEDKKIAKELINAVLGYKANFNTIFKIEAEKSAFSFDNDEQREAFIASVPDEGMALYEALQKAYSAYILMDIIEDANGKSVSYSMVAKFNKYGEDLKTLKDLVKEYCPTKYFEFFRGEHYDAPYQKDYDKSKAKGYTKYNEVRGAKYDDFKKEVENLFKDTAAISDSRYKEMMTKFANGKFLRRLKTSDNGSIPFQLHLEEMNAIIDAQERFYPFLSEIRHKLNSLVTFRIPYYVGPLTQKSAALDASGKPRFAWSKRQEGKEGEKIYPWNWEDIIDKGASAREFIQRMTGTCTYLYGEPVLPKCSLLYEKFCVLNELNGARWSQDNDKWYRFDAEDRLSIYEELFERYKSVSFKKLEDWLKQRGEAFPHVKGGQGEGKFESKLSSHHFFKELLGTDEWPDQTKQMIEELILWNTLFEDKKILKEETTKKYGDVLTAEQIKKFCGHRFTGWGRLSKKLLTGIKTEVDFRKMSVMDLLVEGDPYGEHVGSSQILMEILHNKNFEFNKEIEAHNEKYFSKDQSVEDLPGSPAVRRSVNQALRIVEEIAKIAGKPAAHIYIESTRDEDEKKRGKRSTKRNENIKKMLSELKEEYKNADIFTQLNKHSDEQLSKRLSLYFMQNGKSMYSGKAIDINLITNNTYCQIDHVLPQSYIKDDSFENTVLVLSDENQRKGDSLLLDADVRRKMAGLWHELHRVKLIGDKKYKNLTRSVVTDRQMEGFINRQLVETSQIVKFVRMLLKSQYPDTEICSIKASLSHEIREKYNLPKIREVNDYHHAHDAFLACEMGRFLSIRYEEAFTNPVGLTKLMRKFVKKESEEAQKQHRIPGTTPFFVASFSKPGFDLETGEVTRDEWNPIEEVEKIKRAFSFKQCFVSRMPEMTSGTFWDETIYSPKNTTMTLALPVKGNLLPEKYGSYSSSKPSFSAICRGKKKNKSQYYVVDIPRTKSAELYKNSIKTSNYLTKVLELSGVEFEELVYPALLKNQVIEFAGQRFYVVSSAELRNGVAPSFSYDDYVMISNYFDTNQEDSTDAIVIYDLLWKIVSTQMPILAEKLQLDSKRSSFTNLNLEDSKKVIVSLLHTINGSTVPSDTTKIGGPTRTERLYISIAAQLNKRSIEFSVIDQSVTGMFERRRRIGL

SEQ ID NO: 5042 - protein, 1290 aa, unidentified
  REGION 1..1290: note = Description of Unknown: Cas Enzyme sequence
MENVDSSFFIRLRQSRLLPEDRAEGHANYRWPLFNCSDFNESDYYAKFPTIYHLRVWLMETDEKADIRLIYLAFHNIVKTRGNFLHQDNPSLSARNANMGDSIKNLCVSLKEWCEEGEIDCAPKSRDMQTVLEDISSRRTEKRERLMPLFGFGSQDKQRAKELAGAILGYKVDFGKIFEIEGETLKFDLGNDEAIEGFLAVCPDEALTLFEAIRSAYSSYVLLGILKGADGRTISYCKVREYERYAQDLQMLKALVREYVPEQYDPFFRGPHYAAPWQKDYDASKAEGYTRYNLGTSKRSYDDFKKDVKKLFAGTHAENDERYKSMMQSFDDDVFLRRLKTSDNGSIPYQLHLEEMDAIIDRQGAHHPFLLENREKIESLVSFRIPYYVGPLTTKNARRAGDLADGEMRFAWSVRQEGKESERIYPWNWEDVIDKDKSAENFIRRMTGTCTYLQGEPVLPRCSLLYEKFCVLNELNGARWSQDGDDERRFCASDRAGIYEDLFKHGSVTYKKVEDWLVRHHRSHPHVRGGQGEARFESKLSSHMFFCNVLGVDDLEGDTVTMVERLILWNTLFEDRDILKEKIQREYGDRLTASQIKQICKKRFTGWGRLSEKLLCGLKAKTANGPMSIMDILEDGNPEGGHVGNAMVLMEVLRDEHFEFERLIDEYNIEKARGKGGLSVDDLPGSPALRRSVNQAMRIVAEIASIAGKPPANIFIEVTRDDDFKKKGFRTTRRYDNLREALASLKAEGAASLSELKRIGVDGLDTALSLYFMQNAKCMYCGEPLDIRHVMSGDHSYQIDHIIPQSYVKDDSFENRVLVHSHCNQSKSDALLIDSTIRKKMGHYWRELFDAGLIGEKKYRNLMRDHITEKQMQGFINRQLVETSQIVKFVRLMLADAYPETHVESIKASLSHQLREERGFVKCREANSYHHAHDALLAAEIGRFIQLRHGNLFENPIAATRAMRAFIKSQSEQYKKTRKMPGSASFIIGSFLTSGFDKETGEVFKDTWDADAECEKIRRFLNYRDCYISRMPEVTSGAFWDATVYSPKGGKSKMDLPLKKGLDPKKYGSYSGQQFAFFAISVVKKKAKQMYCFVPIPVSVAYGSGDEYELVSEYVKSLAQEQGMEFVSLARESIYKYQLIELNGDRLYITGLKKARNALEMAFTNAEYSLIRDMVDGKETLQESRIALFDHISRFCKLRSRRLAALIKFDYLREGFENASEEDQARSILNILKLINASDRMTDLSGIGGSKCAGCIQPTFTKELNSSDSNLVIIDQSVTGMFERRHRLEL

SEQ ID NO: 5043 - protein, 1484 aa, unidentified
  REGION 1..1484: note = Description of Unknown: Cas Enzyme sequence
MTNIRNAEHYNIGLDMGTGSVGWAVTDQDGNLYRFKGKPTWGSRLFTSAEPAATARTYRGQRRRYDRRRQRLNLLQQIFQPEMEKTDPDFFVRLNQSRLWKDDPQRFGEYTWPLFNKKHPLIIDGKEITEPVYYGMFPTIYHLRFWLMQQTNQVDIRLIYLAFHNIVKTRGNFLYQDMGTALTAKNADISKSIDEFAVAFEDWQGSLDEESPLKGAVVDTDVLEAALNDTQTRRAEKEEVAAKAFSTDSSDKKKMGKAFADAFIGYKANLTYIFDIKEDNKDIKLSFGDEEKVDAAKELLGDEDKLLFEAMNAIYSSVVLQGILHITNAEVYWASGIFKTALAGMDIDDCAVTISKSKIIEYGRYREDLKCLKQLVKKYYPNDEETGKNSSEYKTFFKGKEFCDPKSKVPVKGHKHRHMKYDPATAEGYTRYDLGAKGGTDIRTKSGVTPYEQFKKDTLSIFRVKYANGKLRPLDESAIALKAAADESILEIAKRFEDQTFMRKLKTSDNGVIPYQLHLEEMTAIIEVQKASYPFLAEVYTTHDGAVRNKIKSLVSFRIPYYVGPLTQKSAAKDAEGRNRFAWSVRQAGKESAKVYPWNWDDVIDKEASADAFMHRMIGSDTYLWNEPVLPRCSLLYEKYCVLNELNGAHYKDTDGNIRRLDVSERKQIFEDLFIHGKHASVSYRDVEDWAKRHCRRYAELSGGQEENGFESKLGSYRYFCRLLGTTDLNDSQREMAEDIIEWNTLFEDRDILRARIKEAYSNFLSDKQIKDVCKKRFTGWGNLSKKLLTGIKVKSDEGPVSVMDVLEYGYPNAGCSAFRHGDAMVLMQVLHNETLDFEEKINEINEESGEGRLLTVDDLPYASPALRRSINQTMRIVEEIVSIAGCAPENIYIESTRDEDELTKKGRTKKRFESLNAQLKCLNGEQLKAGIMNELKENESKLDSDRLMLYFMQNGKSMYSGADLDIRNLSSYQIDHIIPQSYIKDDSLDNRVLVKADENQRKKDSLLLDESIRKRMKPVWDALHNAHLMSDKKYSNLCCDSISERRMQGFISRQLVETSQVVKFAAQMLAQRYPQNSDGTGTRVCTVKAGISHQLRQVWDNEAGRYVWRFPKVREMNDYHHAHDAYLATEVGRFISIRYPESYTNPVGMAKAMRTYIKRRANQYAIDHKAPGHSFIAASFLENGFDKETGVVTRDKWDAEAELARMTKYFNIPDCYITRMPEITAGAFSDATLYSPRNKEKYANLAMRLKGNLETQKYGGFSREQFAYFFIYEKQDKKGRRLFCFESLSVSRADEVQRYGVAALERFAKNLLAPGETFIRIVRPALYKNQLVEIDGSRVLLRGAAEVRNATEMAFGLSEARLLADIADGKTLSKKDLLRLYDRYTDKIQRYAHELDEKLNLREHRSAFEALDSVQQPQVLLQVLALLNAKTNAIDLTGIGESAHAGRLQYTFNKLLNSGRFVVIDQSITGMFENRVTLRHEEG

SEQ ID NO: 5044 - protein, 1595 aa, unidentified
  REGION 1..1595: note = Description of Unknown: Cas Enzyme sequence
MNETVWAFDLGKASIGEAVRQGNKFLHKASLLIPADLGRRGPATMSGTPASRYRMLQTRLAHARREEWLDRVWMAAGLTPLVSRTVEHVDFTVRRVKKNVRGKVRWRNKKVGGRWILKSKADPSLEREFGGADDSECYTSCLLRIKLLNGDTLKDWQLYKALFSAIQKRGYADVPWKVQRKATEDKPKNAQEEAENAIAGKRWTDFSKHPDVAKIGTHFQRACYFDAWHMKLWNPAKPKEISLHPTERQESTQKVVFPGRIIAEEVLALARKATEQEKRLETGFSKVMEDWKKSVKERIARINAHRAHLGKSLVWVPDFSRGANNFAELLVYGPGGAPENPIDGVRHIASHDPDIRRATGLHPGGADDTMGALNQKVARFENRLRASCALIPRLVVCGNLAPEESVRIKEHDHERLLPSQVTLLMKLKNMSVEERNAARNQRGLKSEELRKIFEALNPKRKYHLTKREWRDWCRHFEVLPVTDPDDKDGAKNNQAPAEGTEKKKTDDLAVEKPKPAGRSRFSRPALLILKELLLSGLSPRVFHDDLANARTVLKVKTGPRSGPIIEKTLNVAADTGDAKTDTKNRMCGLLVSDLQFLLRMGKDGKPADSWDDLYIPSQQLDRRAQEAQATMEERASAIRALIGEQNNPIVRHRLDAFWKRLQKLEKAYDIPQRIVLEFVRDDSETSWLGTEAAAEITRAQKEQRERRERARKMLAEMGNPNGDVLKYLLWEAQGGQCLYGKPAGKPQCPYTETGLSFTDLHKYRIDHIVPRAKGGPDSFSNYVLTTDETNAAKGDRTPWQWFREDRNQQDWDAYKSRVWTRVNQLGWKKVRLLLSADAEKLVERYTPLAETAWIARLAQTVAGLHFGWVNGNDREGNKRVITVSGGLTGRVRRQYFLNSLLGRDRELDGKISERLDSLAELRSSGLPWKEQRDKARALRSELDELGAQANKDRADKRHHALDAMVLSFLEGWVNDPKREEEFRLELLGDNPTFPPNLMGEIGKLRSQIIAMEATVAKSGSAEERARLNERIISCRDGLAKMRMERNIRAVRAAFRREIEGDEKGGVKPILPFALHYPKPHLEATFHRGVWLKVESASRAVHATIDDYDKAFEQERVPLLELPNQENFVTEEKEHSVAYAVLRIAEIAPHKDYDAMSVRKAVESFLKTNPSIEEWQAWCTCDVAPAGIKPKKGQPNKREIVLYRIEEKRTKRVSLFGLGVGSSEVPEYDRAHFEMQINRLVCRPERSKDKPETPLQPDGELQAKLRELQPRIEAFYQENPPDPGDRPRKESARAEWQARKDRAKEAWEQFQKDTGLDRHKRVCLRTDSAKTTDRRYELAGLSSLLLVRVKRYDHENAEKQIQFLSDAWTRFQLREFLKQNPSPKQWKEFCGTFVQVRREELKQFLSPQPQTAEEFIRFYQQQAEASARRDGAANKIRSIVKTVQKVIGNPHAFVDVSKDGSGIYATSGNRGYFVWRRRTTDGENAEQFVYGTQPVQAFLRLADVKRQLLRQEGMELLDKRLWQTDMLLHLPNDTLSGKKTVPSGYYLFGSISNGTNATLKPMAGGDVYDGIRIDLLLEKGLSRVHLETETKEKTQV

SEQ ID NO: 5045 - protein, 1366 aa, unidentified
  REGION 1..1366: note = Description of Unknown: Cas Enzyme sequence
MKKPYSIGLDIGTNSVGWAVITDDYKVPAKKMKVLGNTNKESIKKNLIGALLFDAGNTAADRRLKRTARRRYTRRRNRILYLQEIFAAEMNKVDESFFHRLDDSFLVPGDKRGSKYPIFGTLEEEKEYHKQFPTIYHLRKILADSKEKVDLRLIYLALAHIIKYRGHFLYEDSFDIKNNDIQKIFNEFTILYDNTFEESSLSKGNAQVEEIFTDKISKSAKRDRVLKLFPDEKSTGLFSEFLKLIVGNQADFKKHFDLEEKAPLQFSKDTYEEDLESLLGQIGDVYADLFVVAKKLYDAILLAGILSVKDPGTKAPLSASMIERYDNHQNDLSALKQFVRRNLPEKYAEVFSDDSKDGYAGYIDGKTTQEGFYKYIKNLISKIEGAEYFLEKIEREDFLRKQRTFDNGSIPHQIHLQEMNAILRHQGEYYPFLKENKDKIEQILTFRIPYYVGPLARGNSDFAWLSRNSDEAIRPWNFEEMVDKSSSAEDFIHRMTNYDLYLPEEKVLPKHSLLYETFTVYNELTKVKYIAEGMKDYQFLDSGQKKQIVNQLFKEKRKVTEKDIIHYLHNVDGYDGIELKGIEKHFNSSLSTYHDLLKIIKDKEFMDDPKNEEIFENIVHTLTIFEDRVMIKQRLNQYDSIFDEKVIKALTRRHYTGWGKLSAKLINGIRDKKTSKTILDYLIDDGYSNRNFMQLINDDGLSFKETIQKAQVVGETNDVKQVVQELPGSPAIKKGILQSIKIVDELVKVMGHAPESVVIEMARENQTTNKGKSKSQQRLKILSDAISELGSNILKEHPTDNIQLQNDRLFLYYLQNGKDMYTGEALDINQLSNYDIDHIIPQAFIKDDSLDNRVLTSSKDNRGKSDNVPSLEIVEKMKGFWQQLLDSKLISERKFNNLTKAERGGLDERDKVGFIKRQLVETRQITKHVAQILDDRFNAEVNEKNQKLRSVKIITLKSNLVSNFRKEFGLYKVREINDYHHAHDAYLNAVVAKAILKKYPKLEPEFVYGDYQKYDLKRYISRTKDPKEIEKATEKYFFYSNLLNFFKDKVYYADGTIIQRGNVEYSKDTGEIAWNKKRDFAIVRKVLSYPQVNIVKKTEEQTGGFSKESILPKGNSDKLIPRKTKNVQLDTTKYGGFDSPVIAYSILLVADVEKGKSKKLKTVKSLIGITIMEKVKFEANPVAFLEGKGYQNVVEENIIRLPKYSLFELENGRRRMLASAKELQKGNEMVLPSYLIALLYHAKRIQKKDEPEHLEYIKQHHSEFNDLLNFVSEFSQKYVLAESNLEKIKNLYIDNEQTNMEEIANSFINLLTFTAFGAPAVFKFFGKDIERKRYSTVTEILKATLIHQSLTGLYETRIDLSKLGEE

SEQ ID NO: 5046 - protein, 1402 aa, unidentified
  REGION 1..1402: note = Description of Unknown: Cas Enzyme sequence
MQDIKEKIMKKPYSIGLDIGTNSVGWAVITDDYKVPAKKMKVLGNTNKEFIKKNLIGALLFDAGNTAADRRLKRTARRRYTRRRNRILYLQEIFAAEMNKVDESFFHRLDDSFLVPEDKGGSKYPIFGTLEEEKEYHEQFPTIYHLRKILADSKEKADLRLIYLALAHIIKYRGHFLYEDTFDIKNNDIQKIFNEFTSIYDNTFEESSLSKGNAQVAEIFTDKISKSAKRDRILKLFPDEKSTGLFSEFLKLIVGNQADFKKHFDLEEKAPLQFSKDAYEEDLESLLGQIGDVYADLFVVAKKLYDAILLAGILSVKDPGTKAPLSASMIERYDNHQNDLSALKQFIRRNLPEKYAEVFSDDSKDGYAGYINGKTTQEGFYKYIKNLISKFEGADYFHEKIEREDFLRKQRTFDNGSIPHQIHLQEMNAILRHQGEYYPFLKENKEKIEQILTFRIPYYVGPLARGNSDFAWLTRNSDVAIRPWNFEEIVDKASSAEDFIHRMTNYDLYLPEEKVLPKHSLLYETFTVYNELTKVRFINDRGEESLMNTFMKQDIFEEVFKKYRKVNKQKILDYLSLEYDEFRIIDLIGINNEKGEFNASLGTYHDLLDIIKDKEFMDNPKNAKTFEEIIHTLTIFEDRKMIKERLSKFSDIFDEKILKSLVRRHYTGWGKLSAKLINGIRDKQTGKTILAYLIDDGNSNRNFMQLINDDGLSFKETIQNAQVVVKKDDMQQVVENLPGSPAIKKGILQSIKIVEELVKVMGSEPESIVIEMARENQTTTRGKKNSQQRYKRIEESLKILSSALDSNILKEYPTDNIQLQNDRLFLYYLQNGKDMYTGKPLDINQLSSYDIDHIIPQAFIKDDSLDNRVLTSSKDNRGKSDNVPSIEIVQKRKTFWQQLLDSKLISDRKFNNLTKAERGGLDERDKVGFIKRQLVETRQITKHVAHILDLRFNGEVIKKNKKNRAVKIITLKSNLVSNFRKEFRLYKVREINNYHHAHDAYLNAVVAKAILKKYPKLEPEFVYGDYKKHDLKRYFSKSKDPKEIEKATEKYFFYSNLLNFFKEEVHYADGTIVKRDNIEYSKDTGEIAWDKEKDFAIIKKVLALPQINIVKKTEIQTHGLDRGKPRGLFNSNPSSKPSEDSKENLVPIKQGLDTRKYGGYAGISNSYAVLVKAIIEKGTKKQRKTILEFQGISILDKIDFEKNKENYLLGKGYLDILSTIILPKYSLFEFPDGTRRRLASILSTNNKRGEIHKGNELVLPAKYTTLLYHAKRINKSLEPEHMEYVNNHRAEFAELLEYVLRFNDKYVGALKNGERIREAFTNWETVDIKDICFSFIGSENSKNAGLFELTSQGSASDFEFLGVKIPRYRDYTPSSLLNSTLIHQSITGLYETRIDLRKLGEE

SEQ ID NO: 5047 - protein, 1391 aa, unidentified
  REGION 1..1391: note = Description of Unknown: Cas Enzyme sequence
MKKPYSIGLDIGTNSVGWAVITDDYNVPSKKMKVLGNTNKESIKKNLIGALLFDAGNTAADCRLKRTARRRLTRRRSRILYLQEIFANEMNKVDESFFHRLDDSFLVPEEKRGSKYPIFGTFEEEKEYHKQFPTIYHLRKSLADSKEKADLRLIYLALAHIIKYRGHFLYEDTFDIKNNDIQKIFNEFTSIYDNTFEESSLSKENAQVEEIFTDKISKSSKRDRVLKLFPNEKSTGLFSEFLKLIVGNQADFKKHFDLEEKAPLQFSKDTYDEDLESLLGQIGDVYADLFVVAKKLYDAILLAGILSVKDPATKAPLSASMIERYDNHKNDLSALKQFIRRNLSEKYAEVFSDDSKDGYAGYIVGKTTQEGFYKYIKNLVSNFEEADYFLEKIEREDFLRKQRTFDNGSIPLQIHFQEMNAILHHQGEYYPFLKANKEKIEQILTFRIPYYVGPLARGNSEFAWLTRNSDDAIRPWNFEEIVDKASSAEDFINKMTNYDLYLPEEKVLPKHSLLYETFTVYNELTKVKFIAEGMKDNEFLDSGQKRKIVENIFKNQRKVTEKDIIHYLHNVDGYDGIELKGIEKQFNASLSTYHDLLKIIRDKEFMDDPKNEEILENIIHTLTIFEDREMIKQRLAQYKSVFDEKVIKALSRKHYTGWGKLSAKLINGIRDKQTGNSILDYLIDDGKSNRNFMQLIKDDGLSFKEIIQNSQVVGDTDNLRQVVQNLPGSPAIKKGILQSIKLVDELVKVMGSDPDSIVVEMARENQTTAKGKKNSQQRYKRIEDSLKILSSGLDSKILKEHPTDNVQLQNDRLFLYYLQNGKDMYTGEAIDINQLSSYDIDHIIPQAFIKDDSIENRVLTSSKDNRGKSNNVPDLEIVEKMKGFWQQLLKSKLISERKFNNLTKAERGGLDDRDKAGFIKRQLVETRQITKHVAQILDARFNTEVNDKKQKIRTVKIITLKSNLVSNFRKEFGLYKVREINNYHHAHDAYLNAVVAKAILKKYPKLEPEFVYGDYQKHDLKRYISRSKDPKEIEKATEKYFFYSNLLNFFKEEVHYADGTIIKREKIEYSKDTGEIAWNKEKDFATIKKVLALPQVNIVKKTEIQTHGLDRGKPRGLFNSNPSPKPSEDSKENLVPIKQGLDPRKYGGYAGISNSYAVLVKAIIEKGVKKQRKTILEFQGISILDKINFEKNQANYLLKKGYTEILSTITLPKYSLFEFPDGTRRRLASILSTNNKRGEIHKGNELVLPAKYTTLLYHAKRINKSLEPEHLEYVTKHRAEFAELLEYVLRFNDKYVGALKNGERIREAFTNWETVDIKDLCFSFIGPENSKNAGLFELTSQGSASDFEFLGVKIPRYRDYTPSSLLNSTIIHQSITGLYETRIDLSKLGEE

SEQ ID NO: 5048 - protein, 1366 aa, unidentified
  REGION 1..1366: note = Description of Unknown: Cas Enzyme sequence
MKKPYSIGLDIGTNSVGWAVITDDYRVPAKKMKVLGNTNKKTIKKNLIGALLFDAGNTAADRRLKRTARRRYTRRRNRILYLQEIFATEMNKVDENFFHRLDDSFLVPEDKRGSKYPIFGTLEEEKDYHKQFPTIYHLRKSLADSKEKADLRLIYLALAHIIKYRGHFLYEDSFDIKNNDIQKIFNEFTSLYDNTFEESSLSKGNAQVEEIFTDKISKSAKRDRILKLFPDEKSTGIFSEFLKLIVGNQADFKKHFDLEEKAPLQFSKDTYDEDLENLLGQIGDMYADLFVVAKKLYDAILLAGILSVKDTATKAPLSASMIERYDNHQNELSALKQFIKRNLSEKYDEVFSDESKDGYAGYIDGKTTQEGFYKYIKNLISKFEGATYFLEKIEREDFLRKQRTFDNGSIPHQIHLQEMNAILRHQGEYYPFLKENKEKIEQILTFRIPYYVGPLARGNRNFAWLTRNSDEAIRPWNFEKIVDKANSAKDFINKMTNYDLYLPEEKVLPKHSPLYETFTVYNELTKVKFIAEGMRNYQFLDSGQKKKIVDQLFKEKRKVTEKDIINYLHNVDGYDGIEIKGIEKQFNASLSTYHDLLKIIKDKEFLDDPKNGDILENIVHTLTIFEDREMIKRCLTQYHSILDEKVIKILARRHYTGWGKLSAKLINGIRDKQTGKTILDYLIDDGYSNRNFMQLINDDGLSFKEVIQKAQVVGKTDDLKQVVQELPGSPAIKKGILQSIKIVDELVKVMGHSPESVVIEMARENQTTNKGRNKSQLRLKTLSDAISELGSNILKEHPTDNIQLQNDRLFLYYLQNGKDMYTGEALDINQLSNYDIDHIIPQAFIKDDSLDNRVLTSSKDNRGKSDNVPGLEIVEKMKGFWQQLLKSKLISERKFNNLTKAERGGLDERDKVGFIKRQLVETRQITKHVAQILNARFNAEVNEKNQKIRTVKIITLKSNLVSNFRKEFGLYKVREINDYHHAHDAYLNAVVAKAILKKYPKLEPEFVYGDYQKYDLKRYISRTKDPKEIEKATEKYFFYSNLLNFFKEEVQYADGTVVKRENIEYSKDTGEIAWDKEKDFAIIRKVLSIPQVNIVKKTEEQTGGFSKESILPKGNSDKLIPRKTKKIFWDTTKYGGFDSPVIAYSILLIADIEKGKGKKLKTVKTLVGITIMEKATFEKNPITFLENKGYHNVRKENILFLPKYSLFELENGRRRMLASAKELQKGNEMVLPSYLISLLYHAKKIQKKDEPEHFEYIQQHHTEFNDLLNFVSEFSQKYVLAESNLEKIKKIYSDSEQSNMEELANSFINLLTFTAFGAPAVFKFFGTDIERKRYSSVTEIFNATLIHQSITGLYETRIDLSKLGEV

SEQ ID NO: 5049 - protein, 1376 aa, unidentified
  REGION 1..1376: note = Description of Unknown: Cas Enzyme sequence
MKEVYNIGLDIGTSSVGYAMTDEKGRLLRFHKRPTYGSVLFEEAQTAKERRQKRSARRRLARRHKRIKLLQALVAPDVCVADPEFFLRMNESFLWAEDSKYEKFYAKLPKALFVDGTVSVETLPTIYHIRNELVKSTKQADIRYVYLAMHHIIKYRGHFLMEGQTLSDIGAEAPQKMQELLELLTDPESFACGLAPAENAAKEICHAMENHALRGMARREQIQKLLYAGKKKESKETVQALASLLLGYKGSLKALIGYENQTDAPEKTSLGAIEGETEETYLAGMTEAQAEVFTRILELYRWQLFAEIRQNGQTISDMMVARYEKHKSDLKRLKKWIRTYRKDEYATLFRDDNDPSGYAAYTHHLSRPTRFQQEKFTRCRQEGAKIKSIPEGFYNKCRRILESKKIDLPENARAEANEMLEEMKADNVFLPLQRINLNGQIPNQIQAEELAKILDAQGKYYPTLRENREKILSICTFRLPYYVGPLYQDKNSPFQKWIVRDMTQPAYPWNFFDVVNQTATAEGFIANLTNKCTYLPIKDVLPLHSLLYEEYLMLNELNRVRVKGNLIRDVQLKKRMMDELFAKNKSVSYKVFAKWLRQNSPYTDVTENDISGTQEPGKFTASLRTRYDLEKHGFTVSEQTMEQLETLVRWSTIFEDRSILKKLIQEHYPEITDNQLSFLVQRRYTGWGRLSEKLLTGVLGEYENQPATIMEVLRATNENFMQVLNNPQYHFQEEIAKERLMELGEPKEEIEYDEIRKLQVSPALKRGIWTAVRIVQELIAHQHGCHPHAIYLENTREETPDEKKQRTQSRLNQVEQMYKELAEDETAEKVPSECWEVLKDCRDKKKLDDQQYLYLLQLGKSLYSGKPLDFDRLSATTEIDHILPRCYIVDNSIENRALVLSGENQRKADNLLLADSIRDSQRPWWNYLRQKGLMGEKKFKNLTRSVVRYEDKQKFAARQLVETGQMVQCVTELFKRYYPDVHVSGIKAGLSSELREQYGLYKIRELNDMHHAYDALLAATMGNFVERFMPWLDSESSAAIRFRKAQEARKDDDDNKVDLSSKHGMILAKFSQDQVDADTGEIIHNAQQEICYLKAVWGYHDGHVVFLKRQKSGKITEDSRYRAGNKSAKMPLKKGLPCQRYGGFDSINPAFMTAIQYTQGKKVYHRVVGIPIYANVPVEKADELIRAFAADKIPGVTVVRPRLLMNQMLEWDGGIFVLRGGQTIDILTSKKNAARVTITNGKQLFVSGKDMTTIALLFRGKKDDLNPEQLKETVLHLLEKFKTQYAVFYQKCKADDINRILKSIETPEQLTTADWTAMVSELLNAMGKQRKASKEWITCEDWRIRAIPTKDVELIDQSITGLREKRTKLWPDSEPS

SEQ ID NO: 5050 - protein, 1048 aa, unidentified
  REGION 1..1048: note = Description of Unknown: Cas Enzyme sequence
MEQKLNYVIGLDIGIGSVGWAAINLDKRRIEESGVRLFDSGEVLDQNKRKRTSQQRRGYRSTRRLVRRRAHRTERMKQWLEKIGLVSAETLAEYYEAPTAHPLELRVRGLTEKLAPAELAAALLHIGKHRGFNEFYQLDEEEKKSLSKEEKEDRSRAEAYERLIQVMPGMAPAQLYLSHPMFMSEFGVRYRNTKKQDESKKVLVPRTEIEKETHRICEKQASFYPCLTEQNREKIYEILFRQRDFEDGPGDPNDETRQYKGFLDTIGNCRFYPELKRGARQSVLGDLFVLINRLSQNRYFSAETGEVVDSADAYREIIETALLNGSLEMKEVGKILKNYGIEMLNANEEKADSPNRCLAFIRMIKPILENNGYDWDAVIRAEYPFTPYNEDSFLNRVGKILSENRTPQRRVDLLKKAGVSEGIADALAKRKTGGTVSVSDRYMLESVEAFMNGELFGNYNARREKDLLAQVRTGKKYKKLPPIEKGDYVDNPVVFRSINETRKVLNAIIEKYGSPNAINIEIAADLSRTFLERDLMRLENNRNRIETERIQKKIAELLHTKDEIMPVQVERYRLGEQQGWKCPYCGAPITMETAIQKDERSYEIDHIVPYSLILDNTQHNKVLVHHGCNQAKGQRTPLMYLSADAAKKKEFIKWVNAAYAKKQISKRKREYLLQPDLNDEQMQEWKTRNLNDTRYIAKYLVRYLNDNLLFDSEEKNNVYAVKGAITSQLRRVWLNKDTWGGDDKSELRKESNLHHAVDAVVIANCMPGYIELAEEALRLRRMYHEEGKRETENWTAVLNNAVDRLYRYYRMPKAYAEQMLRNIKRIPSFIPDLSEEVDARFCDCGLENEKQYRSKLRAFYADDLAFAAGIRMPLVSYKPNRKATGKITADKAVKKGTSQSLLVKKIAEDNTTTLDDASYYCTEVYRKKDGTLGLRGIRYSMLKRDNGKIILNEQPPENYAVHIMYLFKNDYLRIYDKNNKIKFEGYYLSVYDMKAQRIYTADRIKGRNEKSVGILKNDRVEKLDVSILGDLGGIQSCGKPFLSEVTRS

SEQ ID NO: 5051 - protein, 1046 aa, unidentified
  REGION 1..1046: note = Description of Unknown: Cas Enzyme sequence
MSKLVLGLDVGIASVGWGIIDYETNKIIASGVRLFSERDKKQNETRRNSRSSRRLIRRREHRLERIKKILFEDKIITENFIPLENPYEIRVKGLNNKLSNEELATAILHIAKRRGVSGNWTVEESKKAAAEEESLKKILNENREQLKNKYICEIQLDRLKNDGKVRGNTNCFNTSDYLKELDKIFENQNIKKETKEKIREIVEDRREYYEGPGNEKSITPYGRFVIKDGKVIELNFIEKMRGNCRVFPEEKRASKNSYDACLYNLLNDLNNLTIDGKIIDTNTKKIIIEEYINKKGNITVKQLLKVLNVNDSLLVHGFRTNKSEEPIITSFDGYKKVLSKVEKEKLNPIVCENKELFNQISDVLTSYKGIEQRKEKIKELSDKLNDKDLEILANLTGFTQYHSLSHKALKLFINEMMETNYNQMQLLQINNWFNKKTILKSQKNISFNEQDILSPVAKRSHKEAIKVLNAIRKEYGELDSIVIEMAREKNSEDKKAKIKEIQKSNELLNQKVKEVLNGKQVNYQIQLKIRLYLDQECKTAYTGEIIDLDKLVNDPTAYEIDHIIPLSISLDDSYNNKVLVTHKENQDKGQRTPYEYFKSGKINENYENFKARILSNNNISRRKKQNLFFERDINQYDVRKKFINRNLVDTRYATRSLLNNVTNYYKSNEIDTKVYTINGNITNLFRKKTILSKDRDKDATHHAIDALIIAGIKKMKLMDNLLNLEIKDDIVYDKETGEVMTLENEKDFFDETFMNFLSSLKEVQPKFSHKIDSKVNRALSDETIYSTRRINDTEYTVGKYKNIYDKDGEKLAKDIRSNKAEKLLIYRNDKKSYDVLKSIVEEYSNDKNPFATYFKEHNEYIRKYSKKGNGAPIINIKYIDDKVGEKVIDLTDKFTNSTRRIIKKQLNPYRVDIYKTEDNKHKILEVKQIDITYKNGKYYIDKNKYEQLKKDHNINEKDKFMFTLYKDTIIKVNDALIRYAGINNIKSGVIYYKTIDQSKIYTNGKEFTRPYINIKNATILEKYNVDVLGNMHKSVNETCKLEIEMI

SEQ ID NO: 5052 - protein, 1107 aa, unidentified
  REGION 1..1107: note = Description of Unknown: Cas Enzyme sequence
MRNEHNNRVLGLDIGIASVGWGIIDMENGSVVDAGVRLFSEVDAEENEKRRTHRGARRLLRRRAYRTQRMRHLLKKHGYLESDDTTPKTTTQTPYDIRVKGLREQLTKEEFAIALLHITKRRGIDNVDIVTSDKKEEEDLLKTKDVLAKNHRLLQEGKFVCEIQQERLRTEGKTRGLANRFNTKDYVAEARALMERQGAPEKFVRAALKIIQSRRAYYDGPGSKHAPTPYGQYFYDEDGNLQHLGMIDKMRGRCGLFPDKFRAPRMCLSAEIFNLFNQLNNITYDGDKKVTPEQKWEIINTIVIPKGGITPKQLAKALGTSLDNINSLPVDKSDKPYLLYSTKHKNHAMSIRALRTALKKAGLDDALLMGLVSDNHKQLINEKRGKLIDDIVEILTTEKSIPRRVRKMRELNDAALDEAHIAALSTISTFTGTHAFSFEALRAMIPDLWQTQQNQMQIIAASGLAHKHTPTHGTRIPFYDDDITSPVARRAHREAVKVINAARKKYGEFASIVVEMARDKNSQEQKAYETKRQKYHEQSRAHARETIGNRKEHITAQDIIRLRLYEQQEGKCIYTGEEFSSLDDVVHNRNVEVDHIIPRSVSFDDSLANKVLCTKTANQQKGQRTPYQWLKSGNGPRSYEAFKAHVLALKNIPRKKREYLLFERDITAHDVRKQFINRNLVDTRYAARVLLNTVQGYMRANNIPTTVHTVRGSVTHMFRVHAQIPKSREDSHAHHAIDALIVAAIKKMDIMDHALAVYARKDSEGNTGVYSRATGELITERTEEDYFPQHFLDFVKTLRDTAPGRIRYSWKVDRKPNRQITDQTLYGVREIDGVKHKIGKYNDIYGKDGELVAKLFRDGKAEKQLLMAKHDPYTFTLLAKIVQEYPDEKNPFAAYRDREKGEDGTGKDLPIRKCNKRGEQTGPIITSLRKDTGKLGIHNDISHKYNAPRGTVVQTSLNPYRVDIYRTPQGTYKFLRLTYMHLTPVQSDEQKRHGIPPQHYRVDTERYAREKAARGITDEDKFLFSLHKNELFGFVQDGKEECIVRFNGVYDYNANTIEYKEEAFNAEGRLRLAIGRKITKLRKYATDVLGHRYRIRSEDCTMTISVL

SEQ ID NO: 5053 - protein, 1057 aa, unidentified
  REGION 1..1057: note = Description of Unknown: Cas Enzyme sequence
MDNKRKLALGLDIGIASVGWGIIDIDTGEIVDEGVRIFPEAAADNTINRRTFRGSRRLTRRRSFRVHRMKELLIKKGIINNGFVPLINPYEIRVKGLTNKLSNEELATALLHLAKRRGSSLEIVSDDKEVGAAKKVLQENEAKLKNKYVCELQYDKLLHGEVIRDANNNFKTKDYLAEIETLLRTQGIKGDFHDKIIELIAKRRHYSEGPGGKNSPSPYGRYLTKDQEEPINLIEKMRGHCSVYPEELRAPKMSYTADLFNLLNDLNNLKIGGRSLGLPSDKKKEIIEVYINKKGNITPIQLARFLNLNVGEITGFRENKKGKELLTEFDGYKTIMKIVDSNSLNPEIYENKLYVDKIIDVLTSTKVEEERIAKICDINGTLFTRDVSKLLASITGVSQYHAFSYKALNEFIDEMMGSNLNQMQIITNKDIHKTNRESSYKGKKIPFDNEAILSPVVKRATRQTFRIVDALIKKYGNLDTVVVELAREKNSADLKKTINDRQAYYEKLNLDAQKEAGDQKLNSKAIAKYRLYKEQDGKSMYSGKDMDLNAIFNNPDDYEIDHIIPISISFDNSQSNKCLVFRGENQLKGNRTPKQVMDTHQSGWWDYNTFKATMENNPKISKRKRANLFFEDDISKYQVKEEFLQRNLVDTRYACRYVMNTFQDYFKANDVDTKVEAINGQITHNMRNKMKLPEKDRDVDYHHAIDALVLASLSRGYVLKNRIIHDFDPLTGEITNVSKIKSSYEFYDNNIMSMAPAIQKIKGEDIKISYQVDKKVNRSISDQTVYGTRDYNGETWVIKKYKDIYGEEGKKLAECIKKGKGDSLLCYRNDPETYSLLEKVVNNYTDNPNPFLAYKDETKDYLRKKCKDGNRKGPIIQQIKYKDAKLGIHLDISDKYPESINRKVVKLQLSPYRMDLYKNAEGKYKFVTIRYSNVRLINGLSSIDELWYEDAKIKKGIDNTFKYVYSFHRGDIIEREFSDGTKSLDLFKCVSNDKEGKVELDFFGKRTLKVSENGASKSFQYLTTFSKSIKSINKFTTNILGDFYLIEESKEPLKLSW

SEQ ID NO: 5054 - protein, 1046 aa, unidentified
  REGION 1..1046: note = Description of Unknown: Cas Enzyme sequence
MAVKLTLGIDIGVASVGFGLINPKTNEIHEKGVRIFSEGTADNNTIRRAHRSMRRLIRRKVARIYRVRRFLFENGLIKDIDFEPDANPYEIRARGLKDIINDGELATAILYYAKKSGYKYKLVDEETNTDEGKLIIANFVVNDQLERFKKDGKIRGDANKYHESLYRKELENILTKQGKNRSFIDECLKIIFQRRRYDEGPGSADSPTKFGRFLTLGAEPINLIEKMRGRCSIYPDELRAPKNSFTAELFNLLNDLNNLTHVKEGKITSEKKKEIIDYVKSKGKLTFKSILGIIGWKIDDIDGFRLDKKDEPIVTEFKVYTDIIKKYKSNGLEANRFVGEEDLFDKIIDILTATKIIEIREEELRKLNCLIDEEIKILARIKSISGYHSLSIKALKEINEEMLETKLNSMQIICKSNHTSADVSLSKKDIGEGITNPVVRKSILQTFRVVKAIVKKYGKDNIGKIVIELARESNNDEQKKKIRDYQKEKEKLKKEVIETCLNGDSTLYTDNLSLRYRLYKEQDGKSLYSGRPIDLNELMNDKQENHKFEIDHIVPLSLSFNDSYSNRALVYREENQIKGQRTPLMIIGTPEADKAKWWNRRDFEAFVRTNNHMERNKKSLLLFADDISRGVPRDSFINRNLNDTRYASTYILKALQNYFKKDNGDVLIKVINGKVTHIFRRKANLEKDRAFHCHHAIDALILAKLSEQKLVNSLMSEQPIFNQETGELLEDEQIFDHDTILFIKKLDSLDNIRDFTFSYQIDGKPNRKLSDEMIKSTRLIDGEQRVIKKFTSLYDEKSANGLRIAEWLRNADKPGKLQNEYKKLLIYQNDKPTFNHITKIIKTYSKEGINPLYLYAKDNGLLRKVSKNGNGPVIKSLRYIEDRLGTHKDISHKYITSKGLVVLLQLSPYRMDVFRNPDGEFKFLDIKYMDVSKKGSKYYIDKEYYLKRKAEAMIKDNANFICSLFRNDLVEFSYKDGEKEIIRFKVPNSEKRKIIEHSLFGKDNEKPQHLKTISSNIINIRKIGTDVLGKQFTISGAPLKLSWDEV

SEQ ID NO: 5055 - protein, 1057 aa, unidentified
  REGION 1..1057: note = Description of Unknown: Cas Enzyme sequence
MGYILGLDLGITSVGFGIIEEDTYKIIKYGVRLFDEGTADNNLTRRQNRSSRRLKSRRKNRINAIKYLLLNNNVIPNVNFDILDNVYELRVKGLTQKLTNLELANVLVNLAKRRGSSLDVAVDENDNESVVAASALTKNTAELKKNNLYICQAQLAKIKSGVKLRNHDNIYKSDDYEKELRQILSNQDLSNELNDKIVEIIMRRRNFSEGPGSYEFPTKYGSYRVDYVDGIKTIKHVNLIEEMRGKCSIFRNEPRIAKCSFEACLFNLLNDLNNLTINGNGKITKEQKLQIINDYVIPKGKITIPQLVKYLGVEEKDITGFRKNKSEKNIITTFDTYSKMINFLPKDILNVTAYVDSIIELLTKTAVVEERIEEIKKLNLGLNDDIINQLANMTKVNGYHSLSKKAMDIIIPEMIETDKNQMQIIHDNNLDKNDCQEKGSKIKFDSSAILSPVTKRVHMQAIQVVNELRKEYGEFDSIVIETTRAKNSSDEKKDIQEDQKRLEEQKRKSDELLIDLDKNPDNYNTLTKLKLRLYKEQEGKTIYAGLPIDLDLLLNDPTAYQIEHIIPYAVSFDNSMNNKSLASAKENQDKGKRTPWQYFSSGMVSECEGPINDWESFEAFVNSLKISKNKKNNLLNQEDVTKFDNMKAFVARNLSDTSYCVRTVMNTMQQYFNDNNINTNVFTVKGRLTNIFRSRVGLKKDRDYFIHHAVDALIIAGSKNQSVFNNAYLLSSTKDGILIKKTGEVFDYSQDPFDDPRFLNYISSLKKIEGKPEDFSYKVDKKTNRQFADQTIYSTRNYDGVDYVVKKYKDIYGKDGESLKKLFDDKKEQTLLMARNDIQTFELFKKIYENYKNEKNPFAKYKDEFGPIKKYCKDGKGPEIYQVKYISDKLGNHLDISDKYNVENGNKKVVLLQISPYRTDVYQSKETGLYNFITIRRYHIYQENDMNIIKPELYQKLLSDKKIDETYEFKFSLNRNDIINLVTIDNQADHIDEMLYRFIGTNNDKTNKIEIRYIEKMTLKQIMVSIGKKIVKFEKYNVSPTGKKAKAEKEVLKLKWK

SEQ ID NO: 5056 - protein, 1064 aa, unidentified
  REGION 1..1064: note = Description of Unknown: Cas Enzyme sequence
LGFKLGIDIGVASVGYGIIDDQYNIIDCGVRIFPENTAKQNEARRAMRSSRRRIRRKSFRLFRMRQVLKRIFDTKSVEVYENIYGIRARGLTEKLTPPEFCAAIIHLTKFRGTHFLTAEDFEKEDNASASIEEVLRTQGELLKHQYVCNIQLNRYQESRQSGVGKTRGQDNRFRNKDYLRELEALLEKQGEYYPVLNAHKEELLKIYKSKREFYEGPGGKNSPTPYGRYRYDKEGKITEVNLIELMRGKCTFFPDEPRIASNSYTACLFNLLNDLNNMGIGGESLSLDHKKELVEHYIDIGKNVSLQAISKITGVKAELLRGYRTDKSDKPQFTEFVGYKEMLKIMGKAEIRTDFLQGNRKLVDEVAEILTSEKDIEKRAERMMAIGILESAAHELKKLSKFTRYHSLSQKAIESILDDLWETDQNQMQLFTLSGMLKQNHDDLIGVNIPFDGSGWIVSPITKRAVGEAVKILNATRTSLRKQYNCEFEEIVIEMAREKNSDEQAAFIKKNQKQNEDLKKQIDSIVDLKKINGKQFEILKLLIEQDFTCAYSLQKVGLAHVFNGMLEIDHVLPRSLSFDDSQANKVAVLLQENQKKGQATPFQYLKSGRGKISYEEYKAWVLRNDAYTKKKKKRENLLYEGNPQQDLTGFINRNLVDTRYACKEVLNLLQAYFRENKIDTKVSVIKGSFTYSFRKKARLDKNRSESYAHHAQDALIVAGLSNTQLIKSVNSLMRTDSIMDNGKTAWLEENGKWINQVTGEVFSDDDFNNGQYIRFIKNVDSVRPKYSHKVDRKPNRALYDQQIKSTREKAGATYVISKYKNIYAQGPGSCGEKLKKRIQESPEDLLMYQHDRRTFDNLVEIVKAYSESKNPFAAYFSEHGPIRKYSRSGNGPAIVDIKYFDRMLGSHRPNKKQEGKNLSVYLSIKSLRADFYLDQGTYKFISVPYDMVNFVAENHVIDSGKYETAKQNKKISPSAEFLFSLHTGEMFSYDKDDEKYEWVYNCMNNDSRNVVETRFIDRPSPGNTQAKRMITISKKIGNLMKFHVDVLGNRHEVKREVFRKIVTI

SEQ ID NO: 5057 - protein, 1060 aa, unidentified
  REGION 1..1060: note = Description of Unknown: Cas Enzyme sequence
MKLKFGLDIGVASVGWGIIDENYHVIDCGVRLFSENSAKENETRRTMRSSRRRLRRLQHRLQRMEKVLINVLGVEKPSEVGNIYEIRCRGLQQRLTKEELFAAIMHLAKRRGTHFLTAEDFNKVGEEKTTEEILQEQAEKLKDKYVCQIQYQKFLDHGKVRGIENRFRNQEYRKELLALLTKQGEFYPVIKNAADKITAIYDSKRHYSIGPGGPKNPTPYGCYRQDQEGNIIEVNLIDLMRGKCTYYPEEKRMAHNAYTACLFNLMNDLNNMTAAGNPISYEQKQQLVEKYINEGKSITLKIIAKVTGVKEEELRGYRIDTKEKAIFTEFAGYKATLKALEKAGIDNAFIKGNRKLVDAIADILTLEKEVDKRYDKLINEGISIEVAQELKKLSSFTKYHSLSQKAMELILGDLWQTNYNQMKLFTDAGLLNQQKEELRGINIPFDGSNWIVSPITKRSVNEAIKVINQARVMVRKKYNCEFAEIVIEMAREKNTDERVKFIKDLQKKNEKIRQQVGDLVNLKKLNGKQFELMKLLIEQDFRCAYSGKQVGVGHVLNGAMEIDHIIPKSLSFDDSLANKVAVLSMENQKKGQTTPYQYLKSGHGQQSYEEFKAWVLNNPNYKKNKKKRENLLYEGNPQQDLEGFINRNLVDTRYACRAVLNLLQSYFKENKLGTKVSVVKGSFTHAFRKRAHLYKDRDATYAHHAQDALIVAGLSNTDLIKKVNKMLSEEGNLLGDKETLRLVNGKLVNTTTGELIEEKDFDCTQYIRFIKTIDTVKPKYSHKVDRKPNRALYNQQIKSTRDKDGKTYIITKYKNIYEQGLGNSGEKLKQKIKTKPEDLLMYHHDPKTFALLQEIVDFYPDSKNPFADYYAEHGPIRKFSKKGNGPIISDVKFYDGALGSHRPNLKQQGNNMSVYLSIKTMRADFYLDDGVYKFISVPYDMVAKRGDQYYIDVEKYNLAKQNQNKKISDQAEFLFSLHTGEMFSYEKDGEKVDWVYNCVNNDVKNVIETKFIDQPSPGKTQPKRMITIGKKISNLVKYHVDVLGNRHKVNQEVFSTTIIV

SEQ ID NO: 5058 - protein, 1057 aa, unidentified
  REGION 1..1057: note = Description of Unknown: Cas Enzyme sequence
VPEYVLGLDVGITSVGWGIIDLENSQVIAAGSRLFSEGTAKNNEDRRGKRSSRRLLRRRNYRLKRMTNLLVRNNIINQDFKPLENPYEIRKKGLNTKLTNEELATAILHIAKRRGISGDWIDEINPEKVKENQTTKAILNEKREFLANNYVCEYQLAKFNEGIRGKENFFETKDYIKEIEAILKNQKLKPELEKEIKEIIQSKRDYDTGPGDEHSPTKYGRWYYNEYGQIVETPMIEKMRGKCSVYSEELRAPKMSYHADVFNILNDLNNIEIFGEKITTEEKEIIIDIIDHNGKFTIADLKKMYKLKDYEGISGARIDKNKNPLLTEFKGLKNIMKLVNDNDLSEIIYQDKKLFDNIIETLTNQKSKDNREKELLEKHRNVLTDKDIEYLSQASGITSYHSLSTRIIKELTCDLIETNDNQMQLLQAKGLFKNKNDLKGKKQIPVNNELILSPVAKRAQAEALKIVNAVRSKYGELDTIVVEMARDKNSDEKKKRETNLQKRNENTNKQVLEELKKANPNMTEKDISAHLALKARLYMEQDGKCLYTGKTIDLNVLIADKYAYEVDHIIPESISFDNSYTNKVLVLKRANQEKGQRTPYKYFKNKVANGWNYEDFKNFVNSSKSIPRNKKQNLLFEKDIDNYEVRRGFINSNLVDTRYASRGLLNTLMDYFKDNELDTKVHTIKGTLTNNFRKKAQIDKDRDEDFKHHAVDALIVAGIKKMNYFDNLLGLTLIKEDDKLHIMNKETGEVITSKNEKEYYDHKFLEFIQTLRDIKVNYSHKVDRKYNRAITTKETIYSTRVVDDKEYKISKFGDIYGDEGKKLAESFRKHKAHEQLLMYEHDRVTFDLLKAVVEQYKNDDNPFLRYYQDNNDYIRKHGKKTGPIIKSVKYKDGVIATGVLDLSHKYEEKPKNNKRAILTSMNPFRIDIYLEDDKYKFLRICHHNISYKHGKPFINPSFYKEEKINRKISDKAEFKFSLNKGDLFYYYKSKDDNRIVRYNGLSYEASKIEYKDVNTTDPKQTYLAIGTFKQMYKYNADVLGNLYKVDKESCKLELDLL

SEQ ID NO: 5059 - protein, 1062 aa, unidentified
  REGION 1..1062: note = Description of Unknown: Cas Enzyme sequence
MSKVLGLDIGISSVGWGIIDQESGEIIDAGVRLFEEATRNANEERRSFRGSRRLKRRRSHRLEMAKLLFKDFHLPTNGIGKVNPYQARYQAIFGSVTKEELVAALYHLVKKRGTTLDTPDEEKTSGSELSTKEQLARNKKLLENKFVCEIQLERLSNSFEKIRNHENRFRTEDYVKEAKAILKKQGQVYPEITDEFITRFIELIERRRQYYEGPGSEKSPTPYGPYSIDKEGKLTYTSMIDKMRGKCTYFPDQLRIAKMSFTADLFNLLSGDLNKLQINGEYLTYEDKVHLVDTIIKKGKNLTLPQILKYKGVSGEADVRGYRIDLKTDKPTFTEFAGFKKTLKIVKENSLPTSLLENIDLLDEIVEILTAEKSFLRREEKLKNILQGKYSEKTIKDIVNAFIDTTEFKGYHSLSKKAISLIMNDLWHTNKNQMELFNEYGLEQRRLLKIQKSRQIKFDDDAILSTVAKRAHREAIKIVNAVRKKYGEMDSIVVETAREKNSDEKRRLYAEFQRKIGKHEKEMTKLLGVKTLAELHLNSKQHLALKLWQSQDGKCIYSGKSISIHDIVTDFSLFEIDHILPISISFDDSQSNKVLCYRSENQKKGQKTPYQYFSTGKASRTFDQFKVEVMNLYKSKKINNKKKDYLLEQRDIQKNEEIQKEFINRNLVDTQYAMRSFSMTLRTFFKTHDIDTKVFSIRGSFTAALRRRARLNKDREESYAHHAIDALIVAAIGRMPAFKFFREFDLTENGIIFNKETGEIVDEEKFFGHNFITFLRNLMNYESKIKYSHKVDRKANRSMSNQTIYSTREKDGEIYYLGKTGNVYQLDKNGVTQLLKRIEKNPDSFLIAQHNPDLFKHILQIIDEYRNEDNPFKAYYDENGFIMKDGKVPVKSLRYYDKKLGVHMNISNKYPNAKNPVVLRTIKSIRIDLYRNKDGQYKYIGVPYYWFKQKGNQFVLDMDKYMEEKMKEYKLIDKSYEFQYSLYKNDLFSFEKNGKVFYRIFRGDNNPRQNIIEVDYIFKKKEERKEGFLSPSTIKNVIKYNVDVLGNTYKIEKEKFIDTLQF

SEQ ID NO: 5060 - protein, 1406 aa, unidentified
  REGION 1..1406: note = Description of Unknown: Cas Enzyme sequence
MNNKYIISLDIGTNSVGWAVMNEDFSLAKSNKKITSIEEGKRETIRKRTNLWGVRLFEEGKTAAGTRGKRGMRRRISRRKKRLIYLREIFEPHIGKFDDSFFIRMNESFLQNKDDLKKVKTKYPLFNGKSGDGETFADEKDYYQKYPTIYHLRQRLLDDKSQADLRLVYLAMHHILKFRGNFIYQGQDFDFENLSVLESLKELLTLYSKATAIDFSFENIEKADEILTNRNLSRSKKAADLTSHFSMPDKNINKQQQALYAAIVGNGINVAAIFGNDEYKNDEIPRGADFKYSKENYEETLAKYEALIAPEEFDVLAAGKKVYEAIVLCNILTHETLSASMKHKYEEHGRQLEKLKQYAKEAGIFDELFGKEGAYTLYVSGKSREVFYKKLTALLAKSEFWEEIKTEIEFDRYMPKQRMSDNGAIPYQVHEYELLKIIENQKEFYPFLGEMVKIEKEDDEGKISDSYEYKIQTLMKFRIPYYVGPLTPKADGKSRFAWLKKQSGMETENITPWNFGQVVDKEASAIEFIDRMTNFCTYLPQEKVLPDNSLIYQEFKIYNELITCGWCEKGSKKYFNPDLRAKIVAKLFKKHKKVSADKMILFLRSEGYADITVRDLFGIDILAKSPGYNNSYSTYIDFINAGISAEMLENNRLIFEEIIKWQTIFEDKKILRKAINSANKTKWDNLLSESQIKNLAAIRLKGWGRLSAKLLTGIRHTNGKTILENLKEENFNNFMRLIEDEKIAAAIREGSVEEGNTKTLNYGMVADLAGSPALKKGIWQSLKIIKELESHLGMENISKVVLEIPRGGSGGSGRTKSRKRQIEDFYSKFTENTTESLEAMSPGLKAEFADTHEKDFDKERIFLYFLQNAKCMYSGKSLTLGDISSYEVDHIIPQTLIKDDSIDNKVLVKREENQNKGGDVPSEKIVGKMKGYWEMLAKNGQVSKRKLANLTIGKLTDKVKEDFINRQLVETRQITKHVANILLAHFEGTDIEILTPRSSLTHQFRDGIIYVPDKEFDYQKELENGTHFEHDGKEFLLDGDGEFVESKYNNSNFVKVHFHEKYHKNRGINDYHHAHDAYLNAVVAHFIYGMNPELRELWVYGKYHKRQKDIVGKEAFKRRNYDKQLLTGMAENTWEMMIDNELVSFERDEVLGKIQTALGYRNMNIVKKTEKLIGKFGDETIYKKDANATPVKRDLNPALYGGTKAPVSAFTVVVRNNRGIIEPLSMPSMSADGYLKSKNRLEFIQLLYPSKNISEIILDVVPKYTKYIKYGIPRLLASYKEAQCGVQLPPIKMVNEKSSAEEMLKVYDSLADFIAKNQLFSDAKITLLKNKIKDNFAAYGTDEKLKVISELLRVSNGSNQGLNALKKAGLETTAQQLTSKENLISNDVIIISQSVAGLYETRRKIK

SEQ ID NO: 5061 - protein, 1085 aa, unidentified
  REGION 1..1085: note = Description of Unknown: Cas Enzyme sequence
MTKILGLDIGANSLGWALLNNDNNTIIDMGSHVFPAGVSDFDTAKEKSKMADRRSARSARRRFWRRKRRLRKLRYIFKEYNISNLKVHDYNSLDPYEIRKKALDKKITFDELARAIYHLAKRRGYFDISCADAGEEAIKEKGKIFDGLKEKGEVVIAGINDLRKQLITYGGNFRTVGEYFASVNTDEVRIRCRYTERQMFIDEFEQIWNKQKEYYPDILNDELKEKIKKAAFWQRPLKMQKSLIGYCKFEKLHRRAPKSHPIAQLFRMYQVINNLTISGGNRILDNEKELSELERSKLINKLLISKGIELGKNANKQIVALLKLDKNSHYVTNYDHQGKIDGIKTYSAIFGILKNKSIFNYNFKQITETSLQEKIKINEELKKDFLKDEITIEELLQAIWRIIFTEKRTDIRINNLKRKFDLDDETANKLANIGLEPGYASLSIRAMRKMLPYLRMGYKYDDAACKAGYHHSLWDEEVEKLDYLPPPAFIRNPIVTTSLNELRKLVNELITRYGKPDIIRVELARDLKKSRKERQKIKEQNLKNRAEREEAIKEIKNYFSDSEYYAQDFPRDRYITKYRLWKQQKHLCIYSGQNIGINQLFSAETDIDHILPYSKTLDDSMNNKVVCFRYENAFKANKIPWEAYAQDKAKYHAILDRVKTFPTSKAKKFQMNTKQFKDYIQGKDEEHKDFIERQLNDTRYISKEALKYLKHICDEVNVSTGSTTAYLRKYWGLNTILAPAGEDFKNREDHRHHAIDAVVIALTNRSTLQRLSTYSHITGDYYLEDFEQYNPNQFPLPWENFRKDVQEKVDCIIVSHKVNRRARGKLHDETYFGLRKNHYGQERTDEKGQKLFHVRKPLDSNLTHSQIKSIVEEDIKEAIFQRLLKFGIDPDSKFTLPVDFFNEPLVIHAKNGNSYRTKSVRIAVPSYTMRKIRDYNIWVETGSNHHIIIYKDITIGKQNGKVVTLLDAVQRKRKGLPVIDKELGTNEEFMYSLIKNELVYLGEFPENFDLNNKNYYKVMFDKIYRVQKFDQYGRIILRQHNIAVLESIDKEGKKVEPGILRKSAPSLEATKLKITTLGFLSIAND

SEQ ID NO: 5062 - protein, 1509 aa, unidentified
  REGION 1..1509: note = Description of Unknown: Cas Enzyme sequence
LNNDNKKYTISLDIGTNSVGWAVLSDFELAKKNKKIKIIENGQVKIKKQRTNLWGARLFDEASTAEGRRLKRGQRRRIARRTKRLNYLRNIFEEHIAKFDPNFFHRLEESFLQNDDDNKLIKTDYPLFSGALGSMKDSAPFSLGETYTNEAVYYEKYPTIYHLRHRLMEYETQADLRLVYLACHHILKYRGHFVNQGQTFNMENINVSDSLKDLLTAYDKEDIIPGFDFKFEELQKYEEANTILTNRKFSKSKKAYELTELYSVLNIDENYSKYEKETKKKTEDFLKSKDAQLKALFTAIVGNSIDLAKIFSKQEYSNKENDEMPKGADFKYSLDAEKYEELLHKLEIYLTPEEIEVINLGKVVYESIVLCNILTEKTLSASMIAKYNSHKEQLKELKEYSKSIGKYKEIFGESCIYDEYIKKASKNPREEFYSKLKNIFFIDFEKIVKENNIVLYDKEHKEKKLSNSGVSANFNSEFLKLNENQFIEFQEKAKFLIDILSHMEFETYLPKQRYRDNGSIPYQIHEAELEKILKNSSIYYPFLGEKVSIELENEEGEKSFKQEYKIQTLMKFRIPYYVGPLTNANKGEQGKKQSDKSRFAWMQKNKDNEHTKITPWNFNEVVDRETSATEFIERMTSFCTYLPEEKVLPKNSLIYQEFTVYNELSTAGWQKSGGKRQKFQPDLRQKIVENLFKKIKKVTAKKMVEFLYSHNYTTEELSTKQLFGIDTVVKDAKYNTSYSTYIDLKNAGISEQMIEENKEKFEQIIKWATIFEDKKILKKTITNANEKWNLFDDIQIKNLSKLRYTGWGRVSNKLLTEIKAANGKTILENLKEDGYRNFMRLLEDEQITNKIRESQLKDKDVDGLSYSLVEDLAGSPAIKKGIWQSLKIVSELEQFLGRENIEKVVIEMARGTQGGRTTTRKKQIENFYSKSEEKLDELKEQLKAKEDKAFNNERLFLYFLQNAKCMYSNEPLYLSELSRYEVDHIIPQSYIKDDSFDNKVLVKREANQNKGGDVPSKAVINKMAIYWEVLAKNGQVSPKKLSNLKRGSLSENDKESFINRQLVETRQITKHVANILNEHFHGTNTEILTPKAGLTSQFRQGIIYIPKSDKEVIEKCVIYNGENYTSHEEEDKIYYNLEEALEKSIVLDKTYKNSHFHKIYWHKGFHKNRDINDHHHAHDAYLNAVVANYIYKTRPDLKNMWVYGEYQRKAEKETGKYAPQRDKFFKQLLSGMEKEIWQFKNIDFETGEVTEYSQSSKEIMNNIEKTLDFRNVNVVKKTEKQEGKFGDESVYGKDAKKIPVKSKLDPKKYGGQTAPISAFAVLRKDKKGTIIAESVSAMEASNYKKLDSEIVVSKYTKYKLSNGAVRLMASFQEAQNANQIKSFKIPNEKSSIEEFEQAYNILSDFIISNKLFTEKNEEALKTNIKEKFMNLSPEDEKDDKGKIKAKGKLSIIKELIGVTKGSNQGLNALKDNGLSSTAQRLKTGNIITNDTTLIYQSPTGLYETRRKLT

SEQ ID NO: 5063 - protein, 1070 aa, unidentified
  REGION 1..1070: note = Description of Unknown: Cas Enzyme sequence
MLRLGLDLGTNSIGWALYRLAEDGEPEALVDGGVLIHPDGRNPRNRASKAAERRIKRGPRRNRDRMLRRRRRVAQLLHGLGLLHSGEEARKASRSLDPLQLRAEALDRPLTPHELGRVLLSFAGRRGFKSNRKTDGREEGAIRKETGELRRRMEQAERDAQREGQHAARTLGEFLWRRRNRGETIRARPTGNRERPYAGLYPDRAMIEDELDAIRGAQAEHHPRIADEDWDEIIGVLLHQRRLRPVERGKCTLLPDEPRAFRAYPLFQRFRIRQEVRNLEVETPGDPSRPLADEERERLVAKLLDSREFKLDHVAAFLGLPDGTRVNLRSTARDKIDGDLTAAVLRAKKCFGRTSWARLSLDRQQELVERLIKDEDHERLVDWLRDEHGLSEDAAEAASSTRLPQGTGNLSKAAIERLLPHMSAGQRYDEAVEAAGLGHHSDMRGDGKAARLPYYGEVLQRAVVGGGKTDGDDTERWGRIANPTVHIALGQVRQLFNAIAKEHGKPGEVVVELARELKQNEEQRLDDQQRQRDNRERNERLRELAEQAGHEDPSPLDMRKLRLWEEQGPPNARLCPFTGEPLSVERVLSAATEIEHLLPYSRSLDNSMNNTVVAMRAANREKGNRTPFEAWGHDRGRFDDILDRARLLPFGKQWRFDEDAMERWQSNRDFLDRQLNENSYLSRLVREYLEAAVAPNRIWVTPGRMTAMLRRGWGLNSILSGPGSDWKNRDDHRHHLVDAAVVGMTSRSLLQKVARASGRDEDRESVIAVAEQPWEGFRHDVGNFVERCIVRHRPDHFTVLHDKQARRRAGRDVSSGSLHNDTAYGIVDGPDENGYMTLVETKPLDALNPKKLATVRDLALRSRLCELWERVAAEGSGESATVAWRRFTDRASEELRVRRVRVLVRLGENGLAFIRDRNGRVYKAYKTDGNAYMDIWLLPKGRKTTGETVSRFNAHQPDFRSPIKAEHPTARKLMRLQINDMIAVGEGDERRLLRVQFLSGQKITAVDHNEGGDLRARVRASDDAESYVPLRVSASRVIQAGLRKVSVDVLGRVQDGGPFGPDGRGRIGRS

SEQ ID NO: 5064 - protein, 1064 aa, unidentified
  REGION 1..1064: note = Description of Unknown: Cas Enzyme sequence
MMAQQMKPTRLGLDLGTNSIGWCLLSLDSDGEPDGIVRSGVRIFSDGRKPTNLTTKNADRRLARQQRRRRDRYLQRRRHLMELLVQHGLMPEDEEHRRKLAKVDPYPLRAKALDRHLHPYRTGRALFHLNQRRGFKSNRKTDKSQDGPVKRSVEEFQQKLKERQCRTVGEYLHQLHGERKSVRARRTGTKKTDIYELYPNRAMLEEEFGQIWQSQRRFHPDVFTERAREAIHKTIFHQRPLKKPIVGPCQFMDGKHRAAKALPSFQRFRILQEINNLEWHETGVPKQPLNDEMRSWLEEQMKTKKKVTFKALSSQIKSCGLASSDVEINLEWENRDSLEGNITAQLLASSKGIGKQWHEWPLNKQDDLVALLIGETEDSSKEMLDDDAVREILTGDYGLTEDQAEYCMDRSLPDGHGNLCREAILKIIPHLEEGLIYSEAVEKCGWHHSDHRYKGELLDALPYYGEVLEKHVTNPSRKQEDRKVPAKYYGRIPNPTVHIALGQLQRVINELIRLHGRPTEIVVEVGRDLPLGAKTKNERMQEQKKNRERNQEYGDRLREEFGQDNNRKNRLRLRLWEEMNVNDPQRRVCPYSGRQISTRMLFSDETEIDHILPYSRTLDDGINNKVLCTREANRDKGNKTPHEAFGHSPDGYSWTKIVEWVKGLPVKKRQKFHQDAMKHHEEDGGFLKRQLNDNRYISRITKEYLSYICRDQDIQVIPGRLTAYIRAKWGLNKILDRKAHEHRYPRKNRDDHRHHAVDALVIGLTSRSLLQRMAKAARRSDELEADRLMGELPCPWDGFYKDAEESIQSIIVSHKSSGGLCGKEGQLHEDTAFSIVSGPDDKGNYRLRRRVSLDASFSGNQVNQVVDDQIREVLEDLKNNKGKLDKDGLDAYRRRTGTSSVQLEEEASHSSIVIIRNCAGEPYKAYKTGSNWACEIYQTADGKWHEVIIRRFDANQPGFIPEWRKKHPTAKLVMRLKSDDVVCWEENGAKLFLRVQRITPGQISFADCVEANADKRNRDRGDSFNFTVKSVGRLQKLGARKADISPSGLVSIRSIPDPNADTKV

SEQ ID NO: 5065 - protein, 1131 aa, unidentified
  REGION 1..1131: note = Description of Unknown: Cas Enzyme sequence
MQKQSYVVLGLDIGTTSVGWALVDIKRHVIIDMGVRIFPVGLNEDKYKKSHVEEPTNVARRTARGARRRGMRFKLRRKQLKKLFAEKGILPAEAKSIEAYLWRAKGLDEALTPEQFFTVLLHLNRRRGFKSNRKEELAGEDKDTGVVKSAIKELKAKIEETGKRTLGEYFYSLIEANKDGVNPQAPIEQIRCRYTARDLYREEAELLWEAQARFHPNIYTEEFRKKVLDETIFYQRPLKSQKESVLKCRFEPKRPVLNISHPLYQEFRMWQKIHDMRVTISTENRHLSPLTDEEKQKLFEALNTPKSLDARGDFSLAKMEKLLFNGKNAKFSAEKNFKFKGNLTHYRFCKQLGEKFWNSLGEEKQLKVWQTARFAQDNEWLFNYAKREFGFTEEQAEAYLKVKLEDDYGSISQKALRKILPFMRIEGGGMDYTEACKAAGYDHSGQLEQFKYREFDGTMEDLETRFKELILKPNALNNPLVQRSLTETFKVVKAIYREYVPLHGIPQEIRIETIRELKMPKEKREKLRSKMRAKEERRKENAEFLSRKLGKHIEPWHSEVTKYELWLELGVSERENFTKEMIKTFQDFNKSISKKDLEKYRLWKESNRISPFSGKVIPLSDLLSPKYEIEHIIPYSRSFDNSFRNKTLCESDLNKAKGNRTPYEFFQKRSEKEWYLFLERIKDMPIGKQKRMMRRDVDDGLPESHLRNTAYAAKEAAKRLAILAPKVETSEGQLTALLRRHWGLNRFLHDDEKALKSKVEKIAGKEKADKTDVKNRGDHRHHSIDALVVACTTRSIIQKVNTESAGYANKGNKENLLRNMDIHPPEGWGKENFRDQLQFHLDRMVISYRNEKRLLSTRTSRIKTKDGLKRTKPTIAVRGALHEETNYGQIELPRAVGKLSAEEKAYVYRRPLAAITDKQVGLIIDPVVRQKVQDYVNKYGNGKVAAAFKNLEEIPLWMNEEKGIPIKTVRVLNPASDLICLKPKENEKLFVASGSNFRMAIYEDPLTRERDYEIVTFFEAVQRKLKGQPVLPQAKGNKTILLEFTHGDYFVRYENSPEEIDWDNMEDIAKNRLYRVGKFTQGSVVIAHQKLSKVELDKDPEPLKVKRAYSTLKAIKVEITLLGKIIPPKGL

SEQ ID NO: 5066 - protein, 1357 aa, unidentified
  REGION 1..1357: note = Description of Unknown: Cas Enzyme sequence
MIKLFCKLLNLGGCFMNKPYSIGLDIGTNSVGWAVITDDYKVPSKKMKVEGNTDKKYIKKNLLGALLFEGGETAKETRMKRGQRRRYTRRRNRLLYLQEIFKSEIDKVDPNFFMRLEESFLWPDDKQGSKHPIFGTLKEELEYHETFPTIYHLRKELADSDTKADIRLVYLALAHIIKYRGHFLFEKVDPKNANLKGNFSKFVDIYNEVFDDDKDSSVEVESILVAKSTKSKKIEDIIKLYPGLKKGDFFAKFISLAVGTSVSFQKEFELENECKLQIPRESFEEDLEGLQGQIPDEYFEVLYSAKALYDSILLSSMLSDISGTEAPLSSSMVRRFTEHKEDLERLKRFFKSHPTYDYNSFFNDNTKPYYAGYIDGKTSQVEFYKAVKKFFEKDNDAHWIIDKIDQEDFLRKQRTFDNGAIPHQIHLAELKAIIEKQKKYYPFLEKEAERIEIILTFRIPYYVGPLSNGHSKFGWIVRRGNEAIKPWNLEEQIDKGATAEQFITRMTNRCTYLPSENVLPKHSLLYEKFMIFNELTKIRYVLENNKHFAVDNEMKIKIFEMLFKKTRKVTEKQLLAFFDKEYPDFHITKVMGLDRKKPQFNSSYATYHDLKKIVSQEYLDNPENAEEIEDIIQTLTLFEDREIIREKLSEYKDHFTKEQLKKLERRHYTGWGQLSKKLICGIRDKQTHKTIMEFLEDDGYTNRNLMQLVTADELSFAKEIKEASSIDTTLSLRELVQEIPGSPAIKKGIHQSLKIVEEIRRVMGYDPENIVIEMAREAQATAEGERRSRERMRSLEKALAEFEGKVNVSLPKENKLLTNKRLYLYYLQNGKDIYTGADLDINLLSTYDIDHIIPQSFIKDDSLDNIALTTREDNRGKLDNVPSSEVVRKMKGYWQQLLKAGLMSDRKYNNLTKAERGGLTEDDKKVFIRRQLVETRQITKQVARILDERFNHEKNESGEPIRKVRVITLKSKLVSDFRKKFELYKVREINDFHHAHDAYLNAIVGTLLLKKYPKLESEFVYGAFKKLTTRQTYEKATRRFLFYSNILNFLNGPLEDRVTEDGELIWDNDKDLPIVRNVLNMPQVNIVKKIERVESGPLYKETIHPREEKDDSKLISIKRNLSTKKYGGYKEPLEAYSLLVAFEEIAKGNKKISRKVVKIPIKDVVLVEKDVIGYLNGKGINNTVGIFKIYKNSLFEFENGRRRLLSSATELQKGNTLYLSREFIPLLYNCSKYVDESEDDYDKYISEHKMLFEPLFERIMDFVDSYIQKPKVSDRLRKVFNTRFSESNNLEIAKSFVNLLTITNLGASSTFVFFGEEITRNNYRYNSSKEHADGILVLQALTGLYETRIDLSKFGEQ

SEQ ID NO: 5067 - protein, 954 aa, unidentified
  REGION 1..954: note = Description of Unknown: Cas Enzyme sequence
MNKPYSIGLDIGTNSVGWAVITDNYKVPSKKIKVEGNTDKKYIKKNLLGALLFEGGETAKETRTKRGQRRRYTRRRNRLLYLQEMFKSEMDKVDPNFFMRLEESFLWPEDKQGSKHPIFGTVKEELEYHEAFPTIYHLRKELADSDAKADIRLVYLALAHIIKYRGHFLFEKVDPKNANLKGNFSKFVEVYNEVFDDDKDCSVEVESILGVKSTKSKKIEDILKLYPGLKKADLFAKFISLAVGISVSFQKEFELENECKLQIPKESFEEDLDGLQGQIPDEFFEDDGFTNRNLMQLVTADELSFAKEIKDASSIDTTLSLRELVQEIPGSPAIKKGIHQSLKIVEEIRRVMGYDPENIVIEMAREAQTTAEGERRSRERMRILEKALGEFEGKVNVSLPKENKLLSNNRLYLYYLQNGKDIYSGADLDINLLSTYDIDHIIPQSFIKDDSLDNIVLTTSEDNRGKLDNVPSPEVVRKMKGYWQQLLKAKLISDRKYNNLTKAERGGLTEEDKKTFIRRQLVETRQITKHVARILDERFNHEKNESGEPIRKVRVITLKSKLVSDFRKKFELYKVREINDFHHAHDAYLNAVVGTLLLKKYPKLESEFVYGAFKKVTTRQIYEKATRRYLFYSNILNFLNGPLEDRVTEDGELIWDNNKDLPNIKKWLYVPQVNVVKKTEVQTVGQNGGLFDNNIVPRTKIKNPEKYVEIKKNKGLDVTKYGGYSGETIAYSVFVVGKRKAKNGKIKAVKELVGITVRNQKQYEKNKLEYLLNLGFEEINLSLLFEFPKYTLFQMEDGRKRMLASSTELQKANMFYFEEKFVKLLYHAKNISDDNSKVHEEYLSEHRNEFLSLFKIIIEFSKKYIVKDKVEQKLVNAVEKDFESASINQLSESFVNLLEYVNRGPASQFDFLGVVINRENLRYQTVTECLNAIVCFESITGLYETRIDLSKFGE

SEQ ID NO: 5068 - protein, 1397 aa, unidentified
  REGION 1..1397: note = Description of Unknown: Cas Enzyme sequence
MIKLFCKLLNLGGYFMNKPYSIGLDIGTNSVGWAVITDNYKVPSKKMKVEGNSDKDYIKRNLLGTLEFDAGNTAKYTRQQRGLGRRTERRNNRVAYLRDIFHDEVRRIDPNFFARLDESFKVPEDKVFSKYSLFGNKKEDMAFHSKYKTIFHLRKKLSDSDEKEDIRLIYLALVHIIKYRGHFLFEQIDPKNVNLKENSSIFVSGYNDAFDDNYDGTVDVDSILTEKVSRSKKVERVLELYPGVKKNSLFAKFINLVVGNKVNFQKEFGLDNECKLQISEETFNEDLDALQGLIPDEYFEVFYAAKAVYDSMLLSTIVKDISDTNALLSASMIRRYEEHHEDLKKLKLFFKNNPKLNYNEFFNDESKDYYAGYINGKTKEADFYSNTKTLLENVEGAEWILEKIEREDFLRKQRTYDNGAIPHQFHLEELKAIIEKQKKYYPFLEENSKRIESILTFRIPYFVGPLSNGNSRFGWVVRNGNEKIRPWNWENQIDKVATAEQFIIRMTNRCTYFPDEKVLPKHSLLYEKFMVFNELTKIRYVLENNAHYAVSAEMKKNIFEKLFKKYRTVTEKQLLAFFDKEYPDFHIVKVLGLDKKNKNFNSSYGTYHDLKKIMPRDYLDDPKNEQEIEEIISILTLFQDREIIRERLSNYGDRLSKEVLRKLERRHYKGWGRLSKKLLCGIRDKQTQKNIMEFLEDDGYTNRNLMQLINDKNLSFANQIALENSVDIDSSLEALVKEIPGSPAIRKSIYQSIKIVEEICRVMGYDPESIVIEMAKGPETTAKGEARSSKRLDKLGEAFKDFKGNQKVELPTDNKMLANNRVYLYYLQNGKDMYTGEDLDIGNLSNYDIDHIIPQSFMKDDSIDNIVLTSSKNNRGKSDNVPSDEIVQRMRGLWKQLLNAGLISERKFYNLTKGKLTEKDKAGFIRRQLVETRQITKHVARILDARFNVRRDDNDKVIRDVNIVLLKSNLVTQFREAFGLYKIREINGFHHAHDAYLNAVVSKAILRKYPKLSSEFVYGDYQVYDVFDLIAKSKDTQKYGKATAKYFFYSNLLNFFKSEIKLADGQIIKRPEVEICNETGEIVWDKKTDMETVRKVLSLPQVNVVKKTEIQTHGITKGKQKGLFNATLSPKPAPNSKENLIPAKRNLDPRKYGGYAGISNSYAILVHAVIEKGKRKTLTDVIEFQGISIMEKEEFEKDEIAFLLNKGYKEIKSILKLPKYSLFELKNGSRRMLASILSTNNKRGEIHKGNQLWLPEKYIKLLYHAKNIKNKENTKHREYVEGHVNELKELVYFVLEFNSRFVDAKKNGELILNELQNWDENDVDKLVESIIAPGKESKKGIFELTAAGSASDFDFLDKKIPRYRDYSPSALLDAVLMRQSITGLYETRIDLSKLGEE

SEQ ID NO: 5069 - protein, 1459 aa, unidentified
  REGION 1..1459: note = Description of Unknown: Cas Enzyme sequence
LDHDFNLATGKKRIVEINEYGEKKISKVRTNLWGVRLFDEGETSENRRLKRGMRRRIARRKKRLAYLQELFQKEISTFDDSFFIRLEESFYQKGDKTVETKYPLFNGKVGSGESFVNEVDYYNKYPTIYHLRKRLVENQSQADLRLIYLGLHHIAKFRGHFTNQGQAFDLKNIDASNSLQELICQFDEWGNINRESKSHLEKANEILVSRKISRKAKSERLAGLYNTGDKIVDAQQRVLFTAVVGNGIDIAKIFNNEEYKPSEENKIPKASDFKYSNENFEDTWSEIQSYLQPEELEILEIGKKVYESIILSQILTEETLSASMVEKFETHKRHLRELKAFTKSISRKEFDKIFRKEGIYDCFIQGKGDPAKVTSRDAFYKEIKELFEKYFRGLKFPDGDKEFDFSQTMLTYEQQKELIKIHNEMRFEVYLPKQRMSDNGAIPYQVHEHELVEIIKNQSVYYPFLGEKVTMEEENEEGEITQKEEYKIQSLFKFRIPYYVGTLAQKSGWILNEKEELQQAESRSKNSWVVRRSTEKITPWNFSKVVDKEQSAANFVERMTGFDTYLPSEKVLPKHSLLYQEFIIYNELMTSGWLEKGKKQYFSPELRREIVNELFKSSKKVSAQKMLNFLNARHPGQLNLVSERELFGLDTFVNSPSYNGTFSSYIDLKAAGITDEMIEKHQDIFEQIIKWQTLFEERKVLKRTIKKANQNHWNQFLSEAQITKLSKKHYTGWGQLSKKLLDGLRTHNGKTIIENLKEENYNNFMRLLEDEKIVESINQAQIEKINNLSLNYAMVANLAGSPKIKKGIWQTLQVIKELEQFLGREKISKIVIEMARDQNTGRTKSRQKQIEKFYATFQEKTKGAIADGLNYSESDFKELKEELSNVQQLDDEKAYLYFLQNGKSMYGGTKLDLDYLSDYEVDHIIPQTYIKDDSFDNKVLVLKSENQNKGGDVPRKEIIDKMKSFWELLAKNGQVSPRKLANLTIGKLSDNQKKGFIKRQLVETRQITKHVANILADYFNKDQNQIEVLTPKAGLTSQFRRGEVFVPKEEFDIAMETSEGTHCEWDGREFCSTGEVKASKYKDSNFVKVHIHEGFTKLRDLNDYHHAHDAYLNGIVAIYIYETRPDLRNMWVYGEYQRQGQRKIGKYGQQRKEFFKQLLTGMKEKQWLCYEYDKEDFSVYTNGEFWDREEILGRIRKNLGLRNLNIVKKIEVQTGKFGDESVYKKNAKATNFAKGLKKGLAPQQYGGTKAPISAYGVIIQNAKGEIEVVSIPAMISQTYSKTADKLSYLQEIYPEKKITKILVRQVPKYTKYILENGGVRLFASYQEAQNGTQLPMMKMMNDSSTDEELAEIYRQLARFIFVNKLFAEKKLELLIKGEIQSYFDKASREEKKAIIEELIRAVKGSNQNLKTLQKAGLGTTAQQLKSGNKITNGTILVYQSVTGLYETRKTLPKSLEKNS

SEQ ID NO: 5070 - protein, 1366 aa, unidentified
  REGION 1..1366: note = Description of Unknown: Cas Enzyme sequence
VKNKITKDYCIGLDIGTGSVGWAVVDDDYKIMRLYGKDAWGALLIDNAESSKARRLKRGMRRRYERRRERIRLLQDIFAPMITPIDENFFLRLKESSLHVGEGKFFRNNHYNIFDGKFTDKNYFKNYPTIYHLRHKLATQSEPDIRLVYLALHHIVKYRGHFLREGDAKDIVEGGIEQSLEDLFTLLKDNYLTDIPCDTQVIEDLSKILKCNDKNRTVKQEEMVERLPKEYKTFATALAKALLGNKFILSNLFAFTDDVSEGLREVSFSFSDSDYEEMEEEYFALAANKQDVLAAVKSAYSTLALSEILRGKGSLSEAMTERYEKHKKDLRILKGIFRKYFSHDEYKRFFRSCKEINYVRYVGDKRYDGYFEAIKEGNNKYSGKISRDVFYKSLRKRFEKIEHPDEQTQYCLNEMAKGDFLPLINSVENSYIPYQLNLAEMEKIIENQGDYYPQLRQEKDKIVSILTFRRPYYVGPLKGPYSWNEQQIEGRITPWNFYDKVDTDKLAENFIVRMTNRCTIFPDQECLPKNSITWQKYVILNALNKLSVTNRTTNVQHTVSVQQKQAIFDELCLNKRKVTKAQIAKLLKYKFNIDCTKEDIGGLSSDALDVGMTSYIDFKQRLGATFDEGLLDEYEESIRTLTIFDDTNLRKKRLKAQNVYTDNQVESLCKLKYSGWGSFSRKVLRDTRSRKGENIMQLLYEGNKNFQELRYDKSLGFLEAFEPKNTENKNPIDLVKDMRCSPIVKKIVWNAIRILEEITSVTGKPPKAIFLENTQEDAPKKKTDSRTKQLKELYNTVKNSEYFNKEAAEFLEQQDDLSGDAFYLWLLQLGRCMYTGEAIPLDQLKQGNFQIDHIVPQCYIKDDSLGNRVLIKTSDNANKTGTLGTNPDIIQRMRKFWEFLHEKKFISDKKLRSLMKTNYDVNDQIGFIDRQLVDTSYAIKEIQNVLKQCYLQTEIRGIRAGLISTMRQKYRGKYAGFYKIRGLNNFHHAKDAYLTAVLGMFTTYAFPLWGNSSENKYYKDSLVNATSQDQVKDLVNKRYGYILDLMSSTDYSRFHVDENGNCAWSEARFNNIFKTMAKNSCLVVKKQEPVAEAEFYNQNIISPKDKSAKVEKLRPLKISDGIPMPTDLYGGYASVNPAYFVIIQRTDKTGKSRLVFGSIPTVEVIANNTDKYIAEEYGDVENGVTAKVLRRIKKYQLVEYDGQLCYISGQKDLQNAVELYVTPKYEELLWLADAKKQAQTAKRSTEKYLKAYEKESAKMDALLCEFVDYYCDKLTKHYPSYKNFAETLQKQKDKLLQFEIDKKLDLLSKMMIVTSSGPGRITLDEELGGGSFGRIQKTLSPDKATFIDLSLTGLHCKTSSFNEVLK

SEQ ID NO: 5071 - protein, 1338 aa, unidentified
  REGION 1..1338: note = Description of Unknown: Cas Enzyme sequence
MSEKIRKNYNIGLDIGTASVGWAVTDDNNFNLLKIKGKNMWGVRLFDGAETAQDRRLSRSTRRRYNKRRERIRLLRFLMNDMIMKVDDSFFIRMENMSFLDKEDKLLESHKRNITYKDNYNLFVDQSFNDKAYYRDFPTIYHLRKHLCENNEKADPRLIYLALHHIVKYRGNFLYEGQSFSFDNSDIKEKINDFFMDFFEKNELKCVIDERQIESMIEVLKQRKVKSQKAKELLDLFSFDKEYKSIFVQIMAAVVGNSFNVSKMFPNDFIQSEGKDIKLKFSEAKFDDDIVKYENDIGDKIESIQELKTIYSWVELHSIIGETNDDRISISNSMIQRYEEHKNDLKSLKDVIRKYYPQKYGEVFKDKKEKLHNYYNYIHHPKDTPIESFYTYIKKILDNTDSEEVKDILDKIDLETFMLKQNNRTNGSIPYQLNKDEMEKIIDNQSQYYPELQENKEKIMSILTFKIPYYYGPLNPNGKDFAWIKKQQGKENERILPWNHEQIVDIDATAEAFIQRMTNFCTYFPEEPVLPKYSLIVSKYEVLAELNKISIDGKLISVDLKNRAYSQLFMKKKKVTDKILRKWLKDNMEVLNVDNTDIRGYQKEDSFSTSLTSWIDFTNIFGEINESNFDLIENIIYDMTVFEDKNILEKRLKNKYNLMPKEIKKILTLNYKGWSRLSKKLLVGIKSDYKGNIGVNVIDVMEMSNMALMEIINHKQLSFKKQIEDVNYIETEGKFHLEEVKMLAGSPALKKGIWQSLLLVDEIKKIMKQEPQNVFIEFSREDGKKERTTTSIKRLQSIYQDIDLQTKEEHEIYRLLNKEDNSKKIDSERLYLYYMQMGKCMYSGNPLDIDKLELYQIDHIVPQSLIKDDSIDNKVLVISKENQRKLDDLVVPKDIREKNFIFWKKLFDSKLISAKKFYSLTKAEYTMRDQERFINRQLVETRQITKHVAQIINNHYKDTKVVTIKANLSHDFRMKYKIFKNRNVNDYHHAHDAYIACVLGKYIQQRFSSLDSKYIYGEFKKYAKNKVNLTYNDGFILNSMNNIFYDETTGEVIWNPDHIGTIKKCFYYKDCFITKKLEEKTGTLFNLTIQPNDKNSTKKRTKDLIPVNKFRADFHKYGGFDGIQSVALAIKGIEKRKNKDIHINRVVALPLVYVDWSKLKKENYIKKEHKLENVEIIKVIKKNQLIEIDGGLYYLTSASEFVNAKQLILNEKDYNLVHMINVSVNKNDYKDLNNQRIDELYITLYKKIEDYYPMYKTIAKHFSDEIEQFKRFSIDIKCNIIQQILKVLQANPSNGSISIEGFYKNDRIGRLSKKTVELDKTYFISQSVTGIYSKKYKL

SEQ ID NO: 5072 - protein, 1359 aa, unidentified
  REGION 1..1359: note = Description of Unknown: Cas Enzyme sequence
MLEKPYYLGLDMGTNSVGWAVTDQQYNLLKAKGKDLWGIREFAEADTSVERRTHRISRRRRQREQARIGLLNDYFHDAIIAIDPSFFQRLENSKYHLEDKDQNVRYKYNIFNDPDYTDADYYTQYPTIYHLRKELLENPKPHDVRLVYLALLNMFKHRGHFLNSGISDGNNERSLKDAYINFAISVSELTEDYFNQDVDYSTIEGILSSRDLNRTKKAEELSTVLGIDFKNKKYKEYLRAICGLKINAYTLFSDQLPDDTTKIDLCVSDASFDEKSEELVSLIGEDLFQIILNIKEIYDIGSLAGILKGYTYLSQARVAAYDKHKHDLKLLKSSIKKYCTKEEYNNFFNSDADGSYASYIGSFNSGNKERRVGSKRTSEDLYKEIKKLLKGANKSDPAINEIFTSIETESFLPKQLTASNGIIPNQVHSKEMARILTNAENYLPFLKETDENNLSISNRILQLYKFQIPYYIGPVTEKSQRDGGNGWVIRKDNGRVFPWNIEEKIDVKATSEAFISRMVRRCTYMNGKQVLPKASLEYESFRVLNEINNLRIDGERIPVTLKQDIYTDLFQKGKKVTKKQLCNYLATRGLIESSEQVTGIDIAINNSLSTYGKFKAIFGEDIKLDHIQHMIEDIVFWCTVYGDSKQFLKEQIEDKYKGKLSPEQMKRILGFKFKDWGNLSKEFFELKGADKSTGEAVSIIRALWENNLNLMELINSPEFDFKEQLADYEANSLKTLSDFEPEDLNDYYFSAPVRRMIWQTTLIIKELVHVLGKEPARIFIEMTREKDASRGRTLSRKKKFEDLYKNVKDENTDWAKVIEHADESGTIRSKKMYLYLTQKGRCMYTGNHIELSDLFNDNLYDIDHIYPRHFVKDDNIDNNLVLVTKEKNAHKSDNYPLEAEIFNKQRNMWTQLRKEGFISEEKYNRLMGRNAFTDEQKAGFIARQLVETSQGTKGVAELFHQLLPNSKIVYAKAGNVSDFRRNRELPKSRLVNDFHHAHDAYLNIVVGNVYYVKFTQNPINYIKNSYNKDMNKNNYNLSRMFDWDVKRGDEVAWIAQKQDGATGTISTVKKMLSKNTPLMTRLSYEGKGALANETLYSAEKAKGEGYIPFKSSDTKIQDVTKYGGFTSVTGAYFFLVEHDEKKKRIRTIESVPLYLADKIDKDSSELERYCDKLGLVNYDIRVRKIKIGSLLNRNGYFAYLTGKTGKQLILRNATNLCLDKKWTRYIKKIEKYKETNVLDSIITSETMVNLYNELLNKFTVGIYGRRPNPIGEKMDSAKNTFTSYTLDNQCNLIYQILQLSKILGFETDLSLLRTNKQSGKPTREGGMQISKKIDNTTSMYLINQSPTGLFETKIDLQTI

SEQ ID NO: 5073 - protein, 1407 aa, unidentified
  REGION 1..1407: note = Description of Unknown: Cas Enzyme sequence
MVNKVWYLGLDIGTASVGWAATDMEYKIIRKNKKRLWGVRLFEEADTAKGRRVYRSKRRRLARRKWRLNLLEELFSEEVAKIDPNFYLRLKESKYYSEDKTHKLPYTIFNDKDYTDKDYYKEYPTIYHLRSSLMTEKEPDIRKVFLSVHHILKNRGHFLYKDLSVERNNLIDLIKELLETGKFIDIEEIDMLLLNRIEEISYSKISKKDKENEIAKLFKREKNVNNVKQLNKVFKLIFGGSSSLSDLFDDESYKDVDSKVKNISFVEKNYEEIRYMYEEILKEDEDIEILNLAKKCFNCITLDKITQEGNTLSESKVELFEKHKADLAKLKAIVKNDSILPEEKKDELYRIIFKEDNDKGTNYVNYIKDSKEGKGCSYEEFKKFLVKKLDKLEDSEEKKIILSELELETFLPLQRTKDNSVVPYQIHKEELIKILDNAEKYHSFLKEKDESGYTVKEKIIQLLEFRIPYYVGPLNSHKKANEGGYAWSVRKKGEENTPVTPWNYSKVIDESASAENFITNLTNKCTYLKGEEVLPKNSLLYSEFALLNELNALRYDGNRISIEARNAIIEKLFKEEGKNVTRKSIKKLLKAEGFINGKGEISGIDKTVKNDLKSYRDFKKILGDKFNSEHVENIILWSTIFDKEQGEKLIKEKIEDFYGGIYSEDEISKILKLNYKGWGNFSRKLLTEIVSEKLFNEETGECLNIINAMRYNNILFMELLADRFDYMSQIEDFNKTLQKEVTEITPDILEDLYVSPAVKRSIWQTIRIVEELKKIIGCEPAKIFIETTRKNKTKKIATNSRKEMLKKVYESIINNEDIMNLEKELDYTFNIQNKNKMLSDEDDLSLKRKKLFLYYLQLGRCVYSGESIKLDKLFNDNYYNIDHIYPRSKVKDDSIYDNLVLVTREKNEKKEDKSIFEVGFQTSNNKRFWKFLKEKKLITEEKYYRLTRTSEFTDYELAGFIARQLVETSQSVKEVASILRTLNPNSTVCYSKAENIIDFRKNFGKIKDGNRQSKNTEQLIKVREINDYHHAKDAYLNIVVGNVYDTKFTRNPYYYINNSKNGRNYSLNNMFYTDVRNSNTIAWEMDKTVHQVEKVMNNNCILVTRRTSEKKGRFYEETLYKAAEAEKVDGVGYCPFKISDNRLLNVTRYGGYSSIAISFYSIVEYNLIKNNKKKKVCRIIPIPVINSKKLITKELLISFITKQLNLKKNEYIENLKIKYKIFNEKNLIKINNHKYYVGGKTGNRIYCDSAIQVLFDKEVEKYIKILSKHYNQTNKSDTEIISKDITRENNLKLYFTLLDKMKSKVFANKKQEKYKELILDDTVNKFKELSIKNQITVLFEILNILTNKRKPNFDKKLVGVTVSRGVQSFDLSNLNQFSIIEQSVTGFYEKEITIIGDKGNDVEDSNS

SEQ ID NO: 5074 - protein, 1407 aa, unidentified
  REGION 1..1407: note = Description of Unknown: Cas Enzyme sequence
MENKVWYLGLDIGTASVGWAATDTEYKIIRKNKKRLWGVRLFEEATTAQERRTYRSNRRRLARRKWRLNLLEELFSEEIAKVDPSFFLKLKESKYHYEDKTHKLPYTIFNEKDYTDKDYYKEYPTIYHLRSSLMTEKEPDIRKVFLAIHHILKNRGHFLYKDLSVERNNLEDLIKELLVTGQFIDIEEIDVLLLNRIEEISYSKISKKDKENEIVKLFKKEKNVNNVKQLNKVFKLIFGGTSSLSDLFDDESYKDVDNEVKKISFVEKNYEEIRYMYEEILKEDKDIEILDLAKKCFNCITLDKITQEGKTLSESKVELFEKHKNDLAKLKALVRNDSKLSEEKREELYRIIFKEDNDKGTNYVNYIKDSKEGKGCSYEDFKKFLVKELAKLQDSEEKNIILTELELETFLPLQRTKDNSVVPYQIHREELIKILDNVEKYHSFLKEKDNSGYTVKEKVIQLLEFRIPYYVGPLNSHKKANEGGYAWSVRNKGEENTPVTPWNYSKVIDESASAEKFITNLTNKCTYLKGEEVLPKHSLLYSEFALLNELNALRYDGNRISIEARNAIIEKLFKEQGKKVTKKTIKELLKTEGYIDGKGEISGIDITVKNDLKSYRDFKKILGDKFNTEHVENIILWSTIFDKEQGKKLIKEKIEDFYEGIYSEDEISKILKLNYKGWGNFSRKLLTEIVSKKLFNEETGECLNIINAMRNNNILFMELLADRFDYMKQIEDFNNTLQKEVTEITPEILEDLYVSPAVKRSIWQTIRIVEELKKIIGYEPTKIFIETTRKNKTKKIATNSRKEMLKKVYESIINNEDIMNLEKELDYTFNIQNKNKMLSDEDDLSLKRKKLFLYYLQLGRCVYSGESIKLDKLFNDNYYNIDHIYPRSKVKDDSIYDNLVLVTREKNEKKEDKSIFEVGFQTSNNKRFWKFLKEKKLITEEKYYRLTRTSEFTDYELAGFIARQLVETSQSVKEVASILRTLNPNSTVCYSKAENIIDFRKNFGKIKDGNRQSKNTEQLIKVREINDYHHAKDAYLNIVVGNVYDTKFTRNPYYYINNSKNGRNYSLNNMFYTDVRNSNTIAWEMDKTVYQVEKVMNNNCILVTRRTSEKKGRFYEETLYKAAEAEKVDGVGYCPFKISDNRLLNVTRYGGYSSIAISFYSIVEYNLIKNNKMKKVCRIIPIPVINSKKLITKELLISFITKQLNLKKNEYIENLKIKYKIFNEKNLIKINNHKYYVGGKTGNRIYCDSAIQVLFDKEVEKYIKILSKHYNQTNKSDTEIIPKDITRENNLKLYFTLLDKMKSKVFANKKQEKYKELILDDTVNKFKELSIKNQITVLFEILNILTNKRKPNFDKKLVGVTVSRGVQNFDLSNLNQFSIIEQSVTGFYEKEITIIGDKGNDVEDSNS

SEQ ID NO: 5075 - protein, 1383 aa, unidentified
  REGION 1..1383: note = Description of Unknown: Cas Enzyme sequence
MENKVWYLGLDIGTASVGWAATDTEYKIIRKNKKRLWGVRLFEVANTAEKRRTYRSNRRRLARRKWRLNLLEELFSEEIAKVDPNFFLKLKESKYYSEDKTHKLPFTIFNDKGYTDKDYYKEYPTIYHLRSSLMTEKEPDIRKVFLAIHHILKNRGHFLLQGQSFKDENINNLIKELLELDILHHDLEVSEEIVENIKNIAVEKKNLTDKVNDFKKLYPKEKQLLEILKVIIGDKSSLDKIFSIDEYKELDASVKSISFKEKVYEEVRHDYEQILSNYIKLLDLAKLVYDNIILSDVKKEGKTLSESKVELFEKHKTDLAKLKALVKNDSKLSEEKKDEIYRVILKVDKEKGTNYVNYVKTTKKGAGCTYEEFKIFLKKELAKLQDCEEKNIIIKELDLETFLPLQRTKDNSVVPYQIHREELIKILDNAEKYHSFLKEKDNSGYTVKEKIIQLLEFRIPYYVGPLNSHKKANEGGYAWSVRNKGKEKTPVTPWNYSKVIDETASAEKFITNLTNKCTYLKGEEVLPKHSLLYSEFALLNELNALRYDGNRISVEARNTIIEKLFKEQGKKVRKETIKELLKTEGYIDGKGEISGIDITVKNDLESYRDFKKILGDKFNTEHVENIILWLTIFDNREGKKFVKEKIKNDYRNIYTEGEISEILKLNYSGWGKFSRNLLTEITSKKLVNESTGECLNIINAMRCNNILFMELLADRFDYMSQIEEYNKALQKEVTEITPDILENLYVSPVVRRSIWQTIRIVEELKKIIGCAPAKIFVETTRTNTADKKPTDSRKKQLESLYKKIKDEEIKELENEINSTLDFSIKKDRLNAVESSKLKSKKLYLYYTQLGRCMYSGESIDINELFDNNKYDIDHIYPQSKVKDDSFTNTVLVKKVSNAEKTDKYPLGKNIQTKENKRFWKFLKEKKLITEEKYNRLVRTEEFSDEELSGFIARQLVETSQSVKAVASILGELNPETAICYSKAENVSAFRQNFGKIKEGNRKSKNTEQLIKVREINDYHHAKDAYLNIVVGNVFDVRFTRNAYNFIKDKKDGRKYSLNNMFYIDVRNSNTIAWEMDKTVHQVDKVMNNNNILVTRRTSEQKGALYYATIYKKTIAKEGAYYPIKTSDNIMKNVTKYGGFTKIKIAYYSIFEYILESKKGEEKITRIIPIPIHISQNIKEDSTLEEYAKEQLTFKSGEVIKDLRLKYRKLCIGDVIKINNFYNYIGGKTNDSFMYDSAVQVVLDKNSELYIKELAKYQNWKKENKDGQLWESITAEKNIDLYNTLVEKMNTGIFIKKKPNKFNDLDSEEIRSNFIGISEEEQAKVLLEILNLITNKKSTFDLKSIGITAARGKTSFNLTLQNSFSIIEQSVTGFYEKEIIIIGE

SEQ ID NO: 5076 - protein, 1392 aa, unidentified
  REGION 1..1392: note = Description of Unknown: Cas Enzyme sequence
MANKTWYLGLDIGSASVGWAATDTEYKIIRKNKKRLWGVRLFEEATTAEDRRGYRSSRRRLARRKWRLNLLEELFASEVKKVDENFFLRLKESQYHYEDKTHKVPYAIFNDKDYTDKDYYNDYPTIYHLRSKLMTEKIPDIRKVFLAIHHIIKNRGHFLLQGQSFKDGNLNNLIKELLELDILHVGFEVTEEVVGKIADISLEKKTLTDKVNDLKKLYPKEKQLLEVFRLIFGGKTSLDKLFAIDEYKELDTAIKSVSFKEKIYEEVRHDYEQVLSNYIELLDLTKLVYDSIILSDIKKEGKTLSESKVELYEKHRDDLLKLKNLVKNDSKLAEDKKVELYASIFKEDKDKGTNYVNYIRKSEEGKGCNYEDFKKFLVKELAKLEESSVKAEIIKDLELEQFLPLQRTKDNSVVPYQIHKEELVKILDNAAKYHNFLDEKDESGYSIREKVIQLLEFRIPYYVGPLNSSKKAKEGGFAWSVRNKGYEDTPVTPWNYSKVIDESASAEKFITNLTNKCTYLKGEDVLPKSSLLYSEFALLNELNALKYDGNRISLEARNTIIEKLFKQQGKKVTKTSIKNLLKSEGYIDGKGEITGIDITVKNDLKSYRDFKKILGNKFNSEHVENIILWITLYGESRKLIKAKIESVYGEVYSKDEITKMSRLVYKDWGRFSRKLLTELVSKKLYNEETGECLNIIGAMRQNNILFMELLADRFDYSKQIVEFNKELQEDVTEITPEILDDLYVSPAVKRSIWQTVRIVEELKKIIGCAPAKIFVETTRSNQEKKKPTDSRKKQLELAYKAVKKDVKELEKEIGTINFDVLNDRLSSVEPSKLKAKKLYLYYTQLGRCMYSEKPINISELFDNNKYDIDHIYPQSKIKDDSFTNTVLVKRESNAAKTDRYPLGSDIQTPSNRRFWKFLKEKGLITDEKYNRLVRTEEFSDEELSGFIARQLVETSQSVKAVASILGELNPETSICYSKAENVSSFRQNFGKIKDGNSKSNNNEQLVKVREINNFHHAKDSYLNVVVGNVYDTKFTRNVFNFIKDRKDGRKYSLNKVFYENVSDSKTVAWEMDKTIYQVEKVMNNNNILVTRRTSEQKGGLFDATVYKAKVAAKAKDGVYYPLKTSNSVVKDVAKYGGFTKIKIAYYSIFEYVLVNKKGEEKITRIIPIPIYISQNIKDDNTLLEFGKTQINLKSGEEIKDLKLKYRKLCIGDKICLEGYPYFVGGKTSDYFVYDSAVQVLIDKENEKYIKEIVKFTNWKKDNKDGELSKNITRKKNTDLYNTLLQKMKTPELINKKPNKYQEFEKEKTIHKFNDLNEEEQSKVLLEMLNLLTDMKTVYDLKLINITATRGKQNFDLTSLKEFTIVEQSVTGFYEKEITIIGDKGNDMENNNS

SEQ ID NO: 5077 - protein, 1056 aa, unidentified
  REGION 1..1056: note = Description of Unknown: Cas Enzyme sequence
MGNGLILGFDLGITSVGWGIINHDKEVIDCGVRLFEEADKDNNAKRREKRGSRRVKRRRKQRIIELKRLLMREGIINDDFHVLGNPYHLRVKGLTMKLENDELATALLHLVKRRGSSLDIVITDSSDTEGLKMKDTLKKNALMLNEKKKYVCEIQLERLLNGKKVRGEHNNFRTDDYVDELKQILSNQSLSQSIKDKIIELATRKRHYSEGPGSYTSPTEYGRFRKNEDGDVYEVNLIEEMRGHCSIYTDELRAPSSSFSALKFNLLNELNNLSFINSDFKWTKEKKDEIVSIVKEKGFLSPKSNPAKALSKLTGVEEKNITGFRINKSKKPLITDFSEYQKLLKVLKDGKSNIYNDEKVIDKISEILTSHKTESERVEKLVTILPESDLVKKIASLPGFTKYHRLSFKAIYLLNDELLYQNKNQMELINEMNLADTQDKAKLEIIDTGPMSPVVKRVQREAIKVLKELQTDYGHFDKIVIETTRAKNSKEVKDKIRRSQKYFEDLRKKAKELLGDLNVEKMSGKLVQKIMLYNEQNGKCAYTGNTLSLKAIATHSDDYEIDHIIPYSISLDNSQNNKVLVERKANQLKSNMSPFGYFSSGKAYGKISSFGQFKKIVNGNTNYNKRKRQLLLLMEDIDKYEVKDDFLQRNLVDTSYSIRQFMTALRNFYKSNNFDTKVFAIKGKHTSLFRNRAAYEYGKDLLRDMTNPLIKDRDYYRHHAIDALIVAMLSEQKLLKQLIKDERNQQLDEETGELYYKNPVLDKTFVKQLSYLGEIRDEQIKFSWKVDKKVNRSFSNETIYSTRYHQDNEYIVKKYDIYEMSQKEIERRLINEKERCLMYKHDKRTYDKVIKAYEQYKTEKLPFLAFKENQKQYITKYAKNNNGPNVKYISCLTKKLGNHIDISHNYKGNKRIILQNIPAYRIDVYQEPTGLYKFVTIRYYDLKPKGNSFEIDQSNYNSKLKQKKISSEATFKFSLHKNEVIRCVIITGKTLATYYYKFNGINDDGKNKVEVKTINSKGNKQIIVYVGSKMKQLNKFAVSPAGKFIKIENEILKMRV

SEQ ID NO: 5078 - protein, 1371 aa, unidentified
  REGION 1..1371: note = Description of Unknown: Cas Enzyme sequence
MKNFRCEKYFLGLNIGTHSVGYAVTDQNYSLIKFKGKPMWGTTTFEAGNLAAERRMFRTARRRIDRRQARVALLQELFAQPISQIDPRFFQRLANARLLRDATEDRHTLFADAGFTDKDYHKRWPTIHHLIVELMQSSEPHDVRLVYLACAWLVAHRGHFLFAVDGKSADALLDFGQVLDRFREWLSLNGYPTLWPDSVPEDIVKSVLSKKLGVTKKMALYVERLLDGRKPAKEPTEDCPFSEELAVKLLCGATVPLNNLYGNPEYSDLKSVSLSDDDAEFAEKVHLLGDDGELLTRLREVFDCALLSSAQNGCNTISEAKVRVYEQHKTDLAWLKNFIRKYLPDSWKEVFTPVAGKANYAAYSYHVRHPKDDNFKRAGKVDFCKFLEKLLKNVDVADEDKSAYEEVLERLGTASFLPRQRDPDNRVIPQQLHRVELKRLLETAAGYLPFLSDRDADGFSTAEKILSVFDHRIPYFVGPLNASSPHAWLKRKAKGRILPWNFAEKVDLDASEEGFIRRMTNFCTYLPGQPVLPKNSILYSRFMVLNEIAPLRVDGQPISEESRKGIFTDCFMQHPRVRLSDIRNWLIAHGMAQKDSVVSGADKMLKSSMRPLLAFITQVDGRWQSKLPSGYDFSEQDIEKILERMAFTEDKRRLKNWLLRSWPVLTEADARYIANLGFKDFGRLSKEFLTGIKGVCKSTGEVMSIMDALWTTGDNLNGLLSSRYTFADAVKKATEDHYATNHASLEDQLDELRLSGTVRRSVYRTLAIVSDIEKAMGHAPAKVFIKMSRGDREDRKGKRTKSRRDQLLELYRALADDDARMLAKDLERMDDAAASRLQGDKLYLYYMQLGKCMYTGESIRLEDLASDSLYNIDHIYPQSLVKDDSVLNNKVLVKSEVNGSKSDTYPVDETIRRHMHPFWLHLKECGLLSEEKYHRLTRATSFSDEEKWGFISRQLVETRQSTKAVAQLLTECFDKKTGIVYVKAGLVSDFRQAFGLLKSRAVNNLHPAKDAYLNIVVGNVWDARFSRARFNPNMRYSIKTEAVFGRPVLLGETKVWDGERSIAAVKAVMKGNIVHLTRFAFCRKSDGFFDQMPLRARVSETYARIKRDLPVEKYGGYKNVHAAFYLLAAYSEGKNSDAMLVPVDLVDAASATSDAASEEEYAARKISQILNGKCVSDVRLLLGGRKIKINSALYCDGLLLTIRGKTQKGNGVITRLLSPLILGSADETYVKRLERFTEKAAKNPNLVPSARYDRITPEANTALYDKLAEKMGNAFFRRCPGNMADALAEGRETFCRLDAARQTKVLLTIISWFGEAGSCDLSDIGGKKHMGTKRPSTRLSAWKKTYSDVRLLDMSASGLFVHDSGNLLDLI

SEQ ID NO: 5079 - protein, 1304 aa, unidentified
  REGION 1..1304: note = Description of Unknown: Cas Enzyme sequence
MKEYTLAPTDHLSAVPKESVKINRILALDLGIGSYGIAVQERSGQGENKQYTFPIVRSCTLPGDWAELKEERTRRRMWRTRLAHIEREGWLRQVFERCGLKDAVLWGRRLKKIAVEETGPGGVKVAKKRWTQDADNPPDYRLEREFPPQPGKKARDGAPSDEQGARTIYSGAALRCLLLLGEKAQIAAQGRTLEPWQIFKALHSAIQKRGYDAKVPWARTPTAKPALSDDAAPKRGRKGKKAEAMEAATEADSDPALSEAEAKERIEEKASLERALTMKGIVEGLSSDTRYQHPCFWEAYRMGLWDTQEQEVIIARQSHNSRSCKWADQEDPANKFKSANERDPYSLLPAIFPRQMVEAELIALCEAAAQQLPALSVSAYEIAYGPTGLPYPNIPRRDPALQEIETQRREALKALSPELREKFVRGKAAEWQGALSQKAPTFDNRGPAPCALIPRFNVAKCELRFDKDALVPDSALAAEVSFLLQLKNFRFVPEVKDDSKPGGLRDYFSPQELKQLHREHFNVTVLQRMASGMTGGAMTKKMLCDWMGEHIGPKTTPKPGQDGKGKEIIEMPKATGRARFSRPALRLLKELLLSGLSPAEFKAALVDLNNPAYDALRKALKLVVDDSREINTQEMRGMVASDLDFIDNIGASWDKISIRDERLEAISELTQAEKAARQAAITRMISMEINPKIRHRLTLLDHILDESTTDGRLPDRVVLEFAREEWLGPKRKKELEDFQKERREQNITARMNLGGEVTQKAVLKHQLLTEQGGRCLFCGKNFSNPATSSVAHGELSFENAHLSHIVADSKGGPRAYVNLVLACDGCNRAQDNRFHADAFVQSRFPFGWDAFVGIVSGCAGMRPFKKKILCTKSEDEAAQMVQNKTALQETAWIAKLARVLICLKFGWKLDAEGEQRRIVVVTGSVTNRVASKYGLYSLLGGPERVKKLADAKAAIEAAIKNVEAVSDDELDKLCDDFPKEWKMKKRKGADHWDKDIALWWLRRLRIANEDEINEKDRKDDRHHALDAMVLSFLPHWAGNPGKSLYFGLPPGKNWKDEFRHHLEDLYPEVLITARPELEQSFYGARRVGMTSAATKRYVLREIAYSGITPKFSNSTLSKQARRIFDKHIQSAVSTFADQNPKEAEWLAFCDSLAKDGLKTGGPRITHVRRIVSDELTEYADFSKDGAGAWRKGDKNQGWFVCEKKGREGEYAIEPVYVHQSKSKLEQRILKDGKYSRVVGFFIRDEVVTLDREITGIKDPFPTGSFVVRGMRLDGQVYLATNQGYEYNPTSITNLMLAGFRKGNL

SEQ ID NO: 5080 - protein, 1321 aa, unidentified
  REGION 1..1321: note = Description of Unknown: Cas Enzyme sequence
MKDYTLTPSLESKSELQENLRILALDLGIGSYGIALQERTGHGDNRRFHFPVVRSCTLPPDWAELKDERTRRRMWRTRLAHKEREGWLRQVFERCGLQAAVLRGRQLKKIAVEEISPTGVKTTKLRWTQDADSPPHYRLEREFPPQPGQRTRDGAPSDEPGSRTVYSGAALRCLLLLGEKAQEAAQGRVLEPWQIYKALHSAIQKRGYDPHVPWARTPTVKPSDSADPTRTKIRKGKKAETANESGDGVPVLSEAEAKEKKEEQASQERALTMKGIVEGLSPLARFHHPCFWEAYRMGLWDTKAPESVLPRQTYHARSCKWADQEDPANKFKNANERDPYARLPAIFPRQMVEAELIALCEAAARQLPALSVSAYEIAYGPTEMAYPNIRRRDPAKQEEETERRKALQALPDDQRKKFVRGKAAEWQGALSQKAPTFDNRGPAPCALIPRFNVAKCDLRFDAQGVPVSDSTLAAEVTFLLQLKNFRFVPEVLDPSKPGGVRDSFNPQELKQLYEDHFTATVLTRMTAGTKGGAMTEKMLCAWMSEHIGPKTTAKPGQEGKGKEIIDMPKATGRARFSRPALRLVKELLLSGLSPAEFKAALLDLNNATWQDLRKAVKLVLEPRNGTSLVPPDAAKDSPVFNTDPMRGMVVSDLDFLDNIGTSWDKISIRDERLEAISEMTHAEKDVRQNAITRMISMEINPKIRHRLTLLDHILDEIIADGNLPNRVVLEFAREEWLGPKRRKELEAFQKERRDQNIIAKMNLGGEVTHKAILKHQLCGEQGGRCLFCGKNFSNPETTSVIHGELSFENAHIAHIVADSKGGPRAYVNLVLACDGCNRAQENRYHADAFTQNCFPRGWDSFVTDVEKCTAMRPFKKKLLCTKSADEAALMVQNKTALQETAWIAKLARVLICLKFGWKLDSEGEQRHVVVVTGSVTNRVATKYGLYSLLGGPERVKKLADERVMIEAAMLETETGTDDDFEKLCDGAPSAWKLKKRKGEDHWDRESIFKELRKLQIKNEDAINEKDRKDKRHHALDAMVLSFLTHWAGNPGKSLYFGLPPGKNWKEEFRHYLDILYPEILIPEPPELEQSFYGSRRIGMLSVATKRFVLREIAYSGQPLAYSATALEKAVESITDTLIRGKVLAFVNTNPKEAEWLAFCAQMEREGLRKGGPRLLKVRRAVSKNLDEFADFSKDGTGAWRKGASNVGWFICKMRTEPVRYAVETVYVHQSKEVRAAEIAAHPDYCGVVGYFIKGEWIETSLPIKGLKMPLPEGTYLIRSMRTRNQQTEGMMELKSIQGTEYKPISVTRLMEAGMKKVKTHD

SEQ ID NO: 5081 - protein, 1325 aa, unidentified
  REGION 1..1325: note = Description of Unknown: Cas Enzyme sequence
MAAKDDPLAAAVPAADSTFNPTHVWAFDLGKASIGEAVRAGTKFLHKESLLIPAEFAETKTTANKRRLMRTREAHKEREKWLEQVWDAAGLKEYRTEKKRWNKEKKCFEPADTDYRLKREFAPALQRLNRRTGKKKQTKDSYADGKAKDGAPAAKLEDFQICYTSSLLRIKLLNGEPLQPWQIYKALHAAVQKRGFDSRIPWKLRERRQNRRADSEEMQDENYRRAGDNWQKEFLGTLRQHNLASDRFTRPCYYDAWRMGLWSPERPEHLGCWNPTNDATLPPHGSYRTTHYAQSSRNVRFPRSSVEGELLDLVNRAAEQLPLLAQYLQRQSGGAEERLKAFLSSPDGARYRNEYEERRPKYPAALSPGAFFVYGPALFPYASFFPVFRKAFRLREGGANDWNAALGQKIPRFDNRIINECALIPRLQVCAAGIRIDRNGRPFPETLLASEHHLLWKLKNIRFYRDGREDHLTASELKDIFEHPSAEIFSIRKQTWERLAKELGWQPDALPKPIRPPKVKGRKLTRRELYEWFAQQLRTVTVTRTDGSSSPLTPEEHVAAGTEIILRSHGLTETCWKAWVESKGGTVLPAHESIPEPKAKGRARYSRPALALLRKFILSGLAPDEFRQQESATLATGEFARYKLKPHDLSCFRSERMGTSWEKTYIPNERLASQVLRAGSTAAERRKAIADLIAEQNDPIVRHRLRVFVERLEVLSRAYEPPQHIVLEFVRDVLPESFLAQEAQKDYEKWIRDNEKKTKEAREIVKQLGATGRDSVQKYLLLRAQGFECIYFPNGSLNVGATKQALADSPCIYTEQRIGLSSLDDLRIDHIVPRGGGYGGPDSFLNKVVTTRHVNEDLKKCRTPFEWFHADMPQLWKAYVQRVETRIGTLGRKKVKLLTSPDAPELVRRYTDLAETAWIAKLAQAILCMFFGWEFGLDAERRRKITVVSGGLTARIRRRYGLDELLYANREAFLAAGREKNRDDDRHHALDAMIISFIPAWATHPDKEEFFRFPDGVDPRRLFREALNDVRPRRIAWRSPPLEETIYGRRMRDGKEYRVGRENLVSLALKGDPKKPLMRASVDIESEIRRILDSSIQKKLRTFFTENPAATVERWKQFCGALGIKKVMITKTKPGSIAEYGLMTKSSSEKRGHYKKAANHRGYFIVTRPSPTKALPGKRTAYVAPVFAFQTRQEVEARLKQETGLEIVDYFWSHCQVHFEKAWPFKGTEYPPGEYTLKTLWEQGNAVLKHPILGSIGERPRHNSPVGIAVLVEAGIRCSSRGGKAWKHETKPVIATAKLDKRAIETVPELPIPSKPASQPQPPQL

SEQ ID NO: 5082 - protein, 1109 aa, unidentified
  REGION 1..1109: note = Description of Unknown: Cas Enzyme sequence
MGKLVLGLDIGITSVGYGVIDIDNNKFVDYGVRLFKEGDSNDNEKRRSYRSGRRLRRRKKNRLDDMKSLLLSAGILTKDYKPLNNIYEIRVKGLTEKLTNNELAAALLHITKNRGTTVEALETADADKEAAGTKDVLAKNAKDLEQFEYVCKVQLYRLEKYGNIRGTENNFNTSDYVKEARAILKCQDIDVELSESIVNIISRRREYYEGPGSEKSPTKYGRWIEKGAEPIDLIEKMRGKCSIYHDELRAPKSSYSAELFNLLNDLNNLSINGEKLTQNEKEIVIEEVNNNGKITIDKLKKLLNINDSKDVVEGFRINKSNEPLLTDMAMYDQFKKVFDKHKEDAYQRDKYIIDQIAEINTAKKGIKERCDAIEKQFPNFDYNLIRDLAEMKKMTQYHSLSLKAIREINKEMIKSPYNQMQAIHELGLQHYRKSYKGMKKIQVDEEAILSPVVKRAQRETFKVINRLREIYGEFESIVVETTRDKNSKEKKERINKTQKYYEDRNKKVDELLKERGYNPDTINNKTKMKVKLYLDQNGKSAYTMTPLKLNLIITNPHAYEIDHIIPLSISQDDSFNNKVLITHEENQVKGNKTPIYTYLNNQFKNCDINKYKESVKNNHNFSRKKKFYMLYEKDITKYSNMKEFIARNLVDTSYASRVVLNTLTSYFRDNDISTNVHTIRGSATSLYRKRIGLKKDRDKDYLHHAIDALIVASIKKQSIFRKYLIKYNLSELYNEKTGELIKVEEDSKVIDPEFIEFISNLKTIYEQSYQYYNGYISRNKMKFKPIKISHKVDTKPNRKISDETIYSTRNVNGVERVVKKVKDIYDPKFDKLTNDIINNQYHNKWIMAEKDEQTFEIIKSIVMAHFNTYKEDKDIYKSKSKKGVTSWSLKGSNNPLSQFKEEHGKIRKYSKKGNGPEITSMKYYEDELGNHVNITKKYNVDNKNVVLLQISPYRTDFYVSPKGKYKFVTIRYCNVFYKESNKKYLIDKKWYEEEKKKKKIDDSYQFVCSLHHDEILGVKLEDGKPYIYDESNENDEGLKRYHKGQYEILKFTATNDDKKNIIEIKPTYTYCQKQLKRSCGTFIKLTKFATDVLGNMYEVKDNVLKLEFD

SEQ ID NO: 5083 - protein, 1078 aa, unidentified
  REGION 1..1078: note = Description of Unknown: Cas Enzyme sequence
MAKLALGLDVGISSVGWSVVNLENGSLVDCGVRLFEEGSAAENLVRRTRRGSRRLKSRRQNRLVDARTILMKYGLICDLKFKLLDNPYALRAKGLKEVLTNEELATAILHLVKRRGSSLETVEEDEKKQNEDEKVKNILLENEKLVHSGKFPCEIQLDRMQSQKHIRGEMNIFKTKHYVNELNQILSNQKLDSNLTKELIVLIQRRRQYYEGPGSEKSPTIYGRFIPQDDGSVLIIDLIEKMRGKCSLFEDQPRAPKSAPSTELFNFLNDLNNITIHLDEDNTLKINQLQKQEIIEKYIINGKHNITPKQLAGYLEVDLESLTGFRIDKDEEPKISGFEGYKKLVNSNKESPNLDKLNNFVLLDKIVEVLTKTKGIEERVIELNKLPELIGMDQEITNLSKISGLNQYHALSFKAIYELNEELKQTNDNQMQIISRKGYLKLKTEKYKGLKNIPADHEAILSPVAKKSQQESIKIVNRVRSLYGEMDKVVIEMPRDKNSQEEKNRIKLDQKNYEVLNRRVIEYAQTDQINSKTKMKVRLYMDQDGKCLYTGQALELNRILTDPNAYEIDHIIPISVSFDDSYQNKVLVINQANQVKTNMTPVAVFNQGLFKGWSYETYYTYVLNLRKTNKISVKKFLYLVFDKDINKFETLKEFINRNLVDTRYASRVLLNTLQKYFAANEINTHVSTIKGAVTSAFRKQLDLTKNREESHYHHAVDATIIALLSKQRNFDAVFSNVQIKDDLITFENFKYDYSDPELFYEQSLMKLLSEVKNIQATKISYKVDRKPNRQISDETIYSTRLVDNEEKVVKKFKDIYDQKFTELALIILGESKSRTVDDLLIYQHDRKSFEKLEAVVQTYIADVGPIDKENPFYWYKVTQGNGSITKYTKKGVEGAPLISIKYYDGNLGNHIDVSKSYDRNQHELKLKRVVLLQISSFRTDIYRNKQGLYKMITIRRKDVKFDSTKKIYFISPEVYSVKRIEKGVDDTFGFCFTLNRNDMIEIKKVKEMNSEKYRFVVTNDENANIIEVKPLNYYEKKQMRLAVGKSIESIRKYNTDVLGNVYEVKNEVLTFEILSNKI

SEQ ID NO: 5084 - protein, 1090 aa, unidentified
  REGION 1..1090: note = Description of Unknown: Cas Enzyme sequence
MTKIIVGLDIGITSVGWAVTDEDSGKIIDAGVRLFKEGQAGENVKRRTFRSGRRLNRRRVHRVKDFVKLAIKEGLVKEDYEILSNPIELRVKGIRQKLSNEELFTALYHIVKKRGSSFEVVEDEKVKDEETAKASLSMSDKLIASGLYVCEIQLQRLEEKGHFKGSDNIFRTKHYEKEARQILNNQSVSELFVNGVIELINRRRHFSDGPGSMKSPSIYGRFIVQDDGSIEIIDLIEKMRGRCSIYPEHFRAPKQAPSAELFNILNDLNNLKVLNESIDIETKKDIIRVLIREDKAHSITMSKLTKHLNVTTEDIKGYRVNAKDEPIFSEFIGLKLVLKAVDESRHQLYLDNFAVIDEIMVILTSTKVIEERFEKLIQLQERLPIIHIDDIKPLSQISKIGGYHSLSLEAIYQLNNELFDSTDNQMQIIHRLHLNQLNTDHLIGLKDIPYDRTAILSPVAKRAQQEAIKVVNQIRKNYGEASKIFVELAREKNSDEKKSLIRKAQKNLETLNKSLQEIVGETEINSKTRLKLRLYKEQECKCVYTGECLNINSILSDPNAYDIDHIIPLSVSLDDSMANKVLVTNKANREKGNLTPLQAFRSNKFDGWSEESFRYYVSNLAAYKYGANKKKLNYLLDEREITSYSNMKDFIARNLVDTRYASRVVLNTLQDYFKVNQIPTRVVPINGKITAMLRGKIGIKKSRDENYFHHAIDAATLTLLTQQSHFSKVFDNILIENKDVEINTDGIPVYDYKDFLTESFMQKLVPLRELAEEHEFKDDLPFKFLESKIKISHKVDKKPNRSVSDQTIYSTRQTEEGEVVIKKYKDIYDPKFLTLAQDIIANKVQNKYLMAKHDPKTFEKLVEIVNQYMREFKELKENPFSVYYNNHGSVQKFSKKGNGPEIKSIAYVDGRLNSHIDISSKYEDSLFTNKQKRVVLQQISPYRTDFYVNDKNQYKFVTIRRSDVRYSGKKNLYFIETDWYQEQMDKKSIDKTYDFLFSMHRDELMYIEKQEKNIDGSVSIIKDIWKFTATNNDTKNTIEIKPIHYYEKKQLMPTIGKSIIKLQKLHTDILGKIYESKNNTLKLEFNIDKI

SEQ ID NO: 5085 - protein, 1425 aa, unidentified
  REGION 1..1425: note = Description of Unknown: Cas Enzyme sequence
MYNIGLDIGTGSVGWCLTDENGYLLKVNRKGNNGNTYRNSAWGVRLFESADTAADCRIKRSTRRRYNRRRTRIIKLRKIMSDMIMPIDPNFYARLDEAFLWNEDKSDKAKAPFLLFNDNGYDDVKYYTDYPTIYHLRKHLLEKEGRADARFIYLALHHMMKYRGHFLFEGQSFKAIDNIEDTFIELEHLVNVYVKEKEDTDNNSKNNALYQTIKNYLADNKVKNKDKKEDITDTFIKAGYDNKYSKELAAAVLGYEFNVGIIVNDNSLTDEDGKALKAKFADAKYEEQEEKLSDKLGERYYIVEALKKIYSWKVLHSILGDSMLLSYAMVDKYEKHREQLTALKNLFHKYVSQDEYSEFFHQEKNKEGKYIVNYANYIKGIKRLSNETNKKYNTKQQLYQSIMKILGERAADDEVYKKILVEMEQETFLEKINNVDNSAIPYQLNLMEMDKILTQQGVYYKELRDNKELLLKMLTSKIPYYVGPLNNNNKGNRNFAWMTKKAGKENEKVYPWNVKDVVDIDVTAEDFITRMTNYCTYLPDEKVLPKESLLYQRYMLLEELSQIRIDGRKLSKEDRKAIIDDLFIGKGRVKVSDKDFKEYLDKVNYVKVNSKGYDVTGYQSDDGFACALSSYNKFRRILGHIDEQNEKMIEDIIYWITVFEDKDIVKRKINKQYADRLSAEQLKKILKLKFKGWGRYSSKLLNGIKGDMGTTIIEMLEDADERFAYCDYCPNFMQIINKDEKIKQIIDDNRPRYDGTKDLLDVIQDMHTSPANRRGIWQTMKAIEEIIEYMGEKPQQIYIEFAREDDPKAKNKRADSRKRAIDKALKKLKEDVVDEYNENVYKELKQYEKRLDEEKVYLYFMQNGKSLYTGKELNLNEPENLEIDHIIPYSLSDDNSLDNKALVLKKENQNKGNKIVKEAFPQSFSDSKMIDYWKNLKKAGLISEKKFNNLQKNNVEDILTKGFINRQLVETRQIVKSVANLILDYYNEQIDVIEVKASLSTSVRKMLTYEKKDNNGFWEENKDNCMFYKNRDMNDYHHAHDAYLANIIGMYIQKNYPHLQKELNYSQYRRVWRKYYENTKNNNGVNWFATLGKFSSNNEKADWYGQGIIAYMRKIFCYRDVIISKKVEENTGAFYSETKYPREDKTDSKLVPLKQGNNMRGANNLKELDTRKYGGYKGGEKAYFVLVKYCIEKALKKSVKKEYHMEFIGIPVYIARGIKNKDINLYDYVCDILNEANKNSVADVEILRNKVPKYQMIIGENGEEYYLVGATEVINSKQFVLGGANQRYNRLLNYITYGENDKWQYIQTELIDEQLIGLYNLLIAKIKDEYKGFSKEAVRIQENNSFDKLDVKNKKEFIAEMIKLVQPDSDYPDLGKYATGLSNRMGRKSKEKVGKKITLVDKSVTGLYERRTTFELEDDSSTKSR

SEQ ID NO: 5086 - protein, 1432 aa, unidentified
  REGION 1..1432: note = Description of Unknown: Cas Enzyme sequence
TMQEESGMYNIGLDIGTGSVGWCLTDNNGHLLKINRKGNNGRSYRNSAWGVRLFESADTAADCRIKRSTRRRYNRRRTRIIELRKIMSDMIMPIDPNFYARLDEAFLWNEDKSDKAKAPFLLFNDKEYNDKKYYEDFKTIYHLRKYLINTTNKVDARLIYLALHHMMKYRGHFLYEGQTFESIDNVEDVFVELNNLVNAYIKECEDKDGNEYNDVYREIKKCLADNEIKNKDKKELIAAMFMRADYSKKYSKEVAVAILGYEFNVGIIVGENELTGEDNKPLKTKFSDANYEEQEENISSVLGEKYSIIEALKKIYSWKVLHGILGDNTYISSAMVAKYNIHKQQLSELKQLFHKYASLDEYSDFFHKEKDKSGNDIVNYANYIKGIKRLTNKDNKNYSAKQQLYISIRKILDDRALKDETYQKILKEMEEETFLEKINNVDNSAIPYQLNLMEMDKILTQQGVYYKELKDNKEQLLKMLTSKIPYYVGPLNNHNKGNRNFAWMTKRAGKENEKVYPWNIKDVVDIDVTAEDFITRMTNYCTYLPDEKVLPKESLLYQRYMLLEELSQIRIDGKKLSKEDRKAIIDDLFIGKGRVKVSDKDFKEYLNKVNYVKVNGKGYDVTGYQSDDGFACALSSYNKFRRILGHIDEQNEKMIEDIIYWITVFEDKDIVKRKINKQYTDRLSAEQLKKILKLKFKGWGRYSAKLLNGIKGDMGTTIIEMLEDADERFAYCDYCPNFMQIINKDEKIKQIIDDNRPRYDGTKDLLDVIQDMHTSPANRRGIWQTMKAIEEIIEYMGEKPQQIYIEFAREDDPKAKNKRADSRKRAIDKALKKLKEDVVDEYNENVYKELKQYEKRLDEEKVYLYFMQNGKDLYFPDKELNLDELEKLEIDHIIPYSLSDDDSLDNKALVLKGNNQNKGNKIVKEAFPQLFSNSGTVNYWKNLKKAGLISEKKYNNLQKNNVDDILTKGFINRQLVETRQIVKSVANLILDYYNEQIDVIEVKASLSTSVRKMLTYEKKDSNGFWEENKDNCMFYKNRDMNDYHHAHDAYLANIIGMYIQKNYPHLQKELNYSQYRRVWRKYYENTKNNNGVNWFATLGKFSSNNEEADWYGQDIIAYMRKIFCYRDVLISKKVEENTGAFYSETKYPREDKAGSKLVPLKQGDNMRGANNLKELDTRKYGGYKGGEKAYFVLVKYCIEKALKKSVKKEYHMEFVEIPVYIARGIKNKNINFYDYVCDTLNEANKNSVADVEILRNKVPKYQMIIGENGEEYYLVSATEVINSKQFVLGGANQQYNRLLNYIKYGKNDKWQYIQTELLDEQLIGLYNLLIAKIKDEYKGFSKEAVRIQENNSFDKLDVKDKKEFIAEMIKLVQPDSDYPYLGKYATGLSNRMGRKTGEKVGKKITLVDKSVTGLYERRTTFELEDDSSTKSR

SEQ ID NO: 5087 - protein, 1430 aa, unidentified
  REGION 1..1430: note = Description of Unknown: Cas Enzyme sequence
  MOD_RES 840..853: note = Any amino acid
MYNIGLDIGTGSVGWCLTDENGYLLKVNRKGNNGNTYRNSAWGVRLFESADTAADCRIKRSTRRRYNRRRTRIIELRKIMSDMIMPIDPNFYARLDEAFLWNEDKSDKAKAPFLLFNDKEYNDKKYYEDFKTIYHLRKYLINTTNKVDARLIYLALHHMMKYRGHFLYEGQTFESIDNVEDVFVELNNLVNAYIKECEDKDGNEYNDVYREIKKCLADNEIKNKDKKELIAAMFMRADYSKKYSKEVAVAILGYEFNVGIIVGENELTGEDNKPLKTKFSDANYEEQEENISSVLGEKYSIIEALKKIYSWKVLHGILGDNTYISSAMVAKYNIHKQQLSELKQLFHKYASQDEYSDFFHKEKDKSGNYIVNYANYIKGIKRLTNKDNKNYSAKQQLYISIRKILDDRALKDETYQKILKEMEEETFLEKINNVDNSAIPYQLNLMEMDKILTQQGVYYKELKDNKEQLLKMLTSKIPYYVGPLNNHNKGNRNFAWMTRKTGKESEKLYPWNVKGVVDIDVTAEDFITRMTNYCTYLPNEKVLPKESLLYQKYMLLEELSQIKIDDNKLSKEDRKAIINDLFIGERRAKVSDKNFKEYLNKINYVKINDKGYDVTGYQSDDGFACALSSYNKFRRVLGYVDERNEKMIEDIIYWLTVFEDKDIVKRKINKQYPDRLTDEQLKKILKLKFKGWGRFSRKFLAGIKGDMGTTIIDMLEDADDRFLYCNYCPNLMQIINKDEKIKQIIDDNRPRYDGTEDLLDVIQDMHTSPANRRGIWQTMKAIEEIIEYMGEKPQQIYIEFAREDDPKAKNKRADSRKRAIDKALKKLKEDVVDEYNEKVXXXXXXXXXXXXXXKRLDEEKVYLYFMQNGKSLYTGKELNLNEPENLEIDHIIPYSLSDDDSLDNKALVLKKENQNKGNKIVKEAFTQSFSDSEMMDYWKNLKKAGLISEKKYNNLQKNNVDDILTKGFINRQLVETRQIVKSVANLILDYYNEQIDVIEVKASLSTSVRKMLTYEKKDNNGFWIENKDNCMFYKNRDMNDYHHAHDAYLANIIGLYIQKNYPRLQKELNYSQYRRIWRKYYENTKNNNGVNWFATLGKFSSNNEEADWYGQDIIAYMRKIFCYRDVLISKKVEENTGAFYSETKYPREDKAGSKLVPLKQGNNMRGANNLKELDTRKYGGYKGGEKAYFVLVKYCIEKALKKSVKKEYHMEFVEIPVYIARGIKNNDINLYDYVCDILNEANKNSVADVEILRNKVPKYQMIIGENGEEYYLVSATEVINSKQFVLGGANQQYNRLLNYIKYGKNDKWQYIQTELLDEQLIGLYNLLIAKIKDEYKGFSKEAVRIQENNSFDKLDVKDKKEFIAEMIKLVQPDSDYPYLGKYATGLSNRMGRKTGEKVGKKITLVDKSVTGLYERRTTFELEDDSSTKSC

SEQ ID NO: 5088 - protein, 1446 aa, unidentified
  REGION 1..1446: note = Description of Unknown: Cas Enzyme sequence
MYNIGLDIGTGSVGWCLTDENGYLLKVNRKGNNGNTYRNSAWGVRLFESADTAADCRIKRSTRRRYNRRRTRIIELRKIMSDMIMPVDPNFYARLDEAFLWNEDKSDKAKAPFLLFNDNGYDDVKYYTDYPTIYHLRKHLLETKEKVDPRFIYLVLHHMMKYRGHFLFEGQSFEAIDNIEDTFIELEHLVNVYVKEKEDTDNNAENNALYQEIKNYLADNKVKNKDKKEYITDTFIKADYDNKYSKELAAAVLGYEFNVGIIVNDNSLTDEDGKALKAKFADAKYEEKEEKLSDTLGERYYIIETLKKIYSWKVLHSILGDNKYLSYAMVDKYEKHSEQLKALKYLFHKYTSQDKYNDFFHKEKCYKNDKDEKDADEEKNNNEKKCDKWKYIVNYANYIKGIKRLSNETNKKYNTKQQLYQSIKEKLGERAADDEVYKKILVEMEQETFLEKINNVDNSAIPYQLNLMEMDKILTQQGVYYKELRDNKELLLKMLTSKIPYYVGPLNNNNKGNRNFAWMTKKAGKENEKVYPWNVKDVVDIDVTAEDFITRMTNYCTYLPDEKVLPKESLLYQRYMLLEELSQIRIDGRKLSKEDRKAIIDDLFIGKGRVKVSDKDFKEYLDKVNYVKVNSKGYDVTGYQSDDGFACALSSYNKFRRILGHIDEQNEKMIEDIIYWITVFEDKDIVKRKINKQYADRLSAEQLKKILKLKFKGWGRYSSKLLNGIKGDMGTTIIEMLEDADERFAYCDYCPNFMQIINKDEKIKQIIDDNRPRYDGTKDLLDVIQDMHTSPANRRGIWQTMKAIEEIIEYMGEKPQQIYIEFAREDDPKAKNKRADSRKRAIDKALKKLKEDVVDEYNENVYKELKQYEKRLDEEKVYLYFMQNGKSLYTGKELNLNEPENLEIDHIIPYSLSDDNSLDNKALVLKKENQNKGNKIVKEAFPQSFSDSKMIDYWKNLKKAGLISEKKFNNLQKNNVEDILTKGFINRQLVETRQIVKSVANLILDYYNEQIDVIEVKASLSTSVRKMLTYEKKDNNGFWEENKDNCMFYKNRDMNDYHHAHDAYLANIIGMYIQKNYPHLQKELNYSQYRRVWRKYYENTKNNNGVNWFATLGKFSSNNEEADWYGQDIIAYMRKIFCYRDVLISKKVEENTGAFYSETKYPREDKAGSKLVPLKQGDNMRGANNLKELDTRKYGGYKGGEKAYFVLVKYCIEKALKKSVKKEYHMEFVEIPVYIARGIKNNDINLYDYVCDILNEANKNSVADVEILRNKVPKYQMIIGENGEEYYLVSATEVINSKQFVLGGANQQYNRLLNYIKYGKNDKWQYIQTELLDEQLIGLYNLLIAKIKDEYKGFSKEAVRIQENNSFDKLDVKDKKEFIAEMIKLVQPDSDYPYLGKYATGLSNRMGRKTGEKVGKKITLVDKSVTGLYERRTTFELEDDSSTKSR

SEQ ID NO: 5089 - protein, 1425 aa, unidentified
  REGION 1..1425: note = Description of Unknown: Cas Enzyme sequence
MYNIGLDIGTGSVGWCLTDNNGHLLKINRKGDNGKTYRNSAWGVRLFESANTAADCRIKRSTRRRYNRRRTRIIELRKIMSEMIMPVDPNFYARLDEAFLWNEDKSDKAKAPFLLFNDKELYDIKYYKKYPTIYHLRKYLLETKEKADPRFIYLALHHMMKYRGHFLYEGQTFEAIDNIEDAFIELEQLINVYVNKNEEIENNVKNNDLYKSIKNYLADNKMKNKDKKEYITDIFIKAGYDKKYSKELAAAVLGYEFNVGIIVNDNSLTDEDGKTLKVKFADPKYEEKEEKLNDTLGEIYYIVEVLKKIYSWKVLHSILGDSMYLSYAMADKYEKHREQLMALKKLFHKYVSQDEYSEFFHQEKNKEGKYIVSYANYIKGIKRLNNEKNKNSNANQQLYQSIKKILDKRAADDEVYKNILTEMEQETFLEKINNVDNSAIPYQLNLIEMDKILTQQGVYYKELKDNKEILLKMLTSKIPYYVGPLNNNNKGNRNFAWMTKKAGKENEKVYPWNVKDVVDIDVTAEDFIKRMTNYCTYLPNEKVLPKESLLYQRYMLLEELSQIRIDGKKLSKEDRKAIINDLFIGKGRVKVSDKDFKEYLDKVNYVKVNGKGYDVTGYQSDDGFACALSSYNKFRRILGYVDERNEKMIEDIIYWLTVFEDKDIVKRKINKQYADKFSDEQLKKILKLKFKGWGRYSAKLLNGIKGDMGTTIIEMLEDADERFAYCDYCPNFMRIINKDEKIKQIIDDNRSIYDGTKDLLDIIQDMHTSPANRRGIWQTMKVIEEIIEYMGEKPQQIYIEFAREDDFKAKNKRTDSRKKAVDKALNKLKEEVIDEYNENVYKELKQYEKRLDEEKVYLYFMQNGKSLYTGEELNLNEPENLEIDHIIPYSLSDDDSLDNKALVLKKENQNKGNKIVKEAFPQSFSDSEMIDYWKNLKKAGLISEKKYNNLQKNNVDDILTKGFINRQLVETRQIVKAVANLIRDYYNEQIDVIEVKANLSTSVRNMLTYEKKDNNGFWVENKDNCMFYKNRHMNDYHHAHDAYLANIIGMYIQKNYPYLQKELNYSQYRKIWRKYYENAKNNNGVNWFATLGKFSSNNEDTGWYGEGIIAYMRKIFCYRDVIISKKLEENTGAFYSETKYPREDKADSKLVPLKQGNNMRGANNLKELDTRKYGGYKGGEKAYFVLVKYCSEKVLKKSVKKEYHMEFVEIPVYIARGIKNNNINLYDYVCDTLKGTNKNNISDVAILRDKVPKYQMIIGENGEEYYLVSATEVINSKQFVLGGANQQYNRLLNYITYGENDKWQYIQTELLDDQLTGLYDLLLSKIKDEYKGFSKEAIRIQENNSFYKLDVKNKKEFIAEMIKLVQPDSNYPYLGKYATGLSDRMGRKAGEKVGKKITLVDKSVTGLYERRTTFELEDDSSTKSR

SEQ ID NO: 5090 - protein, 1360 aa, unidentified
  REGION 1..1360: note = Description of Unknown: Cas Enzyme sequence
  MOD_RES 828..839: note = Any amino acid
MKKTGKIKNSVLQETHYNVGLDIGTSSVGYAVVDADTGKVLVFKKKNMLGGRLFNEGETAKATRVKRSTRRRYDRRRERIKLLRCLMWEMVDEKDPDFFARLDEGFLMREDKTIQSKSILFNDKNYTDKDYYKKYATIYHLRKELFENDEQKDIRLVYLALHHLIKYRGHFLYEGQNFQEINNDINELFVRLYEQLAENCQYKCEIHNNQIEEIVEILKDTKQTKSEKKEVLKPVITKTMRETEKKAAQEIVNAILGKKINFNILFGVDTIIDNEDKALKLSFAEEKYDEQEDYIYEQLQEKAEILDTLKEIYSWFALQDILKGEKTVASAMVKKYEKHKKDLKILRNAVRKYCTPEEYKNFFIEKITDTKKLKKSVNYVNYIGADGRGNTENLYNEIKKLLEDKDNADKDIQYILKEIDAENFLPLLRTKENISIPYQLTVLEAARIIDNQGKYYPQLSANKDKILSIIEFRIPYYVGPMNTKNRNERFSWACRKEGKQEEKIYPWNWKDIIDEDKTAARFIERMRNTCTYLPGEDVLPRYSLLYSEFVMLNELNKIKVNGKFIEHDMKQKMIEGLFKKQKNVTEKSLINYLKKMNYMNTDQYEIEGYQKEKAFASSLASYIDFTRIFGEIHSGNRQMIEEIIEWLTLFEEKSIVKRQIQNKYGTQVTAQQLEAVSKLRYKGWGNCSAKLLKGLKTTIDGDKASIIDILNTTNYNFMQIITSKKYEFAKQIEEYNEDNTMTDITIEDISRLHGSPAIKKGIWQTVKIMNELVQIMGHEPDNIFIEFARGEDDKVRTKNRSAQIDKGYKKWKKEFKGEKFSTEVEKEXXXXXXXXXXXXRLNEEKMYLYFLQNGKCMYSGETLDIDKLPLYHIDHILPQTYTTDDSIENKVLVLGIENENKADNLLISQKIRNDRKVFWNYLYECGLMGEKKYKNLTRSAIGEGEIKGFINRQLVETRQIIKNVTQLFTQRYANSNVLAVRSGLSSNYREKYGLYKSREINDFHHAHDAFLAVRIGMFLTKRFPGMEKDLIYDAFLRYRSKQNKSSLLKSKHGYLMTFFDEVQCDENGVVIWNPDEDKAYIKSVLYSGNCQISRKKEELTGKFYNETIYPAGLGDLIPLKKNLSVEKYGGYSGKQSAYFAAVQDENGKKQKKIIGIPIYIKELEKTQPGTINAYLKKELNTTAYRMLKDKIYKYQEIIVNGNDLYITGESEVINAKQFFFGEHYYYLYEVLLKCLADKVPEDEKTKYEEKLVEVYNYILSKAERQYKEYASAFAKIKQAVDFSKLSYEDKIGCLKEILNITGANAGCADMRKYCPKDSKIKGIDRIGRKNGYTFKMNSTNNSIVFVDKSVTGLYERRYTL

SEQ ID NO: 5091 - protein, 1353 aa, unidentified
  REGION 1..1353: note = Description of Unknown: Cas Enzyme sequence
MKKTGKIKNSVLQEIHYNVGLDIGTSSVGYAVVDADTGKVLVFKKKNMLGGRLFNEGETAKATRVKRSTRRRYDRRRERIKLLRCLMWEMVDEKDPDFFARLDEGFLMREDKTIQSKSILFNDKSYTDKDYYKEYATIYHLRKELFENDEQKDIRLVYLALHHLIKYRGHFLYEGQNFQEINNDINELFVHLYEQLAENCQYNCEIHNNQIEEIVEILKDTKQTKSEKKEVLKPVITKTMRETEKKAAQEIVNAILGKKINFNILFGVDTIIDNEDKALKLSFAEEKYDEQEDYIYEQLQEKAEILDTLKEIYSWFALQDILKGEKTVASAMVKKYEKHKKDLKILRNAVRKYCTPEEYRNFFIEKTTNTKKLNYVNYIGADGRGNTENLYNEIKKLLEDKDNVDKDIQYILKEIDAENFLPLLRTKENISIPYQLTVLEAARIIDNQGKYYPQLSANKDKILSIIEFRIPYYVGPMNTKNRNERFSWACRKEGKQEEKIYPWNWKDIIDEDKTAARFIERMRNTCTYLPGEDVLPRYSLLYSEFVMLNELNKIKVNGKFIEHGMKQKMIEGLFKKQKNITEKSLINYLKKMNYMNTDQYKIEGYQKEKAFASSLASYIDFTRIFGEIHSGNRQMIEEIIEWLTLFEEKSIVKRQIQNKYGTQVTAQQLEAVCKLRYKGWGNCSAKLLKGLKTTIDGDKASIIDILNTTNYNFIQIITNKKYEFAKQIDEYNEDNTMTDITIEDISRLHGSPAIKKGIWQTVKVMNELVQIMGHEPDNIFIEFARGEDDKVRTKNRSTQIDRSYKKWKKEFKGEKFSTEVEKELKNKKYKDRLNEEKMYLYFLQNGKCMYSGETLDIDKLSLYHIDHILPQTYTTDDSIENKVLVLGIANENKADNLLISQKIRNDRKAFWHYLYECGLMGEKKYKNLTRNAIGEGEIKGFINRQLVETRQIIKNVTQLFTQRYANSNVLAVRAGLSSNYREKYGLYKSREINDFHHAHDAFLAVRIGMFLTKRFPGMEKDLIYDAFLRYRSKQNKSSLLKSKYGYLMTFFDEVQCDENGVVIWNPDEDKAYIKSVLYSGNCQISRKKEELTGKFYNETIYPAGSGDLIPLKKNLSVEKYGGYLGKQSAYYVAVQDENGKKQKKIIGIPIYVKELEKTQPGAIDAYIKKELKITSYRMLKDKICKYQEIIVNGNELYLTSAKEVINAKQFFFGEYYYNLYEALLKCLADKVPGDEKDKYDEKLVEVYNYIISKAEIQYKEYKSAFEKIKQAVDFSILSYEDKIGCLKEVLKITGADAECADITKYCPKDSEIKGISRIGRKNNYTFKMDNNGKDNMIFVDKSVTGLYERRYTL

SEQ ID NO: 5092 - protein, 1112 aa, unidentified
  REGION 1..1112: note = Description of Unknown: Cas Enzyme sequence
MENNNLVLGIDVGITSVGWGIVKTRSEGPTDYLIVDHGVRLFEEAKLAADRRGIRSTRRVKRRKRQRLDDLRELLVRNQIIEKDFRPLNNPYDIRAKGLSEKLSNAELATALLHIAKRRGPDFETIEESDAKLSESQSTKSQLSKNRQRLNELKYVCLVQLERLKEIGKIRANDNTFTSSDYKNELSKILEVSNIENNLAQEIIEIILRRRSFEHGPGSLKSPTEYGRFKPVEGDLKDEIYDFLLEDSRFLKDSFIFDYKNKEYFINKSGIIVNNKPYNLVDLMRGKCSLFPNEYRAPKQAPSAMKFNLINDLVNLRISTQGDRRLTKEEINKVLDYLKKELRFTKGVNTLLKILNLEDDIVTGFRIDTKDKEIITDYEFIHSKFKSLELTEQEREVLNNISLLDHIAEILTNTKTVESRIDELSKVVDDNLAEKLANLTGFSMYHSLSFKAINELIPEMIENQANQQEIITRTYRNNDTIKELKFDEESILSPATKRSHRQAINVIKELINKYGNFDSIVIETARESNSKAERDSIRDSQKVNKKRRDDALNLIKERYGDEIESQVNITNTLINKIMHYIEQDSKCIYTGDVIDLYSLIFDPTAYEIDHIIPYSISRDNSYNNKVLVTSFANQQKVNNTPFMAYKKGLFTSSKINNYELFKDMVNSNKKIHRDKKANLLFEKDINSYTVQQSFIERNLNDTRYASRSILNTLQEYFISNDIKTKVYAVRGKNTSYIRGIGIKRWRNEDVKSPLIKDRNKHIHHAIDALIVAGLSRQEYFNARPHIYKYNDLYREKEVITPISYNIERDSYITKLINELNLINYTDTKVSYKIDQMPNKQFFDQTIYSTRNIDGKDFTLRKIKDIYSLTSKDIEDNIIKNKEKLLMYNQDIKTYDLMVQAYEQYKHEKKPFEAFKINNDGVGIRKYSKKGNGPEIKSLRYVDKGLGEHFDISHKYDVKDGKKVVQLSLNPYRADIYKLENGSYKMAIIRYSDLRQLDNERYIIDEEIYNNILSSVGIDKGDQFQFSIYKNTIIKYYTNDEELTYRAIGFSGNRIEVKGLYENYGRYNSEGNFVMDRVRITIGAKNPKKLEKYNVSIIGQTSKVESEPLQLII

SEQ ID NO: 5093 - protein, 1404 aa, unidentified
  REGION 1..1404: note = Description of Unknown: Cas Enzyme sequence
MSKKILGLDLGTTSIGWAMVNEAENDKEKSSIIQLGVRVNPLSVDEQQNFEKGKSITTNADRTLKRSMRRNLQRYKLRRECLINLLMEKGFINSDTLLSENGNYTTFETYRLRAKAASEKITLEEFARVLLMINKKRGYKSSRKVKGTEEGALIDGMELAKKMYENNQTPGEHCFELIKQGKTAFPDFYRSDLQNEFNKIFETQAKFYPHIFDQNTKEELSGKKREAVWAICEKLYKENGVNLVGIKRQGKSEDQKRENFEWRVKGLNEKLNLEQIVIVFQQINTQLNSSSGYLGSISDRSKELYFSKQTVGQYQMSILEKNKNASLRNMVFYRQDYIDEFERIWEEQSKYYKLLSPDLKSEIRDIIIFYQRRLKSQKGLISFCEFESKKIEVVISGKPKIKTIGMRVTPRSSPYFQEFKIWQVLNNIEVFGNGNKSRKKTSRIDIENERIANERRYLYQEEKEILANELNLRPKLSKADILKLLFDNHKDLDLNIKEVQGNLTLASLYQAYIKIFEQLGNTINTKQNAQDVLRDLETLFNSLGLKPELVQPLSFEKIEHHAPYKLWHLLYSYEGDKSNTGNESLYRKLKNDYGFEKEAANILANISFPADYGSLSAKAIKKILPHLKNGNQFDVACEYAGYNHSKYSLTKEEIQNKKLKEKLEVLPKNSLRNPVVEKIINQMINVVNSIIDEYGKPDEIRIELARELKKNAKQREELTKSNTLNAKLHEEIKETLRNEFGLTNISRNDIIRYKLYSELKFNGYKTLYSNTYIEPNKLFSKEFDIEHIIPQSRLFDDSLSNKTLEVRQVNIEKGNKTASDYVREKYGETGNENSLDKYVKRVTELFDKGSIARTKLNKLLMFQSEIPEGFINRDLGNTQYIAKFAKGILEELVNYVVSTTGSITERLREDWQLVDVMKELNWDKYHALGLTEEYTTRDGKINKRIKDWTKRNDHRHHAMDALTVAFTKRQYIQYLNNLNAKSDKNSVIYAIEQNELVRNTNGKLLFKPPVDIKEFRVEAKKHLSNILISIKSKNKVVTSNVNITKRKGGVNKKIQLTPRGQLHLETIYGSQKQYVVKEEKVGGNFTEQIIHSVTKPAYRSALLKRLNEFNGDSKKAFTGANSLLKKPVYLDDAKTILLPDKVKTVSFETLYTIRKEITPELKLDKVVDIGIRAILEKRLKEYGGDPKKAFVNLAENPIWINKEKGIPIKRVTIAGISNAEALHHKRDKEGNIMLNLDGDKQPVNFVNTGNNHHVAVYIDKDGNLQDTVISFYEAVARRNTGLPIIDKNYMSNEGWQFLFSMKQNEYFIFPNEKSGFNPKEIDLMNPINYTLVSQNLYRVQKFSKVIYGNSAVRDYVFRHHLETMLVDKKEMRDITYKSIKSLPIFEKIVKVRINHIGKIIQVGE

SEQ ID NO: 5094 - protein, 1077 aa, unidentified
  REGION 1..1077: note = Description of Unknown: Cas Enzyme sequence
MKRDFDYTLGLDLGIASVGWSVVELAYDEKDKVYSPKRLIDCGVRLFDKAEVPKTGESLNKTRREARSARRILRRRKARIRALRRIIEDAGFIPAKEDLSTLPSDKDIWEIRGKDVFNRVLTDREVARLIVHIAKRRGYKSNRKKLDNDDTDSEKKKVLSAIKKNQQQLKSKGLRTYGELVYHLYGGSAKRDTLKHNTTDQYILSFDREGILEELRFILNHQKNLGNNKVTDQFINDVLEVVSSQRPFATGDQIKKMVGKCEFEPNELRAPKASMSFLEFQFWQNAFNNLKLINIEEGRYAKKTDLTLDQKEKLFKEVFNSKKDKITFAFVREVLNIPNNYIFYNLRYEPLYRAGNKSLEKEKIFLNLTNFQNIRKAVNKIDESLWEKIHGDRFVYNTLVEALTLYKTDVDIGNYLKEKGLDEYVEIAKSLPTFSKFGHLSIKALENILPYLKENDYTKACELAGYGDKLKEQKSEILPLIEYDEIRNPVVFRGITQGRKVVNAIVRKYGSPTFINIELAREFAKNSQERRKMERMMENRRKDNEKAVEEIKSLGISDPSGFDILKYKLWKEQDCKCAYSGETIPIERLFENSYCEVDHIIPYSQSMDDSYNNKVLVLTKENQEKRNETPFQYLNRIDPSGKRWEEYKARVENNAHYYQHKKDILLIENADKYTIEDFIERNLNDTKYISRFFKNYLESNLKMKELKYGKRQVFTFHGRFTSELRRIYDISKDRQGSDRHHAIDAIILAVANQSMLQDIVRYRELEEEHKKDWEIFKEEQKIKHPEPWENFRQDIYNRVFEDTFEGISNISNFESLYGDIKNEIKPLFVSHMPRRKVEGPAHEETLYSPKHLDEGFVLIKKSLSDLKPEDVDNIYGDDVVKNLIKERFKKNPEKPFEEPLYKPSPKSNNPNQIKSVKIKKTTGGGGVLLNGGRAFAPHASMVRIDIFSKDKKYYIVPIYVADTVKTELPNRAILPGKKEKDWTLIDDSFKFEFSLYSYDLLSLDMSDGKLDCWYYIKIDRNSGAITLRSHDGSEEIRRGIKTALNLTKYQVDVLGNISKVRAEKRHGFQKRHNHKTV

SEQ ID NO: 5095 - protein, 1351 aa, unidentified
  REGION 1..1351: note = Description of Unknown: Cas Enzyme sequence
MSKKYYLGLDIGTNSVGWAVTDENYNLCKYAGKRMWGIRLFEGGETAEQRRISRSNRRRLSRKKQRIDLLQELFAEEIAKMDPTFFIRLNESRLHLEDKSTGEKFPLFTDKDYTDIQYYKEYPTMYHLRKELIENSKVHDVRLVYLACHHILKNRGHFLINGSFSDVKKLSSVCESMLNSFNGISKYQIEINDIERLEEILSDRKKQKSVKAKELIQIFECGPCEDKTDEKTCKAIVSNLSKWLTGLKGNINSIFDMQFEEIDTSSFSFTEPKYEDTISAALEEKYPDYADVIQKIKTVYDWSVLVEIMAGEDYLSFAKVNAYNKHKENLCILKEVIRKYCDSEMYHKFFNGFDEKNGYGNYIGSIYKNGHSYAMKKCSTEDFYKTLGKILDKIQPEKEDENVLEELKVEVKNQTLLPLARTTANGTIPNQVHIQELKAILDNAKKYLPFLNEKDEYGTVAEKIISIAKFRIPYYVGPLSTRHKKQGANSWIVRKQEGRIYPWNFEEMVDLEQSNKEFIQRMTNKCTHLIGEDVLPKNSLLYSRYMVLNELNNLRIRGNKISVNLKQELYKELFCTKAKVTGKGLFNYLKKEDEELALEDISGFDIDFKSSLTSYLDFKKQILGEEIEKDKYKDIVENIIKWKTIYDDDSKMMKKMIEREYPNVFSKDQIKKICRFKYSGWGNFSLSFLNGIRGADRETGENFTIIEALWKTNYNLMQLLSKQFTFREEIDLINADKVGKIDKVSYDNTVKDLIVSPANKRAIWQTVQITEEIKKVMKCEPERIFIEMARGGEKEKRRTVSRKARLLELYAACKDDVRDWTKEIENREEREFNSKKLYLYYTQMGRCMYSGEEIDIDELMQKNSKWDIDHIYPQSKIKDDSIDNMVLAKKVINNSKQNKLLSPDIRIKMKKYWNTLYKGNFISKKKYDRLTRTEDFTNEELSGFIERQIVETRQSSKAVAELLNRLYEHSEIVYVKAGLVSDFRHDNKLLKSRRINDYHHAKDAFLNIVVGNVYNAKFTSNPRKWIKENRGTNYSIRRVFDYNVKRGNTVVWQGVKDAGHSIEAIRKTMARNDILYTEYTYCDKGELFNATLVRKGNDKAINLKKDLDSVKYGGYNTPKTSAFAFIEFDGKKKERKNHIVEIPVYIVNIASRQPDTIKEYLEQKKGYKNVVVKKYPIKKNALIKVDGYLARLRGATEKDVLLKNAVQLVLRDEYSENIRKVEKYLENNIQYQADSKFEGFTQEDLNDLYDELYIKLKESIYNKRPANQLGTLEKGREKYRAIGDLREKAKIINNILALFQCDATTSTNLKEIGGTANAGNMAYNKNTLPTKKLILIHQSVTGLFETEEELV

SEQ ID NO: 5096 - protein, 1126 aa, unidentified
  REGION 1..1126: note = Description of Unknown: Cas Enzyme sequence
MADRISLGLDIGVASVGFSVLDIDKGKVIELGARLFSATVAEGNQNRRGMRGARRLLNRNKQRRQDTGKLFKKFGLIEDFDKDSFYDNFNQNLNPYELRVKGLTEQLTKEELAESLYQIIKHRGISYALKDVDADEGGTDYSASLKINSQELAEKTPAQIQLQRLNDYGKVRGQVIIGDDPDNQKVLLNVFPTSAYEKEAKQIIATQQQFYPEVLTDKFAEEYCQILTRKRDYFVGPGNEKSRTDYGIYKTDGRTLDNLFEELIGHDKIYPDELRASAASYTAQLFNVLNDLNNLRILDYEDGKLTKEDKEKIIAEIKNNTTTINMLNVIKKVAGCSKDDIKGFRVNEKDKPEISSMLVYRKIHKDLLKAGVDISDWPVEFIDRLSFILTLNTENGEIRKQLNKQLVPDFDFLDDDLVQLIIDNKDSFEIKTNNKWHRFSVKTMNKLIPEMMERPVEQMTLLNEMGLVKKDKKRFENNKYLPYKEIAKDIFNPVASKSVREALKIVNAVLKKYGHIDYLVVEMPRDKNLKEEQDNIKEFQNKNKKAKDAAFEAFVKSVGSEQRVKEALSKNRKLQMKMRLWYQQQEIDPYNGKTIDATDLINNPDKFEIDHIIPQSISFDDSINNKTLCFASMNQVKGQKTPYEFMLEGHGQSYDKFKATVMANKNFGKAKRANYLFEENVSDIETRKRFLSRNLVDTRYSSRVVLNSLQDFFREKSADTKVTVIRGKFTSNMRKHWHIDKTRETFHHHAIDASIIAATPFLRMWKKGGTIFPVKVGEESIDIETGEILDDKNFDKAMYEEPYSGFVSEIMNADDRIKFSHQVDKKMNRKVSDATIYSTRTGKLAKDKKDAEYIVAKVKDIYSVDGFKKFKKVYDKDKTKFLLYKYDPRTFSKLERIISDCPDKVEKVQTNGKVKAVDISPFEMYRRDHGMIKKYSKKGNGPAIKQLKYLDKKLGSHIDITPANANGKHVILQSLKPWRTDVYLNHETGEYEIMGIKYSDLKFNKNEGYGIKKDKYLEIKKVEEVSEKSEFMFSLYRKDRVKVQDMKTGESVELLFWSRNFSNKKYAELKPISQAENDKKLPVYGKGRLIKRLIPKNCKIWKVNTTILGDPYYLEKESDSPKDILD

SEQ ID NO: 5097 - protein, 1182 aa, unidentified
  REGION 1..1182: note = Description of Unknown: Cas Enzyme sequence
MTKYSVGLDIGIASVGWSIVDIDEKKIVDLGSRIFPSGNAAGNQDRRSFRGTRRLIRRRKNRLSDLTKLLTENGFSVNTDKNQNPYELRVSGLTEQLSKEELAAALYHIVNRRGISYDLGDLEDDGKSGVSDYKSSININRQLLREKTVGQIQLERLNEYSQVRGQVKADDEKTLLNVFPSSAYADEAKRILEKQAEFYPEITDEFIEKLIGLVTRKREYFHGPGSEKWPTPYGRYRLEQGKLIFVGENLYEYLIGEDNIGTKIAGGIKQKRASASSLTAQIYNLLNDLNNLTVPNTEDGKLTTETKKEILSAAKSADGQFGIAQICKLIGAKKEEIKGFRIDKAEKPIMHTLAGYRKFRKALAEINIEANDLSTEFFDKIADILTLNTEKAEIRKQLDKADFAISEEEKELIVNKNKEFLVDGRATWHSFSYKTLNLLIPELLNTHDEQMTILTRLGLMKPDNEKYKGLKNIPAIQITEEIYNPVVAKSTREAINVFNAIAKRVGRENIEHVVIELPREDNEEDEKKNIQKLQKANETEKFEADKEILQQLPISDSELIAKYRQIRGLSQKVRYWYQQENSCPYCGKKIEAIQLINNNESFEIDHIIPISVSYDDAQNNKVLVHSQCNQEKAQQTPLGWINNGGGFGQSKAEYIAKVKANKRYSKNKRDNLLNDADLNDIITRRSFIQRNLNDTRYASRVVLDEFYSFFKSNNLPTKVKVVRGKWTSQMRKKWNGVGGLAKTRDTHHHHAIDASIIASFPLLKAFDKAVKLIDIDKETGEILQDREAVKKAREAELLTQWAVQNEKEFEKLDSEIFDFPLFKDVELANDIDNPENPVKFSHRVDKKANRKVADATIYSAQKYSSDDKIKYWDKETQEIITKSEVGYYTLSKIDIYSEDSKQTPPNTIGFKEFQEILHQENESSILPKYSRILMRRNDEKSFGKLLQIIENPEFQDYDRDGKKTKISPFKKFKDEYGFVTKYTKKDNGLLGKGANIITLKYLSGKKELDKSVKLDISEKQGSEDKFVYLEGLNPWRTDLYLNENGKYEFLYLRYVDAKVVNKKIVIEPQIYNERKKSFRVGEKSTFVMSLFRNDIIELSFTKDDKRTRIKFRFWSGRSDGKFELKPVHKNGFEKGEIVGVYKATPQICVAPTWMEEIIKINTDILGTPYYTEKESDQPKLNL

SEQ ID NO: 5098 - protein, 1130 aa, unidentified
  REGION 1..1130: note = Description of Unknown: Cas Enzyme sequence
MTNGKILGLDIGIASVGVGIIEAKTGKVVHANSRLFSAANAENNAERRGFRGSRRLNRRKKHRVKRVRDLFEKYGIVTDFRNLNLNPYELRVKGLTEQLTNEELFAALRTISKRRGISYLDDAEDDSTGSTDYAKSIDENRRLLKNKTPGQIQLERLEKYGQLRGNFTVYDENGEAHRLINVFSTSDYEKEARKILETQADYNKKITAEFIDDYVEILTQKRKYYHGPGNEKSRTDYGRFRTDGTTLENIFGILIGKCNFYPDEYRASKASYTAQEYNFLNDLNNLKVPTETGKLSTEQKESLVEFAKNTATLGPAKLLKEIAKILDCKVDEIKGYREDDKGKPDLHTFESYRKLKFNLESINIDDLSREVIDKLADILTLNTEREGIEDAIKRNLPNQFTEEQISEIIKVRKSQSTAFNKGWHSFSAKLMNELIPELYAISDEQMTILTRLEKFKVNKKSSKNTKTIDEKEVTDEIYNPVVAKSVRQTIKIINAAVKKYGDFDKIVIEMPRDKNADEEKKFIDKRNKENKKEKDDALKRAAYLYNSSDKLPDEVFHGNKQLETKIRLWYQQGERCLYSGKPISIQELVHNSNNFEIDHILPLSLSFDDSLANKVLVYAWTNQEKGQKTPYQVIDSMDAAWSFREMKDYVLKQKGLGKKKRDYLLTTENIDKIEVKKKFIERNLVDTRYASRVVLNSLQSALRELGKDTKVSVIRGQFTSQLRRKWKIDKSRETYHHHAVDALIIAASSQLKLWEKQDNPMFVDYGNNQVVDKQTGEILSVSDDEYKELVFQPPYQGFVNTISSKGFEDEILFSYQVDSKYNRKVSDATIYSTRKAKIGKDKKEETYVLGKIKDIYSQNGFDTFIKKYNKDKTQFLMYQKDPLTWENVIEVILRDYPTTKKSEDGKNDVKCNPFEEYRRENGLICKYSKKGKGTPIKSFKYYDKKLGNCIDITPEESRNKVILQSINPWRADVYFNPETLKYELMGLKYSDLSFEKGTGNYHISQEKYDAIKEKEGIGKKSEFKFTLYRNDLILIKDIASGEQEIYRFLSRTMPNVNHYVELKPYDKEKFDNVQELVEALGEADKVGRCIKGLNKPNISIYKVRTDVLGNKYFVKKEGDKPKLDFKNNKK

SEQ ID NO: 5099 - protein, 1129 aa, unidentified
  REGION 1..1129: note = Description of Unknown: Cas Enzyme sequence
MSNGKILGLDIGVASVGVGIIDAKTGNVIHANSRLFSAANAENNAERRGFRGARRLTRRKKHRVKRVRDLFEKYDISTDFRNLNLNPYELRVKGLTEQLTNEELFAALRTIAKRRGISYLDDAEDDSTGSSDYAKSIDENRRLLKTKTPGQIQLERLEKYGQLRGNFTVYDENGEAHRLINVFSTSDYKNEARKILETQSNYSKQITDEFIEDYIEILTQKRKYYHGPGNEKSRTDYGRFRTDGTTLENIFGILIGKCSFYPEEYRASKASYTAQEFNFLNDLNNLKVPTETGKLSTEQKEYLVDFAKKSKALGASKLLKEIAKIVDCSVDDIKGYRVDNKDKPDLHTFEPYRKLKFNLSSIDIDELSRETLDKLADILTLNTEREGIEDTIKRNLPSQFTEEQISEIVQIRKNQSSAFNKGWHSFSAKLMNELIPELYVTSEEQMTILTRLEKFKVNKKSSKNTKTIDEKEITDEIYNPVVAKSVRQTIKIINAAVKKYGDFDKIVIEMPRDKNAEDEKKFIDKKEKENKKEKDDSLKRAAFLYNGTDNLPDGVFHGNKELKTKIRLWYQQGERCLYSGKLISIHDLVHNSNKFEIDHILPLSLSFDDSLANKVLVYAWTNQEKGQKTPYQVIDSMDAAWSFREMKDYVLKQKRLGKKKREYLLTTENIDKIEVKKKFIERNLVDTRYASRVVLNSLQTALKELGKDTKVSVVRGQFTSQLRRKWNIDKSRETYHHHAVDALIIAASSQLKLWQKQENPMFESYGENQVVNKETGEILSISDDKYKELVFQPPYQGFVNTISSKGFEDEILFSYQVDSKFNRKVSDATIYSTRKAKLGKDKKDETYVLGKIKDIYSQDGFDTFIKRYKKDKTQFLMYQKDPLTWENVIEVILRDYPSEKLSEDGKKTVKCNPFEEYRRENGLICKYSKKGNGTPIKSLKYYDKKLGNCIDITPEKSKNRVVLRQISPWRADIYFNLETLKYELMGLKYSDLSFEKGTGKYHISQEKYDAIREKEGIGKKSEFKFTLYRNDLILIKDTLNNCERMLRFGSKNDTSKHYVELKPLEKGTFDSEEEILPVLGKVAKSGQFIKGLNKPNISIYKVRTDVLGNKFFIKKEGDKPKLDFKNNNK

SEQ ID NO: 5100 - protein, 1117 aa, unidentified
  REGION 1..1117: note = Description of Unknown: Cas Enzyme sequence
MANYVLGLDIGIGSVGVGLIEKETGKIIHKSVSLFPSGAAASNVERRGFRGSKRVKRRKKHRVKRTEDLFEKYDIDVDLYLVPINLNPYEIRVRGLNGKLSLTELFVALKNMVKHRGISYLDDAIDEDNAATSGSDYKKAIEFNARELKNKTPGEIQLERLEKYGQVRGDFSVKLEDGTERRLINVFSTSEYRKEAVRILKTQQQFYSELTDEFIADYLEILTKKRKYYHGPGNEKSRTDYGRYRTNGETLDNIFSILIGKCTYYPDEFRAAKASYSAQEFNLLNDLNNLTVPTETKKLSLEQKEEIIQFVKDAKTCGAKNILSKIAKMIGCKADDITGVREDKDHKAEMHSFEVYRKMKQLETIDVTALTREQLDQLGRILTLNTEREGILESIHEYLPDTFTDEQIDELIQFRKKNTTLLNKGWHSFSLKLLNELIPELYHTSEEQMTILTRLGKQKPKNESAKTKYIDGELITEEIYNPVVAKAVRQTIKIVNKILQERGEIDTIVVEMARDKNDEDQKKRIQEGQKKNKNEKDAAILAAAMDYSNSKELPSTVFHGHKELALKIRLWYQQEKRCAYSGREISIAKLINNQGEYEIDHILPLSLTFDDGLDNKVLVEHIANQEKGQRTPFQAMPLLTNSWSWGESKHYVINNSRFSKKKREYLLFEEDINKFEVRSKFIARNLVDTRYASHVVLNALQDFFKQRGANTKIAVVRGQFTSQLRRKWGIEKTRDTYHHHAIDALVIAASSQLKLWRKTKNTLIRYSENELLDTETGELISDEQYKENVFQAPYDNFTKVLKSKELEDSILFAYQQDSKVNRKISDATIYTTRKRGDEEITVAKIKDIYSIEGYDEFLKVYQKDPSKFLMVQHDPVTFEKVIKVIVETYPDKEINENGKEVKVSPFKKYYDEHGYVRKYSQKGNGPVIKQLKYLDKAVGKHINITPKDSSRKVALKSLKPWRADVYFNPETKRYEIMGLKYSDLRFQKGGSYGITKEEYDVIKKREKISKNSVFKFTLYKNNLVLVKDTETNEQQIFRFGSRNETNFNYVELKPYDKAFFEPKEKLVKFGDVSASGRFLKSINVDNLSLYKIETNILGKKYIIKNEGEKPQLTFKNF

SEQ ID NO: 5101 - protein, 1133 aa, unidentified
  REGION 1..1133: note = Description of Unknown: Cas Enzyme sequence
MKAYNKINYKGDNMANYVLGLDIGIGSVGVGLIEKETGEIIHKSVNLFPSGDAASNVERRGFRGAKRIKRRKTHRIKRTEDLFEKYDIDVDLNSVPINLNPYEIRVRGLNEKLSLTELFVALKNIVKHRGISYLDDAIDEDNAATSGSDYKKAIEINARELKNKTPGEIQLERLEKYGQVRGDFSVKLEDGTERRLINVFSTSEYRKEAECLLKTQQQFYPELTDEFISDYLEILTKKRKYYHGPGNEKSRTDYGRYRTNGETLDNIFSILIGKCTYYPDEFRAAKASYSAQEFNLLNDLNNLTVPTETKKLSLEQKEEIIQFVKDAKTCGAKNILSKIAKMIGCKADDITGVREDKDHKAEMHSFEVYRKMKQLETIDVTALTREQLDQLGRILTLNTEREGILESIREYLPDTFTNEQIDELIQFRKKNTTLLNKGWHSFSLKLINELIPELYHTSEEQMTILTRLGKQKPKNESAKTKYIDGELITEEIYNPVVAKAVRQTIKIVNKILQEHGEIDTIVVEMARDKNDEDQKKRIQEGQKKNKNEKDAAILAAAMDYSHSEELPSTVFHGHKDLALKIRLWYQQEKRCAYSGREIPIAKLINNEGGYEIDHILPLSLTFDDGLDNKVLVEHIANQEKGQRTPFQAMPLLTNSWSWGEFKHYVINNSRFSKKKREYLLFEEDINKFEVRSKFIARNLVDTRYASRVVLNALQDFFKQRGANTKIAVVRGQFTAQLRRKWGIEKTRDTHHHHAIDALVIAASSQLKLWKKTKNTLIRYSENELLDTETGELISDDQYKENVFQSPYDNFTKVLKSKELEDSILFAYQQDSKVNRKISDATIYTTRKRGNEEITVAKIKDIYSIEGYKKFVEIYKKTPNKFLMAQHDPQTFEKVIKVIVENYPDKELNDKGKEVQVSPFKKYYDEHGYVRKYSRKGNGPVIKQLKYLDKAVGKHIDITPENSSRTVVLKSLKPWRTDIYFNHKTQKYEAMGLKYSDLKFQKGGEYGISEQDYLDIKIKAKVDPEAEFKFTLYKDNLILIKDVENNKQMLFRFLSSCGKDSEKHMVELKPYDKKEFEKGETLDFIWNLYPSSNQLQRKLNIANISMYKVVTDCLGNKFIIKKEGENPQLTFKNF

SEQ ID NO: 5102 - protein, 1126 aa, unidentified
  REGION 1..1126: note = Description of Unknown: Cas Enzyme sequence
MTNGLVLGLDIGIASVGVGIIEAETGKVIHASSRIFPAANADNNAERRGFRGGRRLTRRKKHRVKRVRDLFENYNITTDFNNLNLNPYELRVKGLTEELTNEELFAALRNISKRRGISYLDDAEDDANSGKTDYAKSVLANKELLKTQTPGQIQLERLNKYGQLRGDFDIVDENGEIHRVINVFSTSDYRKEAEKILQTQSQFNNAINQEFINDYIDILVSKRKYYHGPGNEKSRTDYGRYRTDGRTLENIFDILVGKCTFYPEEYRAAKASYTAQEFNFLNDLNNLTLPTETKKLSIEEKLYLVDYAKNTPVLGPDKLLKEIAKLVDCKKEDIKGFRIDNKEKPDMHTFEVYRTMSKLDKVDIQTLSRETFDELARILTLNTEREGIEEAILKDLPNQFTNEQIEELIKFRKDKSQIFGKGWHNFSVKLMLELIPELYDTSEEQMTILTRLGKTSANKKEVKRTKYINENDVTEEIYNPVVAKSVRQAIKIINASVKEWGEFDNIVIEMPRETNADDERKFIKKMQDANAKEKKDSEERAATLYNGKTELPSNIFHGHNQLATKIRLWYQQGERCIYTGQKIDINDLIHNHNMYEIDHVLPLSLSFDDSLANKVLVLATANQEKGQKTPFQSIPQMKSAWSYREFKSYVLGCKGLSKKKREYLLTEEDINKIEVKQKFIERNLVDTRYASRVVLNTLQDSLKAMNKKTRVSVVRGQFTSQLRRQWKIDKSRETYHHHAIDALIIAASSQLRLWKKQGDTMFEDYKNGQKVDLETGELLSDNEYKELVFQSPYQGFVNTISSKAFEDEILFSYQVDSKVNRKISDATIYATRQAKLTKDKKEETYVLGKIKDIYSQAGYDAFRKRYEKDKSAFLMYQKDPMTWEKVIEVILNDYCEFDDKGKETGNPFEKYRNENGYIRKYSRKGKGTEIKSLKYYDSKLGNHIDITPENSKNSVVLQSINPWRADLYFNPKTLKYELMGLKYSDLSFEKGTGNYSISQDKYDEIKSREGISPKSEFKFTLYKNDLILIKDTINNKTLTARFNSKNDTSKHYVELKPDSKAKYDSEEVLIPVFGKVAKSGRFIKGINKTGISIYKIKTDILGRKHFIKEEGDQPKLEFMKSSKNNK

SEQ ID NO: 5103 - protein, 1129 aa, unidentified
  REGION 1..1129: note = Description of Unknown: Cas Enzyme sequence
MVRSFIMNGLVLGLDIGIASVGVGILKKETGEIVHSNSRLFPAATADNNVERRGFRGGRRLTRRKKHRSVRLHDLFEDFGLLTDFSKVSINLNPYQFRVQGLDNQLTNEELFIALKNIVKRRGISYLDDASEDGGTVSSDYGKAVEENRKLFAEQTPGQIQLNRFEKYGQVRGDFTVMENGEKRRLINVFSTSAYRIEAERILRKQQEFNKKITDGFIEDYLTILTGKRKYYHGPGNEKSRTDYGRFRADGTTLDNIFGVLIGKCTFYPDEYRASKASYTAQEFNLLNDLNNLTVPTETKKLNEEQKKIIVEYAKTAKTLGASTLLKYIAKLIGASVDQIHGYRIDSNKKPEMHIFETYRKMQSLETIRVEELHRKVLDELAHILTLNTEREGIEEAINANLKDTFSQDQVLELVQFRKNNSSLFSKGWHNFSLKLMMELIPELYETSEEQMTILTRLGKQKSKETSKRTKYIDEKELTEEIYNPVVAKSVRQAIKIINEATKKYGIFDNIVIEMARENNEEDAKKEYIKRQKANIDEKNAAMEKAAFQYNGKKELPDDVFHGHKELATKIRLWHQQGEKCLYTGKNIPIADLIQNQYKYEIDHILPLSLSFDDSLSNKVLVLATSNQEKGQRTPFQALDSMDDAWSYREFKTYVKDLKLLNNKKKDYLLTEEDISKIEVKQKFIERNLVDTRYSSRVVLNALQDFYKEHQFDTTISVVRGQFTSQLRRKWGLEKSRDTYHHHAVDALIIAASSQLRLWKKLNNSLISYKEEQFVDLETGEIIALSDDEYKELVFKAPYDHFVDTLKSKKFEDTILFSYQVDSKYNRKISDATIYATRKAKLDNDKSEETYVLGKIKDIYSQSGYDAFIKIYNKDKSRFLMYHKDPQTFEKVIEEILRTYPSKELNDKNKEVPCNPFEKYRQENGPIRKYSRKGNGPEIKSLKYYDKNIPESFINITPSNSKNKVILRQLNPWRTDVYFNHQTEKYELLGLKYADLQFEKKTGNYSITIDKYNEIKEKEGVSKQSEFKFTLYKNDLLLIKDTKNNEKQIFRFLSRTMPNQKNYVELKPYDKAKFDGNQELMTIFGNVAKGGQCMKGLNKSDISIFKVKTDVLGNKHFIKKEGEEPKLKF

SEQ ID NO: 5104 - protein, 1122 aa, unidentified
  REGION 1..1122: note = Description of Unknown: Cas Enzyme sequence
MMNGLVLGLDIGIASVGVGILNKDTGEIIHANSRLFPAATADNNVVRRSSRQGRRLNHRKKHRSVRLKDLFEYYDLLTDFSKVSINLNPYRLRVDGLNQQLTNEELFIALKNIVKRRGISYLDDASEDGGAVSSDYGKAVEENRKLLAEQTPGQIQLERFEKYGQVRGDFTVVENGEKRRLINVFSTSAYKKEAERILRKQQEYNNQIMDEFIADYLTILTGKRKYYHGPGNEKSRTDYGRFRTDGTTLDNIFGILIGKCTFYPEEYRASKASYTAQEFNLLNDLNNLTVPTETKKLSEEQKKTIVEYAKSAKTLGASTLLKYIAKMIDASVDQIRGYRVDVNNKPEMHTFEVYRKMQLLETIPVGEFSREVLDELAHILTLNTEREGIEEAINTKLMDVFSQDQILELVQFRKNNSSLFSKGWHNFSLKLMIELIPELYETSEEQMAILTRLGKQKFKETSKRTKYIDEKEVTEEIYNPVVAKSVRQAIKIINEATKKYGIFDNIVIEMARENNEEDAKKDYIKRQKANHDEKNAAMEKAAFQYNGKKELPDSIFHGHKELATKIRLWHQQGEKCLYTGKNIPISDLIHNQYKYEIDHILPLSLSFDDSLSNKVLVLATANQEKGQRTPFQALDSMDDAWSYREFKSYVKDSKLLGNKKKDYLLTEEDISKIEVKQKFIERNLVDTRYSSRIVLNALQDFYKAHKFDTTISVVRGQFTSQLRRKWRLEKSRETYHHHAVDALIIAASSQLRLWKKQANTLISYKEDRFVDSKTGEIISLTDDEYKELVFKAPYDHFVDTLSSKKFEDSILFSYQVDSKFNRKISDATIYATRKAKLDKDKSEETYVLGKIKDIYSQSGYDAFIKIYNKDKSKFLMYHKDPQTFEKVIEEILRTYPSKEFNEKNKEVSCNPFEKYKQENGPIRKYSKKGNGPEIKSLKYYDKNIPESFINITPSNSKNKVILRQLNPWRTDVYFNHQTEKYELLGLKYADLQFEKKTGTYSITIDKYNEIKEKEGVSEHSEFKFTLYKNDLLLIKDTEIKEEQIFRFLSRTMPNQKHYVELKPYYKGNFEGKERIKVFNTTSNGRCLKGLGKKGLSIYKIKTDVLGNKHFIKKEGEKPKLKF

SEQ ID NO: 5105 - protein, 1134 aa, unidentified
  REGION 1..1134: note = Description of Unknown: Cas Enzyme sequence
MNGLVLGLDIGIASVGVGILEKNSGKIIHANSRLFPAATADNNVERRKNRQARRLHRRKKHRGVRFQDLFEDYGLLTDFSKVSINLNPYRLRVDGLNQQLTNEELFIALKNIVKRRGISYLDDASEDGGTVSSDYGKAVEENRKLLAEQTPGQIQLERFEKYGQVRGDFTVVENGEKRRLINVFSTSAYRKEAERILRKQQEFNSKITDEFIEDCLKILTGKRKYYHGPGNEKSRTDYGRFRTDGTTLDNIFGILIGKCTFYPDEYRASKASYTAQEFNLLNDLNNLTVPTETKKLSEEQKKVIVEYAKEAKTLGASTLLKYIAKMIDASVDQIRGYRVDVNNKPEIHTFEAYRKMQSLETISVGELSRNVLDELAHILTLNTEREGIEEAINTKLKDSFSQDQVLELVQFRKNNSSLFSKGWHNFSLKLMMELIPELYETSEEQMTILTRLGKQKSKEISKRTKYIDEKELTEEIYNPVVAKSVRQAIKIINEATKKHGIFDNIVIEMARENNEEDAKKDYIKRQKANQDEKNAAMEKAAFQYNGKKELPDSIFHGQKELATKIRLWHQQGEKCLYTGKNIPISDLIHNQYKYEIDHILPLSLSFDDSLSNKVLVLATANQEKGQRTPFQALDSMDDAWSYREFKSYVKESKLLGNKKKEYLLTEEDISKIEVKQKFIERNLIDTRYSSRVVLNALQDFYKAHKFDTTISVVRGQFTSQLRRKWGLEKSRETYHHHAVDALIIAASSQLRLWKKQNNSLISYKEGQFVDSETGEIISLTDDEYKELVFKAPYDHFVDTLRSKKFEDSILFSYQVDSKFNRKISDATIYATRKAKLDKEKKEYTYTLGKIKDIYSLGTKAPSKTGFYKFLDLYNKDKSQFLMFQKDRKTWDEVIEKIMEQYRPFKEYDKTGKLVDFNPFEKYRQENGPIRKYSKKGNGPEIKSLKYYDILLGKHKNITPEGSRNTVALLSLNPWRTDVYYNMETKKYEFLGLKYADLPFEEGGAYGISTETYNELREKEGIGKNSEFKFTLYKNDLILIKDTETNCQQIFRFWSRTGKDNPKSFEKHKIELKPYEKARFEKGEELKVLGKVPPSSNQLQKNMQIENLSIYKVKTDVLGNKHFIKKEGDEPKLKF

SEQ ID NO: 5106 - protein, 1128 aa, unidentified
  REGION 1..1128: note = Description of Unknown: Cas Enzyme sequence
MSDLVLGLDIGIGSVGVGILNKVTGEIVHKNARIFPAAQAENNVERRTNRQGRRLTRRKKHRRVRLNHIFEESGLITDFTKVSINLNPYQLRVKGLTDELSNEELFIALKNMVKHRGISYLDDASDDGNSSVGDYAQIVKENSKQLETKTPGQIQLERYQKYGQLRGDFTIEEDGKKHRLINVFPTSAYRAEALRILQTQQEFNPQITDEFINSYLQILTGKRKYYHGPGNEKSRTDYGRYTTKKDSEDEYITLDNIFGILIGKCTFYPEEYRAAKASYTAQEFNLLNDLNNLTVPTETKKLSEEQKNQIITYVKNEKAMGPAKLFKYIAKLLACDVADIKGYRIDKSDKPEIHTFEAYRKMKTLETIDVEQMEREKLDKLAYVLTLNTEREGIQEAIEHEFSDGTFSQEQVDELVQFRKSNSSIFGKGWHNFSVKLMMELIPELYATSEEQMTILTRLGKQKRTSSSNKTKYIDEKRLTEEIYNPVVAKSVRQAIKIVNAAIKEYGDFDNIVIEMAREMNEDDEKKAIKKIQEANKSEKDAAMRKAANQYNGKAELPHSVFHGHKQLATKIRLWHQQGERCLYTGKTISIHDLINNPNQFEIDHILPLSITFDDSLANKVLVYATANQEKGQRTPYQALDSMDDAWSFRELKAFVRESKTLSNKKKEYLLTEEDISKFDVRKKFIERNLVDTRYASRVVLNALQEHFRARKIDTKVSVVRGQFTSQLRRHWGIDKTRDTYHHHAVDALIIAASSQLNLWKKQKNTLVSYSEDQLLDIETGELISDDEYKESVFKAPYQHFVDTLKSKEFEDSILFSYQVDSKFNRKISDATIYATRQAKVGKDKKDETYVLGKIKDIYSQAGYDAFIKIYQKDKSKFLMYRHDPQTFEKVIEPILENYPNKEMNEKGKEVPCNPFLKYKEEHGDYIRKYSKKGNGPEIKSLKYYDSKLGNHIDITPKNSNNKVVLQSVSPWRADVYFNKTTGKYEILGLKYADLQFEKGTGTYKISQEKYNDIKKKEGVDSDSEFKFTLYKNDLLLIKDTETKEQQLFRFLSRSMPNKKHYVELKPYSKDKFEKNETLIEILGPADKSGRCIKGLAKSNLSIFKVRTDILGNQHIIKNEGDKPKLDF

SEQ ID NO: 5107 - protein, 1123 aa, unidentified
  REGION 1..1123: note = Description of Unknown: Cas Enzyme sequence
MNGLVLGLDIGIASVGVGILDKKTGKIIHANSRIFPAAAADNNVERRKNRQSRRLNRRNKHRRERLNELFDEYGLLTDFSKVSINLNPYELRVKGLIEKLTNEELFIALKNIVKRRGISYLDDANEDGESSSSEYGKAVEENRKLLADKTPGQIQLERFEKYGQVRGDFTIEENGEKHRLLNVFSTSSYKKEAERILTKQQDYNQDITDEFIQAYLTILTGKRKYYHGPGNEKSRTDYGRFRTDGTTLDNIFGILIGKCTFYPEEYRASKASYTAQEFNLLNDLNNLIVPTETKKLSEEQKRQIIEYAKGAKTLGAATLLKYIAKMVDASVDDIKGYRIDKSEKPEMHTLDIYRKMQTLETVDVERLSREVLDELAHILTLNTEREGIEEAIKASFTKEEFEQDQIAELVSFRKSNSSLFGKGWHNFSIKLMMELIPELYETSEEQMTILTRLGKQKTKATSKRTKYIDEKELTEEIYNPVVAKSVRQAIKIINFATKKYGIFDNIVIEMARETNEEDAKKDYVKRQKANEDEKNAAMEKAAYQYNGKKELPDNVFHGNKELATKIRLWHQQGEKCLYTGKNIPISDLIHNQYKYEIDHILPLSLSFDDSLANKVLVLATANQEKGQRTPFQALDAMDDSWSYREFKSYVKDSKTLSNKKKDYLLNEEDINKIEVKQKFIERNLVDTRYSSRVVLNTLQDFYKLNEFDTKISVVRGQFTSQLRRKWRIDKSRETYHHHAVDALIIAVSSQLRLWKKQSNPLISYKDTKFVDSETGEIISLTDDEYKELVFRAPYDHFVDTVSSEKFEESILFSYQEDSKYNRKISDATIYATRKAKLGKDKSEETYVLGKIKDIYTQTGYDAFIKLYKKDKSKFLMYHKDPLTFEKVIEEILKTYPDKEQNEKGKEVACNPFEKYRQENGPIRKYSKKGKGPEIKSLKYYDNKLGNHIDITPDNSENQVILQSLSPWRTDVYFNPETGKYELLGLKYADLQFEKGTGNYSINSEKYYKIKEKEGVSEQSEFKFTLYKNDLILVRDTKTDEQQMFRFLSRTMPNQKHYVELKPYDKAKFEGNQPLMALLGNVAKGGQCLKGLNKANISIYKVQTDILGNKRFIKKEGDAPKLKF

SEQ ID NO: 5108 - protein, 908 aa, unidentified
  REGION 1..908: note = Description of Unknown: Cas Enzyme sequence
ILTSKRKYYHGPGNEKSRTDYGRFRTDGTTLDNIFGILIGKCTFYPEEYRASKASYTAQEFNLLNDLNNLTVPTETKKLSEEQKKTIIEYAKSAKTLGASTLLKYIAKMIDASVDQIRGYRVDVNNKPEMHTFEVYRKMQSLETIKVEELPRKVLDELAHILTLNTEREGIEEAINSKLKDTFNRDQVLELVQFRKNNSSLFSKGWHNFSLKLMMELIPELYETSEEQMTILTRLGKQRSKETSKRTKYIDEKELTEEIYNPVVAKSVRQAIKIINEATKKYGIFDNIVIEMARENNEEDAKKNYIKQQKANQDEKNAAMEKAAFQYNGKKELPDNIFHGHMELATKIRLWHQQGEKCLYTGKNIPISDLIQNQYKYEIDHILPLSLSFDDSLSNKVLVLATANQEKGQRTPFQALDSMDDAWSYREFKSYVKDSKLLSNKKKDYLLTEEDISKIEVKQKFIERNLVDTRYSSRVVLNALQDFYKSHQFDTTISVVRGQFTSQLRRKWGLEKSRETYHHHAVDALIIAASSQLRLWKKHNNSLISYKEGQFIDSETGEILSLGDEEYKELVFKAPYDHFVDTLRSKKFEDSILFSYQVDSKYNRKISDATIYATRKAMLGKDKSEETYVLGKIKDIYSQAGFDAFIKIYNTDKSKFLMYHKDPQTFEKVIEEVLRTYPSKELNEKKKEVPCNPFEKYRQENGPIRKYSKKGNGPEIKSLKYYDKTIPESFINITPHNSKNKVILRQLNPWRTDVYFNPQTDKYELLGLKYADLQFEKETGNYSITTEKYYEIKEKEGVSEQAEFKFTLYKNDLLLIKDVKNNEEQIFRFLSRTMPNKKNYVELKPYDKAKFDGNQELITIFGNVAKGGQCLKGLNKSDISIFKVKTDVLGNKHFIKKEGDEPKLKFKK

SEQ ID NO: 5109 - protein, 1123 aa, unidentified
  REGION 1..1123: note = Description of Unknown: Cas Enzyme sequence
MNGLVLGLDIGIASVGVGILNKDTGEIIHTNSRLFPAATADNNVERRNSRQARRLNRRKKHRGVRLKDLFEDYDLLTDFSKVSINLNPYRLRVQGLDNPLTTEELFIALKNIVKRRGISYLDDATEDGGAVSSDYGKAVEENRKLLAEQTPGQIQLERFEKYGQVRGDFTVVENGEKRRLINVFSTSAYRKEAERILRKQQEFNNQITDEFIENYLKILTEKRKYYHGPGNEKSRTDYGRFRTDGTTLDNIFGILIGKCTFYPNEYRASKASYTAQEFNLLNDLNNLTVPTETKKLSEEQKKTIVEYVKSAKTLGASTLLKYIAKMLDASVDQIRGYRVDVNNKPEMHTFEVYRKMQSLETISVGELSREVLDELAHILTLNTEREGIEEAINTKLKDSFSQDQVLELVQFRKNNSSLFSKGWHNFSLKLMIELIPELYETSEEQMTILTRLGKQKSKETSKRSKYIDEKELTEEIYNPVVAKSVRQAIKIINEATKKYGIFDNIVIEMARENNEEDAKKDYIKRQKANQDEKNTAMEKAAFQYNGKKELPDSIFQGHKELATKIRLWHQQGEKCLYTGKNIPISDLIHNQYKYEIDHILPLSLSFDDSLSNKVLVLATANQEKGQRTPFQALDSMDDGWSYREFKSYVKESKLLGNKKKEYLLTEEDISKIEVKQKFIERNLVDTRYSSRVVLNALQDFYKAHKFDTTISVVRGQFTSQLRRKWGLEKTRDTYHHHAVDALIIAASSQLSLWKKQANPLISYKEDQIVDSETGEIISLTDDKYKELVFKAPYAHFVDTLSSKKFEDSILFSYQVDSKYNRKISDATIYATRKAKLDKDKSEETYVLGKIKDIYSQTGYDAFIKIYNKDKSKFLMYHKDPQTFEKVIEEILRTYPSKEFNEKNKEIPCNPFEKYKQENGPIRKYSKKGNGPEIKSLKYYDKNIPESFINITPSNSKNKVILRQLNPWRTDFYFNHQTEKYELLGLKYADLQFEKKTGTYSITIDKYNEIKEKEGVGEQSEFKFTLYKNDLLLIKDTKNNEEQIFRFLSRTMPNVKHYVELKPYDKAKFDGNQPLITIFGNVARGGQCLKGLNKSNISIFKVETDVLGNKHFIKKEGDEPKLKF

SEQ ID NO: 5110 - protein, 1050 aa, unidentified
  REGION 1..1050: note = Description of Unknown: Cas Enzyme sequence
VHGLDNPLTNEELFISLKNMVKRRGISYLDDASEDGSVGSSEYSKAVEENRKLLAEQTPGQIQLDRFERYGQVRGNFTIEEDGEKKRLINVFSTSAYRKEAERILKKQQEFNNKITDEFIKDYLTILTAKRKYYHGPGNEKSRTDYGRYTTKKDSEGEYITLDNIFGILIGKCTFYPDEYRASKASYTAQEFNLLNDLNNLTVPTETKKLSEEQKIKIVEYAKTSKTLSSTTLLKYIAKMVDGSLDQIRGYRVDVNNKPEMHTFEAYRKMQSIETISVGDLSREVLDKLAHILTLNTDREGIEEAINDKLKDTFNKDQVLNLVQFRKNNSSLFSKGWHNFSLKLMMELIPELYETSEEQMTILTRLGKQKSKKTSKRTKYIDEKELTDEIYNPVVAKSVRQAIKIINEATKKYGIFDNIAIEIARENNEEDAKKEYIKRQKANRDEKMLAMEKAAFQYNGKKELPANVFHGHKELATKIRLWYQQGEKCLYTGRNIAISDLIHEQDKYQIDHILPLSLSFDDSLSNKVLVLSTANIEKDQRTPFQALDSMDDAWSYREFKSYIIDSKLLSDKKKEYLLTEEDISKIEVKQKFINRNLVDTRYSSRVVLNALQDFYKEQQFDTTISVVRGQFTSQLRRKWGLEKSRETYHHHAIDALIVAASSQLRLWKKYNNLLISSKEDQFIDLETGEIISFSDDEYKELVFKEPYDHFVDTLKSKKFEDSILFSYQVDSKYNRNISNATIYATRKVKLDKEKKEYTYTLGKIKDIYTLGKKTPSKTGFYKFLDLYNTDKSQFVMYQKDRKTWDEVIERIMEQYRPFKEYDKTGKLVDFNPFEKYRQENGPIRKYSKKGNGPEIKSLKYYDILLGKHKNITPEGSRNTVALLSLNPWRTDVYYNTETKKYEFLGIKYADLRFEEDGVYGISTETYNELREKEGIGENSEFKFTLYKNDLILIKDTEINSQQIFRFWSRTGKDNPKSFEKHKIELKPYEKAIFEKGEELDVLGKVPPSSNQLQKNMQIENISIYKIKTDVLGNKHFIKKEGEEPKLKFKK

SEQ ID NO: 5111 - protein, 1134 aa, unidentified
  REGION 1..1134: note = Description of Unknown: Cas Enzyme sequence
MNGLVLGLDIGIASVGVGILKKDSGEIIHSNSRLFPAATADNNVVRRSSRQARRLTRRKRHRAVRLHDLFEDYGLLTDFSKVSINLNPYKLRVEGMNIQLTTEELFIALKNIIKRRGISYLDDASEDGDTVSSDYGKAVEENRKLLSEQTPGQIQLERFEKYGQVRGDFTVVENGEKRRLINVFSTSAYRKEAERILRKQQEFNNQITDDFIDDYLTILTGKRKYYHGPGSAKSRTDYGRFKTDGSESDNIFGILIGKCTFYPDEYRASKASYTAQEFNLLNDLNNLTVPTETKKLSEEQKKTIIEYAKSAKTLGASTLLKYIAKMVGTSVDQIHGYRVDVNKKPEMHTFEAYRKMQSLETIRVEELPRKVIDELAHILTLNTEREGIEEAINAKLKGTFNQDQVLELVQFRKNNSSLFSKGWHNFSLKLMMELIPELYETSEEQMTILTRLGKQKSKETSKRTKYIDEKEITEEIYNPVVAKSVRQAIKIINEATKQYGIFDNIVIEMARENNEEEAKKDYIKRQKANLDEKNAAMEKAAFQYNGKKELPDNIFHGHKELATKIRLWHQQGEKCLYTGKNIPISDLIHNQYKYEIDHILPLSLSFDDSLSNKVLVLATANQEKGQRTPFQALDSMDGAWSYREFKSYVKDSKLLGNKKKDYLLTEEDISKIEVKQKFIERNLVDTRYSSRVVLNALQDFYKEHQFDTTISVVRGQFTSQLRRKWGFEKSRETYHHHAVDALIIAASSQLRLWKKQNNPLISYKAGQFVDSETGEILSLSDDEYKELVFKVPYDYFVDTLRSKTFEDSILFSYQVDSKLNRKISDATIYATRKAKLDKEKKEYTYTLGKIKDIYALGKKTPSKTGFYKFLDLYNTDKSQFVMYQKDRKTWDEVIEKIMEQYRPFKEYDKNGKEVDFNPFEKYRIENGPIRKYSLKGNGPVIKSMKYYDNLLGKFVDITPSESKNTVVLLSLNPWRTDVYYNPETRKYEFLGLKYADLCFRKGGSYGISKIKYNKIREKEGIGKESEFKFTLYKNDLILIKDTETNSQQIFRFWSRTGKDNPKSFEKHKIELKPYEKAKFDKGEELEVLGKVPPSSNRLQKNMQIENLSIYKVKTDLLGNKHFIKKEGDEPKLKF

SEQ ID NO: 5112 - protein, 1132 aa, unidentified
  REGION 1..1132: note = Description of Unknown: Cas Enzyme sequence
MMNGLVLGLDIGIASVGVGILKKDTGEIIHANSRLFPAATADNNVVRRGSRQARRLTRRKRHRAVRLHDLFEDYALLTDFSKVSINLNPYKLRVEGMNIQLTTEELFIALKNIIKRRGISYLDDASEDGGTVSSDYGKAVEENRKLLSEQTPGQIQLERFEKYGQVRGDFTVVENGEKRRLINVFSTSAYRKEAERILRKQQEFNNKITDDFIEDYLIILTGKRKYYHGPGNEKSRTDYGRFRTDGTTLDNIFGILIGKCTFYPNEYRASKASYTSQEFNLLNDLNNLTVPTETKKLSEEQKKTIVEYAKSAKTLGASTLLKYIAKLIDASVDQIHGYRVDVNKKPEMHTFDVYRKMQSLETFNVNEMPREVLDELAHILTLNTEREGIEEAINTKLKGTFNQDQVLELVQFRKNNSSIFSKGWHNFSLKLMKELIPELYETSEEQMTILTRLGKQKSKETSKRTKYIDEKEITEEIYNPVVAKSVRQAIKIINEATKKYGIFDNIVIEMARENNEEDAKKDYIKRQRANQDEKNAAIEKAAFQYNGKKELPDNIFHGHKELATKIRLWHQQGEKCLYTGKNIPISDLIQNQYKYEIDHILPLSLSFDDSLSNKVLVLATANQEKGQRTPFQALDSMDDAWSYREFKSYVKDSKLLGNKKKDYLLTEEDISKIEVKQKFIERNLVDTRYSSRVVLNALQDFYKNHHFDTTISVVRGQFTSQVRRKWGLEKSRETYHHHAVDALIIAASSQLRLWKKQNNPLISYKAGQFVDSETGEILSLSDDEYKELVFKAPYDHFVDTLRSKTFEDSILFSYQVDSKLNRKISDATIYATRKAKLDKEKKEYTYTLGKIKDIYALGTKTPSKTGFYKFLDLYNKDKSQFLMFQKDRKTWDEVIEKIMEQYRPFKEYDKTGKLVDFNPFEKYRQENGPIRKYSKKDNGPEIKSLKYYDKNIPESFINITPSNSKNKVILRQLNPWRTDVYFNHQTEKYELLGLKYADLQFEKKTGTYSITIDKYNEIKEKEGVGEQSEFKFTLYKNDLLLIKDTKNNEKQIFRFLSRTMPNVKHYVELKPYDKAKFDGNQPLITIFGNVAKGGQCLKGLNKSNISIFKVKTDVLGNKHFIKKEGDEPKLNF

SEQ ID NO: 5113 - protein, 1127 aa, unidentified
  REGION 1..1127: note = Description of Unknown: Cas Enzyme sequence
MNGLVLGLDIGIGSVGVGILKKDTGEIIHTNSRIFPAATADNNVERRNSRQGRRLNRRKKHRVVRFQDLFDDYGLLTDFSKVPINLNPYRLRVHGLNQQLTNEELFIALKNIVKRRGISYLDDASEDGGAVSSDYGKAVEENRKLLAEQTPGQIQLERFEKYGQVRGDFTVEEKGDKRRLINVFSTSAYRKEAERILRKQQEFNNQITDEFIEDYLKILTGKRKYYHGPGNEKSRTDYGIYTTKKNSEGNYITLPNMYDILIGKCTFYPEEYRASKASYTAQEFNLLNDLNNLTVPTETNKLSEEQKKTIIEYAKSAKTLGASTLLKYITKMIDASVDQIRGYRVDVNNKPEMHTFEVYRKMQSLETISVGELSRNILDELAHILTLNTEREGIEEAINTKLRDSFSQDQVFELVQFRKNNSSLFSKGWHNFSLKLMMELIPELYETSEEQMAILTRLGKQKFKETSKRTKYIDEQEVTEEIYNPVVAKSVRQAIKIINEATKKYGIFDDIVIEMARENNEEDAKKDYIKRQKANHDEKNAAMEKAAFQYNGKKELPDSIFHGHKELATKIRLWHQQGEKCLYTGKNIPISDLIHNQYKYEIDHILPLSLSFDDSLSNKVLVLATSNQEKGQRTPFQALDSMDDAWSYREFKSYVKDSKLLGNKKKDYLLTEEDISKIEVKQKFIERNLVDTRYSSRVVLNALQDFYKAHKFDTTISVVRGQFTSQLRRKWGLEKSRETYHHHAVDALIIAASSQLRLWKKQNNPLISYKEGQFVDSETGEIISLSDDEYKELVFKAPYDYFVDILRSKKFEDSILFSYQVDSKFNRKISDATIYATRKAKLDKDKSEETYVLGKIKDIYSQAGYDTFIKIYNKDKSKFLMYHKDPQTFEKVIEEILRTYPSKEFNEKNKEVPCNPFEKYRQENGPIRKYSRKGNGPEIKSLKYYDKNIPESFINITPSNSKNKVILRQLNPWRTDVYFNHQTEKYELLGLKYADLQFEKKTGTYSITINKYNEIKEKEGVGKESEFKFTLYKNDLLLIKDTKNNEEQIFRFLSRTMPNQNHYVELKPYDKGNFEGKEKIKVFKMTSNGRCIKGLGKKYLSIYKVKTDILGNKHFIKKEGDEPKLKF

SEQ ID NO: 5114 - protein, 1129 aa, unidentified
  REGION 1..1129: note = Description of Unknown: Cas Enzyme sequence
MNGLVLGLDIGIASVGVGILEKNSGKIIHASSRLFPAATADNNVERRKNRQARRLHRRKKHRGVRLKDLFEYYGLLTDFSKVSINLNPYRLRVDGLDQQLTNEELFIALKNIVKRRGISYLDDASEDGGTVSSDYGKAVEENRKLLAEQTPGQIQLERFEKYGQVRGDFTVVENDEKLRLINVFSTSAYKKEAERILRKQQEFNNQITDEFIEDYLKILTGKRKYYHGPGNEKSRTDYGRYTTHKDSKGEYVTLDNIFGVLIGKCTFYPNEYRASKASYTAQEFNLLNDLNNLTVPTETKKLSEEQKKVIVEYAKEAKTLGASTLLKYIAKMIDTSVDQIRGYRVDVNNQPEMHTFEVYRKMQSLETISVGDLSRNVLDELAHILTLNTEREGIEEAINTKLKDSFSQDQVLELVQFRKNNSGLFSKGWHNFSLKLMIELIPELYETSEEQMTILTRLGKQKSKETSKRSKYIDEKELTEEIYNPVVAKSVRQAIKIINEATKKYGIFDNIVIEMARENNEEDAKKDYIKRQKANQDEKNTAMEKAAFQYNGKKELPDSIFQGHKELATKIRLWHQQGEKCLYTGKNIPISDLIHNQYKYEIDHILPLSLSFDDSLSNKVLVLATANQEKGQRTPFQALDSMDDGWSYREFKSYVKESKLLGNKKKEYLLTEEDISKIEVKQKFIERNLVDTRYSSRVVLNALQDFYKAHKFDTTISVVRGQFTSQLRRKWGLEKSRETYHHHAVDALIIAASSQLRLWKKQNNPLISYKEGQFVDSETGEIISLTDDEYKELVFKAPYDHFVDTLRSKKFEDSILFSYQVDSKFNRKISDATIYATRKAKLDKDKSEETYVLGKIKDIYSQAGYDAFIKIYNKDKSKFLMYHKDPQTFEKVIEEILRTYPSKELNDKNKEIPCNPFEKYRQENGPIRKYSKKGNGPEIKSLKYYDKNIPESFINITPSNSKNKVILRQLNPWRTDVYFNHQTEKYELLGLKYADLQFEKKTGTYSITIDKYNEIKEKEGVGEQSEFKFTLYKNDLLLIKDTKNDEKQIFRFLSRTMPNVRHYVELKPYDKAKFDGNQSLITIFGNVAKGGQCLKGLNKSNISIFKVKTDVLGKKHIIKKEGDEPKLKF

SEQ ID NO: 5115 - protein, 1143 aa, unidentified
  REGION 1..1143: note = Description of Unknown: Cas Enzyme sequence
MWGDFMYNIGLDIGIASVGWAVIENESGSIVDLGVRLFSSRNADNNAERREKRSSRRLIRRRVTRLSDAKKVLSKAGFVQEDMYNHVSPYEIRVRGLELKLEKGEIYRAVTHIVKRRGISYLDEDSLDAKSEGQSFKDEVTRNARLLQEFTPGQIQLKRLKEGGKVRTGYNDQNEYQLNIFTVGAYAKELERILTKQQEFYPEITTEFIQAFVRQGTGEEAGLIYRKRPYYHGPGNAANNSQYGRWAYYTENGRPANNIFDQLIGKDLIGEIRASGISLSAQKFNLLNDLNNLTINREESKLSTAEKNMILQYLMNDQVKTFGPKNLAKLLELEMKDIRGWRVDKNDKTQIHNMGPYRTWKNVFAESGIELGDLPIDTVDAIAKIITLNTDLDAVEQTIALELPDADPKLKAAILDKFHQLKVKGSNATWHSFSSKLIGILIPELINTSEEQNTIIERLKIKPELRNKFANLPHIPVEDITDEIFNPTASKSVRQALRVFNQLIDRYGKENIENVVIEMPRDKNEDDQKKVIVDIQKNNEKRKNDGKNYFLAKSGWTEEQFEANIRKGRFAAKLNYYYEQDGRCAYSGAPIPPEDLLNEKTEIDHIIPLSISLDDSINNKVLVTSTANQVKAQRSPKQAFDESGAAMGQTWDEFKAWVLGRKYKKYKRQLLLFEGDIFNPETRNKFVARNLNDTRYASREVLNAIQSFFSGSENHTKVQVVNGSFTHTLRKKWGNVMDKSRDTHHHHAVDAVLCAATPGIRVDKFKFVEGQDGVPYMLDQDTGELIKYHEYKKMNLYDRSTYTPKWEGFIEQLIPTVLFPCINFSHQVDRKSNRKISDATLYSTRVQENVTIKKGKEVKTEESYIIGKIKDIYSVEGWKAFDKNKEKLLMKEIDPKTYEKLIEISTQYPAKVEVQDQSGKTKSIDISPFKRYCEDNDVPYVTKYSKKGKGPAIKSLKYYDKKLGTHINITKDEIGRDIDKTNHNKQVVLLSTNPWRTDVYYEPSDGSYRLLGIKYNHLKFSGEKYGIPRNLYESLKDEEGISRNAEFRFSLYRKDGIQITDGEDTIEGLFHSRTLPAKPNYFEIKPIDKAKWEKKEYLNLFGNVSPSGQFVKGLKKNFIIRKFYTDYLGKRYFVDQEKLTGII

SEQ ID NO: 5116 - protein, 1507 aa, unidentified
  REGION 1..1507: note = Description of Unknown: Cas Enzyme sequence
MKKILGLDLGTNSIGWAVVTSVGEGQNENRLIELSGSRIIPMDAATLGDFDKGVTKSQTSERTTFRGIRRLRERGLLRRERLHKVLKILGFLPEHYANEIDFDHHPGKFKPDVEPKLPWKKNEMGQWVFLFQNSFQAMLADFSHYQPEWVADSKKVPYDWTIYYLRKKALTEKISKEELAWILLNFNQKRGYYQLRGEDEEESSNKLKEYCALQVVRVEATDEKKGKETWYNVHLENGWIYRRTSAVPLKWEGMVKEFIVTTDLNEDGTPKLGKDGSVKRSFSIPKEGDWTLIKKKTEADITKSNKTIGTYIYDTLLHNPGQKIKGQLIRTVERKYYKEELRAILLKQISFHSELQDNDIFKRCVEALYPNNEVHKRNIANRDFVYLFIDDILFYQRPLKTKKSLIDNCPYEENQYVDKETGEIKRASIKCIAKTQPLFQEFRLWQFIDNIRIYKREKEVDGRLQTDVDVTVDFLKTEADYVALFEWLNDKGKIDQKSFLANPAFGIKKVAEQYRWNYVEDKSYPCNETHSLILSLLEKSEISTSFLSEEGGREEALWHILYSVEDKQEIVKALTKFATKYNLPNRFVEVFCKCPPFKKEYGAYSAKAIKKLLPLMRRGKYWADTAIDDKTAERIKKIINGEFDESICKQVREKCANLSTLNDFRGLPLWLACYIVYNRHSEAKETTKWESPEDIDIYLRNFKQHSLRNPIVEQVVLETLRTVRDIWKKVGRIDEIHVELGREIKNSSEKRKQISEQIQANENANLRIKALLIEFMNPEFGVENVRPYSPSQQELLRIYEDGVLNSVEELPDDIAVFLKKFDVMRQPTRSEFLRYKLWLEQRYRSPYTGNVIPLGQLFTPAYEIEHIIPQARYFDDSFSNKVICESAVNKLKDNLLGYEFIKEHHGRKLSEHIQIFSVEAYETFVKEHYAKSRNKMKKLLMDEIPEKFIERQLNDSRYISKLVKRLLSNIVREKDKDGEYEQEDISKNMVVCTGTVTDRLKRDWGMNDVWNQIVYPRFDRLNHLTDSCQFGGWEDKAGKRVFQTAMPLEYQKGFNKKRIDHRHHAMDAIIIACATRNHVNYLSNESASKNSKVSRTDLQRQLCDKKKTNDKGDYIWSIKKPWDTFTQDARKSLEHIIVGFKQNLRVINKSSNTYQCFDEHGIKVLKKQVHGDNLAIRKPMHKDTAFGSVNLRRVKEARLSVALDAPSMIVDKKMKKKVLELMSYKYDKKGIERYFKENIYLWKNLNLSKVPVYYFTDNTSEPLVAVCKPLDASFNMKKIKEAVTDTGIQKILLKHLSNNDDNPALAFSPDGISEMNKNLTVLNDGKLHQPIYRVRVYEPKGNKFNVGSVANKRSKYVEAAKGTNLFFAVYQTSSGDRVYETIPLNIVIERLKMRWTPVPEMNAKGDRLLFTLSPNDLVYIPTVEECESGNISPEIDSRRIYKMVSSSGPQCFFVPHTVANPIVSTLELGANNKAEKSWDGEMIKSICVPVKVDKIGNIISIGGRKNL

SEQ ID NO: 5117 - protein, 1129 aa, unidentified
  REGION 1..1129: note = Description of Unknown: Cas Enzyme sequence
MKNYGIGIDVGYRSVGCAAIEFDDDGFPIKTLSLVSFRHDGGLDMKGEKPKIRKATRGVARRTMRMNRRRKRRLRNLDKALSNLGYTVPEDPGPETYEAWTSRALLASIKLASADELNEHLVRAVRHMARHRGWANPWWSLEQLEKASQEPSETFEIILARARELFGERVPANPTLGMLGALATNNEVLLRPRAEKKKKTGYVRGTPLLAAQVRQIDQVAELRRICEVQGIEGQYEALREAVFYHKPPYVPKDRVGKDPLNPDEIRASRASLEFQEFRILDAVANLRVRTDSRAKRELSEGEYDAAVDFLISYTGMEQPSWADVAEEIGVPGNRLIAPVLEDVQQKTAPFDRSSAAFEKAMKAKTEARKWWESNDDDQLRSLFIMFLADATDDTAEAAVEAGLHELFASWPEEEREVLSNISFESGRAAYSAETLSKLSEYMHEHRVGVHEARKAVFGVDDTWRPPLAKLEEPIGHPTVDRVLTILRRFVLDCERQWGRPRAITVEHARTGLVSPAVRQKILQEQENNRKNNERIRGELRKSGVENPSRTEVRRHLVVQDQESQCLYCGAVIRTDTSELDHIVPRAGGGSSRRENLAAVCSYCNGQKNNTPFYRWASPERFKETIDRVRQLKAFKDPKKAKMFKNQIRRLKQTEADDPIDERSLASTSYAAVAVRERLEQHFNEGLAPDDKSRVVLDVYAGAVTRESRRAGGIDERILLRGEHDKNRFDVRHHAIDAAVMTLLNRSVALTLEQRSQLRRAFYEQGLDKLDRDQLKPEEDWRSFTGLYEASKEKFLKWKKAATVLGNLLAEAIEDDSIAVVSPLRLRPQNGAVHDETIHAVKKLVLGSAWSADAVKRIVDPEIYLAMKDALGKSKVLPEDSARSLELSDGRFVEADDEVLFFPKKAASILTPRGAAEIGDSIHHARLYSWLTKKGELKFGMLRVYGAEFPWLMRESGSRDILHMPIHPGSQSFRGMQDGVRKAVESDEAVEFAWITQNDELEFDPEDYIAHGGDDELNRLLRVMPERRWRVDGFYNAGTLRIRPALLSAEQLPSELQKKVASKTLSDVELILLRAVQRGLFVATSGFLPLESLKVIRRNNLGFPRWRGNGNLPTSFEVRSSALRALGVEG

SEQ ID NO: 5118 - protein, 1135 aa, unidentified
  REGION 1..1135: note = Description of Unknown: Cas Enzyme sequence
VSTDMKNYRIGVDVGDRSVGLAAIEFDDAGFPIQKLTLVTFRHDGGLDPTENKSPKSRKETRGVARRTMRMNRERKRRLRKLDKVLENLGYTVPEGPEPETYEAWTSRALLASIKLANPDELNEHLVRAVRHMARHRGWANPWWSLDQLEKASREPSETFEIILARARELFGEKVPDNPTLGMLGALADNNEVLLRPRRSYNAKEANNPKKAEKYLADYGTQPLMAAKVRQEDQLAELRRICEVQGIENQYEVLREAVFTHVRPYVPKDRVGKDPLNPSEIRASRASLEFQEFRILDAVANLRVRTDSRAKRELSESEYDTAVDFLMSYTGKEQPSWADVAEEIGVPGNRLIAPVLDDVQQKTAPFDRSSAAFEKAMKAKTEARKWWESNDDDQLRSLFIMFLADATDDTSQAAIEAGLYELFESWPEEEREALSNIAFEAGRAGYSATTLSKLSEYMHEHRVGLHEARKAVFGVDDTWRPPLAKLEEQTGQPTVDRVLTILRRFVLDCERQWGRPQAVTVEHARTGLMGPAQRQDILREQKKNREENERIRNELRESGVENPKRVDVRRHLVVQEQECQCLYCGTMITTTTSELDHIVPRAGGGSSRRENLAAVCRYCNAMKSNTPFYRWASPEKLKETIDRVRQLKAFKDPKKAKMLKNQIRRLKQTEADDPIDERSLASTSYAAVAVRERLEQHFNEGLAPDDKSRVALDVYAGAVTRESRRAGGIDERILLRGERDKNRFDVRHHAIDAAVMTLLNRSVALTLEQRHQMKRESAETKRENGWRDFTGLYPASQEKFLEWRKAATVLGDLLAEAIEDDSIAVVSPLRLRPQNGAVHKDTIAAVKSQALGSAWLADEVKRIVDPEIYLAMKDLLGKKKELPEDPERVLALSDGRYVDSNEDVLVFPKNAASILTPRGVAEIGDSIHHARLYGWLTKKGELKVGMLRVYGAEFPWLMRESGSRDILRMPIHPGSQSFRGMQDGVRKVVESGEAVELAWITQNDELEFDPADYIAHGGKDELRQFLEFMPECRWRVDGFTTNYQLRLRPVLLSREQLPAEIQSRVATKTLSEDEQVLLKALDRGLFIAVGGLFSLESMKVIRRNNLGFPRWCGNGNLPTSFEVRSSALRALGVEG

SEQ ID NO: 5119 - protein, 1135 aa, unidentified
  REGION 1..1135: note = Description of Unknown: Cas Enzyme sequence
MSTDMKNYRIGVDVGDRSVGLAAIEFDDDGLPIQKLALVTFRHDGGLDPTKNKTPMSRKETRGVARRTMRMNRERKRRLRKLDNVLAGLGYTVPEGPEPETYEAWTSRALLASIKLASADELNEHLVRAVRHMARHRGWANPWWSLDQLEKASQEPSETFDIILARARELFGEKVPANPTLGMLGALAANNEVLLRPRDKKKRKTGYVRGTPLMVAQVRQGDQLAELRRICEVQGIEDQYEALRLGVFDHKHPYVPKERVGKDPLNPSKNRTIRASLEFQEFRILDSVANLRVRTGSRAKRELTEAEYDAAVDFLMSYTDKDQPSWADVAEKIGVPGNRLVAPVLEDVQQKTAPFDRSSAAFEKAMGKKTEARQWWESTDDDQLRSLLIAFLVDATKDTEEAAAEAGLSELYMSWPAEEREALSNIDFEKGRVAYSQETLSKLSEYMHEYRVGLHEARKAVFGVDDMWRPPLDKLEEPTGQPAVDRVLTILRRFVLDCERQWGRPRAITVEHARTGLMGPTQRQKILNEQKKNRADNERIRDELRESGVDNPSRAEVRRHLIVQEQECQCLYCGTMITTTTSELDHIVPRAGGGSSRRENLAAVCRACNAKKKRELFYAWAGPVKSQETIERVRQLRAFKDSKKAKIFKNQIRRLKQTEADEPIDERSLASTSYAAVAVRERLEQHFNEGLALDDKSRVVMDVYAGAVTRESRRAGGIDERILLRGERDKNRFDVRHHAVDAAVMTLLNRSVALTLEQRSQLRRTFYEQGLDKLDRDQLHPGEDWRNFTGLYPASQKKFLEWKDAATALGNVLAEAIEDDSIAVVSPLRLRPQNGSVHDETIDPVKKLTLGSAWSADDVKRIVDPEIYLAMKDALGKLKALPEDSARSLELSDGRFVEADDEVLFFSKKAASILTPRGAAEIGASIHHARLYSWLTKKGELKVGMLRVYGAEFPWLMRESGSRNVLSMPIHPGSQSFRGMQDGVRKVVESGEAVEFAWITQNDELEFDPADYIAHGGDDDLRRFLECMPECRWRIDGFYDVRRLRIRPALLSREQFPVDIQRNLDEKKPLTVEQQVIVKSLETGLAISLGNLMGLETMRVIRRNNLGFPRWRGNGNLPTSFEVRSSALHALGVES

SEQ ID NO: 5120 - protein, 1173 aa, unidentified
  REGION 1..1173: note = Description of Unknown: Cas Enzyme sequence
  MOD_RES 83..86: note = Any amino acid
MAVTLPKDDVRYKVGIDVGLNSIGFCAVEVDDDDCPIRLLNSLVFRHDAGVDPASRKAALTRKNVSGVARRHQRGGRARRKKXXXXSARSGHAETQKRNQKRETKKRLVALDRLLSEEFGWPLPNLEEYPDPYEPWHVRARLLDGYIADDAKRKEMLSIAMRHIARHRGWRNPYMKPASLASLPYPSEFLTNLNQDVSRVIGRKFASDATQGQLVDAFILGSLRLAATPALQVPEEPEKDSSKNKPRDIVLGRVRGDKGVIEGKLHQSDNAEEIRRICATQEVPQDQVERLIEAVFKAKNPREVGAANKLVGHDELPGQEKYIRAERAHPAFQKFNIVATLTNLRINEAGSKRRLSSKELQMLTNYLSNVGPKDEVTWFDVAEKLKIDRSDLQGTARASYDGQAALKYPPIDVTSVSIKKNKVKALKDWWKQASEDQRGQLIDYLSNSDRLDTPKTDDELDDLTKLTQSFSEKDLEELEKISLPTGRAAYSVNSLTRLTNLMLEEGIDLHEARKRLFNIGNDWKPAPEPINSPVGNPAVDRVLKQVARWIDAATERWGIPASVNVEHVREGLVSEKVVRELIRDNEARHKKNMEVAEATAKRLGLSGPVHRSHTIKYFALRRQNCQCLYCGTKISFETAEMDHIVPRTNGGSNNKRSNLAAVCRTCNASKSNIPFAVWVSSGKAGPGVSLEGAKERVNSLLLEKDDLQKEDDSLVEIYSKKESKNFRKEIIARLESKKPDEEFDGRSLESVAWMAVELHERILGYYENLLKDTGQKAPQVGVYRGAITAEARKASGFENRVELLGGKGKTRLDRRHHAMDALVIALMNQSVSKLLSWRMQLRDSQRISGMQETWKEFHGSNRDEYRRWNAWTNAMRIAVELFNDALEKDEVHFSENKRLGISLAKAHDDTIKSLCSYALGDALSAELIDRAETPALWTALTKQPDFDVKNGLPEDPTRCITVNGKQFGPTDEVNFFASGAPAIKVRGGFAGIGDTIHHARIYRIDGKKTTYAMVRVFQTDLRRMKHKDLFTEPLKPSTISMRTASKTIRKALAAGTATQIGWLVEGDEIRVETDRYPSGQIGGLLKEYPEASSWRVCGFPDDARVRLRPNLISEEGFDADISEDVVKLVSGKGWYVTLNIVLGNGAVTVIRRNTLGEERWVSRAHLPVSVDLS

SEQ ID NO: 5121 - protein, 1150 aa, unidentified
  REGION 1..1150: note = Description of Unknown: Cas Enzyme sequence
MAVTLPKDDVRYKVGIDVGLNSIGFCAVEVDDDDYPIRLLNSLVFRHDAGIDPASRKAALTRKNVSGVARRNRRAKRETKKRLVALDRLLSEEFGWPLPNLEDYPDPYEPWHARARLLDGYIADDVKRKEMLSIAMRHIARHRGWRNPYMKPASLASLPYPSEFLTNLNQDVSRVIGRKFASDATQGQLVDAFILGSLSLATTPELQVLEESEKDNSKNKPRDIVLGRVRGDKGVIEGKLHQSDNAEEIRRICATQEVPQDQVERLIEAVFKAKNPREVGAAYKLVGHDELPGQKKYIRAERAHPAFQKFNIVATLTNLRINEAGSKRRLSSEELQILTNYLSNVGPKDEVTWFDVAEKLEIDRSDLQGTARASYDGQAALKYPPKDVTSASIKQSKVKALKDWWKQASEDQRGQLIDYLSNSGGSDTPKTDDELDDLTKLTQSFSEKDLEELEKISLPTGRAAYSLNSLTKLTQLMLEEGIDLHEARKRLFNVDDDWKPIPEPINSPVGNPAVDRVLKQVARWIDTATERWGIPASVNVEHVREGLVSEKVVRELIRDNEARHKKNMEVAEEIAKRLGLSGRALRSHTIKYFALRRQNCQCLYCGTKISFGIAEMDHIVPRTNGGSNNKRSNLAAVCRTCNASKSNIPFAVWVSSGKAGPGVSLEGAKERVNSLLLEKADLPEDYDDDSLIEFYSKNESKKFRKEIIARLESKKPDEEFDGRSLESVAWMAVELHERILGYYESLLKDSGQKAPQVGVYRGAITAEARKASGFENRVELLGGKGKTRLDRRHHAMDALVIALMNQSVSKLLSWRMQLRDSQRISVMPETWKEFHGFTRDDYRHWEAWAKAMRIAVELFNDALEKDDVHFSENKRLGISLAKAHDDTIRSLCSYALGGDFSVELIDRAETPALWTALTKQPDFDVKNGLPEDPTRCITVNGKQFGPTDEVNFFASGAPAIKVRGGFAGIGDTIHHARIYRIDGKKTTYAMVRVFQTDLRRMEHEDLFTEPLKPSTISMRTASKTIRKALADGTATQIGWLVEGDEIRIETDHYPSDDIGKLLDEYSEASSWRVCGFPDVLKIRLRPNLLSEEGFDDNTAAAVRKIVSGAGWRVSMNTVLSGGLVTVIRRNALGEERWVSRANLPLSVNLS

SEQ ID NO: 5122 - protein, 1172 aa, unidentified
  REGION 1..1172: note = Description of Unknown: Cas Enzyme sequence
LFADLDDLVRQLDVTLSQLGDVDEALDAVLDADERAEGDQLGDLAGHNLTDGVGAGECLPRIFLGGLERQGDALAIHVDVENLDGDFLANLDHPGRGGAKRETKKRLVALDRLLSEEFGWPLPNLEEYPDPYEPWHVRARLLDGYIADDAKRKEMLSIAMRHIARHRGWRNPYMKPASLASLPYPSEFLTNLNQDVSRVIGRKFASDATQGQLVDAFILGSLRLAATPALQVPEEPEKDSSKNKPRDIVLGRVRGDKGVIEGKLHQSDNAEEIRRICATQEVPQDQVERLIEAVFKAKNPREVGAANKLVGHDELPGQEKYIRAERAHPAFQKFNIVATLTNLRINEAGSKRRLSSKELQMLTNYLSNVGPKDEVTWFDVAEKLKIDRSDLQGTARASYDGQAALKYPPIDVTSVSIKKNKVKALKDWWKQASEDQRGQLIDYLSNSDRLDTPKTDDELDDLTKLTQSFSEKDLEELEKISLPTGRAAYSVNSLTRLTNLMLEEGIDLHEARKRLFNIGNDWKPAPEPINSPVGNPAVDRVLKQVARWIDAATERWGIPASVNVEHVREGLVSEKVVRELIRDNEARHKKNMEVAEATAKRLGLSGRVHRSHTIKYFALRRQNCQCLYCGTKISFETAEMDHIVPRTNGGSNNKRSNLAAVCRTCNASKSNIPFAVWVSSGKAGPGVSLEGAKERVNSLLLEKDDLQKEDDSLVEIYSKKESKNFRKEIIARLESKKPDEEFDGRSLESVAWMAVELHERILGYYENLLKDTGQKAPQVGVYRGAITAEARKASGFENRVELLGGKGKTRLDRRHHAMDALVIALMNQSVSKLLSWRMQLRDSQRISGMQETWKEFHGSNRDEYRRWNAWTNAMRIAVELFNDALEKDEVHFSENKRLGISLAKAHDDTIKSLCSYALGDALSAELIDRAETPALWTALTKQPDFDVKNGLPEDPTRCITVNGKQFGPTDEVNFFASGAPAIKVRGGFAGIGDTIHHARIYRIDGKKTTYAMVRVFQTDLRRMKHKDLFTEPLKPSTISMRTASKTIRKALAAGTATQIGWLVEGDEIRVETDRYPSGQIGGLLKEYPEASSWRVCGFPDDARVRLRPNLISEEGFDADISEDVVKLVSGKGWYVTLNIVLGNGAVTVIRRNTLGEERWVSRAHLPVSVDLS

SEQ ID NO: 5123 - protein, 1148 aa, unidentified
  REGION 1..1148: note = Description of Unknown: Cas Enzyme sequence
MAVTLPKDDVRYKVGIDVGLNSIGFCAVEVDDDDYPIRLLNSLVFRHDAGIDPASRKAALTRKNVSGVAPRNRRGERGNKKKQTRADPALSEEFGWPLPNLEDYPDPYEPWHARARLLDGYIADDAKRKEMLSIAMRHIARHRGWRNPYMKPASLASLPYPSEFLTKLNEDTSRVIRQKFASDATQGQLVDAFILGSLSLATTPELQVLEESEKDNSKNKPRDIVLGRVRGDKGVIEGKLHQSDNAEEIRRICATQEVPQDQVERLIEAVFKAKNPREVGAAYKLVGHDELPGQKKYIRAERAHPAFQKFNIVATLTNLRINEAGSKRRLSSKELQMLTNYLSNVGPKDEVTWFDVAEKLEIDRSDLQGTARASYDGQAALKYPPKDVTSASIKQSKVKALKDWWKQASEDQRGQLIDYLSNSGGSDTPQTDDELDDLTKLTQSFSEKDLEELEKISLPTGRAAYSLNSLTKLTQLMLEEGIDLHEARKRLFNVDDDWKPTPELINSPVGNPAVDRVLKQVARWIDAATERWGIPASVNVEHVREGLVSEKVVRELIRDNEARHKKNMEVAEATAKRLGLSGRVYRSHTIKYFALRRQNCQCLYCGTKISFETAEMDHIVPRTNGGSNNKRSNLAAVCRTCNASKSNIPFAVWVSSGKAGPGVSLEGAKERVNSLLLEKDDLQKEDDSLVEIYSKKEGEKFKKEIIARLESKKPDEEFDGRSLESVAWMAVELHERILGYYENLLKDTGQKAPQVEVYRGAITAEARKASGFENRVELLGGKGKTRLDRRHHAMDALVIALMNQSVSKLLSWRMQLRDSQQTSGMQETWKEFHGFTRDDYRHWEAWTKAMRIAVELFNDALEKDDIHFSENKRLGISLAKAHDDTIKSLCSYALGGAFSAELIDRAETPALWTALTKQPDFDVKNGLPEDPTRCITVNGKQFGPTDEVNFFASGAPAIKVRGGFAGIGDTIHHARIYRIDGKKTTYAMVRVFQTDLRRMKHKDLFTEPLKPSTISMRTASKTIRKALADGTATQIGWLVEGDEIHIETDRYSSDKIGSLLKEYPEASSWRVCGFPSAIKIRLRPNLLSEEGFDSYTSEAVSSLVSGPGWYVSINTVLGNGTVTVIRRNTLGEERWVSRAHLPVSVDLS

SEQ ID NO: 5124 - protein, 1135 aa, unidentified
  REGION 1..1135: note = Description of Unknown: Cas Enzyme sequence
MSEHTKYRIGIDVGDRSVGLAAIEFDDDGFPLSNLAMVTYRHDGGLDPTTNKSPKSRKETRGVALRTMRMRRRKKSRLKDLDKTLRALGYVVPACEEPQTYEAWKSRALLATTKVEGAQELGEHLVRAVRHMARHRGWRNPWWTFNQLEIASTAPSDTFAKIRERAEKEWPGVVPEEVTLGMIGALAASNNVLLRPRTYRKDQPRHSKKLNVLGQEPILVDKVRQEDLLAELRTICKKQNIEDQYEKLAQAVFEQTRPYVPLDRVGKDPLQPNKSRASRASLEFQRFRILDAVAHLRVRVGVSDRRALTDEEHDKAVHFLMGYSKKDVPTWGDVADEIGVEPAHLIAPVIDDVRLNKAPYDRSSTEFEQKMKKKTRARQWWDEANLESRSQLILLVSDPTDETMRLAEVSGLYEVFESWPDEEKEALEGLKVESGRAAYSTDTLNKLSDHMRLKRIDLHEARKIAFGVDDMWHPPLDRIDEPTGQPTVDRVLTIVRRFIFDCERAWGCPENVVIEHARTGLMGPAQRADVLNEIAKNRKKNDKIREDLRAGGINNPTRADIRRNAIVQDQESQCLYCGATIGVSYSELDHIVPRAGGGSSRRENLAAVCRACNDSKKDTPFAVWAKNTSRPVTLEGTIQRLRELKAFKRPKDRRMVDLIIRRLKQTEKDDPIDERSLASTSYAATAIRERIEQYFNEKAEKLDLAKVHIDVYSGSLTRESRRAGGIDKMVLLRGQSDKNRFDVRHHAIDAAVLTLLNRSVAVTLEQRRLIKQQREYSLEKSRRERDNVWRDFMGLGPAAQEKFAKWKKTAYVLADIIKEAISNDAIPVVSPLRLRPQNGSVHLDTVDAVLERTIGDAWTVDQVHRIVNPQIYLAFAGYLGKQKALEPDSSRVLALNDGRKLTAEDVIYVFPEKAASILTPRGVVKIGESVHHVRLYAWKNRKGKAEVGMLRVFGAEFPWLMRESGVKDVLRVPIHTGSQSYRDLSDTVCKHIEQGVAQEIGWVTQNDELEFDPDDYLQNGGKDKLAKFLSFMPENRWRIDGFQTSTKLRIRPALLSWEELPTRLYGKELAENQYALLEESLKTGLIIATKGLLSLESSKIIRRNNLGIPRWRGSSYRPVSLDIQRAALAALDEQE

SEQ ID NO: 5125 - protein, 1283 aa, unidentified
  REGION 1..1283: note = Description of Unknown: Cas Enzyme sequence
MAKILGLDLGTNSIGWAIRDNNIDNKNQILDSGVIVFPQGVGEEKGVEFSLASERTKKRASRKLYSRRKQRKSDLLKLLIDNGMCPLSIDEFNNWAIYTKGKSCVYPTENFEFREWLKINPYEVRSKASNNSVSNLEFGRALYHICQRRGFKSGRKDADAGKDLVVYLKEKEKRGDKTLGEYLYEQLEEGESVRKAKYAGDDNEVNSSRISYIEEFNVLVKNQKITTELADKLFKAIFFQRPLKSQKGSVGKCTLEPSKTRCAVSHPLFEEFRMCQFLNSIKIKERSQDKFQFLSNYPEYFSLVKELFFRKSKPSFKFAEISKAVNIKVKKNNLFFEFNYNDKYPIVGNPTMSLLKDVFDAKEWKDCKEVIRSKYKLSDKKSTDDLIEELWHTLFFSGDFVNDVTSEKVKYFIRSRYDITEEQVERYEKINLKQGYASLSKKAIVNILPFLEQNIIYSHAVFYANIPQIIGKEKWLENKQYVQDNISNIIDGYKDQTLKIDIINSLLEDFIKEYDNSDAEYVLDETDKKNVSEKVIVFYGKDRWNKFSEDLKNEIQSEIEFNFQNQLQKRRFGGYHLSKPRLDEIIKQFLIDEFKVSITQSDKLYHPSAIDTYQESSDGLLGSPFTASVRNPMAMRTLHYLRKLVNSLLKEKKISSDTTIIIELARELNDKNKRLAIERWQRERENENKKIKERLEEYAIEKGYKVTDIDILKYRLMDEQKRRCLYTNKEITIENLFGDNPKFEIEHTFPRSKSFDNSLVNKTLADKAFNQLKGNKIPQELDEIYIQNVLINTKDWFEKIEDLKEKIEQQRYFSKVASTVEQKDRAIQQRHYLSLEFNYWNEKYKRFTDKEINPKFKNSQLVDTGVITKYSKLFLGSLFNNVFPAKGTMVADIRQSWGLPKKDRTLHYHHAIDAVVLTCMDKSIRDSLAQAFNESEILGKREKFKVQKPWSTFTEDIDKLKESILVVHNHKNNLLKQTKRKLKVRNKIQYDKSGNVIYQEGQGIRSSLHLDTFYGAIERVNEQDEKEIWFVKRDWASNLNEASIENIVDEAIKQRIKKHGLKNIRTEEGFILLPEEDNLKSMLIKKVRIKTNFRQLPTIKKQSHISGGKRKEHKENYYAKLENIFAMAVYETSNEKGKVERIHKTISAFEVAKYNQGNKKLEIPIENNIVKNKDKKSEILIPFSYLLKVNQMVLFYESNKDELKQLSHLELSNRLYKITQFENDSRINLRHHAQGDADKNLIEESSLDFIKPAQKLRIRLSNFKACVENIDFQISPSGKVSFK

SEQ ID NO: 5126 - protein, 1411 aa, unidentified
  REGION 1..1411: note = Description of Unknown: Cas Enzyme sequence
MKRIIGIDLGTNSIGYGVVDQHYSSELDEQGNRKLSRFKLVDKGARIFQEGVKIEKNKQESSRAAERTKHRSARRLKFRRKLRKYETLKALINHGMCPLPIEDLQKWRGYNNPETGKQENFQHYPKDLAFKDWLQCDRSEGISPYFLRNKASLEKLSNPYHLGRVFYHFAQRRGFLSNRLDASEESPIERHADSLFSLLNDSQTHAELLQFMEEYFSQIPLDEEKELKRLYGKITKVIANEKEFDKLKLSITRMLESKENLGPVKKEIEELTEQIVANGCNTIGQYFFKVEQEDLSKVRLNEIPDKPRKIRTWHTGREVHYLHEFQIICKKQDLKPDLIQELEKAIFFQRPLKSQKGLVAKCTLEPNKPRCPVSHPDFEMYRMLSFINNIKYKESESADWKWLHENADYLKAITPKFFRVTKKSFEFEDLKKVVGSHLIFNYKDHFTVTGCPTIANLMKWFGEDWRDKSWASKSWEEICESPIWKQTLQSALINNHPDLKKAKSIDEAVNDVWHVLQDFDQQQALFDYAQSKLGFSEKDANRFSKTRLGVGYGQLSIKAIRKILPFLIKDKDVSSLAITKAKLADIIKKNLWENNDKRTEILSEVEQIKRNFRNEQQSAHVANNIIKQLKNESNVPVSIQSAGDETIEKYKNSLSDIWETNTERAKEKLKEFKQCLSKGSFMPINSLHDLIKTFLIDNDLAINEKAVDKLYDPRSIGQFKPTLKHVDSGKMILNSPALSSVKNPMAMRAMYQLRKLINTLILEGTIDENTVVHLEMARQLNDANKRAAIRKWQDDREKKKNEAKEALTKLYTEETGRKIEPNETDILRYMLWEEQNHVCLYTVEEEKATLSISNIVGAGNKCEIEHTIPRSLSFDNSMENKTLATKQANQKKNNRIPSHLSNHDEILSRIQHWKEKYEKLGIEIQQIKKKTKAIGLTKERKDRYIQDKHYKQLELDYWKGKYSRFVMKEVPSGFKNSQLVDTGIITRFSRSYLHTYFQTVKCIKGIATSQFRERWLGEKKSRDTHIHHIEDAIILACITSDRHDAFVHLYKALEDGKKKDASHIIGKSMPWPSFTKDIKQIGQDILVSHHTPQQMEKQTRKRLRKRGKVQHNKLGQDIFMQGDSARGSLHKDTFYGAIIPPSDPDKIIKYVVRKGLKDLSLADVNNIVDEKVRGKIQSAVENGDLQIRGGTLENKLNNPIWMNEEKRIPIHKVRCFQGHIKQPLVIKEHKDLKNNESSYRNFLYADKDENYMIAIYQGYNSKGKRKRGFEIIDNMDAAGYFKQSNAERATTTLYPINKTNGKDLFPFHFALKKGELVILKKREEEDIFDLPYSVLSLRLYKVVSIEKDGRITLRFHQESRPDKDLIRNEKYEFGQLPPAKTRVYFSGLIAAIEGRDFRLTPTGKIKRMHHD

SEQ ID NO: 5127 - protein, 1409 aa, unidentified
  REGION 1..1409: note = Description of Unknown: Cas Enzyme sequence
MKKILGLDLGITSIGFALVNEAENKEEKSSIIQLGVRVNPLTVDEQQNFEKGKSITTNADRTLKRSMRRNLQRYKLRRENLVEILKEHKIISDETILSENGNHTTFETYRLRAKAAAEIISLEEFARVLLMINKKRGYKSSRKAKGQDEGQLIDGMEIAKKLYNENLTPSQLCLKLLRAGKKYLPDFYRSDLQAEFDRIWNKQQEFYPDILTDELKETLRGKNEKATWAICKEPFNIVGTKRETKGEELKKENFAWRIKALSEKMDLESLAVVLQKINGQINNSSGYLGAISDRSKELYFNKQTVGQYQMAVLAENPNASLRNMVFYRQDYLDEFNAIWDKQAEFHSELTEELKQEIRDVIIFYQRRLKSQKGLISFCEFESREIEMEIDGKKKTKTVGNRVIPRSSPLFQEFKIWQLLNNLEVSVKDRKTKKQKTASHSAKQEDALEIYGKRELYQEEKELLSAELSVKEKLTKVEILKLLFKNPQELDLNFKEIQGNLTQFALFKAYSDMIERSGHDAIDFKKSAKEITEQVTEVFSALNWNTDILQFNSDAENLDKQPMYKLWHLLYSFEGDNSVTGNEKLIDQLSILYGFEKEYAAILVNVTFQDDYGSLSAKAIRKILPYLKEGNKYDIACEYAGYRHSASSLTKDEIENKILKDKLEILPKNFLRNPVVEKILNQMINVVNGVIDAHGKPDEIRIELARELKKNAKEREELTQAISKTTAEHEKIREILKSKDFGLSYVNRNDIIRYKLYEELKDNGYKTLYSNTYISPGELFNGKFDIEHIIPQSRLFDDSFSNKTLELRSINIEKGNKTAYDFIKEKYGENGLEDYLNRIEMQFKDKRAKLRKLKMQEKDIPEDFINRDLGNTQYIAKYAKTMLEDLVRRVVSTTGSITDVLREDWQLIDVMKELNWEKYDALGLTYYEENREGKQLKRIKDWTKRNDHRHHAMDALTVAFTKDAFIQLFNNMNASLKPNSNEFALKNLYVENGKVRPPMPLKEFRAEAKKHLENTLISIKAKNKVVTQNINVTQKSGGTNKKIQQTPRGQLHNETVYGSQKQYVVNEEKVGTTFDEAKIMTVSKPAYREALLKRLQENGNDPKKAFGGKNAPAKNPIFINETEQLPEKVKTVTFETVYTIRKEISPDLKLEKVIDVGVRKILQKRLDEFGGDFKKAFSNLKESPILNKNGKSIKRVTISGISNAESLHDKRDKDGNLILDKDGKKQAVDFVNTGNNHHVAIYQDENGNLQEKVVSFYDAVKYKQKGFPIVINNPKFIWDKVISEGIDDQDLLEKLPNENWQFLFSMKQNEYFVFPNEKTGFNPKEIDLLNPENYAVISPNLFRVQTMSKVTYGNSVIRDYKFRHHLETTVKDIKELTGITYKQYKTLSFADIIVKVRVNHIGQIIQVGEY

SEQ ID NO: 5128 - protein, 1196 aa, unidentified
  REGION 1..1196: note = Description of Unknown: Cas Enzyme sequence
MTRKVLGLDLGVGSIGWCLITLDKDEKPQSILGMGSRIVPLSAGDAKEFTKGEAISKNKMRTVARTIRKGMDRYQLRREALKKVLSEHGMLPDESLIKLPLLELWELRARAATPGEQLSLAELGRVLLHINQKRGYKHAKADEAAEAETESKAKKEKEGYVAQVKGRYQALKEKGQTIGQHFAEELRANQQTDPKGVYYTYRIKEQVYPREAYLEEYNRIMAVQRTFYPKLLTDALIGRIRDRIIFYQRPLKSCKQLVSTCEFEKKERVVQVKRINKDGVEELVERTITIGPKVAPKSSPIFQVCKVWESIHNIRLYYPDGTERVLEQEEKQKLFDYLQKNDKLSLTALRKVLKIKPKEKLWCDKLLDKGIAGNTTAAILRKALKGYEQYESLLRFDLTIRDGHKADEDGVIRPIIDESYQNEPLYKLWHILYSIEDRADMYRALVGQLKIKEEDLDDGLMDALYKIDFVKQGYGNKSAKFICKLLPHLQEGKMYSEAAEAAGVRHSDSMTDQERDERSLLEEIPLLQKNALRQPVVEKILNQMINLVNALKREHGEIDEVRVELARELKMSREEREEATKNNSSREEENKAIARRITEYGLTPTKSRIQKYRLWQEFAESCIYCGKHVDVVQFLRGEEIEVEHIIPRSILFDDSMSNKACACRSCNQEKGNRFAMEYIQSKGWELDYIKRVDSLSHAKKDKNISYSKRQRLLMLPEDLPEDFIERHLRLTQYISREAQGILRKGIRLVSASEGSVTAKLRQLWGYDNILRDLNLDRYRSMGETEVVTVEHRDGERTDERIKDWSKRKDHRHHAIDALIVACTQPRYIQRLNTVNAEADREEMDAFIKEQQEQKLSKKEKLSLLEHWLIRQPHFTTKEVMKHVEEILISFRPGKRTVTRGRNVYKRSGKTNVQRNVLIPRGALSEETIYGTIQLHRKDRSGTELVRSYVKRIPLSKVNQSNVKNIVDSQIREVVQAALLSLSGRKGVLPTELYLDDSRRRVVRSVRCLVRSNTLIPIRFNADGEAIGFTKPGLNHHVALYRDGVGNIRESVVPFFRAVERARYGIPMIISDPSKAREQARANPNLPESVLLSLPEEDWQLEEFLQGDEMFLLGMTDEAIDRAMETKDYTTLGRHLYRVQSLAAGDYMFRYHLETTLDGKDNVGSIPKSYRIQGLKTYRKLNPRKVKIDLLGRISLA

SEQ ID NO: 5129 - protein, 1196 aa, unidentified
  REGION 1..1196: note = Description of Unknown: Cas Enzyme sequence
MLMSKHVLGLDLGVGSIGWCLIALDAQGDPAEILGMGSRVVPLNNATKAIEAFNAGAAFTASQERTARRTMRRGFARYQLRRYRLRRELEKVGMLPDAALIQLPLLELWELRERAATAGRRLTLPELGRVLCHINQKRGYRHVKSDAAAIVGDEGEKKKDSNSAYLAGIRANDEKLRDEHKTVGQYFAEQLRQNQSESPTGGISYRIKDQIFSRQRYIDEYDQIMAAQRVHYPDILTDEFIRMLRDEVIFMQRPLKSCKHLVSLCEFEKQERVMRVQQDDGKGGRQLVERRVKFGPKVAPKSSPLFQLCRIYEAVNNIRLTRPDGSPRDITPEERAKIVAHLQSSASLSFAALKKLLKEKVLIADQLTTKSGLKGDSTRVALAAALQPYPQYHHLLDMELETRMMTVQLTDEETGEVAEREVAVVTDSYVRQPLYRLWHILYSIEERDAMRRALITQLGMTEEDLDGGLLDQLYRLDFVKPGYGNKSAKFICKLLPQLQQGLGYSEACTAVGYRHSNSPTSEEITERILLEKIPLLQRNELRQPLVEKILNQMINLVNALKAEYGVDEVRVELARELKMSREERERMTIQNDKRKKANDKVAEKIQKCGLFPTKSRIRKYRLWEEAGRQCLYCGRSIDEKQCLNGDDMEVEHIIPKSVLYDDSYGNKTCACRRCNKEKGNRTALEYIRAKGWEDEYMERINERLKAKKISYSKYQRLRWLKEDIPSDFLERQLRLTQYISRQAMAILQQGIRRVSASEGGVTARLRSLWGYDDILHTLNLDRYDSMGETERVSREGEATEELRIKDWSKRMDHRHHAIDALVVACTRQSYIQRLNRLSSEFGREDKKKEDQEAQEQQATETGRLSNLERWLTQRPHFSVRTVSDKVAEILISYRPGKRVVTRGRNIYRKKTADGREVTCVQRGVLVPRGELMEASLYGKILSQGRERIVKRYPLHDLKGEVVDPRLRELIAEYNQEITSKVKAKGAPLYLDAAEKQEVRSVRCYVTQPSVAKAIPIRFDERGRAITFVKSGNNHNLALYRTPQGKLEESIVTFWDAVDRARYGIPLVITHPREVMEQVLQRGDIPESVLRLLPPSDWVFVDSLQPDEMVIIGLSDEELQQALEVQGYRKLSEHLYRVQKVSSRDYWFRYHLETSVADDKNTSGRIPKFHRVRSLSDYEKRNIRKVRVDLLGRISLL

SEQ ID NO: 5130 - protein, 1039 aa, unidentified
  REGION 1..1039: note = Description of Unknown: Cas Enzyme sequence
MEEKTLLALPSGSSPAPKLELGFDVGHSSIGWSVFQSKPFQPLGTGSVIFPSDDCLTSKRRDYRRQRRHIRSTRQRIERIKQILESTGFLSRPELDSPGSAWPWKLAAQVLSSGQKLSPSQLWDVIRWYAHNRGYDGNISWARMDDPKDAEDTKKVEAARTLMEEHKAFTMAETFCSVLGINPLEVKSSSIVYFKGLGVAFPRDAIQNEVRLILEKHFDPVLIRLLLEQVQVEDLPLLQKANIMLPKRYSGGLLFGQLVPRFDNRIITSCPITYERVYSDEIAKHGNAETACHTAERAAKVPAKKSREFLLYRWAMLLANIRVEDKGVSRPLHKEERQSLHTSMIRSESGKMTKRELIAATLQCTSCEINNIAACLVAPDAEKALILRPEKGRAPSGRAPYARPVLKLAALEVLQGLDPREKDGILYQSDALRSSQLKRKLSDKTNNHLVRHRLLILHRLLNDIIKDFAAGQKDRIGRITIEVNRDLQTFSGLTAKEKEQDMGKKLSDFNAVIKRLRNNLGEKTKITPSLIRKGRIAQDLNWTCPYTGEKFDDKDLTNSSRVDKDHIIPRSLRPSDSLDSLVITSPEVNRMKDKRTAAAFIKEFGGHPVVGRPNIYILTWKKYEESINKLESFKGHDQDKKRKKRRKHLLLMEHYVEKEFLPKDLTQTSHLVRLAAEELKKEFLGQSKPPIITSMPGSVTGEVRKAWHLEGCLAQANPQIADLIKKRETTPADVSLKQEIRGLTHLHHALDACVLACASHYLGRDGGLWKALVQRRKNDIDNRLLMDTGIYKLDTQRQARLQALPEPLKNAISKRLAECRVVQHLPSSMRGMRSEETVWRVLDPKDSHPSALRLLRWAENSGVTIPSEGDPQMLLVRRIRRDSAEATKPNNLLHEGETYWWAWDLVSRNKLVGPSQAGKLNRIKGAKQIGENYGIHLNSEPQIIPFHQVHARLAKLGKSPVLRKGQIIQVPQGRYQGTWKVFSVKDTSNMGLVVDLGYPDRVRLSSKGERQKINVSLKTLRKEGLKLLKVPLTGISIAI

SEQ ID NO: 5131 - protein, 1066 aa, unidentified
  REGION 1..1066: note = Description of Unknown: Cas Enzyme sequence
SGRDEKKKQSLAEVRRLARGTRRRRDRYIRRRDQLRQWLTTWGLMPLDPTERQTMARLDPYRLRYEGLDRPLLPYELGRVLFALNQRRGFKSGRKTVADEDKSAIKEAQALEDAISQATCRSLGEYLWQHHQTQNKEEIEAGIVRVQNVRARPGSTGLYPLREMYEDEFDALRSAQEKHQALTAAQWDRLRDIIFHQRPLKPQELGACQLYYNEGFSRAYAAIPSAQKFRAWQEINNLKIIMPNWEKVALTEEQRNTLYTQLNEKNTLSFKGRSGIKKLLGLSEDTKFNLEDARKDKMLGVATSVTMRKPEYFGEKWDHFSDAEQDAIIDYLLPEVASVQQGGELRKKDNAPEKIKSRALQEWGLSEAQAEALAQFKIDTLESGTSRFGIQALQDLLPYMAQGLRYDEACKELGKHHSDRRPVAVSDGLLPYYGYVIPEAIANSGRKRSDPHEKVCGIIGNPTVHIGLNQLRHVVNALIQTYGHPAEIALEIARDLKMNKKQKDALKKRQAKEDEDNKDFARDLADSHALYGVSVPNTYDNRLKYKLWKELEMANGMALCPFSGDKIPRHRLFDHDVQIEYILPRSKTMDDSPGNKTLSTLSANQYKGGRSPYEAFGQSKDGYAYDAILQRVANLLRKKWRFEPDAMTRFEDEAGFLDSQLQDTQYLSRIAQKYLANICEKVRVSPGRLTAKVRHQWGLGTLLDEINGGVTEPKVADAMAEDSATTDTETTEVPDPGQVQKSKKRDDHRHHAIDALVVGLIDQSVIQRAAKASAQDRYAKEIFEPPIPKEVLRQQAKRVIERIIVAHRPDHGMGGALHEGTNYGPFDASKIATTWEQARLDDGYNVVYRKPLIALTAEEVWVIRDTKIRTDLLGLLDGLSGKGVKNAAQKKSIGAAIGTILAQYAETQGIKNVRILKKENTAVPIYHPKVSLQHVKLVAPGDIHHVQFWELPDGKVRGVGVSVFEANQPKDKKPPTRPHPAARLLMKLHKGDVISLTHKGQDMIAIVKSLRPSNKAIGFWAQTSTKEEKMNTFSFGDILNKNVKKVSLNPIGKSTFSATKKVLIDA

SEQ ID NO: 5132 - protein, 1425 aa, unidentified
  REGION 1..1425: note = Description of Unknown: Cas Enzyme sequence
MDNKNKKRILGLDLGTTSIGWAQVIEDNTNSSQSSIVNIGVRVNPLSTDEQTDFEKGKPISINADRTLKRGARRTLDRYQDRRLNLIDALIKANIISKETKLAESEKNSTHSTYAKRSKAVTEKINKDEFARVLLAINKKRGYKSSRKVKNEDDGQAIDGMAIAKILYEQGLTPGQFTFELLKKGRKVIPDFYRSDLKAEFEKVWNTQKAFYPTIFTDAFKKELEGKGQRATSSIFWTKHNFNIAEIKGTREEKKLKAYEWRASAIKEQLEKEEVAYVITEINNNLNNSSGYLGAISDRSKELYFRRETVGQFLYGQLQTNPHTKLKNQVFYRQDYLDEFEAIWSKQAEYHIELTDGLKKEIRDIIIFYQRKLKSQKGLISFCEFENGTKEIKRDGQTTKKTIGLRVTPKSSPLFQEFKIWQNLHNIILRSKIDKSQRYLEQEELEVLFNELNLKGNLDSKKILSLLGNLSPVEWEINYMEIEGNRTAKVLYDAYFKILEFEGYNEDLLKLSGKDEVNVSEVKMPANEIKNMVKTVFEVLEIDTSLLDFDAQMEGKEFEKQQMYQLWHLLYSYEGDDSASGNEKLYELLKHKFGFKKEHSQILANIAFQDDYGNLSAKAIRKIYTYIQELPYDKACLQAGYRHSASSLTKEEIENRPLKNTLELLKKNSLRNPVVEKILNQVVNVINTLIETNSKRDTNGKIIEYFKFDEIRIELARELKKNAKERADMTSSINSAKIRHEKIYKILQNEFGVKNPTRNDIIRYKLYEELKTNGYKDLYTNNYIPRDILFSKQIDIEHIIPQSKVFDDSFSNKTITYRKDNLDKGNKTAFDYIEDKFGKIKLEEYTARLLLLFENNKKNNEEGISKAKYQKLLKKETDIGDGFIDRDLRDSQYIAKKARNMLYEICRVVTPTSGNVTDRLREDWDLINVMQELNFEKFKKLGLTEMVEKKDGTFKERIVDWSKRNDHRHHAMDALTIAFTKQSHIQYLNFLNARKNEEHKEHMKVIGIETKETIIAKDDNGSNKRKFKPPIPNFREQAKEHLENILISHKAKNKVVTKNKNKIAGKLKPQITLTPRGQLHKETIYGKYHYYMNKEESVSAKMDEIMIEKVSNPLFKKGLLNRLMENNNDSKKAFSGKNAISKNPIFLDESKSKTIPAKVNLTWLEEDFSIRKDISPDNFKDEKSIEKVTDLGMKRILLKRLKEFQGDSKIAFSNLDKNPIWLNKDKGISIKRVTISGVKNAEALHYKKDHFGNDILNKIGKKIPSSFVSTGNNHHVAIYKDDKGNFQEKVVSFFEAVERVNQSLPVIDKNYNSYEGWQFLFTMKQNEYFVFPNEQSEFNPHEIDLLDPKNNALISPNLFRVQKISAKNYMFTNHKETIAISGEILKTKKELTGIMYYFIQTPQNLGGIIKVRINHIGQIVKIGEY

SEQ ID NO: 5133 - protein, 1086 aa, unidentified
  REGION 1..1086: note = Description of Unknown: Cas Enzyme sequence
MGYRLGIDLGTASVGLVCVTLTAEKQPANIAYHCAHIFQEPVEPSTGGVGSTKASIRGNARRIRRLIDRRVGRLQDLAAICKLLGINPQTITPDDGRCLHEARSQAVTKPIALADLARVFFRMAKRRGYAGGFQVKKEGDEGQVEGGINQLKQLMEAANCDWLGQYLLHRFNNGETLKLKEAKPDGLYVSREMVEAEFGQIWKIQSAAHSILNEQHNGKPLKDIFHNVIFYQRPLKSVAAMVGHCPLEPSLPRAPMSQPVAQAFRIEKQIADLRWGMGRRAQKLSSEQKTVIREMLCMKEKASFLQIYKALEKADCPKPEHRGLNFDRPSRPELKGNSTLKAIDKMGLAEQWHMLDAGTQVSIINLLADLGSPQEVDRDDWPDRFRGKNGTPRTFKPEVVDFINAMVASGRFDRLSKMGFDGGRSAYSVKALKKLTEKMCEGMDEYEAIEALYPQPDKKPEPLTRLALHKPTGNTVVDIALRQMRYAVNNAIDAMGGEPPSEVVIELSRDMGLGLKRRGDIEKGMDKNQRERKKAKEDLEKNGHSATSTNIFRWRLWQEQDTNCPYCERKISLGAAVDGNETNLEHIIPRTLTRVGRQQDHIMLSHSSCNDEKRNRTPWQAWGDNPDKWKIITERAKSLEKKRRFAKARFLTLQDWKAEIINSDIIEDFTNRQYHETSWISKLAAQWMRTVCPDVAVSRGAMTAHLRRIWGLNTVIPEIRFESGLPVFDTEEKKNLITKDQFEKYKPYWEGHNNNHSGVQRTDQMIEKRIDHRHHVIDALVIALTSRSLYQKMARNYKTLSERAQARERVKLKLSISPPLKNIRTQALDMIREHHIVHKPDRHVGGSLFKGTAYGVTWVENDKDPNADPKQQLTLRTNLETLADEKSKPDAVRKKLEKIASPDTRRLVLDTFDKRIATGKTAKEALSNIQHPQYRNVIRQVKMLRDSAGTAWKIEFNSRHSSPDKPHYKYLQYDGYAYLELTETPGEKPEPRLVTQPEALKQKGQPVPPNTRRFFKGDTVEDTKDGKRFVVKSFREKGLLMFLIPVTEAREIADMDATMKQCKLTQKLQGRRSVGGAGIARLKLVN

SEQ ID NO: 5134 - protein, 1123 aa, unidentified
  REGION 1..1123: note = Description of Unknown: Cas Enzyme sequence
MDYRLGLDVGTNSLGWAVLELDENGEPCAIADAGSRIFNDGRNAKSKATLAATRQEKRSARRRRDRFKQRQTFLLSELTKAGLFPEDESEREALKGLDPLELRASALTEPLAPHEIGRAFFHINQRRGFKSNRKDTSEETTSGKVADSIHKLLADMELMEQKLSKEEYKELSKEEKKEVRGQIILGKKQALEYLQKNDLLTFGSFLWQRRRNKQPTRARTGNDKLYEFYPTRELLEDEFHKIWRAQARHHPNLLTEEAKERIHHAIFSQRPLKSQEIGLCTYMSMSGQKRAHRALPGFQRYRIYSEVNNLNWRTSQGLSEVKAYPEARDAIVEMLERVSTRNGQVSFNKIKNVLKQQGLAEGNIELNLESDKRKGLDGNATSRLMQQEDCVGEQWHEWPPDQQDAFVTLLLSDKEDEEVLAVMQSEYGLDDVDAQTCLEASSRLPEGTGNLSLKAAQLLEEKMRDDCLIQPDAVCAVAKDREEQGDFRNPLNRTAGSEELLDELPYYGEAFQETGHIIPGDNKLQEYESHGDKRKYYGGVSNVTVHIALNQIRALVNELIRRYGRPASIAIEMARELPMGVEKKREEEKRQRENQEQNERFDRILREHGRSPNRENRLRLRLWEELDEDPSGRMCPFSGSRIGIADLFNGNTEIEHLLPFSRSLDDSRANKVLCTRQANRDKGQQGPYEAFHNRAGYNWGEIIERAQRLPKAKQWRFYEDAWNKYDEQEGFLKRHLNDTAYIGRLAKEYLENICLFNKINVLTGSHTALLRRYWGLNSLLRDSNQPEQQKKNRDDHRHHALDAMVVAMTTFSMLQKMSKESSRAEEVDLEHLFPKDHNGRSPIDPWDGFRSDAKKRLDRVVVSHRVRRKRAVLAESGKSVSNRTTGQLHNETAYGIISGPDKTGKYKVVSRWPIDKLKKKDHLKNIRDPYQNKRFLEVWERAEEAGKKGKDAIKQFAVKEGIRSLRCTKSLSGVVVKNRQGKAYKFLEGDSNWAAEIYEYPPGHSKAGKWYGEVITTHEANQPGFRPGQTYRPHPGARLVMRLQINDCVRLDDQIMRLQKISKGFRLVFVPALEANVDARHNDPQDDFSFKETGIRRLQDQQAQKVHISPSGRINSEVRLRKP

SEQ ID NO: 5135 - protein, 1292 aa, unidentified
  REGION 1..1292: note = Description of Unknown: Cas Enzyme sequence
MISRNYLLHLQNGGRDAAHAKWSIDAYYTSAVSLGVDIGLEGIGIYIRKGREEVYAKTVDVSDVLPGADALEKRRLLRHARRNRANKRTRLSRLDVLLTKHGLPLPWKDNKTAYEHSDPFKMRHRAIRQEGNGLGSKEALAIAIRSCVALRGYDYGRFSEDGEHPWGRSHRLADALKWLATATIDDSLAERLQEYVERRELAADKKAPDAKWAEFEQEIARRLKASNEHSLEAVLREHFKGEKHDNLRPRARGFAFSRHKIWAHLVQIVRRHAAIIEDSEGFLAVLGINPDDKKQFPDLKSARAAREKAIFWYNRKSLLEMEAHWAKKRKDCPYAPRLGLGDQKTSSRGHRSLRLWAILEFAITRRVEITYKDAELEKAAKAARQKVEKKKCHKEFLHALTLTAVKALVDLVAGQYAGAIDVPLLDKERRSEAKKKAREIIEDDVAKQSGIAPDLNPKPSATTKGWNESFYDQLDDIVAPSALGGTGSLFHSTAELLFNTATAGGTDFSAEGYNRRLVELEFYDWRRESVLDWGVYPQVEFLLGRRVKRGRRKGEVSRSCQGFLRQLFTGFQVEGHALLGKFAPDFVTVEVVGDPPRTQQQKVDILKEHKKKRDERREAFEKSAYVDSGVASRRRRMALHGQQKGRCPYTGDKLPDDPLDGRLEIEHIFPSEMGGLSVDDNLVLTLRETNGRKHKKTPLQWLGEDRLRELVVNNTDMRWSALKREVFLWGTRREDDPAGKWPKHYGDQGRLLVPDFGNMTRTAQLARQLHAAVADWLGIAKQPEEMARRIATPSGWLASQALKSWLPDYRKDRADLTHHLIDAAVLSHIPPREGMNSVHCGGIFYAERVAEINQQKPGEMTDRLVTRALPGLLNVAAIQHWMPGENREYAQCPVLLRKSRSKTSSLGDSTFWRQADRDKPDLAQREGSPFNPADYKGNPDKLWGLLQKMGINERKHRQWQKRNLRKGLPPPPFKDVVPTIQDIEKYLELATATVQSERGQTPPVLRLKDGKDGKPWTPIAKIWKWSTKRDLSSPLGLSGHVRHEDGKPVYEALRLLKESNDRLELWLGYDWNLAHKAQKAKDMDWEAKGWIYYRRLIPNGTALRHLKQLGLRFDRDKRRIPPAFMQANPEEEATHQTLRQLLLGDKLPAFARKVGQFQKDDVLLIGLNREGAVAAKNEEIFWSAHFKVTSIGGSFALEMKPLLFADKSVTPLKNMERKHLVQKAKDPDVHAALLSLPDAPRLASELMAINPKMRIPPEPEGQAKTKPNDPPSDTPRRRGGRATPAGQADLLR

SEQ ID NO: 5136 - protein, 994 aa, unidentified
  REGION 1..994: note = Description of Unknown: Cas Enzyme sequence
MGGYTLGLDIGSNSIGWALIETGERPAITDMGVRVFPEGVDRDTKRLEKSKNATRREARGARRTHRRRSQRKQQLLNVLQTVGLLPKAESELPSLFHASPYELRKKGLDERLDPYEFGRVLYHLSQRRGFKSNRKSAKAKEDSVVIERAGALQGEIDNKKCRTIGEYFASLNADEQRVRGRYTFRSMYEKEFDLLWENQAKSYPETLTDELRQKIRDDIIFFQRPLKPADDLIGKCELQPNENRCPRADWYAREFRVLQDVNNLIIQKSDGSEQRLSQEQRQIIIDALRIKERLTFGKIRQKLGLLEIQRFNAEYRVGPGGKRVQSLKGDVFVWAMRGKNIFGPKGWQAMNERQKVELNTAFLELEDDELQEKLRLQYGLNEEQVKAAMKVSLPKGYMRFSCKAIQKLLPAMKEGMLTHEAIKNVYRDRSRGHLEEVAKKLDSPPELRNPIVQKALVEVRKVVNAIIREYGKPGKIKIEMARDVQGSKQEREELHWKQEENKKRNEQARKRLKEDIGIPNPTRDDVIKYKLWEECRKRCPYTGKTISQQALFGPNPEFQIEHILPYDRSLDDSYMNKTLCEVHENIHVKKNQTAYEAYSHDPEAYEQIKQNIKVLPWPKRRKFIQQEINLDTHIDRELNDTRYICRELVSYLKKLGVKARGTRGKITAELRHQWGLDGIFDELGTRRDDDHRRHAVDAVVVGVTENKHLRKLARSKYSMSNELFGQPWPAFRDEVREKVNRINVSHRVCRKVSGKLHEETNYGPTHKEGLYAFRKKLDDLTLPMVHKIVDPVVREIVKARLIEKGIGLADSGKPPKEVWKEPLYMKTTKSNRKVQINKVRLYNVAGNVIELKDSSGEPYRYVEPGNNHHIEIFQYKDKKGRTKRAGKVVSMFDAVKRSQRGEPVVRRDYGDGGEFVCSLAINEMFLMDMGDGNMELHRVQKIIHDGRIVLRPHTYSGKVADSDKPPLIQRKNPNTLKGHKVTVDMVGRVQLAND

SEQ ID NO: 5137 - protein, 1226 aa, unidentified
  REGION 1..1226: note = Description of Unknown: Cas Enzyme sequence
MQKELGIDLGTNSLGWGIVESNTVKDCGVLVFEQGIPQEKGREAALSPAAERTAFRAARRLKFRRRLRKYHTLKILIEQGMCPLALEELNRWIRQGVFPRGNENFIHWLNSTKERNPYYFRAHAATEKIPLPDLGRAFFHIALRRGFKSSKKDQEKEDSPEMQSSEMKGKIRELKLKLESSGITLGQYLYERFQCEKKIRKEIRCGRKEHYEPEFERICDVQEIDPEVRKALHTAIFMQRPLRSQKHRVGKCPLEKRHSRCLISHPLFERYRMLSFINSIKVKNVGDKEFRFLTDAERRLAETVFMVSAPSFKVERILHKLFPEIGKKNYEGPRSEINYRPDHTVASASVTHQLSKILKCNDLFAWRHSYVTRHGKEAVMDVQALFDGLYYFSHIYDEDDDDKAALKFASERVGLSEDAAAALIKIKIPDGYARYSLCAIRKIMPFLEMGYVERHAVFLAKLPDIMGECFENRKEELLHDFQQCVNDYVWEKENLSRREHVQGRLLSLTERLRNMLEEKWKIMPPEFEKLYSYQENSNYQDCSKEGILPRIELGMIYNPVVHRSLTVLRHLVNHLRRCGKIDADTEIHVELTREVNDKNHRLAYLDWQKKNEGERAQAVKAFEEYGISNPTETQILRWCLWEEQGHRCLYTGRKIEAGEIFSPTADSVDIEHTIPRSRGGDNSRENLTLCDSQFNRHEKVGKLPSECDNYHQPNGILENLKSCIQPKLEEAEVAYSKASAAARKATGIQRANARKKMLYLRFALDYWRTKVKTFNLAADEINENFTLRQLSATGVMTRHALQFLKSVYSRVFANSGKITKFARESWGVQNQDEAKDRSDHIHHAVDAIVVAALNRKTLARISAAYHECEELMQGRGALKIAYPWESFPEDVRNAVNQILVRHIVQRNEMKQTKRNGVFLTSPVKLPDGRVIRRVPAAGDTVRGALHNQTWYGCIRQNGAEKFVVRKPFDSNEFKQLKDLEKIVDPGVKNALLEQIRNSGMDFKTAMQQEFRMKTKTGKFDGPVIRRVRIFCSMQEPLKIKEQTYCSEKTYKNYYYAETAKGSNFMVALYRKPEIPGTEKTYEYRLISLWNWAKEHRQSGFVPYERREKNLDFIGFIAPGTMALFYEKSPEELHALPKSELQKRLYKITEFEKDGERLRLHLRWHREAREKGKATEAMEIMQMKSSVVSYDIPAFLLRISQKSYQNHLLFDGIDFEFTADGEIIFRE

SEQ ID NO: 5138 - protein, 936 aa, unidentified
  REGION 1..936: note = Description of Unknown: Cas Enzyme sequence
NSIRKNGLPLTREERRKAESAFLLKKASFEFEKLVRKLDPKNWRKILPEFNYAPDKSIATSPVTCQMQKVLGTEDLFAWRHEYIGGDGKTRTMDYQTLFDALIFFDDNDLLKKFAIERAGLTGEQAAEFVEIRIPDGYANFSLCAIRKILPFLEVGHIQTRAVFLAKLPDVLGREIFQKNSERIIADLGRIEEDWRSERERAPSDGPRAPFLSQTERVRQYLEDEFHVTPDRFEQLYRYNSRSDYPDNTGTGILPEVNLGMIYNPMVYRSLNEVRHLVNHLRRTGKIDAETEIHVELARTVNDKSTRKAVADYQKNQENLRKKYAEEIEALGWEATDERILRYTLWMEQNQRCLYTGKQIGAADLLSPQNVVEIEHTIPRSRGGESIMENLTICFTHYNRYTKKNNLPTMCPNYDKPWNDCSSILDNIRSAGWFEKRESLRAQAEKLKSAARGNPQKRVDKIKCEKELEYWDKKLAAFEITDEQLRKQGFSKRQLADTGVIARHTVFLLRSVYRNTYSRNGKVTEWVRKAWGVQGFYERKKRTDHKHHAVDAMCLAALTESSYQKISTAYRIDSEKAAAHIQDEQNTLPTGYPWPEFPEDVFRKTEEILVYHSTRHNETKQTRKKVHLVTPYRRADGKLIRVVKTGGDTVRGQLHKDSYFGRILDPESGEERSVIRKELNLNNFAAEAKLSEIVDPKIRESVQEQIRSRIKEGKSFKDAMNEGNFRMWTRDGSFNGPPILSVRCFVSSTEPLKIRKHAYSSDKDYKKYIYAETAKGGNFKAALYRSPDGKLSYRLQSLWEWATTHRKPDYIPLEKQTGNGEFIGFISPGTMALSYENSPDELKKLFPRELNKRLYKIIVIEKDVQRLTLRFHREARAKSDVQAEMKEKLGVREASAISFQQPAKLLRIGPKEFSKHLLFEGIDFTISIDGEIRFLR

SEQ ID NO: 5139 - protein, 1451 aa, unidentified
  REGION 1..1451: note = Description of Unknown: Cas Enzyme sequence
  MOD_RES 804: note = Any amino acid
  MOD_RES 1194: note = Any amino acid
  MOD_RES 1203..1204: note = Any amino acid
  MOD_RES 1208: note = Any amino acid
  MOD_RES 1217: note = Any amino acid
  MOD_RES 1221: note = Any amino acid
MSKILGLDLGTNSIGWAVVDKDGTEMSLLDTGVRIFSEGVKSEKGIESSRAAERTAFRSARKIKFRRKLRKFETLKVLAQNNMCPLSTDKVLDWRKSGFKNYPLKKDFLMWLRTDDENNINPYFLRDKASREKVTLYELGRALYHMTQRRGFLSNRLDQSAEGIFEEHAPQIESLIGDLQTIEELKSEIHDYFVEKTDIIDETKKGGFKNDLDEGEKKLKTLFNSLNAMIKKNEKDFEKAKTELIERLNKKDDLGAVKQKIHEISDEMKKGNFATLGQYFYSLYNKGKIRNQYTAREEHYLSEFEIICTTQQVNGINKNEIIPEKRYQGLAKDLYKAIFYQRPLKSQKGLIGRCTFEKNKSRCAVSHPDYEEFRMWNYINTIKIKTPQDQELRFLTQEERIKIVPKFHRKKDHFNFEDIAKELFPKGASYGFYKSHEALTFHYLFNYKPYDSVPGSPVSASFRNLFGNTWKTINFSYQTKNSKGLVVTRNADYRDLWHLLTVSKTNAYLYEYAKTKLKVDDKTAKSFSKIKLKKDFSSLSLNAINKIVPYLKSGLLYSHAVFMANIENIVDTEIWSNPKERAYIQEKIGQIIDQYSHEKSLIEIINGLIKGYKNENVYYSSEAEPYFKADLEKRLIAFFGKKTDHKLDNALLNEQFTILIEQIKQQKFLPIKRLDEKVINFLLGVNENGDVFCTNKDKIKKLFHPSDIDVFKTQYIKDENGNEQPVLGSPITGSIKNPMAMRALHQMRKVLNNLILENQIDSKTIIHIEMARELNDANKRKGIKKFQDENKVNREKFRTEIKVXYKAETGKDIEPTDDDLLRYQLWIEQDKTEIYEDTGKSIGISQIIGNNPEYDIEHTIPRSRSQDNSQMNKTLCSQRFNRDIKRNMMPSELTNHTIIKARVDHWRKEALELSWKIDQLSKSISALSDKNAKDKKIAERHFLSLKRDYLQGKYDRFTWKEPKVGFKNSQIPDTGIITRYAQAYLKSYFTRVESVKGGMVAEFRKIWGIQKSYIENDKKYFETKDRSKHTHHAIDAITIACMTKDKYDALAHAWTKEDEAQKHEARKILSDSKPWKTFTEDLVKIEEKIAVSHYTPDVVKKQSKKIIRVKGIKQYKIETIKDPSGKTVPKQDAKGKYIFVLDDNGNKIPRYQQGDTIRGSLHQDSLYGAIQHPIHNERNYVIRKDLYSIKKTDXENIVDPIVXXKIVXAVNNGIIVXSSNXQQKNKVDGTVWMNQEKQIPIKKVRVVATSVKNPLEIKNHATLSQSRFDYKQKVYAQNDENYAMAIYELEGKREFELISTYHFSQLRKSGHGFYPLYKEKIIKGASIQIPIAKRNGHDIILRRGLHVIFYDSTIENPQNINEISEINSRLYTIEGLSINRVKTFEYGVIVLRHNKEARKSDELKQTNYKPDGDFKLSENKPTRKMSPGQFNAFIEGIDFKILPSGKIINIY

SEQ ID NO: 5140 - protein, 1224 aa, unidentified
  REGION 1..1224: note = Description of Unknown: Cas Enzyme sequence
MKKRILGLDTGTNSLGWAVVERDENNEYTLIDKGSVIFQEGVKIEKGIESSKASERTGHRASRRHYFRRRLRKIETLKVLIKHNLCPPLTDEELDIWHKKKIYPLDDDFMQWQRTNENEEKNPYYYRHFCLHKKLDFTKQKDRFILGRALYHLVQRRGFMSNRLDTTSEDETGKVRQSISDLNKEMEEAGFEFLGDFFHHLYSTEGNKVRLRSRYTDREEHYFKEFNEICRVQGLDEEMINDLRKALYFQRPLKSQRAGVGKCTFEPKKPRCAASHPDFEEFRMLSLINAIRIKTPKDGETRPLNDEERAKIGPLFYRVSAVNFDFEDIAKKIAGKNNYMYFKDVGDKPYKFNYKMNQGVSGSTTVAQLRAIFGEDWKQGIAETYTKMECKNGPKSIDDSVNDIWNVLYSFESVEKLKQFAKENLQLDDQLAEKFSKIRLTSGFASLSLKAIRKILPFLRAGMIYSEAVFFANIPTIISEELWERDKDDIMANIYDSIHNSDATKPDMHVTIESIIKDHLQNNYDLKPGAADLLYHPSMIETYPDAKVVNGVYQLGSPRTNAVRNPMAMRSLHQVRKLVNALLRDNIIDNTTEVHVEYSRDLNDANKRKAIANYNKEQETSHKKYYDEIKKLYKEETGKDIEPTELEIKKFQLWEEQEHRCLYTGRQIGIASFIGANPEFDIEHTIPRSVGGDSTMENLTLCENKYNRETKKAQIPTQLANHDEIMVRLEGWKKQIEDLDKQINARNLRTNSGMEKGMKDFRIQRKHLLKMKKEYLLGKYKRFTMTEVPEGFARRQGAGIGLVSKYAGLYLKSLFHKPEDRAKSNVYVVKGPTTAEFRKIWGLQAEYEKKERVNHVHHCIDAITIACIGKAEYDELARYYHDYEDYETSRRNKPTFKKPWPTFAEDLNNIEKELLIVHYTPNNFGKKAKKIIKTSNGKVIAKGDSVRGSLHMDTYYGAIERDGEIRYVVRKPLDATFFDSPKKLDLIVDDAVREIVKEAVAGKNFKEAISAPIYMNKEKGILIKKVRCYMNSVKNPLHIRKHRDISVKEYKQQCHVANDSNYMMAIYEGEVKGKKKREFELINMLDAANYYKKSSDRDEFPRLVPEWSANGYELKWCLYVGTMVILYEKTPDEINFNDMKDVSRRLYKIIGMSSMFVGNWYGLIFMRFHEEARAASDVKLKNGAYKVGEEHRPGIKMLHTQFNALVEGIDFSIDELGKIKLLHR

SEQ ID NO: 5141 - protein, 1362 aa, unidentified
  REGION 1..1362: note = Description of Unknown: Cas Enzyme sequence
MAKILGLDLGTNSIGWAIVENEDNNFTILDKGVRIFQEGVKIEKGIENSKAAERTDFRSARRMKFRRKLRKIEVLRVLSENGYCPSLRSEDLNNWRYKKVYPDNGYFREWLATDDFASEVERKKQTKNPYFFRNLVVSKKLDVNKEYDRYKIGRAFYHIAQRRGFLSNRLEGTKEGDGVVKKSIAEISVAKEDKTLGQYFYEKYVNGDKIRDQYTHREAHYLEEFNRICEFQNLPKPLRNKLHQAIFYQRPLKSQKGLVGRCVFEPKKPRCVVSHPKFEEYRKLCFINTIKIKTPNDEKLRFLNTTEKENIEPLFYRKSKDYFDFEEISKQLAPKKQYKFYKDPNVNPEDFLFNYTMKTTVMGCPVSARLKELFGENYMNLTIEYIRGKDGQQSTIDINDVWHVLVTYHSEEKLAEFVQKRLHLNDDQIKEFLKIHPKQEYASLSLKAINKIIPYLREDLIYSHAVFLASMEDIVPPDTWKNDENKKIIKEEIHHIIQTQNEEKQIIDAVNGIIKKSREENAYWSKEASEIFKSNLIKSLRNQFGTTKLIEFGEEKKNLILDNAYALLKKQMNRNMGRGEFAVVQRIDERVKAFLVDNFDVDERRLDKIYHPSAIDVYKPAVVGSDKNLYLGSPMVSAVRNPMAMRALHQLRKVINELIKLNKIDPYTKIHIEMARDLMNANERKALQAWQREREKQCKEYAQKIREFYIDSIINTEPSEEDILKYQLWEEQNHKCVYTGNEIAVSDFLGANPKYDIEHTIPRSQSFDNSQENKTLCDNVYNRSVKRNKIPSELDNYKEILLRIEHWKEKYEELNTQIQSAIKQTRASTDKNAKDRAIQKRHRLSYERNYWFNKHRRFTMQEVPEGFKNSQIVDTGIITKYARLYLKTVFEKVYTVKGNTVADFRKIWGLQPEYLEKERINHIHHCIDAITIACITKENYENLAKFYHEWEELHKAGVDKKPQVEKPWETFTEDIKSIEDEVLVSHYTPDVLPKQTKKKLRKRGKIQYNKEGKPIYQQGDTVRGSLHKETFYGAIEREVKTKNGEIEKQIRYVVRKPLDTLEDSNIKNIVDPKVREIITRAREEEKKLKKELDSLSKKLSNASEGEESGVLTGIDNLKTRIKNLYALPNKNGNKISIKKVRIYTPTVTNPIQLKKQRDVSQKRRKPYKEYYHVANDANYLMAIYEGIDEKGNKKRDFELINNLQAGEYYKLSVQKYLKPQDINALEGLVPSSKTTGKLSLPLKGIIKVGSMVILWEKSPGEVWELEKTDIKKRLYKVVGLSINRIKSGKKVYEFGMIVLRFHQEARQASDLKTYDGEYNRDEPYISQRKLSHNQFNALIEGVDFILTPLGEIKQLHKNPNAL

SEQ ID NO: 5142 - protein, 1275 aa, unidentified
  REGION 1..1275: note = Description of Unknown: Cas Enzyme sequence
MKYILGLDPGVASIGWALVLEAENNNEESEIIASGVIKANFDNFTYLNSKGVPKDGNPVEMFRKGFTVSPNLVRRISRGAHRSLQHYKLRRAELIRLLKENGLLDDDALLYEDGKDTTHETYRLRAKAATEEISLNDLARVLLMINKKRGYKSAKKDDFDSEEEKGEYLSAIVGRSKMLTDTHQTVGQYLMSQLEQHPLKSIKNQTFYRKDYEDEFEQIWKTQIQFHPELTRKLKKELKNRVIFYQRPIESKKQELSFCELESHQIEIEKNGKKQYVTTGSRVCPISSPLFQEFRMWQRLNDVVIINQATLEKRQLTLEECELLAAELSIRKEMTKRDALKLLKGKQTKNYDLNFEKLIGNDTQARLVNAYLKIMEMTGHDKLEVKKMRVLDVTDAICKVFANLGYHTDALTGEVALNQDVCIQPFYKLWHLLYSFPGDNSRSGNATLIQKVKEFFGFDNDEYAKIIADVKFADGYGSLSAKAIQKILPKMKEGYQYSNACELAGYNHSKRSISKEDNEKRTLQQHLQLIPHNSLRNPLVERILNQMVLLVNNLIEEYGNTYGSFDEIRIELPRELSSNADKRQRDTKNRDDNQKTKDACRDELIAILKEHKINVTYVSENDVLKYRLYKELAMNGYKTLYSNTKVDLIALIMGRGFDKEHIIPKALRFDNSFSNLTIEKTDINLDKSKTTAIDYVRNTYGEEAAQQYIARVNDLYKKGAFSKTKRDNLLRTAEEIPEEPLNRDLGLTGYINKKAMELLLPVTRKIVPTTGKITSQLRDDWQLVNVLQELVWDKYKRLGKINTYVDKNNKTIERIDKEAWTKRTDHRNHAMDAITVAFTKPAIIFYLNSLNSQGEARNQLIKMRHDYMHRDNQGNWVFNPPMQIGRLRAEVKRQLEQMLIYHQASSKVATPNVNITKSKKKKEGNKQVVLTPRGKLHDDTFLGCIKLPQPEMLTVDKSFDEQKIATVTKEKYKKALLDRLHQFGDNPKEAFTGKNTLDKNPIWLDEEHTRAVPLKVKCLQMKTFYTKRVTVGEDLNVENVVNEEIKQILKNRLAEYDGNSKEAFTNLEEHPIWFNKEKGICIKSVIVKATDVKEPIPLHKKRDRKGMIISDSNGGTVSIDYVKSNKNHHADIYVDANGVLQEKFVTFFKAVQRAKEQKPLVEVDYNASEGWRHLFSIQRYDYLIVPDIENGFDPLSIDVCDTANFPIISSHLFRVQKMSSKNYLLRLHLDTSNKTPDGLKGITSIEIRSLNNFIGCVKVSVDRMGRLFSPQPIVL

SEQ ID NO: 5143 - protein, 1114 aa, unidentified
  REGION 1..1114: note = Description of Unknown: Cas Enzyme sequence
MTGKKHIYWRLGADLGANSLGWAAIELDARGLPRAILAAGSRIFSDGRDPKSGASLAVDRRDARAMRRRRDRFQQRQRALLKYLVADGLFPEDEGERKALAALDPYALRARALDEVLSLHELGRALFHLNQRRGFKSNRKADRKADDDPGKIADGIENLKSKIREAEAEAGAEPESWTFGKWLHDRRVHAPDQNNIPRVRTRLGPQGEDAKDGYDFYPSRFLLEQEFTAIWETQAQHHPDVLTHDVYKRLFEIVFHQRPLKAPQIGMCTLIAGDRRLPKAHPLFQRRRLLEELNAQMIVRPGEVAQRLTREERDKLFLKLKDRNKVSFESLRKALKLDPDARFNKESENRTELKGDEVAAVMGSKTRFGNRWVHLSIEEQWAVIERLGDVESDAQDDAFRSWLAERYELTPEKTRAVTNAPLPQGYGRFGETATRRLIDALRDGEKDSRVLVYSEAVTAAGLGHHSDRRTGEVFEDKDGRPQLPYYGVALERHIMPGTGDPSDSDEMRVGRLTNPTVHIGLNQLRRIVNRLIRAYGPPAEIAIELARELKLTDDDKKRINKENNSNRLDAEKRSEKLLAIGKPDTGANRALLKLWEELNPANVLDRRCIYSGVQISIDMLFSAAVEVDHILPFTATLDDSNGNKIVCTREANREKRKRSPYEAWGHSARWEEIAARAAQLPRNKRWRFEPDAMEKFKDDGGFLARHLVDTQYLARLSREYLATLYPDKGEGTGHIWVSPGRLTEMVRRKLGLNDLLPDHNFGGGADQAKNRLDHRHHAIDAVVVAIVDRGMLNSIARASGEEGAEGRERIKIDPPWTGFRDDLRTAVNAITVSHRTDHGTASKAGLPKGKDATAGRLHNDTAYGFTGETDAKGNSIVVRRVPLLSFKKLADLDRVRDPDLKAALYQHLDGLEGKAFEKAIGEFRRREWHPYGGIRRVRVTEPLSVIPIRDRNGHIYKGYKGDSNYRYDVWELPGGKWVTSWNDIDGVALSSVVSTFDAHQSDVQPRPHPAARKVLSLHQNDLVAIERDGEERKLMRVVKFGQNGQITLAEPQQAGDLKRRDAASNDDDPFKYFSPTCGGLKKAKARQVRIDELGRVLDPGFPARSKQRKTRKPS

SEQ ID NO: 5144 - protein, 1112 aa, unidentified
  REGION 1..1112: note = Description of Unknown: Cas Enzyme sequence
MMYRIGLDIGVASVGWVAFACDNDGEPTRLLDFGSRIFTAAEQPKTGASLAAPRREARSLRRRLRRRAHRIERVRYLVEGEFGDNVIEKAENNREDIFALRVKGLDKALSAEELCRVLVYFAKHRGYKSNSKSQSKSSDDGKVLSAIDVNRKKMVENGYRTIGEMIFLDGHFSQNVEGKKVYFVRNKNGAYDKCFLRADLRDEARRILDRQVELGVVDENFKKAYIDIFDSQRSFDEGPALPSKYRIENYPVGMCVFIPTEERAPKAAYSAEYCAALQKINNLRVSEDGREYALNSAQRQIIIAQVKVKKEITFAQVKKLLSLPEDATFNLLNYSAGNGKRGGKSIADVEKSRFVSMAGSYQIRQCLNEENRADISLLNNLAVILSHCKSDEKRLERIKSDPLCAKLTEEEKQALLSVDCKAFAALSLKAMQNIIPYLEEGDKYNEACEKAGFDFRAHGLNNKLKFLRGDDITKVITEVKSPVVRRAASQTIKVINALILRYGSPCGVNIELARELAKTFEERDAIKRENDERAAEYDSKVEKLSKEFGLLKVRPRDVLKYRLYEEQGGKCAYSGKVIDAARLFSEENYAQVDHIIPYSRSFDDSYSNKVLVLTKENQDKGNRLPLEYFSGDEEKAARFKAFVAAQYSGANQRKKRKNLLREQFTQENEREWKERSLNDTKYATRLMYNLIRDYLYVEPIEGKKKQVYAVNGAITYYLRKIWGLVKNRDEGDKHHAQDAAVIACTTDGMIQRITKYNKIIEYGGVWDEDKQRYLYPDGDGVLLEEEEYDSRYGYIKEPYAGFRDEIQFRLMNNPQEYLPVKEALLTRLGYSHEDCLNIKPIFVSRMPNRKADGAIHEDTIRSARALEDGVSIIKTPLQALKLDKNGEIEGYYEKAKKDDRLLYEKLKRQLAQFGGDGKKAFADPFYKPKTDGTDGAIVKKVLLAKPFNAGFKFSGGKAVAANGGMVRTDVFIKDGKYYCVPVYIKDIYAKHLPDRAITAHVNCNEWTLIDDGFTFLFALFPNDLIYLKAKKPFKLISTNAEEKITATVSEGFFYYIGINVATGAADIITHDNGLGTTIGLKTLPLIEKYEVGVLGDIHKVTKEKRLNTQWDT

SEQ ID NO: 5145 - protein, 1104 aa, unidentified
  REGION 1..1104: note = Description of Unknown: Cas Enzyme sequence
MTNYALGLDMGTSSIGWATIALADDGEPLGLLDWSARIFPSGREDKTNEPLAAARRMAHGISRRTDRIKMRRRNLLKQMVKYGLMPADVTQQKALEIIEPLKLRNQGVTQSLDIHSFGRALFHLQQRRGFQSNRKDSDEESKGAIASASNDLQGALTAQNITLGQFLYFRQQQGKTTRATKKFAGTKVEYDYYPTRSMVQNEFEKLWDTQKKHHPNILTQEAYDAIYKAIFYQRPLKAQPRGKCLFFNNEDRLPAAMPSAQRFRILKEIQNIRIKGTAHPANGTPLTPQQKQKLFDALCLQKEMKEEKIKSLLNIASQDSINLFAKGVREKLQGDETAAEMRREAGKEKEGSTKKPSKGRYGKDWDNLSLAQQDAIVGLLTDTIEKITEKGTKRLLNDEEIVSILIEEHGLSATQAEDVLNAKLNNNLLKYGATMVSKLLPLLESGMSEYEAITSLGYNHSMKFTGELLDELPYYGAIEDLRAHIVPMPNASDLMVKQYGRVSNPTVHVALNQLRKLINQLVARYGTHPTYINLEMVRELKKGQKEINEINKNININTSERKKITEEIEAHGQEATPHFIAKMKLWSELDAQPQNRTCVYTGRNICIADVLSERTEIEHILPRSRTLDDTAANKTLTFREINAAKGNATPYEFFSATKELFGKTISYDDVWERANSLKASKKWRFSKDAMEVFESKAKKIILGGSLDGNVNTELENVAARHLVDTSYIAKFAKKYVAYSCKKGENGVMATPGTLTGLLRKAWGLNHLIAQTNEKDRSDHRHHAVDALVIALTTRSMVKRVADASKRSEVKGVSLVKEILPPWDNFALPALKARCDEIIISHKPDHGSPAQGFGTTGQLHKDTAYGLTKIAPQKKGYGVFVTRWTADSFKKVKDLEDIRDIRLRETIKSYISRSLGDCPIENVSDKEVARLVAQYMLEKGIKGIRCLEERPLEVMIPIQHQQTKEAYKYFVGGSNHCAEIYMTSTGKLAGKWQIEIISTFNANQKGFVPKWRKEFPDAHLVMRLHGNDMVAYDDGNGKSVICRVRKISADGRVFIVPHATTSPTRIDKETIGRSPSVYQQMNLRKVSVRIDGVVFDPQNPTSKEV

SEQ ID NO: 5146 - protein, 1178 aa, unidentified
  REGION 1..1178: note = Description of Unknown: Cas Enzyme sequence
MKKVLGLDIGSNSIGFSLLELEEKNGIVFNELVSNSIIFSEPTSAEDRRNARSSRRRNERKSARKKKTRKIYEKYALVPSSFISTPTQYLNNLNLETSDVYTLRENAVNGHMLNKEEFVFSTYSILTDRGYSNMFSISNEDGVINEAVSKNAKEYESKGYSLPSNVLTIKRAKQSKLYQNFPIRNKKDDYSNSLDREMHKEEFIKVVSSQKNNKELFSSPTECQNFIDEIMDESEVNTPFYQRSLKSFENMVEFCAFYDKYNPKGSYKRVPLANIKNIERTLRQQIDNYEVIVEKTGEVKELTPTEIDKIVDFWIETPSSNEIKANNIFKSAGFKNVKLNIPENSSQTVLDIKAHREILKLLQEYEIDFRGDDNALYNELLLELHYFKNNSSRVEHIKKILEKYERNLDDDFIQELALLEHMDGFASFSLEFTNEVLEVMKSENKTHHEALEQLGYFSKYLKMPKYDYLPPLEPTKKDIEWLEKNIKGFQKQHLFYQPKMSPQVKRVIAVLRKLINEIIKEYGHIDEIRIETAKEMNSKSEKEKIEKNQKKDKKKNDEAKKFLKANDIKDSKKNIERAKLYIEQGKDSCLCLYSGEPITPEDAFDEEATEVEHFIPRSTIWINSYKNKILVKKKANQNKGSQNPIAYLKSQSQWENFKGRVQNTFMAPNKKEWLTNEEIIESVMVKEHWQESYLNDTRSATRTIQKYLNHYLFPHENQYGKGEKRSIYSVSGRAISELKYIWGIDSVMPKNEDDKKDRDTNYHHTLDAFTIALCSSSATNTLHNSFIKKENKYKTKIQKEKLSANLPHSKEGENVVEYLKELVQKYETNKLYVCPYNKRKTNAKGFKDGNLKLYVTQDIKGNEILAEMEKVVIDSSLLDKKEGLKISRKSEKEVRKTILLIQDRLDPKKQKKIIEALDVYVEELLALRVSIEEKEKEIKKIKKSLKTGTQHKEYNDAINEMLKPLLATKAQLTQQLNHLKCSFTTKNGKRQIVKSLKLYSKKASKTSADAIVFPNREKRKIERLSIETFNKALKEKEPFVIKANESTMSVKLFSTVEGQKVGLDYFSAKANPHIGTKVNPKYMELVKYSTDILTLYKNDIIKVNNTKAGIIEYFICNGGGNIAATNNKVTIKNINSKVFIKKDKKGGFKELKEDNVTPNKTTQISKVKIDFFGKIEEV

SEQ ID NO: 5147 - protein, 1157 aa, unidentified
  REGION 1..1157: note = Description of Unknown: Cas Enzyme sequence
MTQKYSYSPKKYSLGLDIGTSSIGWAVLDLDKERIHDLGVRIFEKPEHPKSGDSLAKPRRDARSARRRLKRRRQRLNNLKQFFIDQNILTRDRIEEVLSDKSEFNKLDVYSLRSKALTEELSPEELFKVMYQIAKRRGFKSNRKVEEESEKEGGRVSKALKTNEKFLAENGYKTVGEALSRDENFASHKRNKRDDYTNSFSRSDFLHELEKIIEVQKSYALKNVSDTAINEMLYGLDDDKNVVNVSAIMYQRPFMTEELIKKMVGNCTFEENEKRAPRASYSFEIFRLASDLSHLVFIPRDASKRQAKRENLEIRLSSDQINKVIEAAKNQKSLTYKKVRSIAGISEDYVPKYTHGKKKDGDEFGEGNTFGGLKAYYDIKTALKNLPEDWAKIDNESTINQIAYILTTQKSDEGIKAKLNALPISDDAKNAIIKIKATNFGSFCHLSIKALQKITPHILNGMTYDKACEAAGYDFKKQSASLEQITNPVVKRAISQTLKVVRAIERKYGKPYFIKVETARDLAKDLEERKKIKKENEENQGYNEDIKSIIADGYEASPKTKGGKQLLSHLKELSVPLNKNADFNGQQIIKVKLYREQNGICPYSGKPIDFDTMLQDDNAYQIDHIVPFSRSNNDGITNKVLVLTEENQKKSNKTPFEYFGADENRWKEFATRVESIYKTRDIKTDDKATNAINYKYNGYAMKKKQNLLLQDYKNDSWNVRALNDTRYITRFIQNYLRQNVGFAGDEGRQHVIAPNGTTTAYLRKRWGLAKDRSEDVLHHAKDAAVVAAIDQKIIIQANLHAKRHEIKELLAAAKTIEEKTDKLTGEIIDEDEFNKAQRRKNAMLVLSSKHFPQPWDDFGKEVMKRTLNVDIKTLQNELRGLDNYDEEFRLSVKPIFVSREIRHKIRGEAHESKLRSNRNRNGQNLTRVPLTELTLQRLENSLAKEEFDSQKNKNGSSLYEKLLARLNECNGDAKKAFNPPFKLYKGPKQDKNGNPISPVTAVKVYDKRGVVSVGRKANAPAALAEMVRIRVYKKDDQIYMIPDYRINILENKEPMELLKPFNGVSKIDNSFNFIGYLYKGDLITIQKDDQTFVGYFVQFEGDNRITIKSHLAADSSRNSKSTVKRESLSGINYLKIHKVGVLGDVHFSKGVVWPGAS

SEQ ID NO: 5148 - protein, 1030 aa, unidentified
  REGION 1..1030: note = Description of Unknown: Cas Enzyme sequence
MKYRLGLDLGTNSLGWCLVGLDDDNCPTRFLRMGVRIFPDGRNPKDGTSLAAARRLARSMRRRRDRFLKRRARLIRLMIEHGFLPADKSQREQLKSMDPYALRRRGLDSALTPYEFGRALFHLNQRRGFKSNRRADRTADDDRGKMSAAIGKVQQQMNDDGMRTVGEWLSHRHDVRAPVRARLNGQGARSTYELYVQRSMIEQEFDALWVAQSRFNPEYFTSHARDILRDALLFQRRLRPVTPGKCPFEPTEYRAPWALPSVQRFRIFQDANHLRIRETGKTERELTKQQRDRVAEVLLQSRERSFDQLRKLLDLPDDATFNLESAKRTKLRGDTTGAQLGRKTSFGPRWFTLPLSTQDEVAQLLLDSELEETVVAGLEERYGLSAEQASQAAAAHLVEGYGGVGRTAILKILPHLEAEVATYDVAASAAGYEHTRRYVGGDLIHLPYYAEFLPHYVGTGTGDPRDRTEKRFGRIANPTVHVGLNQVRAVVNALIDKFGRPHQIVIELARELKLSRERKREIEQEQQRRQEDNDRYRVLLEQAGRPPKGGDMLRIRLWDELADSPTDRRCPYTGEMISFAKLFSAEVEIEHILPFSMTLDDSASNKTICIRRANRDKGNRSPFDAFGHSPAGYDWEQILNRASLMPFPRRRRFAPDALAQYQADGDFLARHLTDTAFLGRVAREYLTAVCPSTQVWSIPGRLTAMLRARWGLNSLLSDTDRKNRSDQRHHTIDAAVVAVTDRSLLGRISHLAARLSEEGMHRFLEGLEEPWPGYRNGLEFGLQRVVVSYKPDHGTGARLHNDTAYGLADPTKSLDGPVDVVHRVPLLSIKNDTNVDQIRDTALRDKIRQVINGKAGKDVVAALEAFSLQSNLRRIRILQPLSVIGIRRPDGTPYKAYKGDSNYCYQVFASQTKDRWFERVVSSYEAATGRVTPIEDPLIMQLCVNDTVRLKLTAIDIAVFRVVSLTPGKILLARHHEGGDLRERDRDRADYFKYLICSSSRLKSLEAAQVTVDPIGQVWPVKYPHAGARR

SEQ ID NO: 5149 - protein, 1158 aa, unidentified
  REGION 1..1158: note = Description of Unknown: Cas Enzyme sequence
MKILGLDVGTNSVGSAWVDTETQTIKMGVSVFPAGVEEGDQKRGAPKNQARRSYRSQRRSVARRARRKRQMRAWLVKNGWMPTDPDARKQWLELNPWLLRAKGLERELTLLEFGRVLLHMAQRRGAYGFDVEEEEEDTGKIKKAVDHTRAEMRRYNARTFGELMARIYEERRREVGRRKRQIRMPIRNRTTAAKEPNYEFCADRDLIEEEFTWLWKAQQSFDGELGKQLNDQRRQELHDPSGDQTWRCRGILFGQRKTYWNMGVLGRCDLEPTDLRCPRLDMHAQQFLVLETVNNITIIPPGEPRRRLSGPERQRVIQFLRKQKTATAATVRRALGIHKGPNKTHYALSLDADPKRTLNTDWFYREIIENAVGQSHWEKMPSHQKEAINRAILKLDPKVEYDRARLEAGCRDWWNLDEDQTRRFVAAWQHRPSASTRLQLSRRAILNLLPYMQDEGLTVNEARKRFAEDPNSGATPDQRERYGFTGKRPSKTVRRFQEKHSDLLPPAPATLSNPVVRKAIHEVRRHLQAYLRMFGPPDRVIIELARDARLPAKVRNEQLAANRVRERERKRIIEDFGLAALPKARITKAVKRVLLCREQKEQCAYCGNGNNTITEKTAAEGNGVELDHIIPQSRGGDNGLNNLVLCHSACNRGKTNKTPREWLSHEQFGKLEQRLRHLKNGNPVKWDNLHKDVSDIQGFTESQLTDTAYASRQVADWLREVLYAGEVGGKRCVFSTKGRYTPWLRRDWGLYSDRSPSSGGSKNRGDHREHALDALVVALSGPERLQELAHAVETAELAKTEGMPLPKREPLPPPWGDSDTFRSQVMKEFEQLVVAHRPAQRKITGSFHNDTMYGPVFDKDSRLTRYATIKKFAIELTPNHLRVPKGWDELRQRLDRAPSATARRAIRREMLALEDVKPAKSGVVRDRWFREELRQYLREQGLDPNHFTPKQIKELVLREGISLRSGVPVRRVTLLRAPSVIKIKRKRWNERTADMEYDNHPGAIRLYEPQNNHHIEIRENANGKWIVTNDGVVTTYEAAQRVRPRKSCGQSPRPAVNREDTSAGRFVMSLSIGEMVQMRHPATRTLGYYVVFKIDSTKTIHFTSHWDAGRSKQTDQLAPREDIALSAGQLQALGESPAQPPRKVWVGPLGQVNSLLTD

SEQ ID NO: 5150 - protein, 1138 aa, unidentified
  REGION 1..1138: note = Description of Unknown: Cas Enzyme sequence
MVVKQRSSEKLVFGLDIGIASVGWAVLGESRIVDLGVRCFDKAETAKEGESLNLSRRMARLMRRRLRRRAWRLTKLSRLLKREGLIPDVATFKQQPVKGFKTPNLWQLRVDALDRQLNNEEWARVIYHLCKHRGFHWVSKAEARAADSDKEGGKVKQGLAGTKRLMQEKNYRTAAEMVLAEFPEAQRNKQGEYSKALSRKLLCEEMKYLFQCQRAFANSHADEKLETAILGSGDKKSGLFWEQKPPLSGEDLLKMLGKCTFEKSEYRAPKASFTAERHVLLTRVNNLRIVENGSLRGLNDNERRIALWQPYQQAGNFTYKQLGSALVKAGLLVKDSFKFAGLSYPSEAQKAEKAKNPESATIVKLPAWQELRKTLTDAGLESEWQEMANAALDGRPELLDQIAWVLSVYKEDNEVERELGKLKLPTREKMIEALQFVRFDKFSNLSLKALRKIVPLMGEGLRYDEACMAAGYHHSLPDLENGSAKTTYLPPFYTGRDKDGRLKFNEEMDIPRNPVVLRALNQARKVVNALIRKHGSPYAVHIELARDLSKPFDERKKIERAQTEYRSRNENDRATFASHFNIMNSPKGRDFEKWQLYREQQGKCVYSLDPIDLNRLLEPGYVEVDHALPYSRSFDDSKNNRVLVLTAENRNKGNRTPYEYLGGKDESDNWHRFEMFVNTNKVYRQAKRSRLLKKDFGEKETKDFKERNLNDTRYICRFFKNYVEQYLQLHEDSDAKRCVVVSGQLTSFLRFRWGIVKVRSDSDRHHALDAAVVAACSHGLVKRLSDYSRRKEMNQVRSGIEHVDKKTGEIINRFPAPWEHFRDELLSRLNCDDSNELRASVGRLGTYSTEALNDLRPLFVSRAPQRRNSGAAHKETIYGQPEALKVKGCVSQKVAVTSLKLADVDKLIDPHRNVKLYAALREWISKRDEREKRAKAIEAGAGRGRDKRELTAGEKAEIEKLRALPRKPDKHGNPTGPVVRTVKKVERLSGIPLRGGVAKNDTMLRVDVFRHRTNHKFHLVPVYVHHTVTGLPNRAIIAFKDEDEWTEMDEKFEFLFSLYSNDLFCITLKKKVYLGYYAGCNRSTGAVNLWAHDRNTNVGKHGMIESIGVKVAANVEKFNVDVLGNIYPAAPEKRCELA

SEQ ID NO: 5151 - protein, 1094 aa, unidentified
  REGION 1..1094: note = Description of Unknown: Cas Enzyme sequence
MKYGIGLDCGISSVGFCVTELDNNDEPRRIVKLGSRIFDKAEHPKDGSSLALPRREARGARRRVRRHQHRLDRIKYLLVREGIITAEELNHLFDGRLSDIYELRTNALDMSVSNIEFSRILINLAQRRGFKSNRKVDVEDKNSDAGKLTKAVNDNRSRMIENGYRTVGEMLFKDEAYSANKRNKGDNYLNTVSRDMIEEEIHKLFSAQRGFNNSFADERIEELYTDIVLSQRSFDEGPGEGNKNSPSPYAGNQIEKMIGRCTFYPDEERSAKATYSYQLFSLLQSINSITLVSDDGSKRRLCDEERLELRKLCFKTKGVKYSSIRKALGIPENERFNTLSYGDKELKTVESKAKFEYLNPYFAVKKALGSAVESLDDDELDAIGRIFTIYKNDERIKEELLKSGIDNVIAEPLMSLAAFSGFGHISVKACRMLIPFLEKGLLYHEACDAAGIDFRAHCTASKSMLLPANSEELNDIKNPVVRRAVSQTIKVINCIIGEQGVSPTCINIELARELSKSFSERNAIDKKNKENRQANDKIKAQLVEEFGIPYPQGLDIVKLKLWYEQDGICPYSLKKIELNRLFEVGYTDVDHIIPYSISFDDSYNNKVLCLSSENRQKGNRIPMQYIPEARKSDYKVWVNSNIKNYRKRQNLLKEKLTKEETEGFKERNLNDTKYLSRFLYNFIKDNLEFAPFEKDRKNHVVAVNGAVTAYMRKRWGINKIREDGDLHHAVDAAVISCVTQSMIKRISKYSNYKELEYLNAQAEGSYVFSTDTGEVIDKFPYPYPEFRKELEIRTETEESKRLTQLLLGLSNYDYESANSAKPCFVSRMANHKVTGPAHQETIRSGRHEGNFISKVPLSKLKLDKNGEIENYCEEAKRSDRLLYEALKKRLSEFDGNGETAFPVGYDFHKPKSDGTPGPVVKKVKTEEKTTLSVPARNEGKGIASNGSMVRIDVFYVEGEGYYFVPIYVADTVKPVLPNKACVAHKNHSEWKDMDDNNFVFSLYPNDLIKITSKKDIKLKVNLKDSTLPKEKYCNNEFFYYQSADISGGTIEIILNDNSYTNRPGIKTLKRIEKYQVDPIGNITKVNREKRMYFN

SEQ ID NO: 5152 - protein, 1119 aa, unidentified
  REGION 1..1119: note = Description of Unknown: Cas Enzyme sequence
MKQILSLDLGITSVGYSVIQEHETDKYSLIDYGVSMFDKPTDKDGNSKKLLHSQALSAKNLHKLRKKRKQNLASLFDQYHLANKQKLLEQERDNLYKNKWELRAKKVFEEKLSVDEIFTILYHIAKHRGYKSLDSGDLLEELCDSLGIETETAKPKKDDEKGQIKQALKSVEALYEEYPQKTVAQIIYELESKKENPIFRNHDNYNYMIRREYINDEIRKIIKAQIAFGAFRAIDDAFINDVIAVIDDQKESTNDLSLFGKCEYYPEYYVAHQYSLLSDIFKMYQAVANITFNKEKIKITKEQIALIAEDFLGKIKKGKSVKDIKYKDIRKVLKLDDDIKIFNKDDSYLNKGKKQENTITKFHFVDTLSKIDKSFVEDIFASDESYRLMREIFDVLHYQKSPKLIYEQLKNKISDEQVIIDLIRNKKGSSLNISSFAMLQLLPYLEEGLTLDEVKQKIGLQRQEDYAQYKKGIKYLHITSYEKDDELEINNHPIKYAVSAALRVVKHLHAEYGTFDEIKVESTRELSLGEKARKEIEKANRAFEKEIEQIVENAEYQKIAKSYGKNLRKYARKILMWEEQERLDIYSGKSIGITDIFSNSVDLDHIVPQSLGGLSVKHNFVLVHRDENLQKSNQLPMNYIKDTQAYTNRVEHLLREHKINWKKAKNLLATNLDEVFKDRLESKSLRATSYIEALTAQMLKRYYPFKDVQKLKDGSAVRHLQGRATSNIRKVLGVMTKSRETNIHHAIDAILIGVTSHSWLQKLSNTFRENFGCIDDEARKNIKKALPYMDGMEIKDLVKEIEEQYNSFGEDSIFYRDIWGKVKTVNFWVSKKPMSSKIHKDTIYAKKGDGIYTVRENIIAKFIGLKVIPMTSPEEFMKKFHKEILQKMYLFKTNPQDVICKLVEQRGEEIKELLWSFEFLDVKNKEQMSEAKTKLELLIHKDLLDNNGNVIRKVKFYQTNLTGFDVRGGLATKEKTFIGFRAYKEDSKLEYERIDVANVEKIQKTNDGSFKAYKNDIVFFIYNDGSFKGGRVVSYIKKSSGSKLCAFLNPRFPTASEYQPSSFCKIEKGKHSGAKQQSIGSAKGIIKLNLDTLGNIKSYQVLGNVESKILDEIKSIVSH

SEQ ID NO: 5153 - protein, 1206 aa, unidentified
  REGION 1..1206: note = Description of Unknown: Cas Enzyme sequence
MKRIVGLDLGSNSVGWSIIEEKNEQFQQIIDAGSRIIPMGDEKTNFEQGGTASKNADRRQKRGARRLNHRYKLRRKNLLTALRKMGVSTDQLGTIPEKGSGQLTDEEFYEKRAKAVTDKLDSLNELGLILFKLNQRRGYQSNRKERSDENNSKTEVYNVRTVIQDVKAIDEKKRGKQVYEVKLEDEESIGQTTDDYFTALIGTEKEVQVKKWANKNGEESCEMTIPDPEAWQQRLSSMDREFEQSGLHPGQYFHKKIQEAKKEGKDFRVRQNLVFRKRYIDEFNAIWDEQEKYYPILQDEAIRNGIVNAVLPKNYPERKKWLNKPLKEFVRDFIIFYQRPLKVKKGEVDQCQFEPWKNVAPKSHPVYQEYKIWGIVNNLKVEDDTGNTHDLSDEQRVEMYQELNRKKSIKRDSAERILKLSKGWSLRAPDELSGNTTLLAIKKAFTNANEIIDHYLNFEKDLEKLWHILYSLNEEQEVKNAIQNNFQINSFELLKELNKVVFEPKWGNVSTRAMKRMLPLMRVGEYYSPEELYQPVKTNIEKILNGEYDELIKQSTYEHFLNKRKFGNVEDFNGLKYWEAATLVYGDFRTQIDEKYFNPEDIEILKPNSLRNPVVEQVVNETLNVIADIWRKYGKPDEIRIEFARELRQNAEERKKTSQRIRQRQNERDKARETIIKDPDFGISRPSRKDIDRYLLWEEANFYCIYSAKSIPKAALFNGETDIDHIIPRQRFFDDSFANKVICYRSANADKGNLTAQEFMKDNDRERFEKDVKDRFKGKKKYYLLTSEIPESFLQRQMNETRYITRKVREELQKIEKCEVNITSGTVTDYLKNIWGLNEVFKQLVRPRFERMESIVYDGKKPFVNERKENGKTILDLEGYDKRIDHRHHALDAIVTAATKQGMIQTLNNLNQKYKNDEWKERSPRQFKLPHPQFRDMVQDMLEAIIVSHKAKNKLVKHAVNYYSKRDDQTGKIETFKQNDKPYYALRAKLHDEQPYGVSKVFKKIKVKDAFEQVENLKEDWQKEKVEQRLAEFDGDFAKAKKSLNQNPLTDNAGEKLEKVTVFEEKFTKRYPLKDFVYKSPKALEDIADVGLKKQIKSHVEQFGGLTKEAMKEAFTDKNIELFNQSRNKPVENVKLLINGDLTRFETNEDPNDKKFIDGKNYCFIVYENGNGERSFDVISRYEALQMILGGEDVADNQTAHNHFTL

SEQ ID NO: 5154 - protein, 1355 aa, unidentified
  REGION 1..1355: note = Description of Unknown: Cas Enzyme sequence
MEGITMDNKYVLGLDVGITSIGWSIIDEVKGKLLDMGVHMFEQATPAQEVRLNRSARRTLRRRNWRKKQLKNAFVEFGLISKEEMNQRDYLSYTAHSDTYTRPEEDTVYHLRLKALKEQVSLRELLLCLYNICGTRGHFLMENIDFASSEPITFEFFVEQFYEFTHAYVNFTEDTKEFEQTILKPIFEKGKVKSNELKSLLKDEYTVEAEDNDALLEILKLICGFKCDLKKISESVVLVQEDKTKDSVKLDELLKLDNLNEFLNDAVELHDVIAVSQILKDHNYICEVAVEKLNEVLKVQKLEHSDPDKYKEEKNNIQKKMSKAIGERLRVVKNMENKYPNGLYVKEASDILHKQQEFYPNLITDDFIEACISTIKARIPYYIGPLSSQAKNSWINRKDGTFKYGYEYCKDALVNEEESIQNWKLNMISHCTYLPEEYALPKGSFIAETFSLLNELNILTAVDKDENVYYLTREDKIKVFDELFLKRSDYVSHKEVTELLGLKSFGPKDSHKTGKFKNRYTLYQNIVSVFPQFKLHSIIDLFNDNEKDKVNKIEDIILNLNLFDEEQSKINYFTKKLNLDENDAKKLARCKSNGFYAFSKKFLTDTVMNVNRESLLEEMFRDNSENQKNEQMTLITEATDLDGNRINFESNKYITLLKDTKKLSIDLLIQDGKPFIPIARPVIRALNECFKLYEEVVNTYGVPDRVVIETARDLKDSAHDGEEPAKHFDQMKNLYDYLTKQIKEQKDNAKISKQYLEDWDVIQPYLEKNKRKVELYIRQNGRDMVTGDEIDIQKLEDYEMDHILPRGFGDNSMDNLMLIKKEINGKKADRLPLEYIEAESVTNKTGKRIISSDFKRRCYELNDMKLISDKKLKRLLLTSTDEAMGFINRNLVDTRYIIRELMAILRAYNAVNNYDTHIVSLRSSFTTVYRNAFNMKKNRDIGDQHHAHDASIVAITDMVLSTYYPNYDERGNNKYYQEFLKRMKETQDPDSDKSENQKLYNFIRYAYNKRFGNFPNDNDSLVSQVRATVPLYSVKAEKNYKGAFFDATIYPQKDKKKNVAREKGVLGLLGVNNDKRIYSSINCVAVDFYKYTDKKGKRVHVGIHIPKVIVNNNGEINKEQYIKLIRDYYKAPELLDENGNLKECYFRMRVFKNDLIYDTNNYTIQKFNIGSVVNKKLEMKHLYVFSYDEIYKQVYFYKKELAGQFDFKMPKINSDGKKKFSDYKITEIISYCVDNLMDIRDMNRYKGTVEKILKDKTNYQEFLETMAYLDLIVNRNCTPPTIVDRYIPVAGSIDDKTDAENKAQYIKIKSSILGIRYTYNENGKLLISGPRKAPGKYSKIKKEKFSWKICSDVLQ

SEQ ID NO: 5155 - protein, 1094 aa, unidentified
  REGION 1..1094: note = Description of Unknown: Cas Enzyme sequence
MRYRVGLDVGTASLGVAAVSLDENNNPLDLIWKHVRIFDEPLEKSQAGLKSKKAGRRAARMQRRQIDRRLGRTKAIAALAHLFSIQVEPSDDSGRTLLEVRAKAAREKISLSDLIRVFIRLGKRRGYGGSFKPKKEGVVLGEVEGGSNDLNKAMQVVAASCNVAAITLGEYLYDRWKKGLPTKLKVKEKRDKEDDLQNLYALRHQVEAEFEQIWQTQAAFYPVLNSQQQDKPIKQIFYETIFYQRPLKAVGGMVGQCRLEPTLARAPRAQLAFQHFRIEKTLADLRWGAGKRSEALSAVQKSVIRKLCDEKEVVKFEAIYKALDTAGFPKPETKGLNLDRLSRDEIPGNRTNHVFRKLGLGDAWAVLDDRTQIQVINFLADLGSPEQLDDPLWHTRFAKADGTPRQLPEAVVTFINLVKGNEKFDRLNKMGFEGGRASYSIKALKKLIDWLGTPWWPDGWQGEMRPDEEAAIRVCYPESFNKPVLLKGKLDFAPSTGNAVVDGSLRQIRYVINRMIADLGATPEQIVVEMAREMSVGVSKRNERESENNKNRTARLKAEAAIREHGATVTSSRVRRYLLWKEQGEGHCPYCTKKITLSDALSGAETEYEHILPKSLTQVGLKRSEIVLAHRSCNQDKGNLTPYQAWGHDTDRWQVIQARAKYFADNRQFRKAKLLLLEDFETEVLTDESIDGFADRQFHQTSWIAKESAQWLQGICKTPVSVSRGELTAMLRRKWKLETVIPQVRAEEGLPILDEEMQVISVDDFERFRPIWEGHRADDKANHTDRKLNKRIDHRHHLIDAITIALTSRSLFQKMARQYKIDSEREVRGQKTRLEVVEPPLKRVRDLALAAIRECPLSIKPDRYPDGAIFQETAYGVAIRDGEDKARLTLRIKVVDLIDSKKGTVEQARKAIQSIVSTTIRNIVAKSFESSVAAGKSAPVALAVPVYQTLYGQRVEIKKVKCFTNNYADDVAIINHTDKNGREHLKRLLNAGYAYLETEIFDGRIGKQALVNTHQAMRLKRKAQSANMLRLHKGDIVLDSKDGKKYRVGYFTLEGNLFLIPIVDPRAFDSIKESGSGKKKVSFSQVMRLKLVDE

SEQ ID NO: 5156 - protein, 1079 aa, unidentified
  REGION 1..1079: note = Description of Unknown: Cas Enzyme sequence
MHRFAFDLGTNSIGWAVYRLAADMLPASLERTGVRIFPNGRDPQSKESNAAGRRTPRGARRRQDRSLGRRKRLLDDLIKFGLLPSDAESRKEVFAANPHEARAKAARDQVELYELGRALWHISKHRGFKSNRRAENDGDEKSKIAIASAALLKRLRSEGHPTYGDFLHARLARGEGTRIRPTGEGAKLSYAFYPTRDLLEGEFDHIWVTQAAFHPSLTEDMRRRLHDTIFFQRPLRPVRPGKCTFFPDEDRLPRWHPAAQEFLILSQLNHLRIVDDHGEQPLDITARDLVAHTLMAGTKLTWSGLKKTLKLPSLAEFNLEKGGVKELARNDVAARLLGDTKKPGPLATLWPTLDSPTREEILWQISEVADPDELICWLMERLGLSREVAERIERIPLPDGHLRFCKMATQAIVEELRLDVIPYDEAVRRAPLLGGAGLDHSDFQAEEGVDTLPPYNRLPVLQRMIGNGSGDPNDPDLLRYGRITNPTVHIALGQFRRVMNALIAEYGKPAQVVIEATRDMAKSAEELKKIENTIRDNERRNDRWRAELQDAGLLAEGARIGDRFLRMRLWEEMGRGPADRLCPYTGRPIALHQVHSDEIEIDHILPFEETFDDSPANKTLCFREANRRKGKLSPAEAAVRQPDFFDLPAIIARTKHLPANKSWRFLPGAIQKWQETRGFEDRQLNATGYFAHVARAYAEALFPKTDDEGKRRSHVWVLPGRMTAMLRHRWGLNLGDHNRKSRDDHRHHAIDAAVAGVIDRRMVQVLQTHARNMGVERLDRVLPAPPEPFDGFRDAVLSAVEKVNVSHRAQHGSIDPRDPSQTSGRLHKDFAYGEVRDVPENQTDLTIGNVVRRKPVIGLEKDDLDKVRDVKLRESLRAATEGVKDDKAKLTAALFEWSQKTGHRTLRIIKPASTARPVYGRPGKPRAGEPYKWFIPDENVWIDILQSPNGKWFGFGIDVWAANSGTGQTWQELHPDAKFIMRLHKNDTIQLFDWDDNEKCIVPGSNRIKVVNSIPNSPTNKNVKLVGLNDAGKFAGRHNDKDDPFRWDWPPYDRLRLRRARRVRIDELGRVHTIPHGTV

SEQ ID NO: 5157 - protein, 1460 aa, unidentified
  REGION 1..1460: note = Description of Unknown: Cas Enzyme sequence
MKYIKYILGLDIGSNSIGWVLIQLFIEEKQGKIIATGSRIIPMDQGLLGDFEKGNAVSQTAERTFYRSARKLRARHLLRRERLHRVLHILGFLPSHYDKQIDFSKRYGKFVDNTEPKIAYNEGKFLFMDSFQEMLADFKSHQPDLFYTKKNGEESKIPYDWTIYYLRKKALSQKISKEELAWIILNFNQKRGYYQLRGEEEAETPNKEVAYYSLMVTDVTAEAPNKKGEIWYSIQLENGWVYRRTSKIPLDDWKGKVRDFIVTTELEEDGSVKRDKDGKEKRSFRAPSEDDWNLLKKKTEQDINTSRKTVGCYIYDHILQNPNEKIKGKLVRTIERKYYKEELKAILEKQIALQPEIFTDQLFTDCIRELYSKNEAQQRNLAARDFVHLLVEDIIFYQRPLRSQKSTLANCSLESRSYIDKDSHTRKEAPLKVCPKSNPYYQEFRVLQWLQNLKIYEIDTDQEVTHEFIKTLEDKQQLFDFLMNQKEIDCEELLKYFLNQTYPNAKEKALKSELKKWKDTYRWNYVYDIGEKSSKKYPMNETRYELKRHLEKVANLPDDSLSSEVEYLLWHLIYSVTDKVAYEKGLKKFAQKHHLDKDSFVESFKKFKPYPSEYGSFSEKAIRKLLPLMRFGSYWDFNHIDKNTQKRIEDLITGVENEEICTILREKAKKYQLEKETDFQDLPLWLAQYIVYNRHAEASSLEKWTSVNDLETYLNEFKQHSLRNPIVEQVVTETLRVVRDIWQQYGQGQADFFDEIHIELGRELKKTAKEREELSKQNQKNEDTNLRIKALLAELGEDNTIENVRPYSLMQQELLKIYEEGIFSSSMEIEDDIEKIHKKATPSKTELQRYKLWLEQKYKSPYTGQIISLKRLFTEDYEIEHIIPQSRYYDDSLSNKVICESAVNKLKGNQLGLEFIKNHYGEKVHAAGKEVSILTEEQYKEFVKNHYANNSGKMKKLLLEDIPEKMVARQMNDTRYISKYISEILSKIVRSSERDEGVNSKNVILCTGKITSALKQDWGVNDVWNDLILPRFERMNALTQSTLFTTYNEKFQKYLPTVPMEYSNGFQKKRIDHRHHAMDAIIIACATREHINYINNQHALEKGKSKQEKQKSRIDLRTILCEKKYNDNAEENYSWIFKKPWAHFTQEVRTALEGIVVSFKQNLRVINKATNYYECWVEENGRYIKKMVKQEGTNWAIRKPLHKETVSGKITLEREKVSKGKILTATRKAIDSTFTEKVIEGITDTGIQKILLNYLKFKKSPEIAFSPEGLEELNKNITLYNDGKPHKPIRKVRIFEQGSKFPLGEVGNKATKYVEAAKGTNLYFGIYQGKDKRSFATIPLNEVIERQKQGRPSVPEYNEKGDPLLFSLSPNDLVYVPVEGEIIEDIDFQNLSNEQKERIYKTVSFTGNQCFFVKQTVSASIVNKMEYSPLNKMERSITGIMVKEVCIKLKVDRLGNISKA

SEQ ID NO: 5158 - protein, 1582 aa, unidentified
  REGION 1..1582: note = Description of Unknown: Cas Enzyme sequence
MRDRFACFHNGIILIVICFRIMEQKYTKKSYKKTLLIKILFFNFMPVLKHLKYSIMKKILGLDLGTNSIGWALIQQDFDTKKGEILGMGSRIIPMTQDVLDTFSGGKPLETQTAARTSYRGIRRIRERHLLRRERLHRVLNILGFLPDHYANQIDFEKRLGQFLDEKEPKLVYKNKEFIFKESFEEMLNDFKQSQPSLFYKKSNGKETKIPYDWTIYYLRKKALTQKIEKEELAWIILNFNQKRGYYQLRGEEEEENLNKLVEFHSLKIVDVIAEEKPNNKGDLWYSLYLENGWIYRRSSKIPLYDWKDKVRDFIVTTDLNDDGTIKKDKEGNERRSFRAPSEDDWTLLKKKTEQEIEKSNKTVGTYIYENIVQNPSQKIRGKLVRTIERKFYKEELIAILKKQIELQPELFTDDLYNDCVRELYRNNEAQQLVLSKRDFVHLFVDDIIFYQRPLRSQKSSIGNCSLEYRVYKDKDGNQVKEYLKAIPKSHPFYQEFRVWQWLSNLKIYRKEDDSDVTNHFIKNDEDKVALFEFLMEQKEVGHKDILKHLLTPVLKEQYPSAKTAAFNKEVDKEIAKYRWNYVFDDSKEKEEDKSKKYPCNTTGYEIRRRLVKVSNVPINFLTPQIEQHLWHIIYSVTDKKEYEAALKSFANKYHLEENSFVEEFRHFPPFKSEYGAYSEKAIKKLLPLMRLGKYWCWDAIDSKTQGRIDKIISGEYDETIKNRVREKAINLTDNTHFQGLPIWLASYIVYDRHSEADIAGKWNSVTDLEQYLEDFKQHSLRNPIVEQIVTETLRVVRDIWKYYGQGAKDFFNEIHVELGRDMKNNADDRKWLTKQVTNNEATNLRIKALLTELKENSDGKLAVENVRPYSLMQQDALRIYEDGVINSKIELPEDIIRISKSAQPSKTELQRYKLWLEQKYRSPYTGQMIPLGRLFTEDYQIEHIIPKSRYFDDSFNNKVICESAVNQLKDNQLGLEFIKNHQGEKVECGMGKVVEILKEEAYQTFVKEHYSKNKTKRQNLLLDEIPEGMISRQMNDTRYISKFISGLLSNLVRAEKDDDGINSKNLIPGNGNITTVLKKDWGMDAVWNDLILPRFERMNQLTNTTAFTYWNEQYQKYLPVDYSPIDSKRIDKKRIDHRHHAMDALVIACMTRDHVNLLNNQSAKSETTRYDLQNKLRNKSKETWIDKKTNKQVERDVFKEFKKPWDNFTMDAKIALENIIVSFKQNLRVINKATNYYEKWVEKEGKKVKAKVKQEGTNWAIRKPLHTPMPYGKKSYFFDLLKIAESVGKREYIIDDEIKTKVEKVLVECNGKITEAQKKLKQFPLIDNNGNPIIQTTFRINTEKFRRRQPISLLSNRGQGGIKTIEDAKKIIYKIVDFKIQKDLLKHIEECDDDLDKAFSPEGIENFNSKRKIPIYKIPIGESGSGRFCVGTKISTKHKWVEADKGTNLYFAIYESNDGKRSYDSIPLNIVIERLKQGLPPVDFRSENDFYLTPNDLIYVPNEDEKINIKNLKPSEFGEEQKKNIYKVVSFTGNRLSCIPYSVASPIVNKVEFTQLNKIEFTKEKESLIKLKIDRLGNISL

SEQ ID NO: 5159 - protein, 1218 aa, unidentified
  REGION 1..1218: note = Description of Unknown: Cas Enzyme sequence
MEIDTKQRILGLDTGTNSLGWAVVDRLPEGYKLVDKGVHIFQEGVTIENGNQEKSRAAERTEHRSLRKQYWRRKVRKIHLLAVLSNAGLCPPLTSEELHTWRVDGVYPLANEPFMRWQRTDENKGVNPYAARCQCIERELDMENKNDRYLLGRALYHIAQRRGFLSNRKDQTNNKETGVVKEGIKELTQKINDAGCEYLCQYFYQLYQRGERIRSCYTDRKEHYEKEFAAICEKQHLNGALVEKLYKIIFVPRPPKKQNNAIAKCPFEPSKHCAPISHPLYEEFRMWSFIRNIKVQTPDDIDLRALSADEISKIQRLWYRYKKGQTNYNFHFEEIAKALAGKGKYCYYKSAEDKPFRFNYYLDSNVAGSPVSAQLKDIFGENILQDREALDKIWNALDFFTDDVKLSEWGIKHYNLTDEQADKLAQMRLPEGYASLSLKAIENIVPLMRDHALMYSSATLIAKLRDLLKDYDFDEEVDAYLINDIEDYLTIPTDKNGKPLMSREERKQILDRKWQTHYNLSDKDLKKLYHPSMIEAYPKVENKTDGVYQLKSPRISALKNPMVMRSLFRIKAVVNQLLKEGTIDENTIVHIEFARSLNDANRRAALLRYQTILRDERESAREEIKKYVPNPTDDDILKYLLWKDQGGVSVYTGTPIPPDLLFKGDQYNFEHTVPRSMGGEWTRENLTICEQHFNTDIKGSQLPSQLSEQYKQIFEAQIQAWKDKYEDLDKQIRKLQKQSSGATTKEAKDGIIKKIRLLQLQSKFWHDKYEAFTIEEDKVKGFTRRQGTDISVINRYGRSFLQTLFERVDVVKGTMTAAFREAWDIQEPYEKKDRTNHVHHCIDAITIACMGKREYDKLSEYCHEEEANRHRLHGVRLPKPWPTFTEDIKDIEKEILVSHYTPNPMGKQTKKKLRDSRGHIIRDKDRQPLYAAGDTARVVLHNDKIYGKILNSHNIDPKHPSGKECTVKRIPLAEVKVDEVVDPIVKQVIANAIAKYGSIKAAIEAEQDNNDGSIWLNKEKNVRLKKVRCFQDFASGAEPIRALRDTSTKEHKRFHYSRPDGNYVAAIYEGTDKKGNRKRTSVIVTNLDAAKAFNKHQPIVPETKDGYPLLCTIKKGDLVLLYENSPEELHNATQAELSKRLYKIAKMSDSNGLQITIRYHQEAREATKLKELFGNPKTGLYDCSQEIYPQRRLSYNQFNALVQGQHFELTETGKITFI

SEQ ID NO: 5160 - protein, 1439 aa, unidentified
  REGION 1..1439: note = Description of Unknown: Cas Enzyme sequence
MKKLGLDLGSSSIGWFLREDEEILNYGSIIFDSGMVKGTSGYSSPTKDRREYRLKRNPIRARKYRKKLILQTLVDNGMVPLESYELKKWTNYRKGKYKEFPSNSNFKDWLACNFRFDGGTVYKNPYDLRVKAINEKLTKLELGRALYHLAQRRGFKDIGETNKETQKQIDRRKESGFQDALSNHRTIAEALQKEYLEKGMRARDNYPYRDEYEDELLQILSKQGFSLKKNDKGKFKNKFVSDTRKAIIWQQPLKTQKGNIGKCTLEPKKRRCSVSHPLFETNRAWQFINTIKYKKNADDSFEFIPQKYRDHLFHSVFLNQSGNFKFEKLRKALDKLFQKKMIYNYRLDEKKGTYETTIAGMPFCKGVIKILGDKALTDILSIEEYTQSSMPKNHENYSLLDIWHNITEFDDENLSEFGKQKLNLDFIERKRKGEIESTSPLLILKETLPQGYGNLSQFVLRKIIPLLKKGYIYNDAVLLANLKEALGVNYERQKDKVITVLNEATKFYKEHKTTIIITNKLIENYKGEIEANLNGQENTLFAQGDFQYLLKDSDKDDIIKACINHFGENRWKNVPNNESIINEVGKEYQEFFFDKNRAYRKLETLQDIFEDLLNKEEIIFKKPLYHHSNRDNIYGNPIKYRNTDIEILPLAKTNSIKNPMFNKAMSILRKLVNQLIVDGVVDNDTEIIVEVARELNDNNKRIAIERYQKQREAKRNKIRVFLEEYKAKEKSSLNVEENIHQFELWEEQIFEETEDETGSAYKNVDRKEILKENNAIKRYELWMEQKGQCMYTGKMISISQLFSSTTNIEHTIPRKLLPDNTLANQTIAFADYNTNIKGTELPVHLPNYSKNVAGVGTEIEPRLQQWKTIRDGFKKAFETRQKPNGAEDENTKNIRIQDKHFYRMHYDYWNDKLDRFTRTDVNDKWARRQLTDTQNISKYAREFLKTYFFKVAVQKGSTTAEFRKMLGLEDKDNQKDRNAHTHHTTDAAVLTYIPTNASRRDKLIKNSFALKDETDKQLRYTPYPNFNAQSIKHNIENNTLIYNFTKDNITTQTFKKVRIAGEIQYKRDTNGNKILSKPLISRGDTIRASLFKDSFLAKIRDVERFDDGQPKRNEDNTDWVYKKGEEEFIFVKNEPISKINKAKIKDIVDPELAKLVESQLGKDKILDWQGKVIRHVRIKKKAGRQVKSRVDYKSEKDYKNSYYAESGSIPYGIMLFNPKSDQRILLQAHAYQIAEVFREKRKFDIDLFVDKFYPDYSSFKKLLLRVGQNLIVLNNDEEFEKRLEKEFQKNRLYKIVKIDNGSLWLKYHLTAIADNDLDLVVKQKKDELLWNYEKELGLGKVREDDSIKDLKTRNEVYERKKFSFSSYNDFRIKRIVDNFGKQKASKIKSELSKYKKVASFIEVEGETPLLKLNTSNSWNFLYENTDFDISILGKIKFKE

SEQ ID NO: 5161 - protein, 1438 aa, unidentified
  REGION 1..1438: note = Description of Unknown: Cas Enzyme sequence
MNKIFALDLGTNSIGWALRNPNLLENQIEKFGVLTFNKGVGIGKTGEYSYAAERTKKRSTRRLYQARKYRLWATLEHLINEGYCPLSLNGLNKWRHYDKAEARKNNNGGRVYPVDDLLFDAWIKLDFDGDGKPDYKSPYQLRKELAEEKLDLIKQENRFKLGRALYHIAQRRGFKSSRKGADDVKEKETSDDNDIVDLQYSEKKKNKNIIELFEKYPDAKTIGSLFASLENDGIRIRESIAQYAIRENFKDEIKYIFQIQGLSLQNVLYTKLVEKGKNKNDGSIFYKRPLRSQKGLIGKCTLEPSKYRAPISHPSFETFRAWSFLNNIKFKPSEDKDAEWQPLNLELKNKIYSKLFFRKKAYFPFSDITDFLQKEGKKWHFNYKPKTTVTGCPITARLRDIFGEGYLTIKIPKTPSAKSKKNYYDIEDIWHVLFSYEDQEYVSEFAEIKLSLSTEQVKQFVTMWNATPVGYAMLSLNAINKINIFLQKGLIYTEAVLLANVPDIIGKELWAKNEQLFINEISNVIDSNRHQKIILTTVNNLVSKHKSLEDHEKFGYKDGNYKLTESDFNSIEETIREQFGANKWSRKSKTEQEQVTNTVKDCYQAYFKTTGLERKDINNERHFVVKSHNTIYYKSDSGYYRLPKLIDTLAEFLQLNFNVSDDLVKKIYHPSEINIYPSAKADKDGVIKLGSPKTGSFKNPMAMRALHELRKLINYMIETNQIDSDTRIVVEVARELNDSNKRWAIEAWQKQREAENQEFAEAISLLLEEKAGISAEPSNESDIDKVRLFYEQNTEQTLPAIAGEDEKGKKRKTSDEAVRWNGHGKKLIEKYRLWKEQGYLCFYTGKFIKLTDLFDENVIDFEHTLPRSKSFDNSLANLTVCYHDYNRTIKKNQIPTQLNNYNQDFDFGGSIGMCKAILPRLDHWKEKVERIKQQIDFWSTKSKKAADKGWKDDAIRQRHLWLMELDYWRNKVDRFTMEEITSGFKNSQKVDTQLISKYAFHYLKTYFEKVDVQKGSITAEFRKIYGLQIPDIKKDRSKHSHHAKDAAVLTLIPVAAKRDELLKTYYEHQERRQSFSAQPYKGFKREFVWNIDDSILINNIATDQTLTPAKRIVRKRGKIELIEGTSSQKVATGNTVRGQLHDETFFGAIKPAKRGEKGNILRDEAGKIIQEDKVRYVVRVPFQYKAKADSPGFKTLEEIEKQIVDEGLKEQIRKQVEKAGGLKEAFEQGIYMLNKNGEPVNKIRHIRIFKSTSNPLEVKRQTYLSKHTYKQNYYANNATNSYFAIYKSGDIKECDFRNLFESAKLISTGTIKNKKDLFEKQITKKKGKTNMELPLKYILSTGVKVLFLRKNDEELRNLPAVELTKRLYVFTNFESDGRLNFKFHLEARDNKEIKDSSEIDFENTSPALRFSYSKYDFLVEGYDFIIEMDGTIHWLIKY

SEQ ID NO: 5162 - protein, 1458 aa, unidentified
  REGION 1..1458: note = Description of Unknown: Cas Enzyme sequence
MTSKTIIGLDLGTNSIGWALVQQNFELQQGKIVAMGSRIIPMSQDVLGEFDKGNSVSQTADRTKFRSTRRLRERYLLRRQRLHRVLNILGFLPKHFSDQIDFEKRLGQFKGESEPKLAYDNKQFIFQSSFLEMLEEFKIHQPALVENGKKIPYDWTIYYLRKKALTQKITKEELAWILLNFNQKRGYYQLRGEEEEENPNKRIEFYSLKIVDVKADEQQKGKDDIWYSLVLENGWIYRRSSKIPLFDWKDKIRDFIVTTDLTDEGRIKTDKEGTEKRSFRAPSPDDWTLLKKKTEQDVDRSNKTVGAYIYDTLLQNPNQKIKGKLVRTIERKYYKEELQEILAKQIQENLELQNESLLADCIRELYRNNENHQNTLKGQSFLQLFINDIIFYQRPLRSQKSSIGNCSLENRSYKDANGVQQTVPLKAIPKSNPVYQEFRIWKWMSDLSIYRRDDDVNVTHQFFKSHKDYEKLFEELSGKKEIKQEVLLKYLAEQTGFKGKAANAEAATYRWNFVEDKTYPLNETRATIASRLAKVKDLQENFLTQEREHHLWHIIYSVTDKIEYEKALKSFARKNKIDEVSFVESFRKIPPFKPEYASYSEKAVNKLLPLMRLGRYWIWESIDAESRTRIEKIINGEFDENISTRVREKATTLTEHDHFQALPDWLAKYMVYGRHSEAADLSKWNSVDDLGRYLNNFRQHSLRNPIVEQVVTETLRVVKDIWKRYGNGAKDFFDEIHVELGREMKNTAEDRARITNQVTQNENTNLRLKALLAEMLQHGDVENVRPYSPTQLEILKIYEDGVLNSDIEVPDDILKISKTAQPTSKELLKYKLWLEQKYRSPYTGEMIPLNKLFTPAYEIEHIIPQSRYFDDSFGNKVICEAAVNKLKDNQLGFEFIKNHHGEKVETGFGNTVTILQEDAYLDFVKTQYSRNRSKKAKLLIEEIPEKMIHRQLNDTRYISKFISSVLSNIVRAEKDDDGLNSKNIIPGNGKITSQLKQDWGLNDVWNDLILPRFERMNEITKTSVFTAYSKVHQKYLPTVPLEFSKGFQKKRIDHRHHAMDALIIACATRDHVNLLNNQHSNSNEKRYDLQRKLRRFEKAKYFSKSENRSIERDVPKEFLKPWATFTSNAKAQLETMIVSFKQNLRVINKATNRYESYKDENGNLRMGKDGKPKKDIIPQTKGDNWAIRKSLHKDTISGKVDLPRVKVAKGKILSATRKSIDPSFNNSIIESITDTGIQKILKNFLASKGGNPELAFSPEGLEDMNKNIEKYNEGKPHKPIYKARIFEPGSKFPLGQKGNKKDKYAEADRGTNLFFAVYWDDEKKKRNYETIPLNEVIEHQKWQATLTKLEREQTPIIPVKAENGSFLFSLSPNDLVYVPDIVEDLESEKAKPNCIYKVVSFSGNQCFFVKQDIATSIVNKAEYSTLNKMERSIDGKMIKESCIKIEVDRLGNIRRRIL

SEQ ID NO: 5163 - protein, 1208 aa, unidentified
  REGION 1..1208: note = Description of Unknown: Cas Enzyme sequence
MEIDTKQRILGLDTGTNSLGWAVVDRLPESGYELVDKGVHIFQEGVNIEKGTQEKSRAAERTKHRNQRKQYWRRKVRKILLLQELSNAGLCPFLTSEELRAWRVEGIYPLSNEAFMRWQRTDENKGINPYAARCKCVEQELDMENRQDRYLLGRALYHIAQRRGFLSNRKDQTNDPEKGVIKEGIKELTQKIQDAGCEYLCQYFYQLYQRGERIRSCYTDRKEHYEKEFAAICEKQHLNKALAAKLHKIIFVPRQPKKQQSGIAKCPFEPSKHCAPISHPLFEEFRMWSFIRNIKVQTPEDSELRTLSNEEITKILPLWFRKSKANFNFEDIAKTLAGKGKYCYYKSSEDKPFRFNYHLDSSIAGCPISAQLKGIFSEDILQYRAKVDDIWNALDFYTDDLKLREWGIKHYNLTDEQADALAKIRLPQGYASLSLKAMENIVPLMRDHGMIYSSATLIAKLRDLLKGYNFDEEVDAYLINDIEDYLAIPTDKDGKPLMSREERKQILERKWQTHYHLSDKDLQKLYHPSMIEEYRKVENKTAGVYQLDSPRISAFKNPMAMRSLFRMKAVVNQLLKEGTIDENTIIHIEFSRKLNDANRRAALRRYQTILRDEREKAREAIKPYVPNPSDDDILKYLLWQDQGGKCIYTGKDIHPRELYLGTEYDFEHTVPRSMGGEWTRENLTISDKTFNTETKGSRLPSQLMPQYQQMFAAILQSWKEKYEALDKQVRAEQRKAKTASTKEKKDGFIQSARLKAMQRDFWKNKYEAFTITEDKVSGFTRRQGTDAAIISRYARLYLLSLFNRVDVVQGIITADFRKLWGIQPAYEKKNRENHVHHCIDAITIACIGKREYDLRAASYRAEEEHKIKLVVPKPWIGFTEDIQEIEKEILVAHYTPNPMGKQTKKKLRDSHGHIQYDKRGKVIYSSGATARGALHDDMIYGMIANSHNIDAKHKVGDRCAVKRVPLSAVDVKNVVDPVVKQVIVDAIAKYGNLANAIAAEQENNDGSIWLNKEKNVRLKKVRCFQDFAINAAPIRKLRDVSLKEYKQHQYSRTDGNYVCAIYEGSDNKGNRKRSFEIISNLVAAKAFNTNQPIVPETNEKGYPLIMTLHLGDLVLLYEQSPDELRNASQKELVKRLYKITGMTDSGGLQITMRYQQEARPDKELQQINGLFRADEPIKYLRMLRHTQINAFVQGQDFELTETGKIVFK

SEQ ID NO: 5164 - protein, 1391 aa, unidentified
  REGION 1..1391: note = Description of Unknown: Cas Enzyme sequence
MSKKTWYLGLDIGTASVGWAATDTEYKIIRKNRKRLWGVRLFEEATTAEERRNYRSGRRRLQRRKWRLNLLEELFASEIEKVDKTFFLRLKESQYHYEDKTHQVPYAIFNDTDYTDKDYYKEYPTVYHLRAKLMSEKNPDLRKVFLAIHHILKNRGHFLLQGQSFKDGNLNNLIKELLELDILHVGFDVTEEIADKIANISLEKKTLTDKVNDLKKLYPKEKQLLEVFRLVFGGKTSLDKLFAIEEYKDLDASIKSISFKEKIYEEVRHDYEQVLSNYIELLDLAKLVYDSIILSDIKKEGKTLSESKMELYEKHKDDLLKLKQLVKNDSILSEDKKIELYSTIFKEDKDKGTNYVNYIRKSEEGKGCNYEDFKKFLVKELAKLEESSTKEEIFRDLELEQFLPLQRTKDNSVVPYQIHKDELVKILENAAKYHNFLDKKDESGYSVKEKVLQLLEFRIPYYVGPLNSSKKAKEDGFAWSVRNKGYEHTPVTPWNYEKVIDESSSAEKFITNLTNKCTYLKGEDVLPKNSLLYSEFALLNELNALKYDGNRISLEARNTIIEKLFKQQGKKVTKTSIKNLLKTEGYIDGKGEISGIDITVKNDLKSYRDFKNILGDKFNAEHVENIILWITLYGESRKLIKAKIEAVYGDIYSDEEIAKMSRLVYKDWGRFSRKLLTEIVSKKLYNEETGECLNIIGAMRQNNILFMELLADRFDYLEQITGYNKELQRDVTEITPEILDDLYVSPSVKRSIWQTVRIVEELKKIIGCSPTKIFVETTRSNQDKKAPTDSRKKQLELFYKAVKKDVKELESEVGALNFEVLNERLSSEEPSKLKAKKLYLYYTQLGRCMYSGETIDITQLYTNAYDIDHIYPQSKVKDDSFTNTVLVKREYNAAKTDRYPLGSDIQTPSNRRFWKFLKEKGLITDEKYNRLVRTEEFSDEELTGFIARQLVETSQSVKAVAGILGELNPETSICYSKAENVSSFRQNFGKIKEGNRKSENTEQLIKVREINDFHHAKDAYLNVVVGNVYDTKFTRNVFNFIKDKKDGRKYSLNNVFYENASNSNTVAWEMDKTVHQVEKVMNNNNILVTRRTSEQKGGLFDATVYKAKIAAKAKEGAYYPLKTSNSVVKDVTKYGGFTKVKIAYYSIFEYTLISKKGEEKITRIIPIPIYISQNIKDDYTLVEFGRSQINLKVGEEIKDFKLKYRKLCIGDLINIDNYIYYVGGKTDDNFVYDSAVQVVIDKESEEYIKLLSKYQSWKKENKDGKLWGTITSEKNIRLYNILVEKMNTSVFTNKKHSKYAELIDQITINKFKSLIEENQSKLLLEILNLITNKKTTFDLKDIGIKVGRGRFSFNLTKLNKFSVIEQSVTGFYEKEITIIGDKENDMENNNS

SEQ ID NO: 5165 - protein, 1194 aa, unidentified
  REGION 1..1194: note = Description of Unknown: Cas Enzyme sequence
MSKHVLGLDLGVGSIGWCLIALDAQGDPAEILGMGSRVVPLTNLGDDKAFSKGEAFTANQKRTARRTMRRGFARYQLRRYRLRRELEKVGMLPDAALIQLPLLELWELRERAATAGRRLTLPELGRVLCHINQKRGYRHVKSDAAAIVGDEGEKKKDSNSAYLAGIRANDEKLQAEHKTVGQYFAEQLRQNQSESPTGGISYRIKDQIFSRQCYIDEYDQIMAVQRVHYPDILTDEFIRMLRDEVIFMQRPLKSCKHLVSLCEFEKQERVMRVQQDDGKGGWQLVERRVKFGPKVAPKSSPLFQLCRIYEAVNNIRLTRPNGSPCDITPEERAKIVAHLQSSASLSFAALKKLLKEKALIADQLTSKSGLKGNSTRVALASALQPYPQYHHLLDMELETRMMTVQLTDEETGEVTEREVAVVTDSYVRKPLYRLWHILYSIEEREAMRRALITQLGMKEEDLDGGLLDQLYRLDFVKPGYGNKSAKFICKLLPQLQQGLGYSEACAAVGYRHSNSPTSEEITERTLLEKIPLLQRNELRQPLVEKILNQMINLVNALKAEYGIDEVRVELARELKMSREERERMARNNKDREERNKEVAAKIRECGLYPTKPRIQKYMLWKEAGRQCLYCGRSIEEEQCLREGGMEVEHIIPKSVLYDDSYGNKTCACRRCNKEKGNRTALEYIRAKGREAEYMKRINDLLKEKKISYSKHQRLRWLKEDIPSDFLERQLRLTQYISRQAMAILQQGIRRVSASEGGVTARLRSLWGYGKILHTLNLDRYDSMGETERVSREGEATEELHITNWSKRMDHRHHAIDALVVACTRQSYIQRLNRLSSEFGREDKKKEDQEAQEQQATETGRLSNLERWLTQRPHFSVRTVSDKVAEILISYRPGQRVVTRGRNIYRKKMADGREVSCVQRGVLVPRGELMEASFYGKILSQGRVRIVKRYPLHDLKGEVVDPHLRELITTYNQELKSREKGAPIPPLCLDKDKKQEVRSVRCYAKTLSLDKAIPMCFDEKGEPTAFVKSASNHHLALYRTPKGKLVESIVTFWDAVDRARYGIPLVITHPREVMEQVLQRGDIPEQVLSLLPPSDWVFVDSLQQDEMVVIGLSDEELQRALEAQNYRKISEHLYRVQKMSSSYYVFRYHLETSVADDKNTSGRIPKFHRVQSLKAYEERNIRKVRVDLLGRISLL

SEQ ID NO: 5166 - protein, 1222 aa, unidentified
  REGION 1..1222: note = Description of Unknown: Cas Enzyme sequence
MKKVLGLDLGVGSIGWCLIEKDDHNTPKRILRMGSRIVPISSDEETGYTKGNAVSKNADRTAKRTARKCYDRYQLRRQALINLLKRFGMVPNKNLMLEQTPIELWQKRADAASKEITLEELGRVLLHINQKRGYKHSRLSNSDSKETAYVQEVNSRYDDLKAEGLTIGQHFAAKLKENEQTSADGKKYYNYRIKEQVYPRHAYEEEAKKILEVQSQYHSDVLMPDVCKEIMDIIFYQRDLKSCKNLVSFCEFESYTIKKDGKEITIGPKVAPRTSPLAQLSSILETANNITIRNRKNDELYISPEQRRAIADFLDNHEVMKLTDLYKILNIGRKDGWWAGKAIGKGVKGNSTKYQIREALSALPKEQVDSLTAFQLEYDEYVDEETGEVRKRINNTKAEKQPLYRLWHLLYSIKDVDELSGALRHLGIEDKESIEKLSKLDFRTAGYANKSAKAIGRILPYLMEGVMYSDACERAGFDHSRRINPDRTLLTHLPQIQKNELRQPVVEKILNQLVNIVNALLEKEGAIDEIRVELARELKQSKDERNEAFRRNNQNERLNKELAERIKKYGLTPTRNRIMKLKMWEESEHSCMYCEQPVDPVEFLKGADVEREHIIPRGLLFDNSFTNQVCSCRRCNSKKGMRTAYDFIGDDKGQEGLDIYIDRINDLFNKKKISRSKLNRLLVSHKAYISRKAQGKETEEDKELWENFIDRQLRQSQYIAKKSVEMLQQVCKNVYTTSGSVTDFVRHQWGYDELLHDLNFERFKKAGLTAMIKQLHSGKEVELERIKDWTKRLDNRHHAVDALAIACTTQSMIQRLNTLNACRDEMLEELNNQNQRLIDPERSMLEKWIVAQPHISYVEAKNEIDKIVISQRPNTRITVPGKRYVTKNGKRTLAQTGIIVPRGALHAEFVYGRIMKQEADGVTMTPQYVRKYKLGIGAQGFLFKGDEVYKEEVKKNSKTGLSKIVVTDKIKDVLDKIVDGDIRQRILERLNRGFEEGVDYRVNVAKALANLKNLDDDPVYSDDAKTRPIRTVRKYVSSSTMVAVRKDSNGRPIAFVEPDDNHHVAFYKDEDGKKKEIVVTKWQAVQRKLKHIPIIIDNPSQTWSEVWGRDDIPDELLKTLPKDGSIYLLSLQKGEAIIMGLEEFDYQRALLEKDMRILCDHLFYVQSASSDDYRFRRHVEAKYDTKDMNKDDLRFLRIRTIDELFKINPHKVKVTVLGDIID

SEQ ID NO: 5167 - protein, 1371 aa, unidentified
  REGION 1..1371: note = Description of Unknown: Cas Enzyme sequence
MKRILGLDLGTSSVGWAVVDQAENDNEKSQIIKMGVRIVPLDTQEKDDFEKGKSITTTAVRNQKHGMRINLQRYKQRRAHLISLLKREHFITDETLLYEDGNNSTFETYRLRARAASEEISLEQLARVLLMINKKRGYKSNRKADKQEDGQLIDGMAVARKLYDEHMTPGQFVNETLLQGKRYVPTFYQSDLRAEFNTIWDFQSQFYHDVLDDELKDKVIGKNKKSTAQTFYATKNVSAAENKDRKTRLQVAYRWRAEAVTQQLPIEQVVAVLSDINGDIYNSSGYLGKISDHSKELYFNKLTVGQYLMQQLDKDPHFRIKNRVFYRQDYLNEFNTIWETQCRFHPELTDELKEEMRDTIIFYQRRLKSKKGLISYCEFEGKEITVTVNGKTKKVMTGPRVCPKSSPLFQEFKIWQELNHMFKNVPLSDDQRMILYKELSVNKELSISSVLKLLGLKDKEQALNFKFLQGNNTQVQLMNAYKQILDWSGHDVEKFDKWDYHTKMQFIKSVFKAIGAKTDYLEFDSNQIDHYLDQPAYKLWHLLYSYESDNSETGDEKLKKHLKKLTGLSDEYVTALASVQFEQDYGSLSAKAIKNIMPHLLAGKVYSDACEAAGYRHSAQSLTREELENRPLEKALDVLPKNSLRNPVVEKILNQMIHVVNAAMEEYGVDRDGVKRFDEIHLEMARTLKQTKDQRDKASRSIEERTRENEKYIMELQKDFGIAHPSRNDIIRYRLYLELKDNGFHTLYSNTYIPREELFSKKFEIEHIIPQAKLFDDSQSNKTLETHEANLEKANRTAMDYVLEKYGEIGAEQYRQRIAFLYDRNNKNHTNKKHKNLLTTEAEIPKDFLNRDLGNTQYIASKAREILMQVTRTVVPTIGAITARLREDWKLVDMMKELNWSKYKALNQTEEYRNRDGHQVRIIKNWTKRNDHRHHAMDALTVAFTRWEHVQYLNNMNAQEGDDQMPNVWMLRSKLMKDGKFLPPMPLDQFRAVAIEHMKGILVSIKAKNKVATPNVNRVSGSDVLQVTQTPRTQLHKEKFYGARQRYVTTIKKVDGKFDAVTISKVARKDYREALMRRLDECGGNAKKAFTGKNSLSKAPLYCDELHTKQVPESVKLSWLETYFVIREAVDPSIKIDNVLDKRVRDILQKRLEEYGGDANKAFSNLDEKPIWLNKEKGINIKRVTTSARLTNPMPLHDQLNRDGSRMKDGEGKTVPVDFVNTSNNHHIAIYEDADGNWHEKIVSYFEAIARINNEMPVVDKHFNESEGWKFKFTMKQNEYFVFPDEKTGFFPTEIDLMNEKNYSLIAQHLFRVQKLTNNDYWFRQQFESSVTAGNSLPQGVAFFRKSINSLKGIVKVRINHIGKIVHVGEY

SEQ ID NO: 5168 - protein, 1040 aa, unidentified
  REGION 1..1040: note = Description of Unknown: Cas Enzyme sequence
MDQNKRTIFGFDLGTNSIGWAVLEEDANGTPLALIDMGSRIFQKAVEDKTPTPKNLKRRMARLARRVTQRRARRRSRLQNYLISLGLLPAEVRDSSKRESVLNELGDSYLLRAKALDTPLASFELGRVISHIGMRRGFQSNRKTILSDMQGDPDVMQMLAELEHESPEGKSEADAARIKEETEFKAAISELQFQIDESGSRTLGEFLSKQPTDVRKRNRRTSREMLRHELEQVLSAQTRVELTDAVKQEIEHIIFHQRPLRWDSSSVGNCSLEPTRKRAAVARLEFQHFRMMQDINHLKYDYPQVDPETGEIGGLGISLSADDRKKLVTKLDRQRSVTWAAIKKELGLPKSIRFNLEEGTKKGLGGNSTACSIRSVIGDAAWESMHETKQHELVEDLLKFEKKLPLKNRLVNIWGFDVRTAIGLASLELEPGYGNHSLKALRTIIPHLENGLIYSDARIAAGYDYEVEVPKTLSRLPPPGDFRNPVVNKALHEFRRVCNALIANYGKPFAIRIELPRELMMNKQRKAAFEKQQKENQNANEQGKEQYSIIRSANPQLALPEYPRRNDLVKYRLWKDQDCVSVYSGRAISLTELFSAAVDVDHILPYSRTLDDSYMNKVVAFSTENREKGNRTPYEAYSGDRANWEQMLQRSRKLPLSKRNRILRDELDGLDGFINSQLSDTAYISREVKDYVNVLGADVSISKGQLTAWLRHRWGLNPLLGGGEKNRSDHRHHAIDAVVTAAVSRRLYKQVVHLAELDPRGGSPEVIRIEPPFPEFRESLETKLGQMIVSHDAVKKLSGAFHEETGYGAQKTKDGDRIVYRKPLNQQFDIKQIGKIADPTLKTFLTSHLASFGNDPKVAFSDSNRPRLTANKAQIRHVRVVASESFNPESYLQVKLDGKLIRLHPFGNNHHVEIVRDKKTGKYRGVFVNTWQAAQRIRKGKLPLIQTDHGPDLEFVMALHINDMVTAKKGGVTSTYRIQKLDPSNNRLVLRAHTAATLEDSSQEFISTIPKLMGEGSLTPIRLNVLGHRLSDKANLNVSD

SEQ ID NO: 5169 - protein, 1039 aa, unidentified
  REGION 1..1039: note = Description of Unknown: Cas Enzyme sequence
YDGNKGWSRQDLTANPEDTEKEQKAHELLDAFRAKHGRDGTMAEVLCDRLGLDPLAAKQSSAIRFRDLGAAFPREGVEAEVERLLRAHLGMLPGVDEAFIIAVMRDHTVIVGPDYRLPARYGQRVGSTRTPGGLLFGQLVPRFDNRIIATCPVQFQRVYDRVLAETGNASKATFEAHKLAKVPGVGCVEFHRFRWAMQLANVTIATGDARKSRRLSKEERNALNADMEKHGALTPSEFKKAVRALTGTNKDNLDRLLALPDADKSLVLDPARKLVASGVLGILWPHLVESLQKHTLTNLRRGKATTVRALLDKCPAAAPAFDHWWDGEAMKKPRKPRTGETATVRTRAQALDEAHALAPANGRAAHSREVMADVWQFVLAGDGHPMDPGGPLFRSEAIRRAQLDRVIDEQTNNHLVRHRLKLLERLHEHLLTEFAAGDPTRVSRITIEVNRNLKELSGKTAQEQAKEQGQQTAQFRSVEKKLNAAYEGLGVKLGPGLIRKGRIAEDLGWQCPYTGATYDELDLLHRRVDKDHIVPRSQRTSDSLDSLVITFSEINKLKGQRTAVQFVEEFQSKPIPGLPNLMVKTLSNFLRDVEGLDTFKGHDDDKRRKKNRQRLLKLRDSVEKEFTPGDLTKTSQLVRLGAEALQRAYLNTNAKPVIVSLPGAVTAAARKSWNLLGCLTAANPNVLNAEDLDDHGKPRIHRKTELRGISHLHHALDASTIAFTSHLLPCDGGVWKREAIELLAKRRCNTMEQAQLRAMLRWNVSFTQEGQPVLAELPDELREQLRARLAERRVVQHLPASMGDMVSDQTVWRVFDPADPHPNARRLARWLAAAEVEVPKPDAPTVIIITRKRKAPPKPSEEAKAKKGKFHEGKTWEWYYVAAAKDALLGFAPSGDPAKAKLKPLKAVKVLGDNFGIALDPEPTLLRPLHVWRQMTALKAANGGKWPRVLRNGMLIRVPRAKTAKVDYRGTWMLRGVQVNQAKGFLVDLSPTDQIRYRGEDGCFQNVSLETLLKCGLEILKPTLCGVAQASSVPTTSVG

SEQ ID NO: 5170 - protein, 1175 aa, unidentified
  REGION 1..1175: note = Description of Unknown: Cas Enzyme sequence
MKKILGLDLGSASIGWAVVRENSEELLTEDASGSTAPNDAIVALGSRIIPLTTDESTGFSKGSTLTKNADRTQKRTQRKGYDRYQLRRGLLLQELSRLGMYSGQTLRLSTLGLWELRAKAVTEQVSLPELGRVLCHINQKRGYRTVKSDFEDKKQGKYVEAVVGRYRELHAQGLTVGQYLYKELSSDPAFRCKDRVYPRAAYVEEYDAIMDCQKRFYPEVLTGEVIAHLRDYIIFHQRPLKSCKHLVARCELERREALIGGRIRNCGPRVAPRSSPLFQVCKLWEMINNLRIENKEGDPLVLTLEQKQALFAFMNTHAKFTAAKLTSVLGLKSREWKIANAIGTGLQGNTTYCALSAALEKCPDRGKLLAFELHAVDGDKVHADTGEIVQVIDTSFEKQPLYRLWHALYSISDIDTLREVLGQNFGIADPETLDRLCRIDFVKSGYGNKSSRALRKILPYLQQGMQYYQAKCMAGYDDAPWNKEQNQARELAERLLPVPKGELRQPVVEKVLNQLVNLVNALMAEYGPFDEIRVELARELQQSREERESASRSMAENNKRNEQVAQKIQQEYGLTPTRSRIQKYRLWTESDHQCMYCGQLVNVAEFLRGVDVEVEHIIPRSMLFDDSYSNKVCACRKCNKDKNNRTAFDFMKTKPEGEFAAYLERVNSLAEAYKPNRGLDVGISETKKRKLLMRKQDIPTDFIARQMRETQYISKKAKEMLQTVCRNVYSTSGSITDYIRHVWGWDDVLHEINFEGYRAAGLVQTCEREVDGRKLQVERIVNWSKRLDHRHHALDALVIACTKQGYIQRINNLASLGEITFRSDAGKAPSGASRERRTRLERYIRMQPHFSRAEVIRAVKGIAVSFKADKRTVTPGKRYVYRKGKRICVQRGILVPRGPLSEESVYGRIHDEGKEKYVLRYEVDTIDLKKLGSVVDQGIREILRQRLEQFGGNPKKAYATPVYDHQGRAIRSVRCFTNLKVAVPLRYDQQGQPIAFVKTGNNHHVAIYEDEKGRWHEHMVTFWHAVDRKRYGLPILITDPGDVWDRVTDRMPEDFQRQLPPSATWRFVFSMQRNEMFVLGMEEEEYRKALSVQDTATLCQYLYRVQNITAGAYVFRKHTETQSDDRYPDEHGKKIFSLLKSNARGAVHWVQSFGALQALNPHKVHVSITGKISEV

SEQ ID NO: 5171 - protein, 988 aa, unidentified
  REGION 1..988: note = Description of Unknown: Cas Enzyme sequence
MTQYLGADPGTSGCALAILDDATKIIGVSLEISHASTAEGRRIARHQRRQIKRKRQRRDAVHKLNEKYLGIKESDLAIYPFYNRQLGLTERLSKAELAACLSHLAKHRGPQYGGFFDPNQDSRWIEAKYLDYIESDIGFLNRCDSIELSDDRQMNFPNRREVECEFEQLCSAQSAHHSELSPEVVEEYREAIFTQRPWWFSRSTIGKCPFRPSDDCLSKCDQDAQLYIQLERLNNIRVNPDGENRSLTPEERQAALDRLKNGNLTINRLNQIVGTEDHNYSPKSKSSQIQRSFFELVVSKLPTSADCPELRSQLNRILIQLSDNGKKIGPVVDRLRRVLGWHGCSPEECEQFVKHVGECTSKIPTGRIFCSRFVLLELGLLDRMKQGDNSSAALRALGLKRIYVKNPRPPILPNAVATSSLRSLDRQLGHIARECGVDWKTAKLTIESTRDIRQPKNVRQAIENKQAAREVLNSKIKSLANQHGVPFNHFKLWAQQGGVDLISQKSITIADMQKKHCQVDHIVAVAIGGDDSLENKMLVLANSNQFKSDEFLLGKLGALKCEAIAEHYKSSHVFEIDGESLKFPPDFKKAEMILSTLSSAETFWEKHHGPTTSYIYTEFASYIQSKRFQDHPTDVQSAKPLHTQMLRKHWRLESLLCGDSKREDHRHHIVDAIVVACLGVSSIRRRVEELVLGRDVVVPPPWGDIEAFRAQIKRCLDYHVVYHRVKRGARGPLHKAQMLSCYDEEHQLFAKRKELPKALTDKFATAKKKLVIDDRKKMKPGKGGFIEGDDVRQKIIETLKEHHVWGDEFNKYKVTQLVNDGKLPKRVRVVTKVDNVLVVPSKRHGKVIGKRYYEKAKGGNYRAVVWNKDGKWQISVEDMLSAAKRLRCRSQNQPEDNRDIIVVLFKNDIVQMVIPGQSCRFWRVVKMQNGKLNFVQHFNASTNPNDYITLSANQLQKLGNLTPMRSRSITVAAFDPNFSRSIEMPQYR

SEQ ID NO: 5172 - protein, 870 aa, unidentified
  REGION 1..870: note = Description of Unknown: Cas Enzyme sequence
MKVHEIPRSQLLKIKQYEGSFVEWYRDLQEDRKKFASLLFRWAAFGYAAREDDGATYISPSQALLERRLLLGDAEDVAIKFLDVLFKGGAPSSSCYSLFYEDFALRDKAKYSGAKREFIEGLATMPLDKIIERIRQDEQLSKIPAEEWLILGAEYSPEEIWEQVAPRIVNVDRSLGKQLRERLGIKCRRPHDAGYCKILMEVVARQLRSHNETYHEYLNQTHEMKTKVANNLTNEFDLVCEFAEVLEEKNYGLGWYVLWQGVKQALKEQKKPTKIQIAVDQLRQPKFAGLLTAKWRALKGAYDTWKLKKRLEKRKAFPYMPNWDNDYQIPVGLTGLGVFTLEVKRTEVVVDLKEHGKLFCSHSHYFGDLTAEKHPSRYHLKFRHKLKLRKRDSRVEPTIGPWIEAALREITIQKKPNGVFYLGLPYALSHGIDNFQIAKRFFSAAKPDKEVINGLPSEMVVGAADLNLSNIVAPVKARIGKGLEGPLHALDYGYGELIDGPKILTPDGPRCGELISLKRDIVEIKSAIKEFKACQREGLTMSEETTTWLSEVESPSDSPRCMIQSRIADTSRRLNSFKYQMNKEGYQDLAEALRLLDAMDSYNSLLESYQRMHLSPGEQSPKEAKFDTKRASFRDLLRRRVAHTIVEYFDDCDIVFFEDLDGPSDSDSRNNALVKLLSPRTLLLYIRQALEKRGIGMVEVAKDGTSQNNPISGHVGWRNKQNKSEIYFYEDKELLVMDADEVGAMNILCRGLNHSVCPYSFVTKAPEKKNDEKKEGDYGKRVKRFLKDRYGSSNVRFLVASMGFVTVTTKRPKDALVGKRLYYHGGELVTHDLHNRMKDEIKYLVEKEVLARRVSLSDSTIKSYKSFAHV

SEQ ID NO: 5173 - protein, 1502 aa, unidentified
  REGION 1..1502: note = Description of Unknown: Cas Enzyme sequence
MKKILGLDLGTNSIGWVIRNMNNLKNEQIEKYGVNIFEKGVGIGKSGEFSFAAERTKKRSTRRLYQSRKYKLWKTLEILIEQGYCPLSKEGLDRWRKYDKEKAFKGEGGRAYPINNIPFDSWIKLDFNGDGKPDYSSPYQLRAELITFKLDLSKEIDRNKLGRALYHIAQRRGFKSSRKDVAVQDTGEKQDAKSELKKETEFENNLQKRFKKSISDFPTIGSALAFVEKQGERVRLEWIQHTFRKHYKDECTKIFDFQGIGIDSDLYKKLIESNKNRYNGSIFFQRPLRSQKGLVGKCTLETDKYRCPISHPDFEEFRALSLLNNIQYRKENDGEWIGLSDELKKEIYNKLFYRPSKSHFNFSEIRDYIQKREFKDKSIAWVLNYRNRTINYSDKTNVSACPVSSRLRDIFGEDWRSYQKTTKLSRVNKKTGEEHTIKYTIEDVWHVLFSFDDEELVSQFAAEKLELDNEKTKKLVTAWKACPDGYSMLSLNAIKKINLFLQEGFIYTEAVLLANIPEIIGKNIWDIDENQIFIKHHITQLIASNREEKQIINIVNNLVAAYKALHDNEKYGFKDTTYTLTETDKSDILKTIIDTIGTKTWEEKTPNKSEIVDKVTYLYQCTFKTGFEIVLLGEDKYHIIKIKEKTYYKSTSHQFYKNPRVVDTLKDFILANFLEVDKKQLDKLYHPSMIEIYAPSKPSKDDGKLYLQSPKTGAFKNPMAMRTLYELRKLINYLIKTGQIDEETRIVVETARDLNNANERWAIETYQRQRQNENNEFADAIRSLLENKDYSTMPNPDSNEDIDKVRIWYEQVQKSSISKGTGEYNQNKWANQSTDLFQKLSQAKQMVDKYRLWKEQKCICIYTGRVISISDLFNTNTVDFEHTIPRSISFDNSLANLTVCFAHYNRNIKKNKIPTQLPNYDNDAKIGQDLYTAIKPRLKDWEDKVEHIKTMIEFWKGKSKHSSTKDQKDEAIRQRHLWAIDLKYWQNKLSRFTMTEVTSGFKNSQLVDTQLISKYAMHYMKAAFNTVDVQKGSVTSDFRKIVEIQNTYEKKSRAKHSHHAIDALILTLIPHAAEREKILKLFYEYLEEKQIAKDTGVYKKHDWLKAELDREVSKLNLPALEPIINEIDNNILINNIARDKALTKGKRIVRRRGKIVYLRDKNGKLLLDKNGNPKPKIAKGDCIRGEVHKDTFLGAIKLPLKNEQGNYQTENGKYVYNNALLYVVREPLMFKKDAASAGFKSIEELESCIVDKHLLEIIKKQIHGRSFKDALSEGVFMYNRKGEKVNQIRHVRVFVRDKEPLRIKGHVNISQKALVNLDSRNHKQFYYAGNGENYVYALYQGIVKNKIERDYRIISLFDAASLLRISESRELAIEPEIEYNKKGDKLNLYAILKTGQKVLFFDKDKNEMLNEFPNEELSKRLYKILGFEKDGRIRFIHHIDSRDDKQLKELESIHGKGIWQGFSMVNTEKPWPKLKLSIGNFNFLIEGKDFELKPDGEIIFFN

SEQ ID NO: 5174 - protein, 1337 aa, unidentified
  REGION 1..1337: note = Description of Unknown: Cas Enzyme sequence
MFSQRNNPYCELLQFVGQRYEIIDNKIIMRKILGLDLGTTSIGWAYVNEAEEKEEKSAIVKLGVRVIPLTTDEEGDFLKGKAISINADRTLKRGARRNLDRYQLRRDALIKLLKERNFITDESILSEEGKQTTFSTYKLRAKAVKEKVSQQDVAKVLLMINKKRGYKSSRKSKSDDDGIVIDGMAVAKYLYDNNLTPGQYVYEILRKGGKYIPDFYRSDLQLELDKIWDFQMQFHHEILTKEFKEQIKDKGKLATSKIFLGKYGIYTAENKGKRDAVKLQAYKWRSEAIKLQMDKEELAYVIVEINNNINSSSGYLGAISDRSKELYFNEQTVGEFLYNQLKQNPHTKLKNQVFYRQDYLDEFNVIWEKQKEFYPELDNVFKSEIRDIVIFYQRRLKSQKHLISNCEFEKSRKTIPKSSPLFQEFKIWQVLNNIEVENIKSRERFYLDEEQKVILFQELNIKNKLTDKEALKILVNKPKEFKINYKDLEGNRTNAELYKVYQQILEFEGEDYDFSKMIADEINEVVSTKFIELGVKTEILFFDSNLSGNDFDKQSFMQLWHLLYSFEDDNSRTGNEGLLKGIENKFGFKKEYAKLISNIPLQADYGSLSAKAIRKILPYLKEGNTYDIACNDAGYNHSSSLTKEELANRKLKNKLELLPKNSLRNPVVEKILNQMVNVINAIIEEENLGKPDEIRIELARELKKNAKERGEMTQNINKATIEHEKIRSLLQTDFGISKVTRNDIIRYKLWRELESNGYKTLYTDTYISKEELFSKKFDIEHIIPKARIFDDSFSNKTLSARKINIEKGNETAYDFLELKFNTLEFEQYLSRIDRMFKGGEISKAKHNKLLMRLSEIPEGFIDRDLRNSQYIAKKAKQMLEEVVRTVNTTTGSITNLLRSDWQLINVMKELNLPKYEKLGLVEIIKGKNGQDEKRIKDWTKRNDHRHHAMDALTVAFTKPAFVQYLNNLHARGDKAGSIYGIEKKHLIRDKNNKLVFKPPMPISLFRSQSKTNLESVLISFKAKNKVVTRNKNTIKLKGKNKYKEKVELTPRGQLHKETIYGKIERYVTKDEKIGSKFNLEKIKQVAKQSYREALLVRLLEFDGDPKKAFSGKNSPSKNSIFVDETKTKVVPEKVKLVWKEDRYTICKDISPDLKLDKVIDAGVKKVLQNRLNEFDGDAKKAFVNLEENPIWLNKERGISIKRVTISGVSNTEALHYKKDHNGKIIFDEKGNKQPVDFVSTGNNHHVAIYKDENGEVQEEVVSFYEAVHRVNEGLPIINKNKEGLEFLFTMKQNEYFVFPSENFNPDEIDLMEPENAKLISPNLFRVLLVQTSFRNNH

SEQ ID NO: 5175 - protein, 1353 aa, unidentified
  REGION 1..1353: note = Description of Unknown: Cas Enzyme sequence
MSKTYYLGLDIGTDSVGYAVTDEYYQLQKCKGEPAWGVQTFEAANLAQERRAFRTARRRIDRTQQRVALLNELFATDIGKVDPRFFIRRAESRLFREDAGDNYPVFNDKDFTDKEYYKRYPTIHHLIVDLMQSDAPHDIRLVYLACAWLVAHRGHFLFDVPAENVGELLDFDVVYHAFTEYLKENEYSLPWADEIGPAAILAIMKRNTGVKRKQDAFKAEIYGGKKASKKGDEAFPFSRDAIVTLFSGGKVKPQELYDDEAYAEVESVGLGMPDEDFARIVAELGEDGELLLKLRAMQDCAMLIGTQNGKKAISEAKVEVYEQHKRDLAALKKFVKKYLPQEYDAIFRAAGTDNYTAYSYNVKSCKDKSPVKSKADAEKFSKFLHGKVKNVKPAKADEAFYQDMLTRLEANSFLPKQKTTDNRVIPQQLYRYELTELLNRAEQYLPMLRRKDASGLTVKEKICSIFDFRIPYFVGPLNSKSQNAWFERKAEGKLYPWNFKTLVDFDKSEEAFIKRMTNYCTYLAGEEVLPRKSLLYCKYTVLNEINTLKINGNAIPVEVKQKIFTDVFMQRQRVTLKQIETYLRGQGLLFPEDKLSGADEKLNANLSSYHQFRRLLESGTLTEENVERIIARAAYSEDRSRFLRWLEQEYPQITAADRKYIARLNLKEFGRMSGRFLSGILGADETTGEAFTVMEALWNTNQNLMQLLSDRYSFKRVVEDYNRDYYAQHTRTLSERLDEMYISNAVKRPIIRTLDICADVAKAMGGAPEKIFVEMARGANEDQRGKRTRTRKEQLLDLYKKVKTEDARALAKELDAMGVMADNRLQSDKLFLYYLQMGKCAYTGQPVDITRLADGTYNIDHIYPQAFVKDDSVLNNKVLVLSTVNGAKTNDYPVSGEIQQKMRGTWQLWLENGLMTEEKFRRLVRTTGFTEQERYDFINRQLVETRQSTKAVAALLQERYPEAEIVYVKAGLVSEFRQEFDMLKCRSVNNLHHAKDAYLNIVVGNVYNARFTKNFSFDRSYNIQVKKVFAGPVKCGKATVWQGGQDLAKVRAVMAKNAVHMTRYAFCRKGGLFDQQPVKAAAGLVPLKSGLPTEKYGGYNRTTAAFFALVKYTAGKKTDIMFVPVELLVASKFLADKQYAGEYIKRALEKILGKPVQTVDLLLNGRPVKINAVISVDGFEMYITGKGGGGLTILTAPLLPLVLDSESQRYVKRLESYQNKRANNSALLPDEEHDGISKQANLALYDVLCEKMNQPFYKRSPANMAAALNSGRDKFNEAGIVEQVGLLMGLLPWFNSTSARVDLTLIGGAKVAGYRQPSSSLGVWKTKCKEFKLVEKSASGIYESRSCNLLELL

SEQ ID NO: 5176 - protein, 1277 aa, unidentified
  REGION 1..1277: note = Description of Unknown: Cas Enzyme sequence
VLLILQQLFAEEISKIDSGFFLRLKESKYTPEDKLDVKGENPKLPYALFSDKDFTDIDFHSKYPTIYHLRNELINSKENHDPRLVYLALHHIIKHRGHFLFESLNENSDVQTFKECWREFAQTLADSELEIINFGAGLEDKIESILKNKNYSPKKKVQELKAILKIKDPIETEILNMIVGNSVNLIKLFKDDSLKEEEIQKFSFKENKYEEESEKLESILQERFEVIAKGKGIYDWEILTDILNDCKTLSEAKIKTYNKHKEDLISLKKLVKKLDSTNNLYKKIFGINIEKGNENYSNYVGFQKKGNKKIAIEKKISKDDFYKMLRKSLSDYEKEDEVKKIIAEIELGTFLPKQVIKDNGVIPSQLHLKELKLILANAENYLPFLKEKDENNISVNEKIQSVFKFRIPYYVGPLSATGDNNAWIVKKSNQNIFPWNFEKIVNTEKSAENFIKRMTNKCTYLVGEDVLPKNSLLYSEFTILNELNNLRINGERVEPNLKNKIFEELFKKNKKITMKKLKEFLKCEGISCNDDEISGIDGDFKSNYAPYMDFKGLDLIKILSSDEIEDIISDITLFHDDKKLLKARVKEKIKNHKNITDRICKLSYKDWGRLSKKFLTEIEGTSKETGEIYNIINFMRNTNKNLMELLSYNFDFVEKIENYNKDFSPNMNLNYETVKNLYVSPSVKRSIWQTIKIVKELKKVLKSEPKKVFVEMAREKQESKRTESRKKKLLDLYNSCKKEEAELYEAIEKRDDHQFRSDRLYLYFTQKGRCLYSGENISLDNLYNNNMYDIDHIYPQSKITDDSLDNRVLVRKNDNSKKSDIYPLPAEIINNNKSFWNHLKDIGFISQEKYNRLSRTTPFTTDELGGFINRQLVETRQSTKAVASILKQVFPKTEIVYVKAKNVSKFRQDFDIIKVRELNDLHHAKDAYLNIVVGNVYNTKFTNSPINFIKDVKAREYNLNKLFKQKDVERNGYIAWKVGEEGTVGKIKKIVDKNNVLIVRRSYEVKGGLFDQQILKKGNGQISIKANDRIGNIDKYGGYNKASGAYFMVVESKDKKGNLIRTIEFVPVYLAEKLENSNDLRLDYCINNLKLIEPRIIIPKLKFETLFYSEGFFFSLSGRSNNQLLIKNETQLLANKEIQITMKKVIKFIERKKENSTLKITPKDNINIEELDFTYDFFLSKLQSHCYSVKLSNQVNALESNKIVFKNLFLEEKCSVIYEILHFFQTNRVTSNLKTINGAANAGSLVISKNITNFKELYLIYQSTTGIFEQKVDLLKL

SEQ ID NO: 5177 - protein, 1246 aa, unidentified
  REGION 1..1246: note = Description of Unknown: Cas Enzyme sequence
MKKILGLDLGSASIGWAVIAEIIENGETKCDILGMGSRIIPYEGTEGKDFAKGTGESRNSLRTKARTARKGYDRYQLRRKYLVDILIKNQMYPDEATRSLPKMKLWELRDKAVHSPVSLMELGRLLLWFNQKRGYKSSRSDANLGKKDTEYVATVKSRHVKIKELNLTIGQYFYKELSTDEFFKVKENIFPREAYIEEFNSICKTQQIAHPTILNNELIDKIRNEIIYYQRPLKSQKGLVSVCEFEGFCRIGKDGKEYFVGPKVAPKSSPLFQLAKMWENINNIKIGSRTGEDLKLTTEQKWAIFQHLDNNEKLTPTDLLKILNLKKENCYVNKQLAKGLNGNITKHAIRQCLGVSDKYENLVKFELTVVDSEKEGYLYDRKTGEILDSKPIKFIDPRVEQEPFYQLWHTIYSIHDQEECSRVLQTKFNIEQPIADKLAAIDFSKHAFGNKSAKAIRKILPYLMEGDGYSEAMSYAGYDHSNSQTKEENLQRKLLELLKPIPKNSLRQPIVEKILNQMVNVVNAIIEKYGKPDEIRVELARELKQSKEERNDADKAMSKRQRENDAITKRLEEFGLRATRNNIIKWRLYEEIDNEEKKLNAMCVYCGQPISLTEALRGNEVDIEHIIPKSKLFDDSQSNKTLAHRHCNKNKNDLTAYDFMKGKPDVVFNEYVERVNQLYANHIIGKAKRDKLLMTESKIPDNFIDRQLRESQYIAKKAREILQTICHNVWSTSGTVTAELRHLWGWDDVTMNLQMTKYRELGLTHQVEWESEHGKNKHQKEVITDWTKRDDHRHHAVDALTIACTKQGFIQRFNTLSAARTRADMMFDVDERSLEFKEKRSLLEKYIIGEQPLIVDEVEKAVSNILISFKSGKKVAVLGKRKVGKRGNKKVVQEKIIVPRGALSEQFVYGRIKTQEENKPVKYLFENPQLIFNPTIKAKVEERLLMFDGDVKNAIASLKKVPIYLDNEKTVVLEKATCLKDEYVIKYTVDTNFNKTDKVVDPKIKEILQNRLKKFGGKEKEAFKDVQLEDKTVIKWYEDEGLERPIKSVRCFTGLSAVVPVKKDENGNDIGFVKPGNNHHIAIYTDTEENKQQHVCTFWHAVERKKYGVPVIIKNTNEVWDKIQSQPDGTYPESFLEMLPPPNLNLLVSMQQNEMFLLNLPEEMQKEVDVNDKSSLSKYLYLVWSVSDSDYWFRHHLETKNSELKSIDGARENKRYFRFQSLGSYFATNPIKVRLNHLGDIVNIGN

SEQ ID NO: 5178 - protein, 1085 aa, unidentified
  REGION 1..1085: note = Description of Unknown: Cas Enzyme sequence
MSSSLKPPRIEIALDIGHSSIGWAVLGTNETSAPGVLGCGSVIFEKDSALASTRRRHRSQRRHVRATRQRIARMEKFLVHLGVFTEGELKTKHAANGGSPTPWLLAARVLASNGDRTLTWPELWDVLRWYAHNRGYEEITGEVHDDDELSEEKVKDTEKVAAAKAALDQFGKTTMAETICAWLGQDPLGPRAGTTENYKAKNCAFERPLVVAEVAKILSAHRGKLEGMDEALIATLILDARAKPVPAIRFPRRYQGSLLFGRLATRYHNRIIGRCPISGGKIPGKNCPEFLRYRWAMQLANLRLADSAAGPLRPLTSVERSGLHAAMLRDGALTPGELKKLVAALPGHARDNLEQFFLHPDAKEGLILDPIQKVISGDVRIAAVWPHLPAQFQVRARGRWRRGKATTLSKLRDEAVKLGHDCAAFDAAVDAICAPLSAKSKKKTLPPTRAELISAPLDARRELAKLSGRAPYARPLLAKAFEEVMAGRDPKAVGGSLEETEDVRRRRESRPLPQQTNNHLVRHRLQILGRLLEDLTADPAYGAGEPARITCVTLEVNRDLREMAGLTAQDIAKELGQRLKQHGDAVKWLEQDPQVAPKIGAGLIRKARVAVDLGKRCPYTGEEFDPIDLVTKRIDLDHIIPRSQRTSDSLDSLALTFSSVNKWKGARTAWQFVRDEGGKSVPDAPNLSIMPLARFKEHVEKLDTKGHLDDYRRKKRRKEFFLLASYEEKARTFTPGQLTQTSQLSRLGAQVVRAALPHLQSHDLVALPGSVTGAVRKAWNVLGCLSAAAPGVLETVKLPDGSEKTEVRTKTEIRDITHLHHALDACVLALAAHFIPNRGDVWRLLAKRRLNPTQQAELAALGLFDFDERGQFRLRDLDPALKEQIRQKLAERRVVQHVPADMSGVRVEENTRGILRRENGRVFLRQRKRNAERQVVVNHTNEPEGKVVGLPRADGSGGKLAALNGVRVIDGNFGVAILNDPTLPPTDRFVIIPHERVYKRLAELRLRNGGKRPLIWRNGQVLKLTNGLRIGRWRIFSIKNNSSGLALDLGAVDAIHPDWINVLMKSLIRDGAANACETLTGHYKV

SEQ ID NO: 5179 - protein, 1402 aa, unidentified
  REGION 1..1402: note = Description of Unknown: Cas Enzyme sequence
MNLRNYSGDYNIGLDMGTGSVGWAVTDAQGKLLHFKKQPTWGSRLFDSAQPASEARVHRGQRRRYVRRRWRLDLLQKLFEPAMSEVDPGFFMRLNQSRTIEGDPIFTKDFTKADYYDRFPTIYHLRTYLMDTDEQADLRLVYLAIHNIVKHRGNFLRQGEKLTAKTAKTSDALKNLNGALKAWCESREYEFAKLDELSVAKILADERSSRSQKAKDIQALVKVDTADAAANKKLAKGLSSAVVGLQCEFKDVFGEFECEATKLAFSDDEKLEALQAACPDDCVELLESVCGVYSAYVLQGLLSYAEGQTISVNMIKKYNRYANDLDRLKTLVHEYAPGSYESFFRGATYHDSNSDDPSRDYDVSKAQGYTAYDLHKLSYDDFAKSVKKLFAGTGAETDERYIAMMDAFDKQRFLRRLKTSDNGAIYYQLHLEELQAILKNQGRFYPFLKDDAAKIESLVTFRIPYYVGPLTPKNAAQDKHGNHRFQWSERKPGMEDATITPWNWDTVIDKNKSAENFIMRMTGDCTYLAGEKVLPKQSLLYEEFCVLNELNGVRWSEDGDDWQRLDAAQREGIVHELFHKKRRVTYKMIADWLVKEGDATNPVVRGGQGESGLESKMGSYIFFAKDIFGVDELSRAEYPVIEKIILWNTLFEDRSILKEKLQDEFGPSGNGMLDAEQIKKICKKRLTGWGRLSDKFLTGIRIDTQAGRSMSIMDVLREGNPSSERRLGETMVMMEILHDNTLGFQEKVDEHNRKYYAEHEKSLGVNELPGSPAIRRSLNQAIRIVDEIAKIAGHAPANVFVEVTRDEDEKKKGKRTTKRWDVIEDALKAFKAEGGDLAVMDDFKELKAANVDLDERLTLYLMQNGKCLYSGRAIDLNKLMAGSGEYEVDHIIPRAYIKDDSLENKALVYREENQHKTDQLLIDKSIRWKMGETWKQLHQAKLIGDKKYRNLLRSSINENAMKGFVARQLVETSQMVKMAQALLEARYADEGTKIVPVKASVSHNLREAAGLVKCREANDFHHAHDAYLACRLGLFIQMRHPGMYENPIGYSHVIKKYVREQSELFKKTHRMPGSAGFVVNSFMTAGFDPETGEVFDDAWTEDDEVKRYRGKYLPDGWNAAAEVEGIRRALNYRQCYISRMPQEDTGAFWKATIYSPRDPKMGAKLELSTKQGLDAKQYGGFSSQQFAYFFIYEAKKKGKPVFRFSQVPVWLAARIEGDSAALGEYARGLAEKEGLEYVGITRSKIYKKQLIEVDGDRLIITGAKEVRSGSQLAFSQDEMSALLFADEMLTSDAIAELNTIWLGIDQSLLTLNKRLSLQLNLGRFDEAYANLSTEQRKKLLTGLIALVNGNDRIVDLSMVGGPSKAGHMGIVFSKLLNDPQVTFFIVDQSVTGMFERRTRVGL

SEQ ID NO: 5180 - protein, 1039 aa, unidentified
  REGION 1..1039: note = Description of Unknown: Cas Enzyme sequence
MKNDAEQHILGLDIGATSIGWALVALQDGAPQRIVRAGVRCFQAGVEGDVESGRDESRARKRREARLARRQTERRTRRMGKVARRLQQAGLLPDGPIDAGEQRLKFFTELDRAIASRYLSAVPEGSPERRRLAHVIPYKVRAAALDERLEPHEIGRALYNLAHRRGFLSNRRAPLKTDEKPGVVKENITKLGEEMRKAGARTLGEYFAGLDPEKERIRARWTSRKMYLEEFERIWEKQSEFHPSVLTDEFKNELHRAIFYQRPLKSQKGRIGECQFERGHRRAPMASLEFQRFRMLQKVNDLLAVSKTDGVVRALTSDERDKLIAELDTKDKVTFGRVRTLLGLRGWTFNLESGGEKSLIGNKTAAALANFFGARWSAFSDADRERIIGDVRSIQKEETLKRRGMEVWALDEGAAEALSNVRLEDGYCGLSRKALRKILPSLEGGQSYSKVVKDVYGERERPVLEYLPSVNQSGIVVLNPAVRRALTELRKVVNAIIREHGKPDKIRIELARDLRQPRKERKQRSDRMRSNEAARNEARRRILQETGDSSPSRTDILKVQLADECNWECPYTGRQINWATLLGAEPQFDIEHIIPYHRCLDDSFVNKTLCEVAENRNVKKNRTPFEAYAGTEHWEEIVQRVTEFQGRLGSEKLARFCLEDLTEFEDFSSRLLNDTRYTSTLAADYLACLYGGLWDARAIRRIHATKGGITAQLRNAWKLNGILGDGPGKSRDDHRHHAVDAIVVALTDANMVKRLSGAAQRSFAKGERRWWNYVDEPWEGFLGHATGAIDGIVVSHRVSRKVTGPIHEETYYAHKEGSAYVHVRKALKDLSKKEIEDIVDDRVRECVRDKLAGGDPRKAFKLPENEPVMLARDGRQIPIHRVRIRKKASVETVGKGVRQRHVLTGSNHQVEIVETTDAKGSVRWKGYVVTTYEAMRRLKNGEPIVRRHHGAREKFLFSLALKDAVRMEGKDGDYIIWRVSTISEFTNGTVQLCFVPNADARPVTKIPREGRTRTPDKMREARCEKIAVTPLGEVRRAND

SEQ ID NO: 5181 - protein, 1230 aa, unidentified
  REGION 1..1230: note = Description of Unknown: Cas Enzyme sequence
MSKKILGLDPGIASIGWAVVQQADSEEEKSAILDAGVVKVDFDNFAVQRPDGTVSDTGKMEEMFRRGFTVSPNLVRRQARQARRRLQHYKQRRDELIRLLTANGFITNETALNETGIDTTHQTYALRSKAVTEEVSLEDLARVLLMINKSRGYKSSRKGEGDDTDYLKALTERSQILVERDITVGQYLYEMLSQHPLKGIKNQTFYRKDYEDEFERIWSCQMRFHKELTKKLKRQIRDKVIFFQRPIESKKGEIAFCPFESHQVIVDGRFYTTGSKVCPISSPVFQEFRMWQRLNDLIVTDLVSGEKRSLTMKEKESLALELSIRKEMTKTAVVRHLYGKAIKTVELNFDTLIGNDTAARVYKACLEVIKLSGHELDFKKMSSKEIVDAIGEIFTMMGFKSEVLTDEVQFYRLWHLIYSFPGDSSRTGQETLVKSIRLFFNFDCDEQAEKVAGIRFADGYGGLSSKAIGKILPKMRDGLQYSDACLAAGYIHSVRSLSKEEMETKELAAAVQVIPHNSLRNPLVERILNKMACTINAVMAKHGQFDEIHIELPRELCASAEKRARETMAIDRNTKEKAKCEEELKVKLKEMGFPVTYVSRNDILKYRLYKELAANGYRTLYSNTPIDLKELILGKCFDQEHIIPKALRMENGYSNLTIEKTSVNLKKGKRTALDFVQEEYGDAAAELYKQRVNDLYVQKAISKGKRDNLFRTSADIPANPLDRDLGLTRYITKKAVELLEPVTRKVLVTTGSVTSRLREDWRLVDVLKDTVLGKYHAMGLTDTYQDKDGQKVERIREDVWSKRNDHRNHAMDAITVAFTSQTHIHYLNSLSSLGEGREQLLHMRQKYLHKDGQGNWVFNPPMPLDEMRLSAREIIESIYISHPLPKKDVATFTKYKQHGLVRYGLTPRGKLHDATIYGRKEFAVVSSCKVDKSFDKVKIETVTNPRYRTALMTRLQEYGGDAKTAFTGKNSLEANPIWIDKYHGSAVPMEVKCMTKKCIFTKRVPVNEDLNIEKVLDGKILAILKARLKEFGGDSKKAFGNIAENPIWYNREKGICIKSVIVEADLNDAVPIHQDENGRAIDFVKPNNNSHADIYVDAKGTLREKVVSFISAVKQKTKGVHDEVPEGWKHLFSIRRNEYFVLPDKDFNPLEINLEDPANRKLVARHLFIVTGISSNDYKLRLHCDASSGKVKELKGVTFERFKSLSKFLGCVKVEVDKSGNLKVLQKFVL

SEQ ID NO: 5182 - protein, 1105 aa, unidentified
  REGION 1..1105: note = Description of Unknown: Cas Enzyme sequence
MSITLGLDLGPNSVGWALINDEDQCVVDLGVRVFPEGVDNFDSGKEKPRNEDRRDARTMRRQIRRRAERRKRLRDTLIDVGLFPKDVTQQDALYQLDPYALRKKALDEAITLHELGRVLLHLNQRRGFRSNRKGERKDSEVKGMLAEISDLEKAIEAEGCRTLGEYLHRKLEAMDHTKRDPDEEDRIRCRHTSRKLYMDEFAAIWESQTKHHGKKLTEQLAFGKLGRLNDIHKPIAKGDPRRNGATDLASFGLFGMIFFHRTLKPVPKEIVGICEYEPKQRRCPKADRQAQKFRLFQEVNNLRLIDETQSPPVDRKLNEQERQLVIANLLKTKEATFDQLRKWVGSLPDSPAPEQIRFNLEQGKRKKMQGMITDALMAVGGNKQIIGKAWWDIPEDTKDGIITELIHSLDDDLTHEILVTKFSLTNAQADAALGLDFQAGPTQGYMNVSRMAIDKLLPHLEKGMRLMGNDQSDSALHAAGYMRRDQLQRRVFDKLPDPARSRDARIGDIPNPVVKRTLVELRKVVNAIIREHGKPDHVHVEMTREVRQGPKARSETSTRIREAEARRDKAKQFLSDHNEAYGTRGGNILKVLLWEQQNHSCAYCGNKISQSQLFNHGQVEIDHIFPYARSLDDSQLNKVVSHRKCNADKGSQTPYEWLAHHDPNRHETICQHALSLVKQGDFPYQKYKRFTQKTLELDDFVARQLTATGYIAKATVEYLKCLFEQEHAVLGLKGQLTAELRRQWGLNDVLRDDGVNKKSRDDHRHHAVDAVVIAMTNRSRLQTLAKGSAEVENVDRETGEVKYRQAYIGKRIDAPWESFRDDVVKQIKHLDGQDHGEKYRRGVSHRAQRKIRGALHEETIYSPTEQHGVFVIRKPLDSLSLNEVAQIRDEGIKRIIIKRLEEHGIQAGRNKKVDSKTIKAALCSKEHPLTMPSGVPIKKVRVFRNEQTIAPIRTKRSKAQDNLDLIAHVKPGSTHHMCIFEWKDAKGKNKRDGVWVTMLEATKRKINRQPIIQRQPPADHPTIPQDAAFVMSLSSGEMVLATLRDGTEELLKYKTSASTQGQIYFARAVDARKSGEQEKIAFTCNTLKAKKISVDLLGCIRRAND

SEQ ID NO: 5183 - protein, 1017 aa, unidentified
  REGION 1..1017: note = Description of Unknown: Cas Enzyme sequence
MAKTVLGIDLGPTSIGWALLEKEDGKEKSILGVGSRIFQEGVERSAKGEEKSKNKERQEARSARRVKQRRRMRKELLIKRCKKSGLLPKNENDLEKLLEIDPYFLRAKALDKKVKLHELGRALFHLNQRRGFKSNRKSGKDSDSGKIKKGITELQGEIEKTKSRTLGEYLCKIENSQKEENRLTDLLLGEIRIRNRYTLRAMYADEFNQIWESQKRFHPKVLTKALKVKIDDAIFFQRPLKPKDHLIGRCDLEPEEPRCPKADWAAQQFRIIKEVNNLIIVNRDGSEQQLTDSQRETIVSMLTTSKQKAFSVIKKKFEMLSNQTFNLEKGGRDKLLGNTIDAKLASVFGAKPWAKMEEKEKNELRDHIGHIEDPEELEAYLAEKWKLKEEMIEALEKVDLPSGYMSFSKKALLKIIPLLVEGKNEFDAVTELYPNWRETKLDYNEKLPQLSPGDIRNPIVYRALTEVRKVINAIIRKYGRPDTIYVELAREMKGNADDRKDAFFKMRDNEKENEKAKKIIKDYVEYPRMKDVVKYKLWRDQEGICVYSGKAIPQESIFTNDIEVDHILPYSRSLDDSYMNKVVCWVKANRDKGNRTPREWLKGNEVKWEKMLQRNASFEKMPRNKKRKFKQKEIMISKDEKGKIVVDTFIQRQLNDTRYISRLVVSYLQTLFPIEEQKKRKTVQATRGQLTGELRRQWQLNRILNPLAANIKSREDHRHHAVDAIVIACSTAHHMRVLATREKYKLVKKHIPAPWENFRGDVANAVNEINVSFRVKRKIAGQLHEETNYGHISENNFVYRVPLTSLTGAMVKKIRDDEIRRLVIERCKEKGVDPKKINSKVFPSDEPLRMKSGVIVKKVRITKTLGKSRLPFKDRDGKVFRHAKLGSNHHIEILKTKDKKGKIKYDGVVVTTFEANRRAKNREPIIQRDHGPDKKFVFSLSINESVMIKTDDGKHHLYRIQKIAHNDIALRPNTYAGVVKNSDKWPIFSRKTPNALMKMDAFKVTVGPLGEVNVAND

SEQ ID NO: 5184 - protein, 1095 aa, unidentified
  REGION 1..1095: note = Description of Unknown: Cas Enzyme sequence
MKYIIGLDIGIGSVGWAVVRNDDDCKRLEDFGVRIFESGEIIESNKNIRNSQRRRKYRGMRRRIRRRNHRKERLKNYLENIEFVSRAELSEFFAKNNHDIIDIRVRALDEMVTPVELTAALLHIAKRRGYKAFYELSDENNNAKDKKAKEEEEKDIYKALTNTADVIKNGGYRSIAEAIMKDSEHFSDKISGRYKYRNIKEKDEKGKKKSDGKISENDILFPTEMFEDEVRKILGKQKEFYPQLTDESIDKIFDIIFSRRDFEDGPGNTDDENRPYKGFVDSIGNCPYYKNEKRGHRYTVIGDLFALANKLSQYKYVEKNTGEVVKLPRDLMRNIVNQSLQSGSITKTKINELAKELNIVILNTKTAKNENIADCIKYLKAVKPIFESYGFDWDKLISEEYTDQNSLLNRVGDTISFNITPKRRIDALNKIDELKGKDELIKKLSKQNFSGTAKVSDKYMIDAINAFFDGTLVGEFQANVQQDEFSVSIKTEKLLKLKPFDNNSEYAQNPVVFRAINETRKVVNAIVQKYGAPNAMNIEIASELNKSFDTRQKISTQQNKNEKERKNAIKQISLITGLDEREIRPQYIERYLLGELQGWRCMYSNEEITNKKEAILNKGKQYEIDHIVPFSRILDDTLNNKALVLARENQKKGARTPLMYLSAEKEKEFKQRVNKLFKGNKITEKKYRYFMLESLVGEDAEKILGDWKTRNLNDTRYIAKFLVKYFNDNLYFAREKGDDKRPVVYAVKGAITSSLRRQWLNKETWGRYDKGELKKITYFDHAVDAIVIANCLPAYVIIAAENHKLRDIYYSAGKIKTEEYRKSLDNCVDTLMKYYGMSPAVSRKLLEKVKETPSLLKNIRFEVEYRVRDYELMKYFFNYDTKVGEDTLDQIFRNDLYKIYDHQFADSIEMPIVSIKPERKYSGQMVKDGFIKKKDAISGKNSVKTIGENNSTVLNDSRFYCVDVYRTCNDETNLNFIKYTDLLKRNNHLYLRSDYRYPDDYAMHEMYLFYGDYIEITKKNKICCGYYFSLKNSSRNELYMSKGNTRRKLNNVKENEVCSITKKDTVKKFEIDILGKKLGEVKKYGEPLSLLPEKN

SEQ ID NO: 5185 - protein, 1231 aa, unidentified
  REGION 1..1231: note = Description of Unknown: Cas Enzyme sequence
MITRILGLDTGTNSLAWAVVDRDANGNYTLVKRGDVIFSEGVKIEKGKESSKAAERTGHKSLRVQYARRRLRKIDTLKVLVSLDLCPYLSDEQLSQWKAKKTYPLTDDFMLWQRSGSAEENNPYYCRHRCLTQKLDLTDQSQRFLLGRAFYHLAQRRGFLSNRLDTSADSEESGKVKSGIAQLSVEMEKAGCHYLGEYFYQLYRQHGNTVRLRSRYTDREEHYKKEFFAICEKQELDAQWVEKLQSALYFQRPLKSQRKGVGKCTFEPKKPRCAESHPDYEAFRMLCILNNIKIKTPNDTSLRPLNAQEREKIWPLFFRKSKPNFDFEDIAKALAGKNNYAWIKEADERPYKFNYRMHQGVSGCPVTAQLIDIFGSDWKAGIAETYTAVGKKNGTKTIDEMADDVWNVLYSFSSKDKLKAFATEKLQLDEASATKFANAKLPHGFAALSLKAIRNILPFLRQGFIYAHAVHLAKIPDIVTKAVWNDAHKREQILSGLMEIIENYNPKDRGVEGTIDFCIKSHLQDVVDLRPGAADALYHPSMIEAYPDAKLNKMGMFQLGSPRTNAIRNPMAMRSLHILRSVVNQLLRDGTIDRDTEVHVEYARELNDANKRKAIADYQREQEKKRKQYRDDIITLYKSECHKEIEPTDTDILKFQLWEEQNHLCLYTGTQIGICDFLGDNPKFDIEHTIPRSVGGDSTQMNLTLCDATFNRQVKGARLPSQLTNHADILKRIAPWKSKCEDLRKKIDKIRTFSGMAKEKKDSQIQKRHRQKMELDYWQGKYERFTMTEVPEGFSRRQGAGIGLVSKYAGLFLKSLFHSAGNPNRSNVYVVKGVTTAEFRRMWGLQGEYEKKSRLNHCHHCIDAITIACIGKDEYDKMAQYYHDEEVSRWHGSAGKPHFKKPWPTFTKDVLALEQSLLVKHLTKDNMPKQAKRRVRTAKGKHLAQGDAARGSLHKDTYYGAIEQEGEIRYVLRKPISKFEKESELENIVDQAVKEKIKAAVAGKNFKAAITEPIFMNKEKGIRINKVRCYVKAKERLKIRQQRDLSTKEYKQFFCVENENNYLLAIYEGEVKGKKERDFCVVNNLDAAAYLKRSNKGKAAPLVPERSAERNLPLLAVLQRGTQVLFYEDSPEEILFDNPQDLVRRLYKVVGINTKRDVKKGKTYLYGNIELRFHQNAQKKDDVKMESGGYKNNEAPHQGIVLSHNQFKALVEGVDFEFNILGEIKKKEHHA

SEQ ID NO: 5186 - protein, 1231 aa, unidentified
  REGION 1..1231: note = Description of Unknown: Cas Enzyme sequence
MITRILGLDTGTNSLAWAVVDRDANGNYTLVKRGDVIFSEGVKIEKGKESSKAAERTGHKSSRVQYARRRLRKIDTLKVLVSLDLCPYLSDEQLSLWKAKKTYPLTDDFMLWQRSGSAEENNPYYCRYRCLTQKLDLTDQSQRFLLGRAFYHLAQRRGFLSNRLDTTADSEESGKVKSGIAQLSVEMEKAGCTFLGEYFYQLYKQHGNTVRPRSRYTDREEHYIKEFLAICEKQELDAQWVEKLQSALYFQRPLKSQRKGVGKCTFEPKKPRCAESHPDYEAFRMLCILNNIKIKTPNDTSLRPLNAQEREKIWPLFFRKSKPNFDFEDIAKALAGKNNYAWIKDAGEKPYKFNYRMHQGVSGCPVTAQLIDIFGSDWKPGIAETYTAAGKKNGTKTIDEMADDVWNVLYSFSSKDKLKAFATEKLQLDEARATKFANAKLPHGFAALSLKAIRNILPFLRQGFIYAHAVLLAKIPDIVTKAVWDDAHKREQILSGLLEIIENYNPKDRGVEGTIDFCIKSHLQDVVDLRPGAADALYHPSMIEAYPDAKLNKMGVFQLGSPRTNAIRNPMAMRSLHILRSVVNQLLRDGVIDRDTEVHVEYARELNDANKRKAIADYQKDIERKRADYRKRIVEEYKNKCHKEIEPTETDILKYQLWEEQNHRCLYTNGEIGICDFLGDNPKFDIEHTIPRSVGGDSTQMNLTLCDATFNRQVKGARLPSQLTNHADILKRIALWKSKCEDLRKKLDKIRTFSGMAKEKKDSQIQKRHRLKMELSYWQGKYERFTMTEVPEGFSRRQGAGIGLISKYAGLFLKSLFHSAVNPNKSNVYMVKGVITAEFRRMWELQGEYEKKSRLNHCHHCIDAITIACIGEAEYQKMAQYYHDEEMSRWHGSANKPQFKKPWPTFTKDVLALEQSLLVKHLTKDNMPKQAKRRVRTAKGKHLAQGDAARGSLHKDTYYGIVEKDGKLYHVLRKPIDKFKKESELENIVDQAVKEKIKAAVAGKNFKAAISEPIFMNKEKGIRINKVRCYVKAQERLKIRQQRDLSTKEYKQFFCVENENNYLLAIYEGEVKGKKERDFCVVNNLDAAAYLKRSNKGKAAPLVPERSAERNLPLLAVLQRGTQVLFYEDSPEEILFDKPQDLVRRLYKVVGINTKRDVKKGKTYLYGNIELRFHQNAQKKDDVKLESGGYKNNEAPHQGIVLSHNQFKALVEGIDFEFNILGEIKKKEHHA

SEQ ID NO: 5187 - protein, 1236 aa, unidentified
  REGION 1..1236: note = Description of Unknown: Cas Enzyme sequence
MEKKILGLDLGSTSIGWALIKESDDNRREVIRMGCRIIPLDIDEKNSFEQGKSFTKNQERRKFRTMRRNNFRYKLRRAYLLQELKEHGMWDENLLHIAREQLWELRAKAVTEKISLTELGRVLYHLNQRRGFKSGSKHDLGDEDATKTQKEMLSKFQQLKNEGKTIGQKFYDEIKANPHYRVKEQTYPREAYMEEYNAIMSCQQKFYPEVLTDNFIHKLRDQIIFYQRPLKSQKKLVSICEFEGKWIKNKDGETIFIGPRVAPRSSPLFQYERIWEVLNNIEIGGEKLSLDVKKTLFSQLYEGKDLNSSDIKKLLGTDKYVNFSKIPGNTTYLKLKKILSGTAFQQLLQFDVEKHIIDYEFIQPETGEVQQKKIVAETIIQEPLYQLWHTIYAISDVEECKKALIKKFNLPEEIAQKLAEIDFVKDGYGNKSAKAIRKLLPYLMEGKQFKDAESEAGYRIQPIPEIKDKLDLLPKNSLRQPIVEKILNQLIHVVNQIIDPAEGLVTPEERKNGQFEIRIELARELKASKKEREKILEKIKKNEESNKYIAEKLVKEYNLPPNRKNITKWKLYHVVDLKESKSKKDNKKFSNEASELNGICLYCGKPFSLTEALTGENIDVDHIIPRAVYFDDSLDNKILVHSQCNRDKGNQTAYDYMKSKGEEALKLYIERVEKLYKIDEKKYEKKHKYLLMPSENIPEDFLNRDLRETAYISRKAKEILQSITANQIQVTSGAVTGKLRHLWGWNNILSDDESNESIETNIADETQSNSEDLTENQTTPTKKKRDDHRHHAIDALVIACTKQGFIQRINTLSSQETQQQIREELKNTQVKLDAYENRLSLLEKYLISQKPFETHEVKKHVERILISSKPGKKVATWSKNIYPSGKIQKVLTPRGKLHDETYYGEIKVPISKTIEGIFSDYEKDPGILENIISPKLRELIEKRLADYNYDAKKAKKSLKQQPIYVDEEKKNKLEYVLCYETKFVYKIPVENILKDTKKLKNVVDAKVKEILANISKDTNKGKESVLYFNPDKQIPIRSVRIEAWFEYTPLYPNKENTPYVMPDNNHHIAIYRDEQGNLQELVCTFWQAVQRKLYGFPVIITDPAQLPKLISEAKEKLKDKGKDLPETFTKALPNPSWTFLFSMQSGEHFILELDHEQAKQWIAEKAYDKLSPFVYRVQKLSKKYYLFAHHTKTTADLDPKKSRRVSSLKALKSKKPIKIHLNVLGDIDHYELIKFE

SEQ ID NO: 5188 - protein, 1157 aa, unidentified
  REGION 1..1157: note = Description of Unknown: Cas Enzyme sequence
MKRVLGLDIGVGSIGFSLLDVLEKDGITEFKNIVTNSIVFDVPELAEERRKGRSSRKLNDRKSRRKQHIRNLFFEHGLTDKSFVTEPSSYLNALDVESDVYILREKALHHDLSKAEFVKAIYSITTRRGYSNQFEPTEQDENSAKENEKINGSISKNIQLIKEKGFILPTELLTFRRTQKEKQGFQNIPVRNKGGNYTNSLNRKLHEDELKIVIFSQKDNKSIFSSEEKYEKFYIAVRDVMMEQRPLKSFEEMVAYCSYFDKYHESPQKRMSLSSLYNIELTLKQSLSNYKTINKKSGEILPLSKKQIDEIVAKWINEPTSDKITFANIFTKTSLKNCKLNDVGGSAEVLNIKGFRELSAIFKQYNVDFYTEYRDFFEKALLILSYYKNISKRVEELQKSFSGKFEPKNEFINEIAKVSSIDGFGSFSVRFAKMVLEKMEQGNIFSEALENLDYFDKYLGMPAYDYLPPFNPTQADIKWLKKDLPYFDTKHLYYKANNSKTVERIISVMRKLINDIIKKYGKIDEISIEGGKELNSKKEEDKIKENQKVDKKINDAARALLKSNDIKDYNHPKKINKAKMFIEQNEKCFYSGISLTLQDALDEEICEVEHFIPRSHFWNNSQKNRILVLKKHNQNKTNIPPIEYLKQIGKWEIFKAFVMNSSMKESKKEWLTNEEKIASIFDQDTNIFLANYLNDTRSSIKIIKNYLEHYLYPKTNRYGKDDHSYIRVVSAKAINELKYIWGIKELIASEDTGKKDRTTNYHHSIDALAVALCDKKGMYALHNFFKQKENKFKTKSMKENVAKNVPFTSEGETLHSFCSHLVEKYKNNELYVCPYNKVKTNKKGFKDGNKKLIVAENSKGVEQLQELKNISLLPYDLLQDKKQLKVTDRTDEGVRRYVQEIVSQLDVSKQKGIREALPKYGEFLIAKRAEEEKLSVLEKKLVNKQKTDKKKEDVELSNQINKIKLQFQSVRSEIALSNCYFVTKKGTKQIVKCVKHLSDSETHASTVLIQNGNSITMKKLNIETFQQAQEDTHPFVCKDNDYTVSVDIYSSSKHQIIGLKYFRSIKNDIKPNFKESFQNIDKQYEFSIYKGEIIAILDEKDKVQYLAIANGGGNIAGTNHKIQIENINTNGVVAVTINKKTIIKKAKIDFYGNFQIG

SEQ ID NO: 5189 - protein, 1361 aa, unidentified
  REGION 1..1361: note = Description of Unknown: Cas Enzyme sequence
MENNNELIVGLDIGSNSVGWAVVEMKGNDLKKLHGMGSRIIPSNDDTRNFEQGKAQTRNADRRRYRSMRRNNQRYKLRRANLVKVLKLIGAWPDKLGEPLTTASPMLTALELYGLRASAVEKAINLQDLGRVLYHMNQRRGYKDIGDLMDELKGQDNKAEEKESGTTTEVKKVKVLSWSVEDAKGKKEILRVEVDHEGEVISGTTTHTSFKEVEGQELYIQIKTKQTSKGPSTTFYRVNVSDWLKGKDELDKKLEESGLHPGQYFHRELVENPSQPPRFRERVVLRERYRAEFDAIWKRQVDAHPELKESALRDRVLETLIPRNLSLRSQWASKELGTILRDFVIYYQRQLKSQAANKGECRFERKPVAPVSSPVYQLFRIWQQVNNIKLRDKYMREVPLTPEQRLDVVSQTMEQEKITEGGLLQKLKLKKSGKEWNLRADLPGHITLTKLRKVLGEHPSWEQLVAQAQDVHALEGTLLFKLWHVLYATPEFEHRKGAVKKLLDLDDATAEALARVRFERKHGAVSSRAAGRIAQLMVCGPSWSETNWPPGLQKRVQHVIDHRGSEDMKQEMRDAVTGLTSIEQFQGLPYWLAASVAYGDHRARSGERLNAPEDIRSMPRGFLRNPTVEQVVNEALMVVRDIWKDLLSGERPTSFRIELARELRQSIGEREKATANNRTREAARKKVVERLQEDFGKARPTGKDIERYELWEQQKHQCMYSGKPIEASQLFSRETDVDHIIPKTLFYDDSLTNKVLCLRTENAAKGNALGAVYMKSKGETAFEQYVKRINDLELSFGKRKKLMATEVPESFIARQMNETRYIGTELRKLLERIAPVNTSVGQVTDALKNEWGLTAVYKEVLLPRFRRLEGIVGRELITELHRTNGATHTDYRIEGYDKRIDHRHHALDALVVALTRQKYIQKVAQLKQKGDPLSEEERAGGLTWWPLPHRELRQLVKDQLERTIPSIKNRQRLVTKTSNRTAYLDPATGVVRTGRKGRPQVMPDGKRLLAVRGKLHEEQPMGEVRRQERMPIDKVFKRLAEISGKEGPLHEIRPIAKGEPGYNTRFLSHEREREWLHERLAKFNGDTKAALKAWKKYPPRKWSKKKKAEVDVMELTVLVPYYVSTQAVGGLSTKMMTKVLDTGVARALDAHVAAHNGDHELALTDDGLTQLNDGRTMPLKRVRIKKHDTPVWDTDGHRQLLRPGSSNERLHIKMGENYALAVHVHEETGVRAFDIIPFYDAVLRTREGLPLYEPRPWHRTFLLRKKDPVYVPRPGEQLRDIPWADQEAIWERLYMTVKFSGDAHYFIHTSVSAIADGFEAKEFGSQNCTVFEDRDDPRTKISHVAIPVKVDRLGRVSPLWQ

SEQ ID NO: 5190 - protein, 1220 aa, unidentified
  REGION 1..1220: note = Description of Unknown: Cas Enzyme sequence
MKKILGLDPGIASVGWAVVQMAEEASEKSGILDAGVVKVDFDNFAYQKPDGMISSTGKIDELYRKGVTVSPNLVRRQARQARRRLQHYQQRREQLVKLLMANGFITADTPLNEEGKDTTYQTHALRAKAVTEAVTLEELAKVLLMINKSRGYKSTRKGENDGEDGKYLAAITERSQVLLERDLTVGQYLYEMLTQHPLKGIKNQTFYRKDYEDEFEKIWSCQMKFHKELTKKLKKQIRDKVIFFQRPIESKKGDVGFCQLESREVVVNGKTYTTGSRVIPTSSPLYQEFRMWQRLNDVAIKNIMTGEVRHLTQEEKERLAAELSIRKEMPKTAVIRLLYGKAIKSVELNFDSLIGNDTAARIYKACLEVIKLSGHELDTKKMSSAAVIAAVQDIFGMLGYRTVALTDAGEFAKLWHLIYSFPGDSSRSGHDTLTAHIKQLFNFDSADQAEKLANIIFADGYGNLSSKAIKKILPKMKEGLQYSDACLAAGYNHSVRSVTKEENENRELSATVTPIPHNSLRNPLVERILNKMVYTINAVMAKHGQFDEIHIELPRELCSNAEKRSKDTAAIDRNTKDKEKAEQELKEKLAEMGYPVTYVSPNDVLKYRLYKELAANGYRTLYSDTLIDLKELILGRGFDKEHIIPKALRLDNGFSNLTIEKTDINLKKSKQTALDFVQEEYGDAAAEQYRQRVIDLLEKKAISKAKHDNLLRTVAEIPANPLDRDLNLTRYITKKAVELLEPVTRKVLVTTGAVTVKLREDWKLVDVLKEMVFEKYQELGLTEKFTDKEGKVVERIREDVWSKRNDHRNHAMDAITVAFTTQSMIHYINSLSSQGEGREQIFHMRQKYLHKDGKGNWIFNSPMPIDEMRKVAKQVLENIFVIHPTPKVAPVTRNKGTLVPRGKLHDATFYGRKKKEVISFEKVDKSFTEEKISTVTNPKYKTALMARLQEFGGDAKLAFTGKNSLEKNPIWLDKFYSAAVPLKVKCMTTKHVYTKRVTVNENLNVEKVLDEGIKAILKARLQAFNGKTKEAFANLEENPIWMNEEKGIAIKSVIVETDLKDLTPLHRKEDGTAKDFVKPNCNNHADIYVDGQGELHDNVVSFFDAVKENKLPVNENWRYFFSIKRNEYFVMPGKDFNPLEIDLEDSRNRSLVAKHLFVVQKMSSGDYLLRLHNDTSSGTVKELKDITSMRITSLSKFIGCVKVSIDKSGDLNVLQKIVIE

SEQ ID NO: 5191 - protein, 1372 aa, unidentified
  REGION 1..1372: note = Description of Unknown: Cas Enzyme sequence
MRKILGLDLGTTSIGWSLVQEAENNQETSKIIKLGVRVNPISTEERTDFEKGKSISINADRTAKRGARRNLQRFKLRRENLIEILLHEKIIDRHTPLTEIGSGSTHETLQLRSKAASEQISLEEFARVLFAINKKRGYKSSRKAQNDEEGAAIDGMSVAKELYDRNMTPGQYVLELLEKGKKHIPDFYQSDLRAEFDTVWNFQKQFYPEVFTDDFYKSLEGQGQQNTRKRFLKIHEIYTAENKGKKDAVRLQHYQWRADAISKQLSLPEVAYVLVEINNNLNNSSGYLGAISDRSKALFFNKETVGQYLYKQIQENPHASLKNQVFYRQDYLDEFEQIWETQAIFYPQLTKELKEEVRDVVIFYQRKLKSQKHLISECEFEKHHKVIPKSSPLFQEFKIWQVLNNIQFKNLETKEIRLPSDELKEELFEELNIKGDLKSDVILKLAGLSKKIWKLNYTEGLPGNTTNKILYDAYRKIAENEGYGFDWEKKSSTEIKEEVHQTFKSIGVDTNILAFDAEIDGNDFDKQTSYQFWHLLYSAEDEGSISEEDQLQYGNSGVALKKKLHKKYGFEPEYAKMIANVTFSKDHGNVSAKAIKKILPYLKAGHTYSKACEYAGYRHSFSFTKEELENRPLEDRLELVKKNSLRNPVVEKILNQMVNLVNQIIETYGKPDEIRLELARELKKSAKEREEATKYINATKRRHEEIRKILAAEFGIPYASRNDIIRYRLYEELRQNGHKTLYTNRYIPKEKLFTNEIEIEHIIPRAKLFDDSFSNKTLAYSQPNKDKGNRTAYDYIESTFVSDVENYKARATTLYKMKEISRAKYNKLLMKESELPDDFIERDLRNSQYIARKSKEILLTAIRRVNTTTGKITDKLREDWGLINVMKELNLPKYRALGLTEIQERRNGKKIEQIVDWTKRNDHRHHAMDALAVAFTTYNHVNYLNYINAARFEKNQNLHAVRNKITEVVISKNGNKKRKFKSPLPNFRAEAKKHLEEILVSFKAKNKVVTKNKNRTQLKGKSQFQEVEQLTPRGQLHKETVYAGRQRSVVTMEKISSKFDLEKIQQVTKPIYREALLKRYVENDRDSKKAFSGKNSLTKNPVILPNGKLLPEKVKLHSLETVFTIRKSVNPENFKNLKSLQKVMDVGIRRILEKRLEDFDGNAKEAFSDLEKNPIWLNEEKGIAIKNVAISGVSNAVVLHTKKDHYGNVILNKNGKEIPADFVSTGNNHHVAIYRDQNGKLQENVVSFYEAIERANQKLSIIDKDYKKEEGLEFLFTMKINEMFVFPSEEFNPLEVDLYDSKSATLISKHLFRVQKIALKDYVFRHHLETTVETKRELKDQTYKRLQSTSSLEGVIKVRINHLGEIVHIGEY

SEQ ID NO: 5192 - protein, 1466 aa, unidentified
  REGION 1..1466: note = Description of Unknown: Cas Enzyme sequence
MIKNILGLDLGTNSIGWALIKQNFENKYGEILGMGSRIIPMSQDVLGEFGKGNSVSQTAARTDYRGVRRLRERFLLRRERLHRVLNVLNFLPEHYASQIDFKKRFGKFKEETEPKLAYNNDGFIFKNSFEEMLTDFKNHQPQLLANNKKIPYDWTIYYLRKKALYHKIQKEELAWILLNFNQKRGYYQLRGEDFEDEKNKVFVRLKVDRIVDSGENIKGKILYDVYFENGWKYEKQIVKTEDWIGRTKEFIVTESILKNGDIKRTFKAVDSENDWIAIKTMTEQEIDKSHQTVGTYIYEALLQNPKQKIKGKLVRTIERKFYKEELKQILEKQKEFHHELQNDDLYNDCVRELYRNNESHQLTLSKKEFVHLFMDDIIFYQRPLRSQKSSISNCTLEFRKYRDENGVEHTQFLKAIPKSNPYYQEFRIWQWIFNLNIYKKDDDSNVTKEFLNTIEDFENLFEFLNNRKEIEQKPLLKFLLEQKDFKGKLLSAEIEKYRWNYVEDKKYPCNETRTMILSRLDKVENISIDFLTREFEQKIWHIIYSVNDKIEYEKALKTFAVKNNLDENSFLEVFRKFPPFKSEYGSFSEKAIKKLLPLMRLGKYWEYENINEHSKDRIQKIITGEFDENIKNRVREKSTHLKVENDFQGLQLWLAQYIVYGRHSEASMIGKWNSADDLEKFLNEFKQHSLRNPIVEQVITETLRVVKDIWLKYGKGAKDFFSEIHIELGREMKQTKDERADTTKRITENENTNLRIKALLAEMMNDNSVENVRPYSPMQHEILKIYEDGILRSDIEIDDDILKISKTAQPSSSDLKRYKLWLEQRYKSPYTGQIIPLNKLFTPEYEIEHIIPQSRYFDDSFNNKIICESAVNKLKDNYIGLGFIKQFGGTMVECGFGRSVKVFEAGEYEDFVKKHYANNRGKRSKLLLEDIPDKMIERQMNDTRHISKYISGVLSNIVRVEDGTDEGVNSKNVVSGNGKITSQLKQDWGLNDVWNELILPRFERMNQLTNSTDFTTWNENYQKFLPTVPVEFSKGFSKKRIDHRHHALDALVIACATKDHVNLLNNQSAKSDTKRYDLKKKLMKFEKSVYNHPQTNERIEREVPKHFLKPWENFTVEAKNNLEKIIVSFKQNLRVINKATNHYEKYVEKDGVKIKERVEQTGTNWAIRKPMHKEFVYAKVNLPWVKVSGKEILTAIRKPLDISFDEKKISNSITDTGIQKILLAHLKKYKGTLDDKGKEIAPEILAFTPEAIEEMNKNIIELNDGIFHQPIFKVRVFEKGTGRFSIGQSGNKKNKYVEAAKGTNLFFAIYEDKSGKRSYETIPLNEVIERQKQGLNSVPLENKKGHKLLFHLSPNDLVYVPEEGEFTGRVFNLNDLNKEQIKRIYKVEKTSGTECYFVRQDIAFLIKQYDAKTKIGELESQNKLQVTMSEDRTKIADVCLKIDCDRLGDINILTKEKIKKMFDEYR

SEQ ID NO: 5193 - protein, 1358 aa, unidentified
  REGION 1..1358: note = Description of Unknown: Cas Enzyme sequence
MKKILGLDLGTNSIGWALVEEAEKADEKSSIIKLGVRVNPLTVDEKQNFEKGKSITTNADRTLKRSMRRNLQRYKLRRENLIEILKESYFITDETILSENGNHTTFETYRLRAKAATEEITLEQFSRVLLQINKKRGYKSSRKSKGTEEGQLIDGMDVAKKMYNENITPGQLCLQLLQSEKKHLPDFYRSDLQAEFDKIWAKQAEYYPDILTDDLHNELRGKKREAVYAICLKNFVWKEKHIEWNNDEACNIQVEKEHTIVGFKRNGNTNDQKLENLQWRVKGLSEKLQLEELVVVLQEINTKINGSSGYLGAISDRSKELFFNKQTVGQYQMQVLDENPNASLRNMVFYRQDYLDEFNTIWETQASLRGKNNPSNPFTDELKSEIRDVIIFFQRRLKSQKGLISFCEFESRNIEVEIDGKKKTKIVGSKVIPHSSPLFQEFKIWQVLNNLVVSGKDRKSKKTKENTARSFAEQEETMQIYRNRELYQEEKEILAHELSIKEKLTKAEVLKLLFDNPQELDLNFQSIQGNLTTATLFKAYQTIVEHSGHELDLKKSADKIIEDTKKIFEGLGFNTGILSFNPEAKNLDKEPLYNLWHLLYSFEGDNSKTGNANLINKIMTDYGFDRESASILANVTFQGDYGSLSAKAIRKILPYLREGKKYDIACEYAGYRHSKSSLTKEEIENKVLVDKLTILPKNSLRNPVVEKILNQMINVINTIIDTYGKPDEIRVELARELKKNAKEREELTKSISGTTKEHEEYKMILTKPLSEGGQFGLSYVSRTDIIRYKLWKELEPLGHKTLYSNTYISPSQVFSGDFDIEHIIPQSRLFDDSFSNKTLELRSINIEKGNQTAIDYIKEKYGETGNDKSIDKYLERIQNLFKNGKISKTKYKHLTWKEEDIPEGFINRDLGNTQYITKYARTMLETMCRRVISTTGSITDELRNDWQLVDLMKELNWDKYSALGLTYYEENREGKKLGRIRDWTKRNDHRHHAMDALTVAFTKDVYIQYYNYMNAKEDKDFHYTKEQWSKMFPSLPMPEEHSNINGIKNKYFENGKALPPMPLNEFRAEAKRHLENTLISIKAKNKVITQNINITKKTGGTNKKIQLTPRGQLHLESVNGSYHKPIVKVEKSTGKKTVTFETVYTIRKAVSPDLNIDKVVDVGVRSILKKRLEEYGGDTKRAFSNLDENPIWLNKDKGISIKRVTITGISNGEPLHTKKDKDGKDILDSEGKKIPVDFISTSNNHHVAVYRIPVIDKKTGRQKINDNGNPMYELQENVVTFFEAVARRNAGLPIIEKEYKQSEGWQFLFSIKQNEYFVFPRTEKREIVEIKTGEITTVEVVTFNPNEIDLLNLIIIQR

SEQ ID NO: 5194 - protein, 1134 aa, unidentified
  REGION 1..1134: note = Description of Unknown: Cas Enzyme sequence
MTKVLGLDLGTNSIGWALVDDKDNEILGIGSRIFPEGVANLGEGEGREISKNASRTDARGTRRQFFRRRLRKRYLLRVLAKYNLCPINFELVKIWSNNEVFDDGEFKEWIRLNPYKLRAKAINEEITLTELGRIFYHLIQRRGFLSNSRSAGNDNNEEGLIFKGDAKIGKIGISETQENVTKHETLGSYLHQIQPTEFNPYQQDIERIRNRYTTRKMYIEEFEQIWEKQAIFHSELTDELKSILGGRKKDGYKEDGVLFHQRPLRSQKHLVGNCTFEPKKTKSQLSTIPFEEFRVYQWVNTVECNGRKLNDREREVLVGQLFSKEKVKFMILRKALNKADSIFQFNYKDNDNIVGTHTINQLSNKKFFGAIWYEFTEKKQEDIWHVLYFYEDRDKLKKYAIKNWGFDNDKAEKISKFNLKDGYTNLSRKAINNILPFLKLGFTYDIAVVLGGVKNAFGNDWTILGYEIRNLIIDKIFHIVRNSNKDGFIDILKDFLKEDYYLNDKQIAKLYHHSVNIEINEILDKLPVNENADKEIQNIRNPIVTVALFEIRKLVNEIIDDFGKPDQIKVELARDLKVSKTKRNEIRREQKRLEGENDRVKEELDSNGKSYSHINILKYKLWEECNKTCPYTGAKISISQLFSGEIQIEHIFPWSRSLNDSFMNKTLCFADENRLKGDLTPFEYYNKQGEEIWELKKAQALSCYKNKKGYPNAYQKFKQFIKQKHESDFISRQLNDTRYISREAKNYLSKICKDVQVSPGQMTANLRHKWGLNGILNDDNIKSRDDHRHHAVDALVMACSTRSHLQELTKWNRYNRLSEFKVYPMPWKSFRQDAQKSIDQILVSHKKNKNILTISSHKTEKKGVLYSNIGLAARGQLHNETVFGKRKAPNSLEGYHVRKPIESLTTSKHVEKVVDPIIRKLILDRVKELGGFEKGKNIPKETFYVVNKKGIVKPQIYLPNKNGQPVPVKKVRLRVNIGSAEKLKEINQYVDPRSNHHVLIYKNENGILKEDVVTFWTAVERKKLKQNVIQLPLEDENGDIVTALQINDMFLLGLKDEDINWDKPNYKLLKEHLYRVQKFTSLDYYFRKHQESKLDGNLGKAFQYIKGFGEGKTGWLTFNPIKVGITPTGKINKL

SEQ ID NO: 5195 - protein, 1161 aa, unidentified
  REGION 1..1161: note = Description of Unknown: Cas Enzyme sequence
IKKSKGLVAYMEEHNCSTVGCAFYDMEKNSIRVRANEQMQAIRSMYEDEIRQIFTFQNGLSLDSTFFKRVISRKKGEGTIFYKRPLRSQKGNVGKCTLEKNKSRCPISRPEFEQFRAWSFINNLRYKTIEDEGKAQRELPIEIREKLYEEKFVRVSNFKVADILKWLQKQDSSIAELNYDAQTTVMGSPVCARLKDILGDNWQTAELEGYNYEELWHVCFEVGDDGEEFVKDFAVTHLQADGVLLNKMMKLWGNITQDYALLSLKAIRNILKMLQEGYIYSEAVVLAKLPDLFGENWHVVKDALLAEWKGICARIEHERQIAKLTNNLIAEYKILEPEDQFAFHNTEYLLDDSDRKQVRTSVIKSLSYKYWKQLSEPAQKQLLTEVENAYQSFFRSSDRNYCAVRHLDDAMLDVVRDNFMDYVQPQYKKKIENNIDVLYHPSDVAIYAPVKAKNEKVEGIMRNIKLFKSPATNVFHNPVVMRVLYQLRNTLNKLIKDGIIDDADTSVVVETARELNSANMREAIRRYQQARERENESYRKELEQHFPSRNITQDDIDKVRLWHEQGERCIYTGVPIPDIKTLLNNDDFEVEHTIPRSISFDDSLTNKTICAFHYNRYVKKNLFPSQLPEEDYAAILERLEPWKKKIKALKKEDKDSSIVARHIRHMELRYWEDKVSRFTTQADEWKQSFRNNQLNDTRIITKYAYHFLKTVFGDVTVQRGEMTADFRKALGIQSLEEKKDRSLHSHHAIDATMLTLIPSNSKRDALLELFFQIDELKKRRETDASVQEQLELLEKQYNKLLASCDIKGAEEVPEYINQHILVQQHQKDQTLTPAHRRLRVRGKVVKKNGKERWITGDSLRGSLHQDTFYGAIAPAVRDENNKMIQDANGKILVDEEQVAFVIRVPLRHKVSSKDKGFSTWEDLEKVIVDKDLFQQLKNQYPLLSFKEACEQGLYRLDRHGNRINQIRHVRCYVPSVKNPLPIKKQTYLSDKPYKQSYWAAAGDACYLCKYQSADERYSYYKMYNLYEIGKNRSAGMEAVPRTIVNNKGIELHLVYTLRNGLNVLIYKDSPEELRNLSKEEQSKRLYVIRGFETPSRINMVYHLSAKSVQDLGKGESIKDYDHLPEKIRCGAATVKFLIEHEDFDIKPKIGIDLTKQKNADD

SEQ ID NO: 5196 - protein, 1410 aa, unidentified
  REGION 1..1410: note = Description of Unknown: Cas Enzyme sequence
MERIKLGLDIGTNSIGWAILEKEDKKYHFLKKKDENENFIPIPTKGSYIFPKGTEGNEKSKAATRRGHRSARRRIDRIRRRKIATIKVLTENELCPTISDNELNNWRYSKTYPCDNKEFIEWQRTGKKGGDVKSEKYKQPYYLRYLAATKVGLMNSEFGRYQLGRAFYHLAQRRGYKSIDDEEQTDDKIEQFKTTVSKLIEESSSCAAFYEPFLVVLDTFKSEKKVERLGKKIIQKLKKEGTFEVVSQFIFEEFNKRENLGKVESGIQDLSQKIEESRQPTLGSYFYSIYAQKNDVGNIERIRGRYIDREKHYLKEFNYICEKQKIPEDLEEKLQFAIFYQRPLKSQKGLVAKCPFEPKRKRIAISHPLFEEFRMWETINRIKIKTENDSRLRFLNKAEKELIVKEFQQKTDFEFEKLAKKLSQGKDFRYVKDRNKMTAEIEYNFPMDKTLSACPTQSQLKRILGKDNYGSFSLLNTGYKAEKGKSQVSIEDIWHCLFVDSFGKKDKKEARKDFALQHLNISEEDVERFANIKLKKGYGSLSKSAIKKILPYLKDGEHYSHAVFLANISSVLDREPTKEEKQTIIAGIRESLKKHEKEKTVNAIVNNYIEKFKDGDFSLGQNENSILIHRDGIRNEIYSWYSEDELNQMEEDEITKLENQCWLKFSEAATDKRIKDIEFIKSKTITAFIGEFLTQAFPNDTIKIEKLYHPSAMETYARVENKLGNPEISSIRNPVFNRAMHQIKHLVNKLIEEKLVDKDTEVNIEMAREINSASYRRAMAQYQKEQEFIRKWAREKIIECYDEKEREGIHPTDDQITKYILYSEQNHRCLYTNETITPRKFFAEQRFDIEHTIPRSKINDNSLKNKTLANAEFNRNYKKDELPALLDVKFKEEQITGESIIQTRDEQLKSYSISKDEVHFDVELKSLKADLKKYKNAAKAVTDANAHDEIMTRFYYTKLKYDYLNEKHLKFEMEEVTTKFTNANLVDTRLITKYARAYLKSYFKNVNVVNGQITDTLRKMWGLQGENEEKDRSNHIHHCIDAVTVACVEKGTVNRMSEAFHNYERDYFNGNPGARVFFPEPMKDFVATMKRLKEEVYIYHKQIDRIKPLMEQLKKEDFKLSILRGALNSQNPYGIRKKEEGKYFFVQRKSITKIKEKDIQNIADKRIQERIQNLCDARGKKIEKLVSENGDFLLLPEYEAPDKTGKVVKSGPMIIKKLRLISSKTKLAPYKKIRKIDRTDKAGQEHRHDFYFDKEAGSNYEAIIYGDLVPDEKGKLNREYRLINHFNIVKNVFTKEPSLPILFKIHSDDLFLIFNKHYDEIIWEDKKDLQQRLFKMVKFDENEKFTLERHNYANGDVDRAIGMSEENLKDMNGVVLRRRASTFKGIPTKIDELGRIDIEYSKKFIKKQGY

SEQ ID NO: 5197 - protein, 1218 aa, unidentified
  REGION 1..1218: note = Description of Unknown: Cas Enzyme sequence
MNKRILGLDTGTNSLGWAVVDWDEHAQNYELIKYGDVIFQEGVKIEKGIESSKAAERSGYKAIRKQYFRRRLRKIQVLKVLVKYHLCPYLSDDDLRQWHLQKQYPKSDELMLWQRTSDEEGKNPYYDRHRCLHEKLDLTVEADRYTLGRALYHLTQRRGFLSSRLDTSADNKENGVVKSGISQLSTEMEEAGCEYLGDYFYKLYDEQGNKVRIRQRYTDRNKHYQHEFDAICEKQELSSELIEDLQRAIFFQLPLKSQRHGVGRCTFERGKPRCADSHPDYEEFRMLCFVNNIQVKGPHDLELRPLTYEEREKIEPLFFRKSKPNFDFEDIAKALAGKKNYAWIHDKEERAYKFNYRMTQGVPGCPTIAQLKSIFGDDWKTGIAETYTLIQKKNGSKSLQEMVDDVWNVLYSFSSVEKLKEFAHHKLQLDEESAEKFAKIKLSHSFAALSLKAIRKFLPFLRKGMYYTHASFFANIPTIVGKEIWNNEQNRKYIMENVGELVFNYQPKHREVQGTIEMLIKDFLANNFELPAGATDKLYHPSMIETYPNAQRNEFGILQLGSPRTNAIRNPMAMRSLHILRRVVNQLLKESIIDENTEVHVEYARELNDANKRRAIADWQKEQDKQHKKYGDEIRKLYKEETGKEIEPTQTDVLKFQLWEEQNRHCLYTGEQIGITDFIGSNPKFDIEHTIPQSVGGDSTQMNLTLCDNRFNREIKKAKLPTELANHEEILARIEPWKNKYEQLVKERDKQRTFAGMDKAVKDIRIQKRHKLQMEIDYWRGKYERFTMTEVPEGFSRRQGTGIGLVSRYAGLYLKSLFHQADSRNKSNVYVVKGVATAEFRKMWGLQSEYEKKCRDNHSHHCMDAITIACIGKREYDLTAEYYRMEETFKQGRGSKPKFSKPWATFTEDVLNIYKNLLVVHDTPNNMPKHTKKYVQTSKGKVLAQGDTARGSLHLDTYYGAIERDGEIRYVVRRPLSSFTKPEELENIVDETVKRTIKEAIADKKFKQAIAEPIYMNEDKGILIKKVRCFAKSVKQPINIRQHRDLSKKEYKQQYHVVNENNYMLAIYEGLVKNKVVREFEIVSYIEAAKYYKRSQDRNIFSSIVPTHSAKYGLPLKTKLLMGQLVLMFEENPDEIQVDNTKDLVKRLYKVVGIEKDGRIKFKYHQEARKEGLTIFSTPYKNNDDYAPIFRQSINNINILVDGIDFTIDILGKVTLKE

SEQ ID NO: 5198 - protein, 1510 aa, unidentified
  REGION 1..1510: note = Description of Unknown: Cas Enzyme sequence
MFSQRNNPYCELLSNSATKVSIIFFISKFFLTFFVFISFLLSLPHQNVKRMKRILGLDLGSNSIGWAFVQQDFENKQGKIIAAGSRIIPMDQKMLSNFEEGTTVSQTAERTTYRSMRRLRERHLLRRERLHRVLHILGFLPPHYDSQIDFSKRYGKFIDDAEPKIAYNKGNFIFMDSFNEMIEDFKKHQPQLFYKKSNGEESKIPYDWTIYYLRKKALSQKITQQELAWLILHFNQKRGYYQLRGEEETEGNDMEIISSKVLSVIKKNKDKKYDKYWYDITLENGLVYKAAFYNDLVYSWIGQEREFVVKRTLLKNGDEKIELSYLPTSDEIAKMDKKQQDKFYQKIKVKTESSIGNKTVGAYIYDHLLQNPNQKIKGKLVRTIERKYYKDELKAILAKQIALQPEFFTENLLADCIRELYRKNETQQQNLLSKDFLHLFVEDIIFYQRPLRSKKSTIANCTLEKRSYIDKESNECKDAPIKVCAKSNPYYQEFRVLQWLQNLRIYEIETDREVTAEFIETAQDYEALFNFLMSQKEIDNEGLLKYFLLAKNPQIKDKVAKSELKKWLTTYRWNYVYDAADNSSKKYPMNETGYDLQRYLQKVEGLPANFLTFDITYRLWHLLYSVKDKVEFEKALKRFAKKKQLDETSFVESFKNFKPYPNEYGSFSEKAIKKLLPLMRFGNHWDFNLIDVSTQKRIDDLINGVANEDIRTIIREKAEKYQLNNETCFQGLPLWLAQYVVYNRHAEATDIEKWTSVSDLEAYLEDFKQHSLRNPIVEQVVTETLRVVRDIWQQYGGGQANFFDEIHIELGRELKKTAEERKQLSDKNQQNENTNLRIKKLLAELKEDASIQNVRPYSLVQQELLKIYEEGVFSATDEIEEDIQKIRKKTEPSKADLQRYKLWLEQKYKSPYTGEVISLTKLFTEEYEIEHIIPQSRYYDDSFSNKVICESAVNKLKTNLLGLEFIQNHHGEKVRITANKEVTIFTEEQYKEFVKKHYANNLAKQQKLLLNEIPEKMVARQLNDTRYISKYISEILSKIVRSDEKDEGVNSKNVIPCTGKITTALKQDWGLNDVWNELILPRFERMNQLTQTQLFTSYNDRLQKNLPTVPIEYSQGFQKKRIDHRHHAMDALVIACATREHINYMNNQHALDKSKDKKEKQQSRIDLRTILCEKKNNNWQFKKPWSTFTQEAKEALEHIVVSFKQNLRVINKATNYYEKWEEKNGVLVKKKVKQEGSNWAIRKPLHKETVSGKIVLDRKIGKDKILTATRKAVDITFTEKIISSITDTGIQKILLNYLKYKGSPEVAFSAEGLEELNKNIAQYNDGKKHQPIYKVRIFEEGSKFPLGEIGAKATKFVEAAKGTNLFFGVYQGKEKRSYATIPLNEVIERQKQGLPSVPERNEKGEPLLFSLSPNDLVYVPMEGEIAETIDFNNLSKEQKERIYKTVSFTGNECHFVKSTIASLIKSYDAKSKIGELGSLNKLEVTISGDSRIKEVCIKLKVDRLGNITKA

SEQ ID NO: 5199 - protein, 1034 aa, unidentified
  REGION 1..1034: note = Description of Unknown: Cas Enzyme sequence
MAQMRYRLALDLGSTSLGFALLRLDEQSNPCAIIKAGVRIFSNGRDPDGNSLAVTRRMARAMRRRRDRLLRRKARMMNLLIAYGFFPQDPAARKVLEELNPYELRAQGLDERLAPEEFARALFHLNQRRGFQSNRKTDKKDNDSGALKSAIGRMRSALNEGQARTVGELLFKRMQGGETVRARYRESKTLKPDGKTKVDKSYDLYIDRAMVVAEFEALWHKQASLNPNIFTDAAYRDLKDCLTKQRPLRPVRPGRCTFLPEEERAPLALPSTQRYRMYTEVNHLRILKEGLQEQALTLAQRDALIDALEHNAKRTFVQIKSLLGLKGAVQFNFEDPKRQEFKGHVTSAILSKPAHFGKAWFTYDEARQDEIVSRILSEENESALIDWLMHETGVSEKQAEDIANVGLPEGYGSLSRKALARILPALKQDVISYDKAVQAAGFDHHSQLNASATGEPPPALPSLPYYGEALQRHVSFGTGKLDDPAEKRHGKIANPTVHIGLNQVRTVVNALIKRYGHPSQVVIEVARDLKQSRLQREEANKRQADNQKRNARIRQEIADASNGKISPERVKVADIQKWILWEELNPLDIFNRCCPYSGERITALDLLSSDGRVEIEHILPYAQTLDDSLNNKTVSMRWVNRIKGNQTPAEAFGQDQVKGCVYEDILKRAEQMPKAKRYRFALDAMARWDKEGNGFLARALNDTRYLSRIAREYISLICPQATWVIPGQMTALLRHQFGLNGVLGLRGEKNRNDHRHHAVDACVIGVTDHKTLKSLSDASQRGREQGIMDWADNMPDPWLTYREQVKRAISHILVSHKPDHSHEGAMHNDTAYSLLGNGRVGVHKQVDGKRVLIEDTLKVIEFSYAKSRRATNDPWFDSDHNHRAGAYKGYKGDSNYCIEIVRSDKGKWEGEVISTFEAYQIFRQEQQAGQDGMARLRHPTLSISGRPLVMRLIRDDYVKLETEEGVKLMRLAKMAADGRIFFVEHHEANESARARDKDDAFNYTVKTPVGLQKAKGRRVTVSPIGELRDPGFKE

SEQ ID NO: 5200 - protein, 1094 aa, unidentified
  REGION 1..1094: note = Description of Unknown: Cas Enzyme sequence
MGQSWRLGVDLGTSSLGWAAIALDERGDPAGILAAGSRIFSDGRDPKSGASLAVDRRDARAMRRRRDRFKQRQQALLRHLTRDGLFPEDRDARKALEGLDPFDLRARALDERLSLHEIGRTIFHLNQRRGFKSNRKADRTSGDDSGKIAIGIDRLREAIAESGARTFGEFLHLRRASATDRNTVPSVRTRLRPESGEGAKGDGYDFYPGRALIEEEFTAIWEAQAPHHPEALTDDVHERLFEIVFHQRPLKAPKIGKCTLIAADERLPKAHPLFQRRRLLEELNALMIVRPGEKAERLTREERDILLLKLKDKAKVSFASLRKTLKLDPDARFNKESENRTDLKGDEVAALMGAKARFANRWAHLSWEAQWAVIERLNGVESDEDDDLFRTWLEATHGLTPEQARAVAGAHLPQGFGRFGLAATERLIAALRDEVRPDGRVLVYNEAVERAGFPHHSDFRTGEVHGLLPYYGVALERHIMPGTGEPSDSEEMRIGRLTNPTVHIGLNQLRRVGNALIRTYGPPAEIAIELARELKLTDEEKKKRNRENNDNRLAAETRSEKLLAIGKANTGANRALLKLWEDLNPDDVLDRRCIYSGKQISIDMLFSDAVDVDHVLPFAATLDDSNANKIVCLREANRLKRKRSPYEAAADFRSRFGPEADWEAIAARAAHLPRNKRWRFEPDAMERFKDENGFLSRHLVDTQYLSRLAREYLASLYPGQGEGSSPIWVSPGRLTEMVRRKLGLNNLLPDHNYVGADQPKNRLDHRHHAIDAAVIAIVDRSMLQKVARLSGEEGADGRERIHIPEPWEGFRDELRTVVNAITVSHRVDHGTAAKAGLPKGKDATAARLHNDTAYGLTGETDARGNTIVVHRVPIEAIRKPADIAGIRDVHLRAELYRFTDGLEGKAFEQAIRDFGRLGPLPFRNIRRVRVIEPLSVIPIKDRNGRIYKGYKGDSNYRYDVWEMPDGKWKADVVSMFDAHQPGERARPHPAARKVLSLHQNDLVAIEREGEERRLMRVVKFGQNGQITLAEPQQAGDLKRRDAKSVEEDPFKYFAPTCGGLKKAKARQVRIDELGRVQDPGFPARTAIRRTRSKP

SEQ ID NO: 5201 - protein, 1100 aa, unidentified
  REGION 1..1100: note = Description of Unknown: Cas Enzyme sequence
MTLQSIRYTLGLDIGIASVGWAVLRNGLDGEPYKIENLGVRIFDKAEVPKTGASLAAPRREARSSRRVVRRRRHRKERIKYLIEQEGIMTQTEMMQLFQNSSFEKSVYEIRVEALDRLLTREEAVRLLIHFAQRRGYKSNSKAEEAKDNENGVIKQAISQNQQSMKEHGYRTFGEMLLMDDRFYYTQPDGARIFIPHNKASDYKVTAERGMLADELHMIFAAQRSLGSLWFSDPFEIAYMDIWSSQRSFDKGPGGDSPYSGNQVEKNWGKCTFEKDKLRAPKASYSAEYFRLLQDVNHLRIVSLDGASFPLNQEQRDTVVVAARKSSSLTYAQLRKKLKLSDDQYFNALYYGDKTTAEVEKKKFGHLQFYRQLRTALDKVEKGAADTLTWEQRDEIARILTVYKADDRRTDELQKAGIPEKYIDALLPLSPTKAMHLSVTAIKKIIPYLEAGMPYSDALSKAYGNQTNASTSSKKHKLSLNDIEEITNPVVRRAVSQSIKVINAIVRQYGAPERVRIELAREMGKNFKDRRMIETRQTDNAAKNERIKAQISEYKSDHITGQDIVKFKLFKEQDGICLYSGKSLDIARLFEPGYVDIDHIIPYSISFDDSYNNKVLVQSSENRQKGNRIPYAYFGQNSDRWEKYETLVNNTVRSYRKRKNLLLKSLSEAQIDGFKQRNLQDTQYLSKVVFRLIEDHLQFAKTAPGKKHTQPVNGAITAQVRKRLGIEKIREDGDLHHAMDAAVIACITPGMIQRITKYAQNHERFYATAKGYVDIKTGEVLTRAQYEAMDDIRFPEPWAGFRLELEARVSDHPQEAIAQLKLPHYENSEEIRPIFVSRMPNHKVTGAAHLETIRSKKGGAGSTVTKTALTELKLGKDGEIAGYCRKEDDPLLYEALKARLKAFGGDGKKAFAEPFHKPKHNGEPGPIVNKVKIQESATLTVPVNHGVAANGSMVRLDVFYVDGDGYYFVPIYTADIVKPKLPNRAVVAGKKASEWKMIDDNHFVFSLYPKDLLRIRSNKGIKLKAVNKNADLQEYSANDCLCYYVGFDIATGAFTVESHDRRLNRRGLGGKTLLSIEKYQVDVLGNYFPVALPEKRMKFR

SEQ ID NO: 5202 - protein, 1395 aa, unidentified
  REGION 1..1395: note = Description of Unknown: Cas Enzyme sequence
MPFKNILGLDIGTASIGWAVVKVDEENPNLNTIIKLGVRVVPITTEDKLNFEKGKSITLNADRTLARSIRRNLHRYKLRRKNLIDLLIQNQIIAPHTPLNENGKFTTFETLQIRAKAAKERIELNELARVLLHINKKRGYKSSRKVQNEDEGKAIDGMAVAKLLYKEKLTPGQYVYQLLKNGKNQIPDFYRSDLQKEWDRVWDFQKQFYPDTFTEDLKKELEGKGQKASIAILYKNCGTTTATNKGKKNEKKLKAYEWRSRAISERLSLEEVAYVLAEINNNIYNSSGYLGAISDKSKELFFNCQTVGENLYTQISQNEHTKLKNQVFLRQDYADEFDQIWETQAQFHPQLTSELRKKIRDSTIFYQRKLRSQKGLISICEFENREIEISKNGKKKTKTIGLKVAPKSSPLFQEFKIWQILNNVLIRQEGNNRSLTLEEKELLFSELNTKGNLPAQKILALLKLPAKNTKINYTTLEGNRTQEQLYRVYFKILEWEGHNVFELLKIPEDQDELRPADSKLSAAEIKEIVKSAFESCSISSSILDFDALLPNPEFERQHLYQLWHLLYSYEGDNSPSGNEKLLNLLQNKFGFKKEHAQFLTSISFASEYGNLSTKAMRNLYPYSKENSYSDACVLAGYRHSKNSLTREELANRKLKNRLEILPKNSLRNPVVEKIINQLINLVNSLQEEYGAFDEIHLELARDLKKNAQEREKWYKNALEANSRNQQYSEILKKDFGISNPSRNDIIRYRLYLELNENGFKDLYTQTYVIKDLLFTNKYDIDHIIPQSKVFDDSFSNKVLVPRKANHDKGNLPAMDYVSNLGKEREEQYLNTVSELYKKGGISYKKYKNLVTKGADIGDGFLNRDLNNTQYIARKTTELLNQITPRVVTTTGEITAKLRKDWNLVNTMKELNIEKFHSAGLTEWVINSKGEKKEIIKDWNKRSDHRHHAMDALTIAFTTSNHIQYLNYLNARDDETNKKHFHIISIEKKVKNDIILENGKRKSIFTFPTNNFRQEAKKQLNEILVSHKVKNKVVTVNQNKPKKRNGYTPKDEQTPRGPLHKETIYGMAKILQTKEVKISSKFNYETVLMVQKKAYRDALLKRLEENLNDPKKAFSGKNSLAKNPIFLTAHSSEKVPENIVIQWYEKIYTIRKPISPDNFKNEKTIEKVLDPTLRILLKNRLREADGNAKEAFSDLEKNPIWLNKEKGICVKTVTIKGISNAESLHIKKDHFGNEILDEKGNPIPVDFVSTGNNHHVAIYKDAEGALQEKVVSFFEAVEKVNQGLPVIDTLYNKELGWKFLFTMKQNEMFLFPSEDFNPNDIDLYDNKNLSQISKHLFRVQKLTSKDYHFRHHLETSIEFNADSLRGITWRREGVNGVKNIVKVRLNHLGKIVHIGE

SEQ ID NO: 5203 - protein, 1374 aa, unidentified
  REGION 1..1374: note = Description of Unknown: Cas Enzyme sequence
MEKILGIDLGTNSIGWAIREVNASLENQITNKGVLTFDKGVAEDKSGEHPMVKKRTEARGKRRNYQAEKYRKWALLECLIQENMCPLTIDELNQWRHYKKGIGRKYPMSKKFINWLRFDFDGDGKPDFERLGYSKHESYYLFRALIVDETKKKIFQEYPEIIGRVLYQMVQRRGYNDLSDLDETEKNELSKTILKGGGEANATGANEIEPYIAKYKTLGAALYHIQKEKKVRIRKRYNLRSRFEDEIKIICETQDLEHLNKKFCSAIVWQRPLRSQKGLIGICTFEKNKRRCPTSHPLYEEYQAWVFINNLKIMPFEDSVKNKPIEEILTQLVYPEFYKASPIFKLTTIASKIKKAGYFISAKFPEDTKVNSVSFLYRMKEIFGESWKETLGWDSLLKNESKNSRIKYNIEDLWHIHSVKSANKNNSESSFDFTKRFAKEKLKLEEEKAEIFAKIRLEQGYATLSINAIKKILPFLQKGIIYSEAVYLANLPKVLNIANIDEEIIQHFTEESKKIINQRHLEKKYLQVINELINDQLNSSSRFGMDKNYQLDEDDKKDILNKLIDIFGKYSWEKFSEEEKLSITKKVSNKYLEFLQKRIHAKNVFEKSDRLHDKIFNWLKETYDLPQDRIRFLWHPSEQETYLPAIEKDGVKYLGSPEPISKGFKNPMALKTLHRLKQLINHLLYEGTIDEDTRIVIEIARELNDTNKRKAIERWQKEREKQNDSYLNQIKEHYGNNFTQKAPSDIKNLIDKLRLWEEQKRRCIYTGKNIELNEVLNGSKYDYEHTIPASISFDNELKNLTIADKTYNQQIKGKKLPSECPNYDKEFNHNGFTYRPILETLEDIFGNMIEEERKGQKTGKYKFAKIIEFENSLQEWKDKKSDDKETMSNIVIKRHLIKMELDYWRYKLQTFTIKEYKAGWRNSQLRDTQTITKYSLPYLKTVFKKVEVQKGSITADFRKIFKIQPRLEKKERTKHSHHAIDAAVLTLIPNASKRDKILLNYNQAKENNLSHHESPDNWKGFATFHILNIEDDVLINYLPTHRTLTPTYKQVRKRGEIQFVKEKGHNGKVQFKLKDKGERIPLLAKGDSIRGQLHKLSNFGAIKKQGEIILVERYPISSFTSIADCKNIVDNKVRELVYEELSKRLESGLSFDKARLEPIPFHKGNEVIKKVRCKVAAGRGYLSTDKAIKIGNHDFQSKHDYKHSIYVQNEENTYCLYYEKSMNDNTIRAFKIVGLFELSQLKIKNENEIKNEAYYNKIITGKGKNEVEIPLLEILKVGTKCIFYKENIDELKDLNYRDLLNRIFRIYKFNEMGTPNLFLQHHLEARKNEILDDGDTFFDPLKKQYRLKIKADKFVCAIENIHFRIEIDGNIKWL

SEQ ID NO: 5204 - protein, 1122 aa, unidentified
  REGION 1..1122: note = Description of Unknown: Cas Enzyme sequence
MAKVLGLDLGTNSIGWALIDDKNDEILGIGSRIFPEGVADLGMGEKEISKNAGRTENRGKRRQFFRRKLRKRFLLRLLAQYKLCPIEQSMIKVWNADEVFNDVNIVNWLRMNPYELRAKGINEELDLIELGRVFYHMIQRRGFLSNSRSAGSDDNENSVIFKGDKKIGKTGIAETQDHIDKSETLGAYLNNIFPEQYSTYTAEQERIRNRYTTRQMYIDEFELIWTKQTEFHSELTDELKSILGGRKKEGYAEDGALFHQRPLRSQKHLVGYCSFEPKKTKCAKSAIPFEEFRVYQWVNTVECNGKILDNADRETISKVLFSKEKVKFLALRKAIDKVGGSFQFNYKDDDAIVGSYTISSLSNKKFFGANWFDFNENEQENIWHTLSFFDDREKLKKYAIDNWKFNDEQAIKISKFNLKDGYANLSRKAINNILPFLKAGHLYDIAALLGGIKNAFGKDWDALSDEQIEFIDANVPAIAQAKIRGGYIDEVKKLLKGEFNLSDKKLEKLYHHSASIETLEILDKLPLGKNADKEIQSIRNPIVTTALFELRKLVNQIIDDYGKLDTIKVEMARDLKISKTKRNQIRRDQKRLEKENDRVKAELDSLGQRLTHNNILKYKLWEECNKTCPYTGSAISVTELFTGNVQIEHIHPWSKSLNDSYMNKTLCFAEENRAKGEKTPYEFYITKGEAKWEDIKAQALNCFKTKTNYPNAYQKFKQFVKIKHDDDFISRQLNDTRYISREAKGYVSKICSNVQVAPGQMTANIRHKWGLNSILSDDDNKTREDHRHHAVDALVMACSSRKHLQELSKWNRYNRNYELRDFPMPWEGFREDAQKAIDRILVSQKKMDNVLTLRNVKTRKNGIDYKNKGISARGQIHEETVYGKRTAPDGETAFHVRKPIENLTTIKHINKVVDLKIRGLIIQRIELLGGFEKGVNIPKNTFFVSDENGASQPQIFLPNKNGNKVPVKKVRMRENIGGAEKLKSSNQYVNPKNNHHVLIYKTEEGMLQDDVVTFWTAVERKNQGQPVVQLPAEHKGGEIITTLEKNDMFLLSLSAQDSLKEIDITKHLYRCQAISSGYYIFRKHTSSTVTDSDYVRIVSFKAWLNFNPIKVSISTTGKLEKL

SEQ ID NO: 5205 - protein, 1391 aa, unidentified
  REGION 1..1391: note = Description of Unknown: Cas Enzyme sequence
MSKILGFDLGTNSIGWAIRDTDIGIGPDQIIRKGVVIFEKGVGENQGKEFSRAAERTKARSARKNHQRRRWRKIDLLTLLINNKLCPLSIEELSLWKDPSRKREKKYPQSVLFKNWLRLDFNNDGIPDYLNPFELRAAALINPLSPEAIGRICYHLTQRRGYLSNRSDKALDADDQVPEEDDSPGPKQRVQLGKVATAINELEEKLTGHTIGQQLSHEISQGGRARRRKEESTNISRLTLQAEFLQIASCQQLNPVLTEKIRKVIFEQRPLKSQKGVVGKCIYEKDKSRCPISHPEFELYRMWQVLNNIRYSDDGKKNWHPLTSAERSLAQQKFFRRSSPAFPFTDISKALTRQHPGRIFNYKDRQTLSGCPTLAGLFAVLGEEKVWELRAKALQRIHWEENEKRSSAFKYHGNGLDLYDLWHWLFQMDNDKDQVIIREKIIHQLNLSEKEADNFVRIPVKQGYANLSLKAIRKINYWLEKQVRYDKAVFLANIPSLIGRSCWESRQEEIISIVETEMSHITREKNITDIVNGLISQYNNLPYNQRFARNTPEYTLDSDDHQDIGQAIGHYFGTGKWSQLSPEDHSLYRQQIAVLYEQALRLSTSGELSFIKPPRLESNLKKALGTALGIDPGEKLLNKLYHPSEIESFLPALDAPGMVARKILNSPRTDSIRNPMAMRTLHELRKLVNYLIENDLVDDHTHVIVEMARELNDSNKRQAIERYQRERQAVNQKYAGEIQKIFKEQNRTLPQDLSTYIDRYRLREEQPARACLYTGQTISDSDLFDEFTTDVEHTIPRSLSFDDSLQNKTIAFKYYNNEIKDKLLPSQLPNYTEEAHGYSSIQPRLREWQDKVDQYQERIDRAIRKSRSASTKEAKDHAIQERHFCSLHHRYWKGKLERFEMTDITDGFKNSQLIDTQIIAKYGVLYLKTLFFHVRSTKGEITDKIKRIWGALSKDEKKDRSRHSHHAADAIIQTLLYKERNKPDIYNILAASYKTAEDNKWKEPKVPNPWGLDPGTFYTIMQNLMEDILVYHADRDNVLKQTKKKIRSNGSIVYSKDGGNNVPVYQKGRGIKGSLHKDTFYGAIKIPVKENGKLISDPGGRLVLQKDEDGNDIIKYRTGFVFNGNTLDAIRKAIENIVDDRLRQLAEETGAAVIQKQGYFEIPPSEQRKRRDALAQSTKVYKVKIFADKMQNPIKLKRHVEGAPEHKQWYYVQTDGNYLMAFYENGRQRDFKIINLYELAGLVGESQGLYPLYKEKTIRGKKIVLPLARRNNKDLVLKQNLKVLLYEKSPEEIISDQTNRNLSDRLYKVTGLSIQRAKFEGEMYLYGIITLTHHLEARRNSLLKMESGDYKFGDGKTFRKLSHNKFKGFIENIDFTISHEGTIQILPSVNE

SEQ ID NO: 5206 - protein, 1424 aa, unidentified
  REGION 1..1424: note = Description of Unknown: Cas Enzyme sequence
MKKILGLDIGTTSIGWAYVNEAETEDEKSLIKKLGVRVIQYDDNLKTVDRKTGKISDSKNPAKDFESGKGLSPNAGRTLKRGARRNLDRYQLRRAALIKILKENNIITDNTTFSESGKQTTYSTYEKRAKAAHTKINKDDFARILLMINKKRGYKSSRKAKSQDDGEAIDGMEVAKKLYENDLTPGEYVHKLLLKGKKYIPDFYRSDLQSELDKIWTFQKAFYGEILTDKLKEDIKGKNKGATWKICEKPFCIMGIKQKGSREEQKLEKYSWRTKGIKAKLDLEQLAIVLQEINSQINNSSGYLGAISDRSKELYFKKETVGEYLYKQLKQRPSIRLKNQVFYRQDYLDEFEIIWEKQKEFYPEFTDKLKSEIRDIIIFYQRPLKSQKGLLGFCEFESWEEEYFDEKSGKKKKKRVGHRVIPKSSPLFQEFRIWQNLNNLILTDITTGETGSLNQELKELAFENLNVVGKLSTNNFLKIIVDKPKNYELNYENIEGNRTNSGLIKAYQKIVEYEGGKYDFSKMKTTEVIRIIEEKFTELNIPTEILYFNSDLEGNDFDKQPIMQLWHLLYSAVDDEKLIIKLTQKFGFKKEYAKIIADVSLQGDYGSLSARAIRKILPYLKEGNTYDEACALANYNHSKSLTKKENEERELKDKLELLPKNSLRNPIVEKILNQMVNVVNAIIEDENLGKPDEIRVELARELKKSASEREKITKYIGKATKENEEIRKLLISDFGISKVTRNDIIRYKLWKELESNGYKTLYTNKYISKEEIFSKKFNIEHIIPQAKLFDDSFSNKTLSARDINIEKGNETAFDYLKKKLSPEEIENYLLRIERLYKKGKITRAKFNKLKMRNSEIPDGFIDRDLRNSQYIAKKAVQMLNEVFRKVSTTTGSVTQRLREDWQIINVMKELNLPKYEKLGLVETIEGKNGQPEKRIKDWTKRNDHRHHAMDALTVAFTSYAHIQYLNNMSARGNKKHKKYHKVYGIEQKYLYRNDKNKLLFKPPMPLHQFREEAKKHLESILISFKAKNKVVTRNKNKIKIKGKNNYKIKIELTPRGQLHKETVYGSINRYATKEEKIGKNFDLEKIKTVANQSYREALLIRLAKFNGNPQKAFTGKNSPSKNPIYIDNAGVLKVLEKVKLVWKEKQYTIRKEISPDLFKDSKKRDDFVKRIDNIYDEGIKRILKKRYENSKREVEKFNATINKTSEKKKILETAFSNLDENPIWLNKEKAITIKRVKISGFSNVVAIHSKKDHNGNFILDKEGNKQPVDFVSTGNNHHVVIYRDENGKLQDEVVSFYEAVHRVNADLPIINKNKNGCEFLFTMKQNECFVFPSNDFDPNEIDLMNPDNAKIISMHLFRVQKFSKVEYGNSAVRDYVFRHHLETQLIDKNETKDICYKVVKSLGRLEGVVKVRLNHLGKIVKVGE

SEQ ID NO: 5207 - protein, 1047 aa, unidentified
  REGION 1..1047: note = Description of Unknown: Cas Enzyme sequence
LYDEHHENLRKLKAFMKKYCKSRQYKEFFDSAKKKAANYSNYIGYVKIRGKKTVAERCSEEDFYKNLKSIISVIEARPEDEAEKEYLMDHIDQKDLLPLQRSKDNAAVPRQVNEMELDRIISNASAYLPFLSEKDIDGITTAEKIKSIFNFRVPYYVGPLSDRHKNEGSNSWIVRKEEGYIYPWNLDRKVDLEASNEEFINRLTNKCSYLIGEDVLPKNSLVYSEYMVLNELNNLRIRGNALPVTVKQELFENLYKKKNRVKASDICKYLKRDDHELEISDLSGFNGDMKASYSSYLDLSRKIFDHEDLSRHEREIAEDMIRWVTIYGNDRTMLRKVISQKYGKELTRPQIDAACKFKYSGWGRLSGTLLTEIQGISSETGEVFNILKAMYDTQDNFMQLLSSKYSFSAKIAEFNADRTDIIDASDYGSVFKDVYVSPSVKRPIWQSIQIIKELIKVQGRAPEKIFIEMARENESDEKKNRMKSQRNSRKERLLELYRSCDDDTRNWTAEIEGRDEREFNSMKLFLYYTQMGRCMYTGEPIDLDQLMKGNSEWDRDHIYPQSKVKDDSIDNLVLVKKVENSKKSNGLLSDTIRRKMFGFWRMLLDRGFISKKKFDRLTRVNDFTDEELAGFISRQLVETRQATKAVADLLKEIYPDIEIVYVKAGLTSEFRARELSMLKSRLANDLHHAKDAYLNIVTGNVYYTRFTTDPYRWIKAHRDEDYSVNAVFSRDLKDRSGNTVWHGPDRDEERRIVKNEAGGYVGGSIDTVRSTMEKDRMYYTEYTYCDSGALFDATLQPKGSTGASIPLKKGMSIEEYGGYISPSTSYFAQIEFDDKKNVRTKNIVGVPIYVSELLKQDPDALVKYFETRGYKNVKVLRERIKKNSLLIVNGFPMRIRGENEVLNTFKGNMQLTCPPEIYEIIRNIEKSVEKNRIQIVEEKDGQKMVGLYDYMTKKLKKIYAGRPANMASRLEGGKKVFVSLSLVDERDLLYSMITMLRCDNDTTSDLTKIGGSKNSGNMAVNKNTIGKSEVILVNQSVTGIYENRIKL

SEQ ID NO: 5208 - protein, 1327 aa, unidentified
  REGION 1..1327: note = Description of Unknown: Cas Enzyme sequence
AGGHDFWGSYMFDNAQTAEERRMVRTSRRRIARSHERLMLLQQLFAEEMGKVDCLFFIRLNNSQLFLDDKDKSLKSANILFDDKNFTDKDYFRDYKTIYHLRSYLIDNPITDIRYLYLAVHHIIKNRGHFLYDGQTFDVNDRQNVLSKFENVNSFLADNDMPTLELANINGVLDCLKDKNLGKKAKLGKLKELFGVKSDKQQLAILNALSACKFSIKDLYSADEEFDIDKLSFDDGGYDEKYLAVENEVGADDCVLIRDLKAIYDWAILSNIIGDHKFISQAKVQIYNDHQADLAELKAYIRNNCDADTYSKVFRYSKGVANYAAYIGMDKHKSYSKCSKDDFYTFLKKTIEIKDEHILKKIDDGTFLPKQVSNANGVIPYQLHYAELSAILNNAENYFPFLKDEQDGLSVSQKILSIMSFKIPYYVGPLNDRDKKFAWVKKFDGMQNVKVTPWNFDKVVDLDASEGAFITKMTNKCTYIPTEDVLPANSLLYSTFTFLNELNNLKINGVKDMRARDLIFEYAKSHKKVTLKACLNSLEKNAIIPNNSKVEIFSGTDGDFKNSLAPFVDLKFLGEKLYTNTEMCEQIILWLTLISDKDRLEKRIRESYGKVLTDEEIKRLKGINYSKWGRLSKKLLVDIKSPYCTDENGECLSIIQAMFATGENFMQLMSGKYGFADSIDEYNKSQKISSGVTYKTVKELYCSPSVKRAIWRSFEIVKEIEKIMGKPPKKIFIETTRDADDKSKKGKRTISRKEQIKNLYRDIKDSERDWKEEIEDTPDGKFNSDKLVLYYRQMGKCMYTGNDISLQDVFNTNICDIDHIYPQSKIMDDSLDNRVLVLKTVNKDKDDIYPIKEEIRQKMSGYWKVLLDKKLISEKKYARLVRNTSLTMEECTDFINRQLVETSQSTKCLAQILRQYFGDRCEVVYSKAVNVDRFKQGKKDDNKDDERECKVIKIRELNDLHHAKDAYLNIVVGNVYNTKFNHDARVYFKSHDINSYNINNLFNRDIKGAWVVGDRKRVIDIANKNTCRVVRMTESGKGKFFDINLVSPKGQKADKLQNWIPRKLKSANSDSGAIANVSRYGGYTGINTAYYMIVKSVDKKGRVKISFVAYPLYLKKNYNDDIDIENKIKYCVEKFGLNEPQILVDNIKKNTLIYINKVGYYLTGGATPSDNRIEVCNTYQLHLETANLKILKEVVKSIKSKEKFKKIILSPDITKNDFIQLYDVFLKKLSSEPYSNLPTIDNIFANLKEKRSYFEELSLSEQCEVLYQILHLMQCNKTSADFTLLGLSANSGKMRMANNFTVDGNIKIIYQSPTGYYKKVIDVKDLL

SEQ ID NO: 5209 - protein, 1357 aa, unidentified
  REGION 1..1357: note = Description of Unknown: Cas Enzyme sequence
  MOD_RES 914..917: note = Any amino acid
MKSIRKESQEPYYIGLNVGPTYAAYAVTNTSYNLSRFKGKDMWGVYKYDEAETAEDRRRFRQGRNSNLKEKERIRLLRSYFFDEIQKVDENFFVRLDNSFYYSEDKDIRLNGDRNVLFADKDYSDRQYMSEYPTIYHLRSELAHGSKKPDIRCLYLAVSHMMKNRGNFYTKNLEDTDKSLGEVYENICTKAAEYDIVLKMEVPAEKIMDIMINPGISGKVKATLVTQLVDATSKPALSIIKLMCGLKAKIADIFPELAESLEEDEKKLSFSFKDEDYFERADSIEKLIGENEYSLIESVKEMYDAAIIKNIIQDYRYVSDAKIASYEKHANDLEILKAELKTILSKNEYKRFFSKEEPGTYSAYVHFSNHNNQITRRKSDKGRTQEDLYHTIKKYLADADDEQAEYILDEIDKGTFLPKQRIKDNSLIPNQLYSVELKAILENASKYYDFLNSRDESGLTVSERILSLFTFTMPYFIGPVSPYNSRGWAVRKEPGKVYPWNLKDKVDMGQSAKQFIEKIIGKCNYLSGEKVLPNASLLYEKYRVLNEINSISVDGEKISVEMKQAIVNELLAGGKTVSKKKILSFLVKNGSATSDSIITGIDDKLNNSMASHRFFADIFGSLNKDNEAVAEDIILWSTIYGSSKDFVTEQILNKYPDMFDEEQLRKIHNLNCKDWGRLSRGFLNMKGLDKDNNELISVIDAMWSNNLNLMELMYDTRFDFSARVKDKTENAVKNLFSFDYDDLNDLYATTAQRRTIWASVKIVREIVKIKGFAPESIFLDTVKSRPNDIPKESRKGKLTALYKGMKGVSADWKKKMISLIDQCDADGSLKAKNVYLYFLQMGKDMYTGEDISLEELKSPDKRKKHNIDHIYPKHFVKDESIDNLVLTNTDLNRDLLDRYPVPKDIYDNMHEFWXXXXLRRSGLISAEKLARLSDRNPLSDEKRASFIGKLYNQAGSSTRMMADIFKNILPKDTKVIYAKTSETNEFRHKFDFPRTTIINDDYLAKDAYLNIVVGNVWYTKFTASPIWYIKEEYRKKKSEYNLNRMYDFNVIRDDRIAWITDKTNPEAATIHTVNKVMNRNTVITITRTTQGHGGLTNATITRADKAKEGVYLPLKTSNERMSVTKYGGKTSITSAYMFLAEHTLKKSRVRTIYSLPLHLVSQIKGKKDLEKYCTDVLHLIEPVIKIAKIMLYSELIIDGYSYLLGGKAGVQYYLRNNVPMRVNAEWQKYVSKIEKYINYKSLDKDMSADKNIELYDELVDKHTNSIYSKRRNTAGDMLKKGRDTFIKLSVKEQLEVLNQIFTLTRMGTNIANLSGIGAGQHVGSITMGCNISTFDSVKLVNRSVTGLFSNEVDLLHI

SEQ ID NO: 5210 - protein, 1376 aa, unidentified
  REGION 1..1376: note = Description of Unknown: Cas Enzyme sequence
MTKKPYSIGLDIGTNSVGWAVITDDYKVPSKKMKVLGNTDKHFIKKNLIGALLFDEGTTAEARRLKRTARRRYTRRKNRLRYLQEIFAEEMSKVDSSFFHRLDDSFLIPEDKRGSKYPIFATLAEEKEYHKQFPTIYHLRKHLADSKEKADLRLIYLALAHMIKYRGHFLYEEAFDIKNNDTQKIFNEFTSIYDNTFEGSSLSEQSVQVEAIFTDKISKSAKRERVLELFPDEKSTGLFSEFLKLIVGNQADFKKHFNLEEKAPLQFSKDTYDEDLENLLGQIGDDFADLFLVAKKLYDAILLSGILTVTDLSTKAPLSASMIERYENHQKDLATLKQFIKNNLQEKYAEVFSDQSKDGYAGYIEGKTTQEAFYKYIKNLLSKFEGADYFLDKIEREDFLRKQRTFDNGSIPHQIHLQEMNAILRRQEEHYPFLKENKEKIEKILTFRIPYYVGPLARGNRDFAWLTRNSDQAIRPWNFEEIVDKASSAESFINKMTNYDLYLPEEKVLPKHSLLYETFAVYNELTKVKFIAEGLRDYQFLDSVQKKQIVNQLFKEKRKVTEKDIIHYLHTVDGYDGIELKGMEKQFNASLSTYYDLLKIIKDKEFMDDPKNEEILENIVHTLTIFEDREMIKQRLAQYNSLFDEKVIKALTRRHYTGWGKLSAKLINGICDKQTGKTILDYLINDDYNNRNFMQLINDDRLSFKEIIQKAQVVGKTDDLKQVVQELPGSPAIKKGILQSIKIVDELVKVMGHAPESIVIEMARENQTTARGKKNSQQRYKRIEDSLKILASGLDSNILKEKPTDNNQLQNDRLFLYYLQNGKDMYTGEALDINQLSSYDIDHIIPQAFIKDDSLDNRVLTKSKENRGKSDNVPSLEVVQKRKAFWQQLLDSKLISERKFNNLTKAERGGLDERDKVGFIKRQLVETRQITKHVAQILDARFNTEVNEKNQKIRTVKIITLKSNLVSNFRKEFRLYKVREINDYHHAHDAYLNAVVAKAILKKYPKLEPEFVYGNYQKYDLKRYISRSKDPKEIEKATEKYFFYSNLLNFFKEEVHYADGTIVKRETIEYSKDNGEIAWNKERDFATIKKVLSYPQVNIVKKAEEQTVGQNGGLFDNNIVSKEKVVDASKLIPIKSGLSPEKYGGYARPTIAYSVLVIADIEKGKTKKLKRIKEMVGITIQDKKKFEANPIAHLEKCGYKNINPNLIIKLPKYSLFEFNGGQRRLLASSIELQKGNELILPYHFTALLYHAQRINKISEPIHKQYVEAHQNEFEELLTTIISLSKKYIQKSNVESLLQQAFEQADKDIYQLSESFISLLKLTSFGAPGAFKFLGVEISQSSVRYKPNSQFLDTTLIHQSITGLYETRIDLSKLGED

SEQ ID NO: 5211 - protein, 1460 aa, unidentified
  REGION 1..1460: note = Description of Unknown: Cas Enzyme sequence
MKYIKYILGLDIGSNSIGWALILLDLLQKTKRIIATGSRIIPMDQKVLSDFGKGITISPTAQRTSYRNARHCRERHLLRRERLHRVLHILGFLPTHYDKQIDFSKRYGKFVDNTEPKIAYNERKFLFMDSFQEMLADFKIHQPDLFYTKKNGEESKIPYDWTIYYLRKKALSRKISKEELAWIILNFNQKRGYYQLREEEEENKENDFEIISSKIISVIKKDKDKKYNKYWYDIILENGLVYQAAFYNDFVYNWINQDREFIIERISLKNGTEKVKLSYLPTFDEIDKMDKKEQDKYYKKIKIKTENSIGNKTVGCYIYDHILQNPNEKIKGKLVRTIERKYYKEELKAILEKQVALQPELFTDQLFADCIRELYSKNEAQQRNLAARDFVHLFVEDIIFYQRSLRRQKSTLANCSLESRSYIDKDSHTRKEAPLKVCPKSNPYYQEFRVLQWLQNLKIYKIDTNQEVTHEFIKTLEDKQQLFDFLMNQKEIDCEELLKYFLNQTYPNAKEKALKSELKKWKDTYRWNYVYDIGEKSSKKYPMNETRYELKRHLEKVANLPDDFLSSEVEYLLWHLIYSVKDKVAYEKGLKTFAQKHHLDKDSFVESFKKFKPYPSEYGSFSEKAIRKLLPLMRFGAYWDFNHIDKNTQKRIEDLISGVENEEIRTILREKAEKYQLEKETDFQDLPLWLAQYIVYNRHAEASSLEKWTSVNDLETYLNEFKQHSLRNPIVEQVVTETLRVVRDIWQQYGQGQADFFDEIHIELGRELKKTAKEREELSKQNQKNEDTNLRIKALLTELGEDSTIENVRPYSPLQQELLKIYEEGVFSSSMEIEDDIEKIHKKATPSKTELQRYKLWLEQKYKSPYTGQIISLKRLFTEDYEIEHIIPQSRYYDDSLSNKVICESAVNKLKGNQLGLEFIKNHYGEKVHAAGKEVSILTEEQYKEFVKNHYANNSGKMKKLLLEDIPEKMVARQMNDTRYISKYISEILSRIVRSSERDEGVNSKNVILCTGKITSALKQDWGVNDVWNDIILPRFERMNALTQSTLFTTYNEKFQKYLPTVPMEYSNGFQKKRIDHRHHAMDAIIIACATREHINYINNQHALEKGKNKEEKQKSRIDLRTILCEKKYNDNAEENYSWIFKKPWDTFTQEVRAALEGIVVSFKQNLRVINKATNYYEHWVEENGKFIKKMVKQEGTNWAIRKPLHKETVSGKITLEREKVSKGKILTATRKAIDSTFTEKVIEGITDTEIQKILLNYLKFKKSPEIAFSPEGIEELNKNIALYNDGKPHKPIRKVRIFEQGSKFPLGEVGNKTTKYVEAAKGTNLYFGVYQGKDKRSFATIPLNEVIERQKQGRSSVPEYNEKEDPLLFSLSPNDLVYVPVEGEIIEDIDFQNLSNEQKERIYKIVSFTKGRVYGIPYKVAISIVNKLEYTQLNKIEFIKEKEVCIKLKVDRLGNISKA

SEQ ID NO: 5212 - protein, 1394 aa, unidentified
  REGION 1..1394: note = Description of Unknown: Cas Enzyme sequence
MNSKKYSIGLDIGTNSVGWAIITDDYNVPSKKMKVLGNTDKHFIKKNLIGALLFDEGTTAKDRRLKRTARRRYTRRHNRLRYLQEIFVEEMSKVDESFFLRLEDSFLVPEEKRGSKYPIFPTLSEEKEYHKNFPTIYHLRKHLADSKEKADLRLIYLALAHMIKYRGHFLYEESFDIKNNDIQKIFNEFLSIYDNTFEGNSLSGQNSQVEAIFTDKITKSAKRERILKLFPEKESIGLFAEFLKLILGNQADFKKHFNLEEKAPLHFSKDTYDEDLENLLGQIGDDYTDLFLVAKKLYDAILLSGILTVTDSTTQAPLSSSMIDRYENHQKDLAILKQFIKNNLTEKYDEVFSDQSKDGYAGYVDGKTTQEAFYKYIKKLLSAFDGADYFLDKIEREDFLRKQRIFDNGSIPYQIHLQEMNAILHRQGEHYSFLKENREKIEKILTFRIPYYVGPLARGNRDFAWLTRNSDDAIRPWNFEEIVDKSSSAEDFIHRMTNYDLYLPEEKVLPKHSLLYETFTVYNELTKVKFIAEGMRDYQFLDSGQKKEIINKLFKEKRKVTEDDIIDCLQKLDNYDGIELKGIEKQFNASLSTYHDLLKIIRDKEFMDDPKNGDILENVIHTLTIFEDREMIKQRLAQYNSIFDEKVIKALSRKQYTGWGKLSAKLINGIRDKQTGKTILDYLMDDGKSNRNFMQLIKDDGLSFTKIIDKAQVVGETDNLRQVVQNLPGSPAIKKGILQSIKIVDELVKVMGHAPESIVIEMARENQTTARGKKNSQQRYKRIEDSLKNLASGLDSNILKENPTDNIQLQNDRLFLYYLQNGKDMYTGKPLDINQLSSYDIDHIIPQAFIKDDSLDNRVLTSSKENRGKSDNVPSLEVVQKRKAFWQQLLDSKLISERKFNNLTKAERERGGLNEIDKVGFIKRQLVETRQITKHVAQILDARYNTEVNEKKQKIRNVKIITLKSNLVSNFRKEFRLYKVREINDYHHAHDAYLNAVVAKAILKKYPKLEPEFVYGDYQKYDLKRYISRFKDPKEIEKATEKYFFYSNLLNFFKEEVHYADGTIVKRENIEYSKDTGEIAWNKEKDFATIKKVLSLLQVNIVKKTEIQTHGLDRGKPKGLFNSNPSPKPLEDSKENLVPIKQELDPRKYGGYAGISNSYAVLVKAIIEKGAKKQRKTILEFQGISILDKINFEKNKENYLLEKGYKEILSTITLPKYSLFEFPDGTRRRLASILSTNNKRGEIHKGNELVLPEKYITLLYHAKNINKTLEPEHLEYVEKHRDEFANLLEFVLDFNEKYVGALKNGERIRQAFTDWETVDIKELCLSFIGPENSKNAGLFELTSQGSASDFEFLGVKIPRYRDYTPSSLLNSTLIHQSITGLYETRIDLSKLGEE

SEQ ID NO: 5213 - protein, 1349 aa, unidentified
  REGION 1..1349: note = Description of Unknown: Cas Enzyme sequence
MRKIIGLDPGISGTGFAYVEEPTERGEVARIVDCGVSVNTLSKDERTSFERGDVFTTNADRRTARSFRRNIQRFKLRRENLIKIFLREGWIADRHDLVSAGRRDAHELYELRAKAATEEISLKDLVRVFLMINAKRGYKSSRRLAKSDDGTVIDAIDVALELMRTHRTPGQYAYGLVSAGKKVLTGFYPSDLKTEVRRIIDFQKQFDKRVEGLSAALDCGNRREALKCTGSVLGVEPLTVKGRGAERRNELYRLRDAALSEQLSPDALALVIAEICGEAASSSGLLAQISDRSKQLHRSDATKGERDIMTIGEFLWGLIREDKMCSLKNITFFRRDYMDEFEQIWSTQCKYHPELTDPLKKEIGARTIFYQRRLRSQKNLIAFCEFETRNRVAPKSSPLFQEFRMWEQLTNLRIKEKSNREEGYPLTVEMMESLAGELRFRKEMSGQDILKFFFGGNAKKYCINLRRINGNGTYASIITAMLAVVDRIEGTEYALDGTLVSDAKEDIILNVFEREGFSTAFLSIEGEMERLWHLLYSYDDSVSGDEGLYDLLAKQLGIHQALLSPLVNCPFEEEYGSLSAKAMKRILPFLKEGKQYDEACECAGYRHSHWLTAEENAQRELLDRLPLLRMGSLRNPLVEQMVNAALQVVNELMVKYGRPDEIRLELPRQLCLSREGRQRMYKDILRNEKRNVAIARFLKDEGLCANPSMSDIEKYRLWCELGPEHKALYSGREIPLVLLFSHGEEINIEHIIPKALQYDDSLSNKTLEYRDVNLDKGNRTGFDYMTSLGDAALEEYKARVKWLYDNQSLAAAGTVCGISKKKYENLLKSRKDIKERVTGRDIAEVSYISRKLKSILECAVRNVVVTNGSITKALRNEWGLEGVLKELNFERYEKCGLVETVMNSKGQPVRKIKDWTKRMDQRHHAMDALTVAFTSRKLVNWYSRPKVVQETVEVGTPMPKQIFRSEVKAALERIIVWYKIDGRAVTRATNRIKAGNERVIVQETFTPRGQLHKETLYGRRVENCVETHRIGKDTTFEVISKVRDAKVREALWMRLKANDGDAVKAFTGKNSLSKNPLNTADGHEVGRKVEVLGRRFVYCVRKPISEVNDEKVLEDVFDAQIRSIIRNYAESHGGLANLPKDILNEPVWFNKEKGIAIKSVHLRVSANLYGIRVKRDVCGEPVLDGTGATMPGAFVNPRSNHHAEIYVNSEGKHEQRIISLIDCVNRHVKGLPLTDEEEMRGNGYRLLLSIRRNELFVFPDEETGFDPTQIDVFSPENRGIVAEHLFKCQKMTMGEYVFGHQYSTKSFGNDKVDTIMKGYTWKSIKSLKFFDKVVKIRASHTGDVLPASD

SEQ ID NO: 5214 - protein, 1038 aa, unidentified
  REGION 1..1038: note = Description of Unknown: Cas Enzyme sequence
MKYRLGLDIGIASVGWAVIRNNEDDEACEIISRGVRVFDVPEKPKDGGSLMAERRAFRSTRRTLRRRKVRIAMTRFLCESELGIVFDDVLKQNNLPCIYQIRFEALSRKLSKEELGRLLLHFIHRRGFKSNRKSAKTKEDGAILKGIQANQEKLKEKNYVTIGEYYYKEFILNKKSARNQFGNYDCVFTREQIEDEIKLIFSKQILPENFQRRFLEIFNKQISYDIGPGKPSPYHRENQYIAMLGKCKFDGEFRTYQTTFAGEQFRLWNNLNNLVLSNNTELTLEQKKNVAEFALDKCKITYAQIRKLLKFDESIRFKHLPYFGRFKENPEDKKSRWVFKEIEPEEAEKKIFLELKGRQAIKKGFGSDFCKLTDEEIDNIAITLACFHDEDKLRNELEQKIKPEYIESVLSIDMPKSKPVHLSASIIYKILPYMQQGKKYNEAMQEAGFNHAIAGTIDRKPKLCFNDAKDEIRNPVVTRAVSQTFKVINAIVDKYGSPQQVIIEVAREMAKNFKERNKIEKDIEENHQRNQHVINQLKEVYGMTSPRGQDIIKYRLAHDQNWEDPYGFGKKIDAERLFEPNYVQVDHIIPYSISFDDSFNNKVLVLTENNQNKGNRTPLQFLPREKIALFENWVNASKLNPIKKRKLKTIEPDVEGLKKSALVDTQYITKFLLEVLNNRLYVAPSKHQVPIKAIKGQMTSWFRKKHGLKKSRDNDEHHATDAVVIACFTDKFIKEITRFSQEKENKHISKSADEYGRLRLEPWQGFADDLKRLDTEQPISVSRMCNRKISGSGHDQTIRRYKDGHTISRVPLSKLKIGKDGEIENYFNPSSDVLLYNAIKQVLLKTSGEKELEKAFKDFRKPLSNGEQGDIVRKVKIKEKTSSYVKLENVGGVAANGDMIRIDVFAKNEKFYFIPIYAAEFYKSKLPSMDESYNFKFSIYPKDLIYIERESPMKLNLRIDKGEQESKESLGGYFYYTGADISTKGISIVSQNGKWKARTPILNLKTFKKMEIDILGNISEPGFQSRNTKTLVKPKGAN

SEQ ID NO: 5215 - protein, 1044 aa, unidentified
  REGION 1..1044: note = Description of Unknown: Cas Enzyme sequence
MAEKKFKYRLGLDLGTNSIGWCMLRLNKDNEPAAVIKSGVRIFHDGRNEKTKEPLAVVRRNARSIRRNLDRKISRRNHLLNTLVKYFLLPSNEIERKALAVLNPYELRSRAVNERLELFELGRLLMHLSKRRGFKSNRKVDKEDSSGKIKPAIERLKNKMQETNKKTAGEYLYSLMQNGKPVRARLGRIDGSNGYEIYLDRALIEEEYNLIMNEQKKHHKELTDDIINEIFNIIFYQRPLKKQIIGKCSLTGEDTKLKKAHVLAQDFILLQKVQDLRVFDDNQLEFRPLSNDEKDIIKRELRKKKEVSYENIRKLLKKYYENVKYGMFSHETLYKKLQGNKTNALMSDKEIIGDSWYSLSPEVQYDIIEELYSDKDNDELSKLYSEKFNLNESQINGLLNKAIYRLDSGYIRYGKTAVTNLNSIMDKDNLNLHDAREEAGYEKENKQDASEYLEYYGKVLPDSVVDPQIENPKNDEERYGKIANPTVHAALNQLRKLVNELIKLYGKPEQIVIELARDLKNSRKAKDVINKKIAENRKLNEEVDKTLQEYSEKYNTHIVKNKLNRDKVKLWRELGKDPLERKCIYTGEQINIAKLFSDEVQIEHIVPYSKTLDDSFNNKTLSMKQANYYKGNKTPYEAFKDSKDGYNYDDIIARAKLLNNDNKFKRFTKDAMDIYNRDGKDFIARQLSDTQYLSTRALIYLQSLYEKAHHSSIWTIPGQLTALIRNYLGLNTLISNDKNKNRNDHRHHAVDAFVVAVTSRSLLQKISYAASLQEDLDNRNVSSYRNKLLEKMPEPFPNYRKSLELAIDNIKTSHKADRSISGKLHEDTAYGIVENDDKYNVVTRWTVDKFKEQKHFETIRDNELKEIACSDKELFAKIVETRKIKSIRKLAKENPVIKIKDKSGRDYKAFAGGNNICVEIYEVDGVRKSEVIQLFDAAQKGFMPEWMKKYPNGKLLMRLFKGDVIGFIENRKYNYYTIKGISIANQNLKLLAINKAEGIFKKGLNILFDSNNKNSLNAKQFNISVTGIVTKKKTADVNFWKNRK

SEQ ID NO: 5216 - protein, 1209 aa, unidentified
  REGION 1..1209: note = Description of Unknown: Cas Enzyme sequence
MKKRILGIDTGTNSLGWAVVDKKDDGFYSLISKGSLIFQEGVKVEKGIESSKAAERTAHRSLRKQYFRRRLRKIKVLQVLIEFDWCPYLSPEALHLWHTKKMYPMDDAFMLWQRTNDNFEENPYYYRHLCLHNKLDLNEQTNRYILGRAMYHLAQRRGFLSNRLDQGNEDEKGKVKEGISALSKSMEEAGCEYLGDFFYKIYKEKGNTERIRTRYTDREEHYKKEFYAICKQQQLSGEQISKLEKALYFQRPLKSQRNGVGKCTFEPKKPRVADSHPSFELFRMLSFVNNIKVKGPHDVELRPLTTEEFEKAKPTFFRKSKPQFDFEDIAKAIAGKGKYQYVKEVGDKPYKFNFRMTQGVTGCPTIANLMSLFGDNYEEGIAERYILSEGKTPTQMVNDVWNVLYSFSDKDKVKQWGKEKLQLSDEEAERFSKIRFTHAFASLSLAAISKILPWLQQGLIYPHAVLMAKVPDIVGEKVWKSRGETITKELLLLISNFNPKDVSMTGTLDFCIKDILKDMCDLKPGAAERLYHPSMIETYPDAKKNSQGIYQLGSPRTNAVRNPMAMRSLHQLRKVINTLLREGTIDNQTEVHIEYARELNDANKRKAIAQWNKDRENKRKKYAEDIRSLYKQESGKTIEPTDDDIVKFQLWEEQNHICLYTGESIGITDFIGPNPCYDIEHTVPRSVGGDSTLENMTLCSSKFNRDVKKTKLPTELANYDEIMGRLEEWRDKIEKLRKDVDRVKTYSNMDKTTKDRLIQKRHLIRLELDYWIGKYRRFQMEEVPEGFARRQGAGIGLVGKYAGLYLKSLFHKTDDRSKSNVRVVKGVTTAEYRKMWGIQDEYMKKSRDNHVHHCIDAITIACIEPGEYNATARYYQQLEEYERNNAPKPSFPKPWPTFTEDVKAIVQEMLVVHSTVDNMPKRARKYVQTSNGRKLAMGDSARGSLHNDTYYGAIERDGEIRYVVRKALSALKETDIENIVDDVVKEKVKQAVAAKGFKDAMAGDVFMNELKGIKIKKVRCFTPSVTNPLHIREHRDKSRKDYKRQFNVTPDGNYCMAIYEGDINGKLKRAYEIVNMMDAAAYYKKSAGLTNQYPIAPENKNGLKLRCTVRTGTQIILLQSDIEDINIMDKEDIAKRFYFVAVMKKDGRIVLRFNQDARDATILKKERKSGAYKVGEDYRSEVMLSLSDFHALVEGVDFKINVLGEIVML

SEQ ID NO: 5217 - protein, 1509 aa, unidentified
  REGION 1..1509: note = Description of Unknown: Cas Enzyme sequence
MKNILGLDLGTNSIGWAVISTSEDTNISPKIKSAGSRIIPMDAATLGDFDKGNTKSQTAERTAFRGVRRIRERHLLRRERLLRVLHQLHFLPPHFEADINFIDHPGQININKEPKLAWIKNDSGQYEFIFKQSFEEMLADFVKHQSHIALENKGIPYDWTIYYLRKKALTEKISNEELAWILLNFNQKRGYYQLRGEEEEDKTNKLVEFYALKAVKVEPTDEKKGNDVWYNIYLENGWIYRRTSKTPLNLEGKTLELIVTTDLNDDGTPKLNKDGEIKRSFRAPKEDDWTLRKKKTESEIEKSGKTVGCFIYDELLNNPKQKIRGEFIRTIERKFYKSELKQILRKQTEFHPELQDKNIYYDCISELYPSNEAYRQNIQNRDFVYLFVDDIIFYQRPLKSKKSSIADCPYEEYQYVDRETGEIIHVPLKCIAKSNPLYQEFRLWQFLYNIHIYQKERILDGKLQTDVDVTHEFLKTESDYVALFEWLNDLGAVDQKTFLKYPPFGLKKQLINYRWNYVEDKFYPCNETKYSMLAKWKRAGLDTGIFNDEIEKSLWHILYSVNDKIELEKALRKFADKYQLNDSFVEVFKKFPPFVKDYGAYSAKAIKKLLSLMRSSKYWKENEIDNTTRKRIMNILNGEFDESISKRVSEKAIHLANISDFKGLPLWLACYIIYNRFSETKDIAKWESPEDLDCYIKSFHQHSLRNPIVEQIILESLRVVRDIWMRQGHIDEIHIELGREMKNSADKRKRMSEQISANENTNLRIKALMSEFMNNEYGIENIRPYSPSQQELLRIYEEGALNTASSVPEEILDIIKKFEGPKQPTKSEFMRYKLWLEQKYRSPYTGEIIPLSKLFTPAYEIEHVIPQSRYFDDSLSNKVICESEVNKKKGNLLGYEFIKAHYGEIIPIGFGKSVKILSIDDYEKFVKDNYARNNIKMQKLMMEEIPEKFILRQLNDTRYISKVVKTLLSNIVREKRADGNYEPEAISKNVIVCTGGVTDRLKTDWGIKDIWNEIVYPRFERMNTITNSSCYGHWENKEGKRYFQTEVPLEFQKGFNKKRIDHRHHAMDALVIACASRNIVNYLNNESASINAKIDRHDLQRLLCEKKKNDENGNYKWIIRKPWATYTEDVLSTLNDIIVSFKQNLRVINKTNNNYSHYNIEGKKVICRQAKGDNWAIRKPLHKATVFGRVNLRFIKEVRLSVAISNPNSIVDKKLKNKIKELYKSQYKPKQIEAFFKSNISEWENLDPVKVKIYYYTDETTQPMAAVRKSLDSSFTSKVISESVSDTGIQKILLKHLQQKNDDPAFAFSPEGIDEMNVNIEKLNDGKKHQPIRKVRVYETLGNKFAIGETGNKIKKFAEAEKGTNLFFAIYQNDAGKRSYETIPLNVVIEREKQGAFPVPEKNENGDKLLFWLSPNDLVYLPTTEELEIAKISFPIDSSRVYRMVSSTKFQCFFVNERVSSCIVDKMEFSSLNKMEKAINGEMIKAICVPLKINRLGEIIEINNKKVNI

SEQ ID NO: 5218 - protein, 1466 aa, unidentified
  REGION 1..1466: note = Description of Unknown: Cas Enzyme sequence
MKKVLGLDLGTNSIGWALVDLENNKIEGMGSRIIPMGTDKQDYEKGVGITKNATRREKRTVRKGNKRYKLRRNKLLFILNELEMLPEQFKFKELPDNIQSTKYSAGIPIPQKLQELELCRIEKNREYDEFGKRIDRQYQNGKRIKKEPIALLDYKLKVKALNNPIELKDFGKILYQFNQLRGYSGGNNDEDKKMKKDEDEDGEKKKYEVFIQKMKIGNIEQLDGTFTSKGEKLHYYNVTFIIDEEEKEGRTKLQNLQDKIGEEEEFEVRIRRNKKGEETSIEVALPQKSNWRKAMELSEKTLKEENLFISQLRLRDLQQNKWTKIRNRVFLRNRYKEEFDKIWETQEKEFPFLKNCPKETLEKIANYIFPGNSESQLKLRKTAIEEGLKYIIKEQVIYYQRPLKPQTELVGNCRFEKEEKVIPTSHPFFQEFRCWKQINNLFITSKTLIGNKYAYQNRYLTTDEKLAIYEKLQTQKEVGFATVIEILNQDKNKGKLDKEQKDYFLNGLNVKAKLKGCDTLISFKKELGDYYNGFISQNKQLVEQLWSVIFDVKNHDGSEYDVKSTRVSSIISVLNNYTDEKTAIELSLKLAQKIKFPRKYASLSQKAIQNILPLMIPNPLNIPETIQQQFKNIQHLIETGEIINDLKYKLEDYVIDFVKNNPNVLQDGGLMESFAISLIYGKHTSETIKPQIKNYHDIVEDKERAKNLRNPIVAQIANETMQVVKAIWKQYKFNPEELEIRVELARDLKNSAAEREKIWNGQRKNKTINDKAKDRLREEGIAITEENILKFRLYEQQKYMSPYTKKKIIPFSKLFDDKEYDIDHIIPKSRYYDDSFSNKVICEKYINEEKSNRTAWEYITQQNSKYKDGSGELEILSANDFLNHVNDNFFGKKKKNLLAEKIPSNPVERQLKDTQYISVAIKSELAKIVGSENVKTSTGEVTDFLRSRWGLRKLFMNLTESRFKQMELWDLDENGNPKTSWITKYFDKEKQKHIYEIKNWSKRYDHRHHSIDALVVALTTQSHIQRLNNLNKYYQDELTARKDEFKIETKEGESIFEGFFNLEAERRDEILKEIESSRKFDAPFPIIDENGNPILDKNGNPKSHLVDYVRKHLETMIVSHKTKDNLGIKINEKTNKKQLKIRGALHQETYYGKLNGRDIKRVEMSSLSITKDKITKQEQIVELIDKVLEKEIIEHKKKYDSMKEAFTGEGLKTFNDKRMAVSKQPVYKVKVWYNKEEKKESGLQRLYENNSKQSVITGDNYLFLVMEKNGKRIFDIASLYDSVSIANEALKNNIYDFKKKIVEDYRVKHKDKPEKTLFTLQKNELVYLPTNKDDEILRKTNTELAEWLSIAENKNIFCKRVYKVVKFTGKDCFFIPHNFANTISVAKDLSKEDQQELKEKYGEKTIPKQEKNYEEFGSFGTCAKTEVNANFVKELVLKKEFEDESPMKIQESCIKIQIDWLGNISI

SEQ ID NO: 5219 - protein, 1510 aa, unidentified
  REGION 1..1510: note = Description of Unknown: Cas Enzyme sequence
  MOD_RES 739: note = Any amino acid
MKKILGLDLGTNSVGWALINQDESKSEVVGLGSRIIPMSQDILGEFDRGNSVSQTAERTGYRGTRRLRERYLLRRERLHRVLNILNFLPEHYGKSIDFEQHFGKFIDESEPKIAYRRNEVTGKMEFAFMNSFNEMVANFKLTQPHLVGEGRQVPHDWTIYYLRKKALAAKIEKEELAWILLNFNQKRGYYQLRGEEPEEEQKKRVEFYSLKVVNVEEGEESRTKGEKWYSATLKNGWVYRRTSKTPLDWIGKTKDFIVTTDIDENGEVKRDKDGVEKRSFRAPLEDDWTLIKKKTEADVEHSNKTVGTYIYDALLLNPTQKIKGKLVRTIERKFYKTELEAILTKQREFHKELNSRELYQACLEELYGNNEAHRNSLGARDFTHLFLNDIIFYQRPLKSKKSLISNCPFEFRIYIDKSTGTEVKESIKSIAKSHPLYQEFRLWQFLQNLKIYAKERIVDGGVVADVNITQELLITEEDWVALFRWLNDRKDVDQKALLKYPAFGLKKEIDKYRWNYVEDKTYPCNETRALINSRLSKVANVPTDFLTRGIEEALWHILYSVEDRHEIEKALKHFAILHQLADDFVDNFKKFPPFNKDYGSYSAKAIKKLLPLMRQGECWHKDAIDSNTLLRIDKLLTAEFDPTIRDRVRDKSINLKCLDDFKNLPLWLASYVVYDRHAEANDIKRWEKPSDVEYFLHNEFKQHSLRNPIVEQVITETLRVVKDIWTHYGNGAENYFSEXHIELGREMKNPAEKRKSMTQKISENENTNLRIKALLAEFLNDSSIANVRPNSPSQQEILKIYEEGVINAENEIPDDIQKISKLSLPTISELIRYKLWLDQKYHSPYTGEMIPLAKLFTSAYEIEHVIPQSRYFDDSLSNKVICEAEVNKDKDNATAYEYIKNNSGKKIELSFGKEVTLFTLTEYEENVKRSFSRNRGKLKKLLMEDIPDEFIARQLNDSRYISKVVKGLLSNIVRVDDEQEVTSKNVISTSGAVTSILKKDWGLNDAWNEIISPRFERLNQLTNSTNFGHMRNNLFVPYVPLELQKGFNRKRIDHRHHAMDALVIACATRNHINYLNNSYAMAGKRDLRFDLRANLCYKSPNDDGSEGYRWVFKKPWNTFTQDAREALSNTVVSFKQNLRVINKSVNRYQKWEVDEHGQKQKVEVKQVKGDSWAIRKPMHKDTVSGRVTLRFQKAVNLSVAIDTPEFIVDKSLKAKVKELLAIPYDKKQIAKYFKENDNQWNGKPVSKVEVYYFDGENAASRIKVDETFNSEKIKKITDTGIQRILLNHLQQYSENQNGKVVEHPEIAFTSDGLEAMNRNIQNLNNGIYHQPIYKVRTYEPMGSKFAVGTIGNKGTKFVEAAKGTNLFFAIYLSPSGKRSYETVPLNVVIEREKQGLSPVPEHDEKGNALLFYLSPNDLVYIPTQEEQDSPQSVDLERLTKEQVLNVYKVVSFTGNRMYAIPANVAQSIVDKVEYTQLNKVESDVILKRSIKEICWKLKVDRLGNVVDVIR

SEQ ID NO: 5220 - protein, 1541 aa, unidentified
  REGION 1..1541: note = Description of Unknown: Cas Enzyme sequence
MKVLGLDLGVTSIGGGLLTLPDKFEDWGKEGRIEWVGSRIIPVDGDYLKKFEIGSEVETKAAFRTKGRGLRRLKHRYVLRRTRLIKVFKILGWLTPDFPENFKKKIRKEDGFKFNISDYLPFEQASINEATKLLGIKNKEGKLTCSEDWVIYYLRKKALTEKISLSELTRVIYMFNQRRGFKSGRKDLKDVTEDVAEKKRVEILAIKQVLQISEQKDKNGKFKFQIIPDNCCAKIPVEPWEELRYKKPEWEGKTFALLITVKNGKQNKPLTPKEDDYDLLLTALDNLIENSGKQVGEYFFDELVNDKNYKIRQQTVKREKYQKELKAIWERQSQDDCHPELKDKTKLFKIAQALYPSQTKAGSSKSKEILSNDLYHVIANDIIYYQRELKSQKSLISGCQYEKLAIERDGQKIKIGVKVAPKTSPEFQEFRIWQTIHNIKIYEREQYLDGHTMIDEDVTGLYLGNDSKGFEAKEKLFELFDSNGEVDENKVFKSINETHSVKLKKETHRINLFYKKDLKVKGNETKKLFRKYFEKANAEAEGKLVLNNPEKFSRLWHVFYSISSSDSSKSQKGIETALKNPKIKFGFSDETIKTLTSIPEVPKQYASLSTKAIKKLLPLMRCGKYWNWENITIENQLKIQKIIKDGWEKVNKETGEVVNEKPFFKTDQVQGLATWMAAYVIYDRHSESVNTEKYTSYNQIDVMKLVPNNSLRNPLVEQIVRETLFLVKDLWRQHGQPDEIHIELGRDLKKNMEERAKISEANTNNQQERKRIKRLLRELLNDSFEEYLDENNKVTSHFVTRPNPESPMDIEKFKIWKSLAGALPEDIATYFKEKDKKEKLPTSAEIKKYVLWLTQNCKSPYTGNSIPLSKLFTTAYEVEHIIPRSKMKYDANENLVICESAINPEPYKGNRLARNFISQFSGQIIKKNNSVIKIFTEQEYEAHCKATFRGKKLKNLLATEVATDFISRQINDTRHITRKIAELLQPVVKNEHGLVFTIGSITSDLKREWGLSKIWKDLMKPRFERLETILEKPGILIKPDEKHPNEYHFHVPDEPDLDLKRIDHRHHAMDALIIAATTKEHIRYLNSLNAVDTSEDLMRVKRYLVKGKVRQFAKPWQSFTEDVKDSLATTITSIKVNNKVVSKPKNKYQRWELKEGKWEKVLAKQEKPKDPNKKWLAVRKSMFKEPQGIIYIKEVYEEKNIIKAIEIQMNRMKVQNTPAMAVASYIYDKEAREIVRNLILEFDFDTEKIKKHLKKNPLKDNSNKLYSFIKVAEFVSYASKRMSLNKKEYVEGLTEEKIKKDFPYPEKSRIAQLFINHVREFKNNPKEAFSLEGLEILNKKAISDPHIGKPIKKITRIESKSDDDKFGNRYVEVDKGANAFFIIYENLLTGDRKEMHSLATHKAIEKLVQGLPIADAKEGYKAIIISPNQLVYVPTSEEILNPELIDFETKDKKKREEIFSRIYKMVSCSDKECHFIPHFVSSSIISGVELGSNEKAEKAWDGKIEYLSNSKGKLSRRNSGTTIKDICIKLKVDRLGNISRA

SEQ ID NO: 5221 - protein, 1391 aa, unidentified
  REGION 1..1391: note = Description of Unknown: Cas Enzyme sequence
MTKVNKDYIVGLDIGTDSCGWVATDKKNNILKLQGKTAIGSRLFEEGHSAADRRTFRGTRRRLNRRKWRLKFLEEIFDPYMTKVDPYFFARLRESGLSPKDSTKNTQAIIFPTPKDDSDFYYKYHTIYHLRQALMSEDKKFDLREIYLAIHHIVKYRGNFLQNTPVKSFDASKINVKKTIKALNQLYAGSSNENQIELNIENTSKIEDIIRSKTTFKMDKAKQISKLLAMSSENKDINKQNRNIAKQITNAILGYKTQFETILSKKIDKNDKATWEFKLSDADVDDKLAILLPDLNQSEQGIIDEIKQLFSAVTLSDIVDEGKTLSESMIRKYNDHKKDLKLLKDVVRSQKDKDKAKRLSLAYDLYVNNQHGKLLEAKKAFKVMDKDKFYKIVKNNVDDSESAKTILKEIELDSFMPKQRTNQNGVIPYQLHQIELDKIIKNQSKYYPFLAEKNPVIDHQKQAPYKLDELVRFRVPYYVGPMITATDQEKTSGKNFAWMIRKEQGQITPWNFEQKVDRMASANKFIKRMTTKDTYLLGEDVLPANSLLYQKFTVLNELNNIRINNHRISVDVKQDVYKNLFKKYKTISSNKLSNYLKNNYNLKFVKITGLSDKSNNSKFNSSLATYYQLKHLNILGDKIDDPNYQKDLEHIIEWSTVFEDKSIYAAKLKTIDWLNVEQIKALSNLRYQGWGRLSHKLLTGLHDKNGQNIMEKLWDSQKNFMQIVKEPDFKAAIEKENQSVVKATDTEDILADAYTSPANKKAIRQVIRVADDIVKAASGKAPSQFAIEFARESEKNPKLSQIRGSKLRKSYEKVFENSANKLVDVSLKEELDNSIKSRKLVRDKYFLYFMQGGRDAYTGERINIDEVDTKYQIDHILPQSFIKDDSFNNRVLTLAKINNEKSDRLPFNYSNRPADKGRLGMTMHQMWHEWLESGLISKYKYRNLILDPNQVSKYQKSGFINRQLVETSQIIKLVATILQAKYPDSEIIVVKAGYNHALRERLNLCKSREVNDYHHAIDAYLTTICGNFLYQVYPDLRPFFVYGQFKKFSSNPDLEKQALKKHKKFDFIWPLLKKKDASEEIHQFKMGPVVFHKHEDIFNKLRRAYTFKYMLVSREVTTRDQEMFKMTLYPRADHDIKKSRKLIPKSKNMPTNIYGGYTSNSDAYMALVKIKKERSFIYKIIGVPMRALSKLKLAKKQGKYDQVLKDVLTPVIMLNKNGKTQRGIEGFRILKGKIPYKQVVLDGEKKFMLGSSTYVYNAKQLTLSNETMRIVTNNFTIKDDRSKLLNQAYDEILEKVDKYLPLYDINKFREKLHIGRYKFVNLSIKEKQEMITQILNGLHDNPVVGNLKNIGFATPFGKMQESTGVVLSSEAKLIYQSPTGLFKKRVKISDL

SEQ ID NO: 5222 - protein, 1404 aa, unidentified
  REGION 1..1404: note = Description of Unknown: Cas Enzyme sequence
MRGGNYYLGLDVGTDSVGYAVTDQAYNLQKYRGKHMWGVHLFDAASGKKTRRGFRVNRRRLERRKQRINLLQELFAQEINKVDPLFYLRIEESALVREDSQEPTALFNDPNFTDKEYYQKYPTIHHLIDELMHSNKPHDVRLVYLACVWLVAHRGHFLSEVSMENLTSTKGFKQVYLELSEYLKIAGGNDGDSVLPENDESIEQALNIMQSKLGKGKKFDQLANALYDGKKNIPKIEGYPYSIDAILKALCGSSVPIKTLLLDDSFEGSIDLNADEDKQALMIAELGEHGDLFMAMKKVFDIVLLRNLLGKHRTISQSKIAVYKQHQKDLKLLKQFMRTHANKEQYNDMFRKAGKDNYVAYSYHGKKAVLANIKKKASQEDFNKYTEGIVKKIAALEALSKEEQEIYADMYTRLEAGTFLPKQKTGENRVIPYQLYLYELEEILKKAQSYLPFLNQADQYGSVADKIKSIFIFRIPYYVGPLSKVGENQPYAWIKRKAQGKILPWNFDEMVDKEESEKRFIIRMLNNCTYLPAEKVLPKESLTYQKYAVLNEINKLKIDSIPITVEMKQKIYTDLYQQTSRVTRKRLEEFLLTNNYMEKGQTLSGVDICLNNQLTSYHRFKRLLDSKQLSTKQVERIIEQHTYTTDKPRFKKWLEDYFKKQGIELSADDFNYICSLRFKGFGRLSKELLTRFEGESIDTGEIFTVMRALWETNDNFMQIIEGSKYTFRQNIQQEIQRYYQQNPRTLDERMEEMWVSNAVKRPIIRALSVVEDVVKAQGGPPQKFFIEMTRGATAEQRNKRTTSRREQILELYKKCKHEDVPELLSELEKMGVEEEINARLQSEKLFLYYMQLGKCLYTGEKISLSDLTSKHYDIDHIYPQSYVKDDSIINNKVLVLSTANEAKDNNYPIKADVQKRHKGFWRFLHKNGFMSEEKWKRLIRTKPFSLEEREGFIARQLIQTAQSTKALATLLKEKYPDSEIVYPKASLSAEFRQEHGLAKSRLYNDLHHAKDAYLSVVVGNVYDMKFTKHWYLDRRKKAEEEQKIADGNYSIKASYLFGAKSVIQDYRQTLLWDGPNMLEKVKKTCSLNDAHMTIYQIEKRGGLFDQMPLKAAPGLIPRKAYLPTEKYGGYPTPSVTFFILVSYTVGKKKDAMFMSVQSINAEGVLKDETSTLAYAKKRVEEIIGKEVKDLSLPLGLRPIKVNTVLSLDGFRVRISNSSNKGKTVSTPSLVPFSGEKLFRTLQETTKDGSVIEIEETIQHYMKHLERLNKKVVESKNKYMYNERYDKVTEEDNLRLYDIYVSKLTDSIYKKRPTSPVSTLISGRETFAQLEIFKQAEVLLNIHSIFDKNGGGSNLTLIGGRPNAGVANLSSMLSNWKKNYKDVRIIDSSPSGLWEKRSFNLLTLV

SEQ ID NO: 5223 - protein, 1410 aa, unidentified
  REGION 1..1410: note = Description of Unknown: Cas Enzyme sequence
MSVHEEDYYIGLDIGTSSVGWAVTDSSYHILRAKGKDMWGARLFDEAQTAVARRSNRVSRRRHEREKQRISMLRGLLSNEINKVDPGFFHRLDESKYWIDDRTGDNASQKYAIFAKGSTGTEEYTDADYYRQYPTIFHLRSDLIHSDKPHDVRLLYLALLNMFKHRGHFLNESLGTESSSALDDIWNEFLNSFSLLSEVQSEDAAAPSINPFETVDRTKLIEILLQKGISKSQIREDAAKILNISRKDKREYSILSLVCGLAGNLEDIFGKETFSALEDKGKKSVNFRKGSFEEDFAEVQDFLDEESISLIMSIKEIHDVLLLDQIMQGHSFLCEARVSMYEEHKNDLELLKKTIKRLAPKEYSNFFRKMQDGNYSSYVGSTNCDKTGGKVRRYVADHATAKRNNEPDELYKTITKILTPFKGDEDVDNILSKITAETFLRKQLTSANGVIPNQVYVREMKAILEKAEVYIPSLKEKDSSGLTVSERILKLFMFHIPYYVGPVGGLNNNNGNKWAVRVSGEPITPWNISDVIDMGKTQQAFIENLIRHCTYLKGEKVLPKHSLLYEKFMVLNELNNLKIAGKPIDVALKQDIYNDLFMKGKQVTRRQLSDYLITRGKLSKGSESLIGGIEDRFNAYLSSVGKFNGVFEPPFLDLQHMLMIEDIILLGTIYGDSKKMFRKQIDIKYGPRSDAPVKLTDKQIKRISGFKFTDWGRCSRAFFETEGASKEDGVIRTIINALWETNDNLMQLLSPDKYTYTDNLSNLITRESKALSDWTIDDLYDMYLSAPVKRMVWQTLHVLSEIEEVMGHAPKRVFVEMTRENREKGVRTRSRKSQLLELYKNSEIKKEQRNWILELEGHTEQEFRIKKLYLYYCQMGRCMYTGEPIDLEWLMDDNLYDIDHIYPRHFVKDDSIENNLVLVKKAKNARKSDVYPLTPEIQSRCIGLWKDLQKKNLISKEKYDRLVRTTEFTLDERVGFVQRQLVETGQGTKAITQILKEALPESSNVVFSKAGVVSQFRHDFEIPKCRSINDFHHAQDAYLNIVVGNVYYTKFTKNPRNFIKEAMTRSGDDQYKYHLSKMFNYTVRCGSETSWICEKEGNHNTIDLVKRQIVKTTPLISRRSYIATGAITRKDTIYGKQKTSKADTGTYYPCKTSDKKLSDVTRYGGKSDIRTAAYTLLSYKEGKKVIRSIEPIPIFILREGNTNNINMTSLLNYLKEQITSANKKPCSDFQIVYPIIKLYSLIKVDGYYYYIGGCAGNRYYLYNAVPLKLPANEAWYIKKIDKAINNNDYYEHDENNNLIITKESNAALYNLILFKLNSGIYTNKKGPLLSSITKVKESFYDLDIQEQCKFLQILVSVFDIKTQSVDLSILGGVKNTGVMFLPKHINSLKECELINLSVTGLYENRINLLK

SEQ ID NO: 5224 - protein, 961 aa, unidentified
  REGION 1..961: note = Description of Unknown: Cas Enzyme sequence
MQNSALGFDVGPTSLGHAFIDITNKSLDIGVRIFKASVHPRTQEPLNKKRREARLSRRGIARTKKRVNKVINCLIKKGFLPEEYRQIEGREQLCQKIGNVMYLRSIAADQKITKEEFGLVLTHYAKHRGFLSLKKTQLGDLNNSKDSHIIKLINSTFSDNDEADEDETEKKVTEYMGAIERTREEVATHGTLGKYQNSILETNLGVPGESLLPVRYSSSNGNTGVNKTRKMVIDEFNMIMDEQMKHHPEINAAMREYLYESIFFQRPISWDRDTISRCALEGDRRRVCDTAKLIAQEARVWMLVNTLKFDGNGTGDADVFLSQAQKKDVATLFNNWSGKSEDVSITAIRGAIGISARTEFNMNSDTIRKCNTTNYRMREAIGSAWDDTPYQDEIIDLLLSDVGKTSIFYSLQNKYGMDETQAIKICGVDLESGYLAYSTKAIRKLLPHLMNGYMIHEATKRAGYRIKKQEIVDRMVQATDTNNPIVNRSLNVLRKVHNAILDDQGRKPDTVGIELVRDLVNNTKKRKEEIKQQNKNRLLNAEARDVIKKTTGIGSPSKDDINKYVLWVEQKKKCIYSGASINLSQLFSASVEIDHILPLRQSFDDGMGNKVVCFAKENQTKADRTPKDAFGKTAQWKVISNAITAAGYPKRKAKKFKVRTHEIQATPMRLLNDTSYVAKTAKFELEKVHSLVQPVKGMMVSKLAKEWGLYSMVGKTVTVGDETLEIKDREDNRHHAIDAIIIAFLSLYSYRFEGILRNNLVEGAAADILAGRKLNIPMPWKGFRDDVKAALDVMVTSHEVNTKTTGAIHDATALGNVPGKNKISASGSYFQVVRGGHTKTYRFGNNHHMDVFDHGPGAGANFKRYKNKLVTMAGVYESKRLGVPVIDKTQDGYWGTLFKGTTFTLNDGDHYVITGFEQGGNINYRQVNYNGIDKKILGRTRVTTLMGEMGLTIVKVDLLGH

SEQ ID NO: 5225 - protein, 1158 aa, unidentified
  REGION 1..1158: note = Description of Unknown: Cas Enzyme sequence
  MOD_RES 74..77: note = Any amino acid
MKYRLGLDLGVGSIGSAVIELDNENNAKDIIDAGVRIFEVSEGAEERRLKRTARKNLVRTKKRLELLAKKLFEXXXXGLWPNENPEGTDKLKSKSPYKIRTDALNEKLASPYYVGRAVLHIAKHRGAGFVSASEETEEEILEEGEKSKAKKSSYDMMLHHLKETNSKTIGEFFYNKIISGKGNDKTVRQKKYAIEKNIVDYAIPRYLVKDEFNKIWDKQAEFYPQMKKENLKKEIYDILFYERPAAPYATGKCIYFREEDRLLKAHPLSEMRRIYEEVNNIRILNDMNKRKLTLEERDSIVNELLLKGQNAGKQAIKKLLNLSAQHKISLVDDRVIKAYLYSRPEFANNEHLQNMNENELSSFIEFLAEPKMSKDKNARLYNEDALIEYLKPILKIDDEKEIGNLLTKLPKGRGMLGISATKIILEKLKEDVLTHREITDKLAETDKRFMAEEEIARQNQGKCFQLPYYGEILQTDTAPLPPLMINNNKSLNPDEIRWGKIANPAVHMILNQIRLVVNEIIKIYGKPYDINIELGRDVGMSTKKKKEFENQQKQNEKLNEEAKNYLKEHKIAINNKNILKYKLAKEQGWKDAYNPTQNISSIFTGMEIEHIIPQAKGGTDTYNNLCLVNSNDNSNKGDRYAYEYFEETKTQEEIREILKNARSRTPQKSWRFEADAREKYEESGDKEENTRYLTDTRYVAKMAQRYLRAIVDCSDCDEVMQTRILAVKGGQTAKLRQHWNLYGLEYDLMGLDIPRYVNCPPYWLELDTGEIIEGINKPDIDGKWKFFDKAKNKEWQPKPRIDHRHHAMDAITVACANRGLIQKMAEENDINKIHYPLPLTSVESLADFRRKVISCLKDIKVSHKPNHSKAGQFHKETGRTVLCQNPDDPNSLITVYSRKILQVVKSAKDLTKLLIPETIKNEWHEDIAEHKAKQAKLVQDFELYMNTAEQILIAENEQGVAEGKKETKITEGRILLKAFRIIQDKGLWKGDKFRCYSNSSSMINIPKHGVAYEAQNNHCIDFYQKNGKIGWEVIKRFDANQADFEPQWKKEGGKIIWSVQQGDILELDTPDEWKQYTDKERCLAKVKKFSEGKFCIDYITDARMTSPKDKTLEYMFVNSLEKGLSYYTSHKARKVELTPFGKIKKKHKVLWNGTKTAA

SEQ ID NO: 5226 - protein, 1348 aa, unidentified
  REGION 1..1348: note = Description of Unknown: Cas Enzyme sequence
LSKDYFLGLDLGTGSLGWAVTDDNYEIIRAHGKALWGVRLFESAQTAEERRGFRTARRRLDRRNWRIRLLQEIFSENIAKVDSGFYLRMKESKYVPEDKRNMNGECPVLPYALFVDENFTDKDYHIKFPTIYHLRQWLMNTDETPDIRLVYLAFHHMMKHRGHFLLSGNIESIKEFNTTFQQFIDCVKEELDLEFHLTDEEIKSIEDTIKDRNQIKSAKKMQLIKSLHAKSVCEKTLLNLIVGGTVKLSDIFGNSEFDNLEQSKISFSDNNYDDYIGTVESDLGEQFIIIEKAKAVYDWSVLVDILGDYQSISDAKVAIYEKHKKDLHYLKNLVKDKLDSQVYNNIFVQTDEKTANYSAYIGMTKVNGKKVPLADKQCSKDDFYNLLKKHVLSVLEDLPEVEYLKTELERGTFLPKQVTKDNGVIPYQIHLYELDQIIQNLQQRIPLLKEHGNKIREIFTFRIPYYVGPLNGMTKGGKTTNWMIRNEGMESEKIYPWNFQEVVNIEASAEQFIRRMTNKCTYLIHEDVLPKNSLIYSKFMVLNELNNLRLGGEPISVKLKQGIFEDLFKHSRKVTQKKLKDYLKRKGIIAKEDIPNLDITGIDGDFKGSLTAYHDFKEKLTGCELKEKDKENIILNITLFGEDKKLLNKRLSALYPHLTENQIKGLCALNYSGWGRLSREFLEGITAPAPETGEAWTIIRTMWETNDNLMQVLSDKYQFAEAVEQKNGQDEIKNISYDLVEQLYISPAIKRQIWQTLQIVKELSKVMETPPKRVFVEMAREKSESKRTESRQKILIDLYKKCKSEEREWVTKLADIETTRFRNDKLYLYYTQKGKCMYSGESINLDDLWDNNKYDIDHIYPQSKVMDDSLDNRVLVKKTYNAEKTDEYPIREDIRSKMKPFWKSLLDGGFISKEKYNRLIRSTGFEPTELAGFIERQLVETRQGTKAVASILKQILPDTEIVYVKAKIASQFRQEFKLTKVREMNDLHHAKDAYLNVVVGNVYYTKFTKNVAWFVKNNPGRSYNLKKMFTSKDIVNNGEIAWKAGNNGTIVTVKKVMAKNNILVTRRAYTVKGGLFDQQIMKKGKGQVPIKGNDNRLDGKEGIDKYGGYNKATGTYFMLVESEDKKGNRIRTIEFVPLYLCEKISENKKAMLDYLVSSSGLKNPQILLSKIKINTLFKVDGFYMWLSGRTGKQLIFKGANQLILTAKDTEILKKVIKFVTRKKENKNLEIVSHDELDTSDLLDLYDVFLDKLINTVYHVRLGAQVTTLTKKRENFSKLNDEDKCIVLSEILHMFQCQSGSANLTLIGGSAKAGILVLNNNITNFQQISIINQSPTGIYEREIDLKGKL

SEQ ID NO: 5227 - protein, 1057 aa, unidentified
  REGION 1..1057: note = Description of Unknown: Cas Enzyme sequence
LKFKNQNKHLDKNLRLALDIGTNSIGWALYDIGRDKKPMSIVGTGVRIFSSGRTPKDTTLNATRRQARLQRRQRDRYLQRRAYLLHLLRKYGLFPKDVFSSKKLECLNPYELRAKGLDEKLDLFHFGRALFHLNQRRGFKSNRKSGNDKESGIIAQSIKKSEEQLKEWGVRTYGEFLWKRFQKMQESRKHPGSQQEHWVLARKPIGAGSKDNYVVYAQRSMLESEFNKLWDSQARYHNKLKDNRLKEIFFKCIFYQRKLKKPIVGNCEYLTGEKRIRKALPSFQKFRILKELNNLAYNQDGHNYPIVEMKRGLEFRDHVIKKLFQKKDKIKFSILEKEFQNFFPDIGNFSRFNLDTPNRKYLEGELTSFVLSKIIPKWQEYSLEIQDRFVELLEGESKTGDFMEDDKDVLEKLKSFSEENNINLSENQLENCMNKLSKLPSDHGSYSKKVIDKIMPFLEKGELEREALENAGWHHSRYNGEPLDKLPYYPEVLKNHCVDMSRNPNKEDLRIPNPTVHIAFNQLKLLVNDIIRVYGRPMQIVVETARDLPVGKKTKDELKKRQKENRKRNEEAKEFIDEFKQLNNRSNRLRYQLWKEQNHTCVYSGKTISKSKLFTAELETDHILPYSRTLDDSFMNKVLVYKNSNQQKGNQTPFEAFSSNEEYWKGILQRVPKSKKSKFDKDAMKKFEKGKFLERQLNDTRYISKYATEYLTRICKEVWTVRGQTTALLRPLLQHEEKNRDDYRNHAKDALVVGLVDRSLVQHISNIAKDKEGTDKTRLQNVAKAIKKDVLPWPSFKEDAKKAIDKIIVSHRRRTKKEGQLHNATAYGCVRDVSDFSKSIDVIHYVDMLKKLDLDKVSEKKINNKIVSERIKKDFLEEVEKNQVLSKEFLINYHQKTGVRRVRLKETKKVIPIKNKFGKIYKYFNGNGNYAVHLFEKSRGKWDAKVIDTFSANQKHFKPIPDKERLMKGDMLFFDDRFWRLVKFDQNKSLIFVEHYLSGNPDELRKDDKTKKSVKQNTPASLQKSNPKRVDISPCGVVKLSEFVLINTDCKKSDQSA

SEQ ID NO: 5228 - protein, 1158 aa, unidentified
  REGION 1..1158: note = Description of Unknown: Cas Enzyme sequence
MEKPITTLGLDLGTNSLGWCLIESARQPRPGGDGKILALGTRIFSPADMAGRDPKTKASLAVGRRDARSMRRRRDRYLYRRNRLLANLIQTGLMPPGKHDRKALVDSVQDGPGHDHSKAIYGLRARALDEKLHPHEIGRVLFHLNQRRGFKSNRKTDGNELEDGKIATGTKRTDDAMQEASARTFGELMYKRRLEGETVRTRLRPEQTYDKDGEEKVNRNGETVMTDGYDFYPARKHLEAEFDAVCKAQTRHHPDLLTPDTVEKLRERIFHQRPLKPVKAGQCAYNAEETRAPKAHPLFQRFRLVKEINELTIINELEGRKSKGRRLTIEERDVLLLAMRDKKTCTFPTLRKALKLSSDFRFNKQTENRNGLEGDVVEAELASKDCLGPKWRDLPLDQQTIITELLRTEGDGQKLYERLQKEAGLSEDDARAVSFAKVPDGYGRMGVTALASLLDEMLTGTTDDGFIISEAEAAIRVYKRSNSERDLNDPGFDELPKYQEVLQKNIIPGDSPGEDVDTKDAAYDRKKGKITNPTVHIALNQLRRVVNALLASERKRRGDVHWKPDYINIELGRELKMSDQQREDVNKIIGTNTKAAIARSQTLQEMGAKDNGYYRLRLKLWEQLNSDPLNRICIYSGKPITKEMAISEACDVDHILPYSRTMDDGIGNKLLCFSDANRRKGNRTPTEHWSGEALEDVRARAANLPKNKQWRFTDDAMERFEGERNFAARQLTDMQYASRMALNYLSRLYPAEEPDMDGELRRHTHVRTLPGRMTEMLRRHWALNDILHDHNFSNPAKPKNRKDHRHHAIDAAVIACTSPALIQAIATEAGRNEIQGAQRLVHNLAEPWQGFREELREKICASIVSHKPDRGSVNATNAGQTSGKLHKDTTYGPTDEKDHKGKPQVVRRKALSDFKSSKDVAAIRDDHLRKTIEEEAYYFEQDDLTTKDKEKAYQDLFGKLSRAENWKGNKNPFYGLRHIRVLETEYPKWIAGKEGRTTKTGKAPKGYLTGSNHRIEIWEVPPTGKGKNGDTAQWQGEIVSTFDAHKPGWASSIRSEFAIARKLMSLHIGDMVAYDDRETGDRIIARVRKFSGNQIYFDTHNEAGDFGEREKDKNDPFTSFRKNVGPMRDLNFRQIRIDEIGRVWDPGPLKSSFALKSD

SEQ ID NO: 5229 - protein, 1156 aa, unidentified
  REGION 1..1156: note = Description of Unknown: Cas Enzyme sequence
MAVTLPKDDVRYKVGIDVGLNSIGFCAVEVDDDDQPIRLLNSLVFRHDAGVDPSAQKSSLTRKKISGVARRNRRANRETKKRLVALDRLLSEELGWPLPNLEGYPDPHEPWHARAWLLEGYIADDVKRKEMLSIAMRHIARHRGWRNPYMKPASLASLPYPSEFITKLNEDTSRAIGREFASEATQGQLVDAFILASLSLATTPVLQVLEESEKDSSNKNKPRDIVLSRVRGDKGVIGGKLHQSDNAEEIRRICATQKISQEQVQRLIEAVFKAKNPREVGAAYKLVGHDELPGQEKYIRAERAHPSFQKFNIVATLTNLRINEAGSKRRLSSKELQTLTNYLSNVGPKNEVTWFDVAEKLNIDRSDLQGTARASYDGQAALKYPPRDLTSVSINKSKVKALKNWWKQAPEDQRGQLIDYLSNSGGSDTPQTDDELDALTKLIQNFNEKDLEELEKISLPAGRAAYSVNSLTKLTQLMLEEGIDLHEARKRLFNIGDDWKPTPEPINSPVGNPAVDRVLKQAARWIDMATERWGIPVSVNIEHVRGGLSSDKVAKKIIRENQARKEKKDEAGEKLAEQLRLSGCAKDNLIKKQFAIQRQNSQCLYCGARLEFGEAEMDHIVPRTNGGSNNRRTNLAAVCKDCNSSKSNTPFAAWLSSGKAGSKVSWEEVKGRVNSMILEKADLSEDYDDDSLIEFYSKNESKKFRKEIIARLESKKPEEEFDGRSLESVAWMAVELRGRIVGYYESLLKDTGQKVPQVGVYRGDIIAEARKASEFEDRVELLGRKGKTRLDRRHHAMDALVIALMNQSVSQTLSWRRQLRDSQRISGKPETWKEFHGSDRDGNRNWEAWTKAMRIAVELFNNALEKDEVHFSENKRLGISLAKAHDDTIKSLCSYALGEAFSVELIDRAETPALWTALTKQPDFDIKNGLPADPTRHITVNGKHFGPTDEVNFFTSDAPAIKVRGGFAGIGNTIHHARIYRIDGKKTTYAMVRVFQTDLRRMKHKDLFTEPLKPSTISMRTADEDIRKVVVNGTATQIGWLIEGDEIRIKTDRYTSFTIGKLLKKYPEASSWRVCGFPTPSKVRLKPNLISKEGLNEKYFDADTLEAGRKIIDHPGWIVEINTLLEKGMVTVIRRNTLGEERWVSRAHLPVSVDLS

SEQ ID NO: 5230 - protein, 1005 aa, unidentified
  REGION 1..1005: note = Description of Unknown: Cas Enzyme sequence
MKSYTLGLDIGSRSIGWALVDGEKKKAIVDIGVRVFPEGVDRDTKGLEKSKNANRREARGARRMHRRRHLRSDKLVKSLQSAGLLPNKREDLKELLQKEPYHLRAKGLDDKLEQYEFGRVLYHVNQRRGFKSNRKTGASSENNKVAKEAGELKQRIEQAGCRTLGEYFASINPEQNRIRAQYTFRTMYEKEFDLLWEKQSEYYPDILTEELGEKLRNEVIFYQRPLKPTDELIGGCDLEEGEKRCPRGDWYARRFRILQDVNNLKIQNPDGKVESLTDEQRQLVLSELFKSKEVLFARLRKVLGLMETQEFNAEYEIDEKGKKREKLKGDEFGASMRSKKIFGPKVWDSMDEPEKIKLNEWLVDLDDDELIEKLVSEYNFSDEQTDRVLKISLPQRYMRFSRKALRKLLPLMEAGKRTDQALDEIYPDRVRREEWGTKDKLDLPEDLRNPIVNKALFEVRKVVNAVAREYGKPAKIKIEMARDVKGNSKERIELQYKMWENKKRNEQARKRLIEDMNIRNPSRDDVIKYNLWEECEHICVYTGKNISQSALFGPNPEYQIEHILPYDRSLDDSYMNKTLCEVRENIQVKGNKTPYEAYNSAPEKYEEIKQRIKVLPWPKRKKFSQEEIELDKVIERELNDTRYICREVVKYLKQICSNVQGTRGKVTSELRHQWGLDSILDLSGFDMKNRDDHRHHAIDAAVAAVTKNEHLRRLAKSKYSQTGGGFEQPWPDFREELEEKVKHINVSHRASRKARGQLHEETNYGPTGLKDEKGQDIYVYRKPLDALTIPMVEKIVDETVRDVVKNRLREKGIEPDSGERKIPKEVWKEPLYMKTTKSNKKVPIKKVRIQDVFNRMILLNDKDGKTYRAVAPGSNHHIEIFEYTDGKRTGSRGGEVVTMFEAVRRKKDGEPIVKRDYGDGKRFVCSLSINEMFMLDIGDGNMELHRVQKISQSGNNKIIVFRPHTYAGVLKDSDKPPLIQRRAPNTLKGHKVTVDMLGRVHLAND

SEQ ID NO: 5231 - protein, 1105 aa, unidentified
  REGION 1..1105: note = Description of Unknown: Cas Enzyme sequence
VDTSYLQDIRYGFGLDIGIASIGWAIVALNEIDEPCGIVDMGVRIFEAAEHPKNGASLALPRRMARSARRRIRRKAHRKDRIRSLLVKEGLLTQKQLDGLFESKQLEDIYVLRARGLDMPLSNEEFARILIHLSQRRGFKSNRKGEDKDEENDKLLSAVDGNRQRMAEGRWRSVGEMFARDPFFEQHKRNKSGQYLSTVHRDMVTEETRLLFVQQRAFAQPFATIKLENNYLDILLSQRSFDDGPGGDSPYGGNQVERMRGTCLFETQEKRAAKASHSFELFRFWEKLNHLRIQTASNSHPLSIAESELILQEALKRDLTYHQLRSLLKLNDTERFNDLSYVTPRVKTADTAAPDRVGLNKLIEKKAFAQFKAWHLLRKALDKVIEGRILTIDADTLDAIGDILSCYKQAETVQEKLKLLPLSPEDIDTLMGVPSFSGFGHLSCLACRKLLPFLQQGYNYDAACTAAGYDFRGHEYKPQLTLPGETKDMEGITSPVVRRAVAQTIKVVNAIVRQMGHSHVFIKVELAREMAKDFQERREMEESMQENATRNEQIMRRLRDEFHVISPTGLDLVKLKLYEEQQGKCAYTLEPFDIGSLFAKGYAEIDHIIPYSLCFDDSYNNKALVTAKANRDKGNRLPLQYLQGEARERFIVYTQTAPYRGGKRRNLLKQSISEEDLSQFKERNLQDTKHMSRFIYNYLTDYMLFDPFVSKKNKHVTAVNGGITAHLRKRWGLSKNRAEGDTHHAQDAVVIACTTDGMIANISRYYQHEETAYELNDRGDYSVHMTTGEIFPLPWPSFRDDVQLRMQAINPAERLMDLQGRGRLPSYDILPPQTLPAARPLFVSRMPRRKVSGPAHKDTVKGPIEGESKLVVKRVALETLKLKDGEIEDYYRSDDDPALYQVLRDRLQAHGGNAKKAFSTPIYKPGSDAPVRKVKVVDTVTLSVPVHGGRGLADNDSMVRIDVFHIAGDGYYLVPVYVADTVKAELPNRACVAHKAYDEWKEMQEEDFVFSLYPNDLILIKDKKPIQLKCNNKDSKLDAERTTRADELLYYRGCDIASAGVNGCSHDNAYYYRTGLKLLHSIEKYQVDMLGNVYKVNKEHRMPFR

SEQ ID NO: 5232 - protein, 1215 aa, unidentified
  REGION 1..1215: note = Description of Unknown: Cas Enzyme sequence
MEIDTKQRILGLDTGTNSLGWAVVDRLSDGYELVDKGVQIFQEGVNIEKGTQEKSRAAERTEHRSLRKQYWRRKVRKIRLLAVLSNAGLCPPLTSEELHTWRVDGVYPLANEAFMRWQRTDENKGVNPYAARCKCVETELDMENRQDRYLLGRALYHIAQRRGFLSNRKDQANDKETGAVKEGIKELTQKIQDAGCNYLCQYFYKLYQHGERIRSCYTDRKEHYEKEFDAICKKQHLNEALVAELHKIIFVQRPLKSQRRGIAKCPFEPSKHCAPISHPLFEEFRMWSFIRNVKVQTPEDPELRVLTIEEIAKILPLWFRKSKPTFHFEDIAKTLAGKGKYCYYKSAETKPFRFNYYLDSSVAGCPVSAQIKDIFGENILQDRATIDTIWQALDFFTDDLKLREWGIKHYNLTDEQADKLAQMRLPQGYASLSLKAIENILPLMRDHGLIYPSATLIAKLRDLLKGYNFDEEVDAYLINDIEDYLTIPTDKDGKPTISRKERKQILERKWQTHYNLSDKDLLKLYHPSMIEEYRKVENKTDGVYQLGSPRISALKNPMAMRSLFRMKAVVNQLLKEGTIDKNTIVHIEFSRSLNDANRRAALRQYQTILRDEREKAREAIRKIVPNPSDDDILKYLLWKDQGEKSIYYADKRISLENLYNGDMYNFEHTIPRSMGGEWTRENLTICEQYFNTEIKRSQLPSQLPEQYKKVFEVNIQAWKEKYEDLDKQIRKLQKQSSGATTKEAKDGIIKKIRLLQLQSKFWHDKYEAFTIDEDKVKGFTRRQGTDISVINKYGRSFLQTLFERVDVVKGTMTAAFRKAWDIQEPYEKKDRMNHVHHCIDAITIACMGKREYDKLSEYCHEEEENRHRLHGVRLPKPWPTFTEDIQEIEKDILVSHYTPNPLGKQTKKKLRDSRGHIIRDKDRQPLYAAGDTARVVLHNDKIYGKILNSHDIDPKHPSGKECTVKRIPLAEVKVDEVVDPIVKQVIANAIAKYGSIKAAIEAEQDNNDGSIWLNKEKNVRLKKVRCFQDFASGAEPIRALRDTSTKEYKRFHYSRPDGNYVAAIYEGTDKKGNRKRTSVIVTNLDAAKAFNKHQPIVPETKDGYALLCTIKKGDLVLLYENSPEELHNATQAELSKRLYKIAKMSDSGGLQITIRHHQEAREATKLKELFGNPKAGLYDCSQEIYPQRRLSYNQFNALVQGQHFELTETGKITFI

SEQ ID NO: 5233 - protein, 1388 aa, unidentified
  REGION 1..1388: note = Description of Unknown: Cas Enzyme sequence
MKKILGLDLGTSSIGWAVVNQAENDNEKSNIVKLGVRENPLTVDEKGNFEKGKSITTTAERTLKRGMRRNLQRYKQRRNNLVTVLRDNNIIGLESKLTEDGTGSTFETLELRAKAVSEEVSLEEFARILISINKKRGYKSNRKANNEEEGELVDGMAVARELYNRGITPGEYVYELLKKQKRYKPSFYRSDLAAELDAVWEKQSSYYPTVLNEETKQIILGKNKTETRKYFYAAHKIEAAEEKDRKLRQVTYYKWRADAVKTRLELGQLVMVLCEINGDITASSGYLGAIGDHSKELELKHQTVGEYLWGLIKQNPHQSLKNIVFYRNDYLHEFNTIWETQAKFHPELTAELKDKVGQHLIFYQRRLKSQKGLISYCELEGKEITLANGKKVMTGPRVCPKSSPLFQEFKIWQDLNNLVLERKEVKRSIKKKIDGMSSLFGDEFNDERFVTLSKEQKDTLYKELYCTKELSAKEMLKILGLSDKEYSLNYKKVQGNITQVTLMNAYKNIVEMTGHDVDKFDKMDAGNKMHLVEVVLETLGASTSFLNFNAGNSHEEMQKNPMFQLWHLLYSYEDDNTATGNGKLVEHISKLTSLPEEYASIIARTTFVQDFGSLSSKAIRKILPFMKNDGKVYSEACGLAGYRHSKQSLTKEEIEKRELHDHLEILPKNSLRNPVVEKIINQMIHVVNGCIDEFGTFDEIHIEMARSLKQSQKQREDATTRLNQKTKEVENIKKILKAAPFNIANPSRNDVLRYQLYEELAPNGYKTLYSNTYISKEKLFSRDFEIEHIIPQAKVFDDSYSNKTIESHSANNEKDNMTAIDYVAMKGGEAGVEEYKKRIAFLNKPATGKKYKNLTTVEKDIENGFLNRDLSDSQYIAKKAKELLLQVSRIVVPTTGSITARLREDWQLVDVMKELNWDKYDKLGLTTAERNRDGHEVRRITDWTKRNDHRHHAMDALTIAFTRHSHIQYLNNLNAKDEDESKDSNIYGIEKKELLKNRKFVPPMPLDELRAQAMKHLEGILVSIKAKNKVTTQNINKVKGAKPQLTQTPRGQLHNETVYGKRQRYATREEKVGAAFDKLKISTVCRKDYREALASRLADNGGDPKKAFTGKNSLAKVPLFIDANHTVKVPEKVKTVVLETYYTIRKPISKDIKLEKVVDEGVRRILEQRLADYDNDQAKAFSNLEENPIWLNKDKGISIKRVTIKGVNVATPLHVKKDKDGNVVLDNQGKEIPVDYVSTSNNHHIAIFEDAEGNLQEHVVSLYEATARKCQDLPVVDREYNKDKGWKFMFTMKQNEYFVFPDAESGFNPADIDLENPMNNSIISPHLFRVQKLTTGDYFFRHHLETNVESDNRLKGVTWKRCSLKGINGIIKVRINHLGEIVKVSEYL

SEQ ID NO: 5234 - protein, 1520 aa, unidentified
  REGION 1..1520: note = Description of Unknown: Cas Enzyme sequence
MKKILGLDLGTNSIGWAVVNEEHTEDRAYLTGIDGAGSRIIPMSADQLGEFEKGKSVSQTKERTSYRGTRRLRERFLLRRERLHRTLGIIGFLPEHYAASIDEFGKFHKGTEPKIAWRKTESGKYEFIFQSSFNEMLDDFQAFHPELCDRKIPSDWTLYYLRKKALTHKISKEELAWIMLNFNQKRGYYQLRGEEYDIDTSQKEEYMKLTVIDIIDTGERKGKAIWYNVKLDNGLTYRRASEQPLDWIGKEKEFIITTKLEKDGSVKKDKDGLPQVSIRMPNDDDWNLLKKRTEADIEGTHKTVGEYIYDNILSKPDVKIIGKLVRTIERKYYREELKEIIRKQREFHPELTDRTLYEKCLNELYPNNDAYRNSIQGKDFIYLMTDDIIFYQRPLKSKKHLISNCPFETRAYIDKESGEIKTNPIKCIAKSHPLFQEFRLWQFISNLRLYSNDGTNTDVTDQYLCTIKDWEKLFEFCNDKKDLDQTTFISRFLGLKKVGDKFPVRWNYVEDKKYPCNKTRHAICSKLSKEEVGKLSGELLSKIWHLLYSIKTKEEIDAVFSDYKISTGGIYDELLEHFSKESLARIKTVRLEEEDYGSYSEKAIKKLLALMRIGKYWSPDLIDSETSDRIGRILSGEFDPGIKDSIRQRASGLTCINDFQGLPVWFACYIVYGRHSEGKESRKWYSPKDIDIFLAEFKQDSMRNPIVEQVVTETLRTVRDIWIKTGRIDEIHIELGRELKSTKEQRERITRRNIENENTNQRIRTLLTEFLNPEFEIEGVRPYSPTQQDILKIYEEAVLQDNITIEDDINDIINKLNSSEPAKRPTRSEILKYKLWLDQKYCSPYTGQPIPLAKLFTHEYEIEHIIPQSRYFDDSFQNKVICEAEVNKLKDRLLGKEFINRHHGEIVTCSGGRTVTIQSVEGYEEFVKKHYSGNRAKLRNLLLEDIPDGFIERQMNDTRYISRYIMGLLSNIVREEVAPGVFEEESTSKNLIACNGSITTRLKKDWGLNDVWNNIILPRFIRLNEICKTDRFTCTNAEGHVIPDMPNELLKGFSKKRIDHRHHAMDAIVIACATRSHVHLLNNEAAKSSNKAIRHQLSHKLRRYEKIIINGEERLVAKEFLKPWETFTQDVQKILKEIIVSFKQNLRVINKASNKYMSYFDEDGNLRLDKSGHPIKGMTTQKANASWWAIRKPLHKDTVFGKVRLRKIKEVRLSVALTCVDMMVDKELKKEIKRLVNRGYDEKRIKKFFTEGENKEIWAEFNPNKIKVYYFTDDTFATRKVLDDSFDEKKIKTAVTDTGIQKLLLKHLEENDGNPKIAFSPDGIERMNANLASLNGGKKHQPIYKIRVYEAASKFAVGTSGNKADKFVEAAKGTNLYFGVYADENGTRSFVTIALNEVIERLKQGLSPVPETNENNAKLLFWLSPNDLVYVPGEGETLHAEAIKSLDTDRIYKMVSSSGSQCFFINSRVSTCIVNKLEFSPLNKMERCISGEMIKEICIPIKVDRLGNITYIGTEYLPKN

SEQ ID NO: 5235 - protein, 1367 aa, unidentified
  REGION 1..1367: note = Description of Unknown: Cas Enzyme sequence
MKKILGLDLGTNSIGWALVNEAENTKEQSSIIKLGVRVNPLTVDELSNFEKGKSITTNADRTLKRSMRRNLQRYKLRRENLIDVLKENSFINDKTILSENGNATTFETYRLRAKAATEEISLEQFARVLLMINKKRGYKSSRKAKSQEDGALIDGMEVAKMLYNENLTPGQLVYQLLQKGKKEPDFYHSDLQNEFDQIWNFQKQFYPEIFADSLYQEVKGKNKGQTWSVLKDPFSVVGIKQSGKPIENKKERYSWRTKSLTKKQDLEILTIVFQEINSNIYNSSGYLGAISDRSKELFFNKLTVGQYLMAQLDENPNNSLKNRVFYRQDYLDEFNIIWDKQTEYHEELTDELKKEIRDIIIFYQRRLKSQKGLISFCEFESKQIKIEIDGKEKTKTIGLRVCPRSSPLFQEFRVWQTLNNIEVTGKENKEKRELYQEEKELLAIELSIKKSLTKENVLKLLSFQNPKELDLNFKSINGNETQAALFNAYQQIIELSGHDIDFSKKSSNEITTSVGEVFSSLGINTEILYFDSNKPLDEQPVYKLWHLLYSFEGDKSNTGNENLVNKLMELYGFDKDSAKVLANVTFVDDYSSLSAKAIREILVHLKEGNKYDVACGYAGYRHSKSSLTKDEIAAKKYKDRLDILQKNSLRNPVVEKILNQMINVINTIIDSYGKPDEIRVELARELKKNADEREELTKAISRATKEHEDIKIILQKEFGIKNVSRNDIIRYKLYKELESNGYKTLYSDTYIPRERLYSKGFDIEHIIPQSRLFDDSFSNKTIELRSINIEKGNNTAYDFIKNKYGESGLEDYLKRIDSLFKADSSKKAKLKKLKTQESEIQAGFIERDIRDTQYIAKKAKNILEDLVPRVVSTTGSITDRLRQDWQLVDVMKELNWEKYDKLGLTEIIEDKDGRKIRKIKDWTKRNDHRHHAMDALTIAFTKDVYIQYFNNLNSRYDKNSNAYAIEQKYIQDRKVLPPIPLYEFRNEAKKHLENTLISIKSKNKVATTNINTSKTKGGSNKKSQLTPRGQLHNETIYGSSKQYVVKEEKVNASFNEEQIAKVCKPTYKEALLKRLQENNNDPKKAFTGKNTLTKNPIYLDVLQTKQVPEKVKTACFETIYTIRKEVDPDLKVDKVIDAKAKAILKKRLEEYNNDPKKAFSNLEENPIWLNKEKGLSIKRVTISGISNAESLHNKIDKDGNEILDAEGKRQPVDFVSTGNNHHVAIYRDAEGNLQEKVVSFFEAVARVNMALPVIDKEYKKSEGWQLLFSMKQNEYFVFPNERTGFNPNEIDLLDPENYSLISSNLFRVQKIGVNDYTFRHHLETNVKDSSLILRDNTWRRIRSPKDLNEVIKIRINHIGKIVSVGEY

SEQ ID NO: 5236 - protein, 1376 aa, unidentified
  REGION 1..1376: note = Description of Unknown: Cas Enzyme sequence
MKRVLGLDLGTASIGWALVEEHANQKSKIIKLGVRVNPLSSDEQTDFEKGRPLSINADRTLKRGARRNLQRFKQRRNNLIEILIKNHIISKHTPLTEIGNDTTHQTLSLRAKAAQKKIEKEEFARVLLAINKKRGYKSSRKAKNEEEGSLIDGMAIAKELYDNNITPGEFVSQLLGEGKRFIPDFYRSDLQNEFDTIWNFQQQFYPNILTNELKKALQHKNKTQTWAICSTPFNIVGISQSGKANEKRQERYQWRVTGLSTQLNLEQLAIVLQEINNNLNKSSGYLGAISDRSKELYFNKQTVGQNLHKQIQDCPHTRLKNQVFYRQDYLDEFEKIWETQAKFHTELTTKLKEEIRDVIIFYQRKLKSQKHLISNCEFEKHHKAVPKSSPLFQEFKIWQVLNNLEFLNKKTKEISKLDDEDRQLLFNELNTKGKFTSKNVLRFMGYSSTNYAINYKEGIEGNNTNKALYNIYQQIAENEGYGFDWNKKSASEIQDELKTIFPLIGIDASILNFDTEIQGTNFDKQTSYQFWHLLYSAEDDDGKISEEDKMQYGNSNVALKKKLHQKYGFKLAYSNMLANISFQQDYGRLSARAIKKIIPFLKTGTDYAESCALAGYNHSNSLTKEELDKRQLKEKLELLQKNSLRNPVVEKILNQMVNVVNQVIKTYGKPDEIRIELARELKKSAKEREESTKYINKATKENEDVRKLLKNDFDIKNPTRNDVIRYKLYLELERSGFKTLYTGEYIPKEKLFSKEIDIEHIIPKAKLFDNSFSNKTLAYRNINLEKADTTALDFITNKHNDDLDNYLSRIESFYNKGKNGISKGKYKKLLLSEKNLPDGFIERDLRNSQYIAKKAKQMLFEVVRTVNTTTGKITSKLREDWDLINVMQELNLPKYKAIDENLIERVEKKDGSYKIRIKDWTKRNDHRHHAMDALTVAFTTHNHVQYLNNLNASRDSKNSKLYGIRNKITKTYEYKNGKKKRKFIPPMPSFREEAKQHIDSILISFKAKNKVVTRNINKTKLKGNDKYHTKTQLTPRGQLHKETIYGRIQKVIVKQEKINAKFDKEKILQVTKPAYKEALLKRLEEFNNDSKKAFTGKNALSKFPIYLNDSKTEQVPEFVKIQFFEDNYTIRKNINPDQFKDLKSLQKIIDIGVRRVLEKRLIDFDNDAKKAFSNLNKTPIWLNKEKGISIKRVSISGISNAEALHSKKDHLGNEILDTKGKTQAVDFVSTGNNHHVAIYKDSKGKLQEKVVSFYDAVARVNLGLPVIDKDFNIDKGWKFQFTMKQNEMFVFPTVDFDPTGMDLLDEKNTDVISKHLFRVQKISTKDYFFRHHLETTVDNIKELKETAYKRLGILSLKNIIKVRINHLGQIVHIGEY

SEQ ID NO: 5237 - protein, 1445 aa, unidentified
  REGION 1..1445: note = Description of Unknown: Cas Enzyme sequence
MKKILGLDLGTNSIGWAVISTDNNNTPIHIEGMGSRIIPMGSDKIDYEKGATITKNADRRAKRSARRMGKRYKMRRNKLLYILAKLNMLPEQIQFKTDFPEASKIQDLELLPIPKNTMQLDSLQHYELREKALNEKITLQELGKILYQYNRLRGYSGGGDNDDSKKENTGEDDNKKYEVRIQKFILKEVVKSNSTYTSRSGKDNGSELPIYNIIVLDEEKEFEGTTKLQTLSDKIGEEIELEIRIKRTKKGDNIVFALPQKTNWRKQMEATELILKEKNYYPCQLFAEDLRNNKWTKIRNRVILRQQYKREFDAVWDEQAKYYSFLENCPNDVLNEIVSYIFPGPSDTQKKLREKGLKKGLKYIIKEQIIYYQRPLKSQFDLIGTCQFEKEEKVIPITHPLFQEFRCWDQINRLYIRSKQQIWDEKKGKYVLKYQNRYLTEEQKFSIYNRLQNQKQLSFNEVSKIVNLANDRSEFLNGLHIKAKLSGCDTQISIKKILNGYCEPNKILVENIWESVYNNVHEGSEYDESSKRVQSIINVLPENLGKDKRVELALKIAQNIKFVRKYASLSKKAIENIIPIMRPNPDNISEIVKKNYEKIKWLIDTGEVIDEAISQDYIIDFIKDNPQALEHGGLMYAFASSLVYGRHTKENIKPQIKNYHDIKYVERNLRNPIVEQIANETMQIVKSLWKQYHLNPNELEIRVELARNLKNSAQEREKIFKNQSDSRRLNESIKNKLIELKQEVNDRNIELYKIWSRQEKTYDNNGNPVMRPKYKDINSPTKDEIEKMRLWEEQQYISPYTLKPIPISKLFSPERLYDIDHIIPKSRYFDNSLANKVICESYINEEKDNRTAWEYILQQDSKYNILTPEEYLSHINKIFVGQKKKNLLAEKIPSNPVTRQMKDTQYISIAVKDELAKIVGSEHVKTTTGGVTDYLRSQWGLRKLFMEQTEARFKQMELWNLDENGTPKELWIKKGYDETTQKNVYEIKGWSKRYDHRHHAIDALVVALSNEKFIKRLNDLNKYFQEELTKHKTSIPIVAEDSIVEAFFNLPKEKRNKIMQEIESSRKFEAPFENLVAEARYLLESMIVSQKPKDKLSIKEDLNGKRQLKIRAALHQETYYGKTDGRDTKTVAISALKAKDIPLIIDKVLRNEIDVHRKKYDSIKEAFSGEGLIAFNESRFQTKKKLAHKPPVYKVKLWYSNKEKDTGNLQPLYGKTSKKTVITGDNYMFVVIEKSGKRIFDVVSLFDSVALAKDYLKEGTANIETIKDKICVDLCIYNIGNNEESKAHKVLFYLQQNDLVYMPKKDDEILRFNELEFKNWLSNNNNRIEFAKRIYKVVKFSGKDCFFIPNNIAKEISIPKDLSKKELDELKSKYKDKAIPKQELNYIEFGTYSNCTPLEMNRLFTMSMREGKKYRGDKPRKIQDHCIKIKTDWLGNVTEFNGMKL

SEQ ID NO: 5238 - protein, 1509 aa, unidentified
  REGION 1..1509: note = Description of Unknown: Cas Enzyme sequence
MKNILGLDLGTNSIGWAVIKASTNEEGKEQLHNIDSAGSRIIPMDAAILGDFDKGNSKSQTADRTQSRGIRRLYERSNLRRERLHRVLSLLGFLPAHYARYIDRYGRFIDYAEPKLSWDKDEQGHPVFIFQDSFDEMLNDFRQFQPALVDNGRKVPYDWTIYYLRKKALTQKIRKEELAWILLNFNQKRGYYQLRGEETNTSTTAKSRQYFDSQIVIDIIDTGQLYKGMKVLTVVLKDGSKGKIFKKEIPDWIGQKKDIIASVDIDKDGNDKYDENGELSCRFKIPSEQEWDEKWELIKTKTQHDLDVSDKTVGAYIYDTLLQMPCQKVRGKLVRTIERKYYKKELYQILEKQKEFHEEFRNRDLYLACINELYSLNEAHRNEIASRNLVYLFIEDILFYQRPLKSKKSLIADCPYEEYTCTNKETGEIEHFGVKCIAKSHPLYQEFRLWQFLANLRIYQKEQVDNGKTCYDVDVTSDFLKTEDDYTELFDWLCEQKSIKQDSILKCPVFGLKKNDINKYRWNYVEDKSYPCNETHALLLEWLNKAGIASSFLNSTTEEDLWHILYSVSDKNELEKALNKFAERYGLAAKFVEVFQSVPPFEKDYGAYSAKAIKKLLPLMRMGKYWSEDNIDEQTRRRIDKMISGEYDDTIRNRVREKAIHLTDVTSFRGLPLWLACYIVYNRHSEARDVKKWTEPADIDDYLRKFKQHSLHNPIVEQIILETLRTVRDIWRQVGHIDEIHVELGREMKNPKDKRAKMTRQMQENENANLRIKAMLVEFMNPEFEIENVRPYSPSQQELLRIYEEGVLNSVSEISDEIATIIKKFNESDIKKRPTKSEVLKYKLWLEQKYRSPYTGEMIPLGKLFTSAYEIEHIIPQSRYFDDSFSNKVICESEVNKLKTNLLGHEFISKHHGEKVLLANGKCINVFSVEDYERFVKDNYSRNPVKLKKLMMDDIPEQFIARQLNDSRYISKLVKSLLSNIVRESDEQEDISKNVIVCTGGVTDRLKKDWGINDVWNKIILPRFQQLNKLSGNTCFTSVSANAHIIPTVPLEFQKGFNKKRIDHRHHAMDAIVIACAGRNIVNYLSNESACKNSKISRYDLQRLLCDKQKVDAQGNYCWMIKKPWDSFTQDVYAVLRNVIVSFKQNLRVINKTTNYYQRYIDGKKKMVKQKGGDNWAIRKSLHKETVFGEVNLRDIKTVALKDAIKNPNAIVEKDLKKKLKELLRLHFNEKQIKGYFEKHKDVWQDVDLKKIKIYYFSNETKDRFFASRKPLDSSFNQKKITESVTDTGIQKILLRHLEANGNVETNAFSPEGIEEMNKNIVLLNNGKWHQPIRKVRVYEKADKFAVGQKGNKGSKFVEAAKGTNLFFAIYETEQEDPKTGEVTRKRSYATIPLNVVINRLKRGLSPAPEDKNGNSPKYVLSPNDLVYLPTQEELKSGHICYPLDKNRIYRMISCTGGRVYFLPYFVASMIVDKYEYTQLNKDEFTKDKQSIKEICIPINVDRLGNLIK

SEQ ID NO: 5239 - protein, 983 aa, unidentified
  REGION 1..983: note = Description of Unknown: Cas Enzyme sequence
NLTQTSYLIYGRHSELAQAKYWISPDDIRKQLHQELKQHSLNNPVAEKVLLEMMQVVADIWDYYGEGKEKFFSKIHLEVGRELKKSAKEKEAESKRMSGNRSQNKRIRQILEEFLTNNPYNANSKNSDHFERLKVVEEGAEHTKNNDREFFNDKSYSKKDIEEILKKPHITKEDFEKYKLWIEQGYHSPYSGQMIRITELFDGTKYNVDHIFPQASITNNSLSNKVVVEVSLNQLKSDRTARVFIQEQNGQPHPDTGIPVCSEEEYVNIVKTQFSGTKKLILLSKEIPKGFTNSQMNNARHIARKAMELLSHIVREPGEVEFRSKNVLPVTGMVTTVLKRAWRLDEVWTELVAPRFIRMNELTQSNLFGDWQTAKSGQKYFDCNLDDTIREKDESYDIKRIDHRHHALDALIVALCTEDHVNYINNINADAKSDNYGKQKQLEKYRQTLKRKIKFTKRDDEQDENNWYYMLPGEIRQAGAENSRRDSVLEMAYHYKDFDSFHSNYKKMVLSTLQNTIVTFKQNLRVINNRLNYYQAEPNTKRRKAQEPKTQKDIANSNNKYNWGVRRSLGKGTFYSKIDIGERENKQLIPNAEFFYHNIDSIANNELRGQIQKIKEDSNSEDGFKKKRKDTFSNITVECIAYKIASRFNSELSTAFDSNKIKTIVDTEGQTKAILLNHLKQFDSVELPFEEAVNYFDSLLEKQEFEAVVNDSENEFQSIDDLINHLKENELKYKKTDYSKLSVFIDKVSERDFRNEKQFKGKIKEHPEIAFTPEAIEKMNEPEELKKLNGGKTHKPIRKVTTYTGFGKQRAVSENLESVKSKQYVVNDSGTNIYISVYELDDKSKISRKNPIRVFKEINLFDLIDFQKSTNTSELPIDKYIYSDDRVKYNFLFTLTQNDIVKIDNEEHELIYAFNRFTGNELYFRPINHASEIEKCEVDLKTNLKTGKLGGTQTNETTSFDGEQIKNICWKLDVNRLGNISKG

SEQ ID NO: 5240 - protein, 1556 aa, unidentified
  REGION 1..1556: note = Description of Unknown: Cas Enzyme sequence
LHISKKSSNFAQNCHKQEIIDIMKKKILGLDLGTNSIGWAVVNEEDTKKSISHAGSRIIPMDAKLMGDFESGNSVSQTATRTAARGARRLYERHALRRERLNRVLTILGFLPEHYTCELNRYGQLNQGAEPKLAWEMVDGKYSFLFKDSFLEMVHEFAQVHPELLVNGRNIAYDWTIYYLRKKALTQAITKQELAWILHQFNQKRGYNQARGEEDEQKENKRQEFITQKVISVRDTSEKSKGKSVYEVCLENGWIFTKESKYPLDWEGKTKHFIVSTTLNSDGTDAIDKDGKIRRTFRAPADDDWGLLKLKTQHDIDVSHKTVGEFIYDALLQNPDQKIIGQLVRVVDRKYYKDELKRILDTQKQFIPELQNKELYAECIKALYPQNEAYRNSIAGKDFTYLLLNDIIFYQRPLKSKKSLINECPYEYHVFKEKDGKWQKQYLKCISKSHPIYEEFRLWQFVENLHIYREAANGIGKEDCTAELIANKADLISWLLTQKEVSEKSLLTQLVGKNKIKGLSWNYVSEKDKKYPAAPVSSTIIGTIKEAGGDINTLTDPFEIRKNKHHRKLSGKEQDEKAKKNNRIINNLEQIWHMLYSISDKSQLLAALKHYAETNHLSDVFVEKLGKMKPFSDYGAYSEKATRKLLNLMRCGEYWSEEAIDANTKSRIEHIRTGEVDDAISERVREKLEAMNKIKDFQGLPLWLAEYVVYDVRKNDTKWETPEDIDKYLQSFRLHSLNNPIVEQVVMESLRTVRDIWKQEGQIDEIHIELGRDLKQNAEQRKKTQQRQQENEKANLRAKLLLQEFMNPDMEIEGVHAYSPSQQELFRIYEDGVLSANKPDDETQRIINDLSSLKQPSAQDIKKYRLWLDQKYISPYTGEIIPLAKLFTPAYQIEHVIPQSRFFDDSMSNKVICEAEVNARKERMLGHEFIVKCGGEKITLSGGKVVTILSQEAYEDTIRKNFAGAPRKQEKLMLDDIPEKFVARQMNDSRYISRLMMQLLSNIVREKISNTEYEPEAVSKNLIVCNGATTTRLKKDWGINDVWNKIILPRFERLNRLQNTTVFTAKTANGHIIPNMPLELRQGFEKKRIDHRHHAMDAIIIAFTTRNHVALLSNESALDKDDKARYDLQTLLRKREVWRSADGKEHYKFTDFIAPYDGFQKDVQDTLENIIVSFKQNLRVINKSNNRSVRFVDGKKQMVRQTEGDNWSIRKSLHKATVFGEVNLRKKKYVNLTYALKHVEDIAEKDLRTKLRELLQEGKDEKQIKKYFASEPDVWADVNLKRIEVFYYTKDTNDHYYAVRTALDDSFTADYIRNKVTSEAIQKILLAHLARCNNDPKLAFSPDGIEQMNANILQLNNGVPHKPIYKVRTCEKAEKFAVGQIGAKSKKFVEADKGTNLFFAVYSTKTEEGSDKRSFVTVPFKVAVDCQKRGKKEWRTLLDEWAHSESIVAENAKLQFILSPGDLVYVPTAEEIHSGNIRLDKSRIYKFVSSSGNQVFFLLEYVSAPIINITMERNGEKKTISEYSTLNKMERAITGEMIKEICLPINVDRLGNIIEP

SEQ ID NO: 5241 - protein, 1159 aa, unidentified
  REGION 1..1159: note = Description of Unknown: Cas Enzyme sequence
MKKHILGLDLGVGSIGWALIETEDDQPKQIIGMGSRIVPISKDDSDQFSKGQAISKNADRTARRTTRKGYDRYQLRRALLTQVLRQNGMLPERMDENVIDLWKLRSDAATEGHQLTLPQIGRVLYHMNQKRGYKHAKADDNGDSKQTKYVEAVNQRYAEIKEARQTIGQHFYLELLRSKVESGNGPYYTFRIKDKVFPRAAYIAEFDQIMQVQRAYYPEVLTDELIDTLRNRIIFYQRPLKSCKHLVSLCEFEMKPYKTKDGKIVYGGPKCAPRTSPLAQFCAMWETANNITLTNRNNEQYDFSLEERRQLVEHLCTHEVLKLTDLYKILGITKKDGWYGGKAIGKGIKGNATLNQLRKALNGKYSDWLEMPIERIDAVDNETAEVFWQVSPKVEETPLFKLWHAVYSIQDAEELAKTLRNKFGIDDQDVIEALCKIDFVKPGYANKSHKFIRRLLPYLMEGMMYSEACARIGINHSNSMTAAERDARPLAERIELLQKNALRQPVIEKILNQMINLVNRLQQEYGPIDEARVELARELKQSREEREGAYRRNNQNERLNKEIAAKIEEMGIRPSRSRIQKYKMWEESNHRCMYCGKTVSLAEFLNGADVEIEHIIPRSILFDDSFSNKVCACRECNHEKGNMTALDYLETKPATEVEAYKQRVDEAFKEGQISKTKRDHLLWHRSDIPTDFIDRQLRQSQYIAVKAVEILQQGIRQVWTSGGSVTDFLRHQWGYDEILHTLNLPRYRQVEDLTEIVHYEHAGQEHDEERIKNWSKRIDHRHHAIDALTVALTRQAYIKRLNSLNAEFTREEMLKEVEEANTVYNEKKSLLEKWILEQPHFSVDDVTNSVDSILVSFRAGKRVTTPARRAIYQGGKRTIVQRGLQVPRGALTEETIYGKLGDKFVVKYPLDHPSMKPENIVDPTIRALVQKRVAERGKDAFKEPLFSAEGMEIKSVRCFTSLSENGVVPVKQDEQGRNIGYAKKGNNHHVAIYKDKDGQYQEMVVSFWDAVERKKYGVPVVITNPHDVWDSIMDKDMPQEFLEKLPKDDWSYLLSMQENEMFVLGMEEDEFNDAIEAKDYATLNKHLYRVQKVARNDYWFRYHTETTVDDKYGEGDESKVNLGWSVEMGKVYRVRSCGALFDLFPHKVKIDIMGRITKA

SEQ ID NO: 5242 - protein, 936 aa, unidentified
  REGION 1..936: note = Description of Unknown: Cas Enzyme sequence
LTDELIDTLRNRIIFYQRPLKSCKHLVSLCEFEMKPYKTKDGKIVYGGPKCAPRTSPLAQLCTMWETVNNITLTNRNNERYEFSLDERRQLVEHLCTHEVLKLTDLYKILGITKKDGWYGGKAIGKGIKGNATLNQLRKALNGKYGEWLEMPIERIDAIDIETAEVFWQVSPKVEETPLFKLWHAVYSIQDAEELAKTLRNKFGIDDQEVIDALCKIDFVKPGYANKSHKFIRRLLPYLMEGMMYSEACARIGINHSNSMTAAERDARPLAEHIELLQKNALRQPVIEKILNQMINLVNRLQQEYGPIDEARVELARELKQSREEREGAYRRNNQNERLNKEIAAKIEEMGIRPSRSRIQKYKMWEESNHRCMYCGKTVSLAEFLNGAEVEIEHIIPRSILFDDSFSNKVCACRECNHEKGNMTALDYLETKPAAEIEAYKQRVDEAFKEGRISKTKRDHLLWHRTDIPTDFIDRQLRQSQYIAVKAVEILQQGIRQVWTSGGSVTDFLRHQWGYDEILHMLNLPRYRQVEDLTEIVHYEHAGQEHDEERIKNWSKRIDHRHHAIDALTVALTRQAYIQRLNSLNAEFTREEMLKEVEEANTVYNEKKSLLEKWVNEQPHFSVDDVTNSVDSILVSFRAGKRVTTPARRAIYQGGKRTIVQTGLQVPRGALTEETIYGKLGDKYVVKYPLDHPSMKPENIVDSTIRALVQKRVAERGKDAFKEPLFSAEGMEIKSVRCYTSLSENGVVPVKQDEQGRNIGYAKKGNNHHVAIYQDKDGQYQEMVVSFWDAVERKKYGVPVVITNPHDVWDSIMDKDMPQEFLEKLPKDNWTYILSMQENEMFVFGMEEDEFNDALDAQNYAVLNKHLYRVQKLTSHDYNFRYHTETKVDDKYEGVDNGRNASMILGALVPIRSFNSLFALFPHKVKIDIMGRITKA

SEQ ID NO: 5243 - protein, 1352 aa, unidentified
  REGION 1..1352: note = Description of Unknown: Cas Enzyme sequence
MSKEPYYIGLTVGPEYAAYAVTNESYNLERFKGQDMWGIYKFKEAETSANRTAIRSARKNIKKEKKRINLLKAYFYDEIMKVDKNFFIRLDNSSFFPEDKEKALNGSRNVLFDDDNYKDADYYNQFPTIFHLRSFLANSKEKADIRLVYLAVSNIMKHRGNFYTKNLEDTSNSVKDIYLNICRLASQSDIHLDEKADTDKLMEILLNPAINNKTKAVLAAQTVKALTKQETALIKLMCGLKIKLVDMFPELADSLEEPDKKASISFSDNNYLDNVDSIEKLAGEDNFALVSAVKELYDAVIIQNIIQGHKFISDAKMASYEKHMNDLKLLKSVLRNNVTSKEFNRFFRLEEPGTYAAYVKSNNSYGKRTRRDSDKGRTQDDLYASIKKLLSKVEEDDSDAEYILDEISKGTFLPKQRITDNRLIPNQLYVTELKAILDNAAQYYDFLNEKDESGLTVTERIISIFTFTMPYFVGPTSEYNSRGWAVRKEVGVVMPWNLETKVDIKESAKNFIENMVGKCTYLSGERVLPKASLLYEKYAVLNEVNNIRVDGDKLPVKVKQEIVNGKLMAGKKLTKKQIHSFLVKKGLADMDSLITGIDDKLNNTMSSYKFFSEVFGTLDKDTEVMAEDIILWSTIYGTSKTYVKEQIENKYPGKLTAEQMKKVLNFKSDDWGRLSAEFLNMRGSNKETDERISVIDLMWNENISLMELINDERYDFMSVIKEKSKKEVKSIFTFEYDDLNELYATAAQKRAIWAAVKIVREIIKIKGYAPESIFLDTKKMRPKDKKDNRKSRLIDLYRSLKDVSKEWKETMINRIDECDKDGSLKSKKVYLYFLQMGKDMYTWEDINFNVVKTTGDNIYNIDHIYPKHFVKDESLDNIVLTNSEFNGEEKKDIYPVPDKIYEAMHGNWLILRKNGFMSAEKLARLSDRNPMSDEKRASFIGKSYIQATSSTKMLAEVFKGVFNKDTKIIYAKTQEVADFRKQYGFAKATIYNDHYLAKDAYLNIVVGNVWYTKFTSSPIWFIEKEYRTGKAEYNLNRMYDFDVIRNDRVAWIAERKKKDIAGSIAVVNKVMAKNTPITTTKKLDGHGQITEATLYKGSKTKPEYFPIKTSDDRFKDMAKYGGKTGIANTYAFLVEFTDKKKGRMRCLYTIPLYMADNIKDKKDIEKYCIEKLGLTDPDVRINKIAPGSELEINGYSYLLGGRSVNQFHVTNNIPMIFSQEWQSYISKIEKYINFKVVDKAVSAEKNLELYDEILSKHSTGVFSKKKLPMYERLLAARKKFIKLSVEEQLQVICQMLTLTRMGTNMANLSLIGEGSSVGIMNMSCNLSKNNSVILVERSITGLYKKKIDMLTV

SEQ ID NO: 5244 - protein, 1115 aa, unidentified
  REGION 1..1115: note = Description of Unknown: Cas Enzyme sequence
MKRFAFDIGSGSLGWSVFRLEGDGRKPVELVDMGARIFPTGRDPKSRESNALGRRGPRQQRRQGDRRKKRRGALEGVLAAHGLMPPAGDDEGRQDFFSTDPYEARARAARDEAALLYDLGRAIWHISGHRGFKSNRKADRTNKDDTGKIADATRNLREMLVQEGAPTYGAWLAGRHAQGAPVRIRLNNEKGYDFYPNRAVLEEEFDHIWRMQAQYHPNYLTDKARDEIKSVLFFQRPLKPVKPGRCTFFPDEDRLPKWHPLAQEFLILQELNRLRIIADKGECSLDLTQRDLLLNHLMSGKKLTWAGVRKALGIPPDIGINLETGGLKKPAHNDVAARLAVGTKKNPAPLEEWVRRGADKQVLLLSILNDSETPDVAIRRLQDECGLAADIAERVEKVTLPTGHIRLGLRATRAIVRAMRDEVRVYSAAVGYASASGLFGDGVVLNHSDLRPEGDPGVARLPRYYEVPTLRRMIGTGTGVPADPPEIRFGKISNPTVHIGLGQFRRVMNALIDRHGKPDQVVIETTRDMAKSARELNEIETEIRKNTNRNDRWREELEECGLLPPGGRAGDRFLRMRLWEELGKTCADRLCPYSGRPIGLTDLHSDRVEIDHILPFSDTFDDSPANKTVCFRAANREKAGRSPGDAWGDTTLGAIIDRVKDAPGMKRKLWRFLPGALEKWQEDKGFEERQLHATGYLAKVVRAYAEALFPKDGTAHIWMPNGRMTALMRRRWGLHLPDHNAKDRNDHRHHALDAVVVGVIDRATVRMLQTHARRIGAQQLDRVLPEPPEPYDGFRDQVMDRVRNLCVSHRPDHAISGRLHEDTAYSLVRDIPENAAALNIGNLAARKPVTALTAKEITRVRDQRLREELRKVTEAVKGDKNRENALSEWSSRTGAQDHLAQQRDWIAEYYPDYEQRSKRQRARIRAKANKDLGNYGFKNVRTVRVIKPKKSAKPVKSAPYKWMIPDGIAYMDVLENPDGKWFCHATDIWAAQTAPEEPWKEDHPEAKFIMRLYKNDTLQLFELDKTGLPVPGSNRIKKIVQLDRSSSRVYLVGVNDAGEYRKRHEDPDDPFRWDLAKIGKLKARRAHKVRVDELGRVLTIPHGTMPRVPSKKKPS

SEQ ID NO: 5245 - protein, 1354 aa, unidentified
  REGION 1..1354: note = Description of Unknown: Cas Enzyme sequence
  MOD_RES 358..366: note = Any amino acid
MKREPYYIGLEVGPTYAAYAVTNESYNLERFRGKDMWGIYKFDEAESSQDRKNARSARKNIKKEKERIGLIRSYFHDEIEKADVNFFARLDNSTFHAEDKDKILSGDRNVLFNDENYKDADYNEQFPTIYHLRSFLAKHNELVDIRLVYLAVSNIMKHRGNFYSKNLEDTDSAIKDIYAGICEKASQADIQLYPEADTDKIMDYMLNTALTNKVKATLVSQEVKALTKSETALIKLMCGLKVKITDIFPGLLETLPEEDKKTSMSFSDNDYLDRTEEIENLTGEDNYELISAVKELYDAVIIQNIMQGHRFISDAKIASYEKHMADLKLLKSTMKRYLSKQEYSRFFNIEEPGTYAAXXXXXXXXXMSNGVKTRRNSEKGRTLDDLYGSIKKLLLKADEDDEDAEYILDEIGKRAFLPKQRTSDNRLIPNQLYATELKAILDNAAEHYGFLNEKDDSGLTVSERIMKIFTFTMPYFIGPTSEYNTRGWVVRKEAGKVMPWNLEEKIDVKESAKSFIESMIGKCTYLSGERVLPKSSLLYERFMVLNEMNCIRVDGEKIPVEIKQEIVNGKLALGKKLTRKQILSFLVKKGLATSDSLITGMDEKLNNTMTSHKIFADIFGTLDSETQAAAEDIILWSAIYGDSKEYVKQQIENKYPGLLDEDRMKKALSIKSNDWGKLSKEFLTMTGTNKETGERISIIDAMWQMNLSLNELINDNRYDFMSLIKEKTIKAEKNIFTFEYDDLNELYATASQKRSIWAAVKIVREVEKIKGYAPESVFLNTIKNRPKDVKKDARKTRLIELYKNLKGVWKDSMISHISECDSDGSLKSKKVYLYFLQLGKDMYTWKDIDFKEVIATGSDVYNIDHIYPKHYVKDDSMDNIVLTNAGFNKEEKKDIYPVPDSIYQTMHENWLYLRQNGFMSAEKLARLSDRNPMSDEKRAAFIGKLYTQVSSSTKMLADIFKNILSKDTKVIYTKSSEVSDFRRQYGFPKMTMLNEHYLAKDAYLNIVVGNVWYTKFTASPMWYIEKEYRTGKSEYNLNRMYDFNIIRDERIAWIAESKKKNIPGTIDVIKKVMSRNTPVTVTRITEGHGALTNATISKAAKSKPGVYLPLKSDERYKDVTKYGGKTSIKTAYNFLVEHTDKHGSRIRTLYSLPLYLANNVKNKEDIEKYCRETLGLKEPDVRINKIMLNSELEIDGYRYLLGGKTGLQYGLKNNTPMVFNVEWQGYISKIEKYIDFKSVDKDITSERNIELYDEILGKHKNSIFSRKRNPLYNLIESCRDNFVGLSLEEQMQALYQILFLTRMGTNVSNLSVIGAGANVGLMHLNATISKASSVKLIEISITGMYTIETDMLNC

SEQ ID NO: 5246 - protein, 1019 aa, unidentified
  REGION 1..1019: note = Description of Unknown: Cas Enzyme sequence
MRHILALDMGTASTGYAIIDENYNVLITGVRLFREGTAEENVGRRRFRSSRRGVRRSRHRLDRLKELLTNVIGVSGDQSYTNLYEIRARGLNNKLSPDELIAAIIQLAKHRGIFYLSPEDLAAEDGSGQSSADIIRTNEYKLKEGVYPCHVQLEKLNTTGIVRGIENKFTHESYRNELIKLLEVQSEFYPKLKGIINDILCIYDSKREYYEGPGSYKSPTPYGSYQLDESGNVIKINLIDKMRGKCTYFPDELRAPKWSYSACLFNLLNDLNNLTIDKKEKPIFTKFEGYNELLKIAKSVNEEATIEGNKQLVDDISEILTKEKSIEIRKKTLIDDLNLSVNLSKEIAKLGDFTKYHSLSFKAINLILDSLLKTSKNQMELYTEAGIKPYNHNFSQNNQLSANLSDWIVSPVVKRSINETIKVFNALRKYLKTQMGEDAEFSDVVVELAREKNSQEKKDLIKKIQKANEEKRYKIMELVENRRLTRAEFERISLLLEQDFKCAYSLEPIELADVFKAGLLEVDHIIPLSISLSDAQSNKVLVYQRENQAKGQRSPFQYFCSGKAKITFERYKEYVTKNLNFSNAKKSNLLYLGNPVEDMKGFIERNLVDTRYASRETYNLLKSFFEYHNINTKVKVINGSATSYFRKKAYLSKNREETYAHHAQDAMIIAGFANTKLMKFFSKIGAFSESLNHKDSIVEVDGNIINSETGEVLEQELFDKSENVSNYIQFLKRIESIEPLYSHKVDRKPNRALYDQQIKATRSFVEADKEVTYIITKYSDIYNTGTGNAGSKLKKMILESPDKLLMYHHDPKTFEIFQKIVEQYGDESNPFAAYKEDHGPISKYSKKGNGPTIESVKFRDKQLGSHRVNTKQNGYNKSVFLKIKSLRTDVYQDGENYLVLNVPYDMVSFVNGRYIIDRDKYNKSQQDQKIPESATFVTSLYRGDYISYEENGEIVECIFKCINNEKAHKIEISYVNRPTDKQVMKGIKTSIKNLTKYNVDVLGNKYEVTDEKLEFDVTI

SEQ ID NO: 5247 - protein, 1096 aa, unidentified
  REGION 1..1096: note = Description of Unknown: Cas Enzyme sequence
LGKVLGLDIGIASVGWGLIDTDTKKIVDMGARLFDSADANNNRARREARGARRNLRRKKYRLKCIDELLLDYDFYPPTDQNLNPYELRVKGLSEKLEPGELYAALYHLAKRRGISYLDEAVEENNNINESLKINNDLLKEKHPCEIQLERLYKYGKVRGLIEIQKEDGSFETLINVFTTGAYKREALQILNTQRKYYSQIDDNFIEEYVEILTRKRDFYIGPGDPKNRTNYGIYKTDGRTINSIFEELIGKCSIYKDEQRAPSSSYTAQEFNLLNDLNNLTINGRKLSESEKKKIVDEVLNTKNVGTATMVKIIKKVTGLGNDIEIKGYSVDKDEKMVFNHTFEAERKLRAFLHDTSINYGEFSIDDKDKLAIVLSKSIDYKSLKENCRTAFQDFGEEEITLLFSFLQKNKSLYSRWHSFSLKIMKEMREELYKKPMNQMNFLIERGIKKSIEANFGKYKYIPVGFLDDEIYNPVVKRSINQSIRIVNAIIKKHGDLEAIVIEMPRETNEIEEKKKLRKIQGDNEKEKNEALNRARNEYNLTDEHLNSQRDLPTKIRLWYQQDGRCIYTGEPISIQDLVNYPNKFEIDHIIPKSISLDDSLNNKVLCYNIANQIKRQRTPFYAFSTNPNNISYDEIKDRAYKLFKSNKISKAKYDLLTFEEDINKQEVREKFISRNLNDTRYASRVVLNGLQEFMKNKGKETQIHVVRGKFTYQVRKRWGLEKDRDESYAHHAIDAIIVAACYMLGQSDGTVRNPFLQKLGRYNKPFWNVVSNEEYDKEVYKLPWENFIIDLNNKTSKIKYSHKIDTKVNRAISDATLYSTREIDGEDYIVKKYKNIYDSVTAKIVIKKIKDDLEKYKDPNDSKILMRKHDPRTFEIITKIIDMYSGEEPNPFEAYRKEYGYIRKYSKNGNGPIIKDIKYISTKLGQGIEVSKTENLSKNKKVVLLSLNPYRSDVYYNEEKENYKIIGIKYNDLIFKDGKYVLKVDDYNLMKERLGIDDSYRFLFSLYKNDIVGITYKANPDIEERYRFLSSKADNPNRIEVKPIDKNEFEKRIQPTIGTKVLKFNKYHTDILGNVFNVTTEQLKFEFIVDNKSDL

SEQ ID NO: 5248 - protein, 957 aa, unidentified
  REGION 1..957: note = Description of Unknown: Cas Enzyme sequence
MKVLGLDLGVTSIGGGLLTLPDKFEEWGKEGRIEWAGSRIIPVDGDYLKKFETGSEVETKAAFRTKGRGSRKLKQRYVLRRTRLIKVFKILGWLTPDFPENFKEKISKEDGFKFNISNYLPFEQSSIDEATKLLGVKNKVGKLACSEDWVIYYLRKKALTEKISLSELARIIYMFNQRRGFKSGRKDLRDVTEDAMEKKRVEILAIKHVLQISKEKDKNGKFKFQIIPDNSSAKIPVEPWEELRFKKPEWEGKTFTLLVTVKNGKQNKPQTPQEDDYDLLLTALDNLIENSNKQVGEYFFDELVNDKNYKIRQKTVRRERYQKELKAIWDRQSQDDCHPELKNKAKLLEISQALYPSQTKAGTSKSKEILSNDLYHVIANDIIYYQRELKSQKSLISGCQYEKLAIEKNGEKIKIGVKVAPRTSPEFQEFRIWQTVHNIKIYEREQYIDGHSRIDVDVTGLYLGNDSKGYEAKEKLFELFDDNGEVDEKKVFKSINETHAAKLTKETHRISLFYKKDVTVKGNETKKLFRKYFEKVNAEAEGELVLNNPEKFSRLWHIFYSISSSDSSKSQKGIETALKNPKIKFGFSDDTIKALTSIPEVPKQYASLSTKAIKKLLPLMRCGKYWNWENITTENQLKIQRIIKDGWDKVDKETGEVVNERPFFSTEQVQGLATWMAAYVIYDRHSESVNTEKYTSYDQIDVMKLVPNNSLRNPLVEQIVRETLFLVKDLWKQHGQPDEIHIELGRDLKKNMDERAKISEVNTNNQQERERIKRLLKELLNDSFEEYVDENTTITSHFETRPNPESPMDIEKFKIWKSLAGALPEDIAAYFKEKDKKEKLPTNADIKKYALWLTQNCKSPYTGNTIPLSRLFTTAYEVEHIIPRSKMKYDANENLVICESAINPEPYKGNRLARNFISQFSGQTIKINNSVIKIFTEHEYETHCKATFRGKKLEERN

SEQ ID NO: 5249 - protein, 1225 aa, unidentified
  REGION 1..1225: note = Description of Unknown: Cas Enzyme sequence
MKKILGLDLGVSSIGWALIDEDDKEILGVGCRIVPLSTDDKDEFVKGNAISKNQKRTLKRSQRRGYDRYQLRRKYLLEVLKQNGMVPDQTLVKLSKLDLWNIRAKAVNEKLTLSQLGRVLLHLNQKRGYKSSRSDSNLDKKDTEYVANVKSRYEQLKEMGLTIGQYLFRELSQNQYFRIKELVYPREAYIQEFTSIIRKQREFYPEILTDELILKIKDEIIYYQRGLKSQKNLVSVCDYEGSWKKVQNNGKEKEVFIGPKVAHRSSPLFQVIKIWETINNIQIRKKDGIYFEITLEKKKELFNYLDNNENLTYSELLKILELKKDEVYSNKMLTKAKGLQGNITKNSILSCFNNIDDHSHLLKLDIVIEQKNDDGFLVDKKNGEILKSKPKKIISVEVEKQPLFKLWHTIYSISEKEECINALIKNFNLPEDVALKLANLDFSKYGYSNKSHKAIRKILPYLMEGDMLYDSCSYAGYYHVLSITKEENHKRKLKDKLELLTKNSLRQPIVEKILNQMINLINSLITKYGKPDEIRIELARELKQTKDERYDTYKYLDKREKENEQIAKELEEYGLRATRNNIIKWRLYHEISEDGKKQNAICIYCGQPISFSAAISGEEVEVEHIIPRSKLFDDSQSNKTLAHRKCNSNKKEQTAFDFMKSKSEQEFNDYLERINTLYKNKIIGKTKRDKLLMPIDKIPADFINRQLRETQYISRKAREILQSICHNVWVTSGSVTSELRYFWGWDTVIENLRLPQFRNLGLTQLEEINDKNSKIKREKIIGWSKRDDHRHHAVDALTIASTKQGFIQRINNLNSDNIRNEMMRNIESSKLEFNKNNTLLENYLISQKPFTTEQVQSVISKVLISIKPGKKVASFGQRKIKKGGKKIIAQSGIIIPRGPLSEESVYGKIKVIEKEKPIKYLFENPHLIFKPYIKKLIEDRLYQFDNDPYEAIKSLKSNPIFLDPENKIKLMYASCFKDEIVIKKDLQTLTKPQIGKIVDPSIRKKLFDRLEQFNGNVKEALKDLENNPIYQNEEKKIPVKSVRCFTGSEVIEPIRKNEKGVDISFVKPGNNHHIALYYDENNKIQMHVCTFWHAVERKKYGLPIVIKNPSSVVDTVLEYPELYPESFLEKLPDGKWSFIQSFQQNEMFVLGLSKEAFEEALSSNDYQLISDNLFRVQKLSTTGYFVVFRHHLSVSADTPYEMIGFSSFQDFTGIKVSINNLGLIQ

SEQ ID NO: 5250 - protein, 1096 aa, unidentified
  REGION 1..1096: note = Description of Unknown: Cas Enzyme sequence
MAKKYTLGIDIGITSVGWGIIDDNNEIIASGVRLFEEADSENNLKRRNFRSARRIKSRKKLRVMDMRQLLFNNSVIPTLDYVPFSNPYAAREKGLTEKLSSDELASALIHLSKRRGSSLETVEEEVKNQESPKLVLQQHAKLIKKGLSVVQIQMKKLNDEGIVRGHQNVFKTTDYLDETKAILNNQEMDDKFNQSVIEIINRRRHFSEGPGNLLSPTPYGRYRSVDGSLKNDMINCFDDVQKRRYKQERFHFTYENAEYLALKNGEIVNKNPLNLIELMRGKCSIYNDQLRAPKGAVSAEIYNLLNDLNNLRIVTQDKRKLSKDEKTKVLDYLIENGYFKPKGFKGLAKFLGVEMSELSGMRESSAALPLITELEHYHKIKKVIDSLDIQKMKLMDYDFVAEVLTSTQVLSERRSLLQSLKIKQQSIEAIANLTGFNGYHAFSFKALYILNKELVENEMNAQQLILDASIDINKDKLALSDKIILSPVARRAQKEALKVVEELRSEFGNFDRIVVETTREKNSKEQKSNIQKAQKTNMKSRTEAEVLVQSVTGNDSYRPSGMQILKIRLYNEQDGKCAYTGLPIDFNRMITDPKAYEVDHILPFSISLDDSYDNKVLVISDVNQLKGNKTPFGYFTSGKVRKHFPIQNFEIFKISIESNANYNAKKKAYLLEVRDITKYSQMKEFINRNLVDTSYAVRMFMMTLKEYFEVNGIPTSVLTIKGKQTSLFRRIGRSLWYRAHQNEEESLNPFDKDRQIYMHHAVDALIVAALSRQRLFNYLYKVDSDTESNYATLNNTGELFEADPKEDSSLVMYLKQLGNLDANDVRYSWKRDSKYNRSVSDQTIYSTRVYDKDEYVVYKLKDIYSKKQKELDPFFGAGDKKETLLMYKHDIETYELIRQAFDQYKHEQYPLQVFADNHGKIRKNNKGPVVTDVKYVRNKLGNHINITPENYSGNKKIILQQISSVRADIYQSKEGLYRFVTIRYAEVKNINHKFVIDEAVYQNKLNDKGIDHNYEFRFSLYRNDLIEFDDGQKTLLRYIAVANDKNNVIEFKYYDKVNDERIMKTLGRSTANITKYNVTPAGKKYKVYKEPLKLII

SEQ ID NO: 5251 - protein, 1369 aa, unidentified
  REGION 1..1369: note = Description of Unknown: Cas Enzyme sequence
MNSNNYSIGLDIGTNSVGWAVITDDYKVPSKKMKVLGNTDKHFIKKNLIGALLFDEGTTAEDRRLKRTARRRYTRRKNRLRYLQEIFSEEISKLDSSFFHRLDDSFLVPEDKRGSKYPIFATLAKEKEYHKQFPTIYHLRKQLAESNEKADLRLIYLALAHMIKYRGHFLIDDPKFKVQNNDIQGLFEKFVEEYDNVQETSLSKIKLNVTEILTANIPKSEKQEQLLKNYPSEKKNTLFGNLIGLALGLTPNFKTNFSLENDAKLQISSESYEEDLGNLLALIGENFIELFSAVKNLSDGILLAGIVSDESPHAPLSAKMVIRFKEHEEDLASLKQFIKNNLPEKYDEVFSDQSKDGYAGYIGGKTTQEAFYKYIKNLLSKFEGVDYFLDKIEREDFLRKQRTFDNGSIPHQIHLQEMNAILRRQGEHYPFLQENKEKIEKILTFRIPYYVGPFARGNRDFAWLTRNSDQAIRPWNFEEIVDKASSVESFINKMTNYDLYLPEEKVLPKHSLLYETFAVYNELTKVKFIAEGLKDYQFLDSGQKKQIVNQLFKEKRKVTEKDIIQFLHNVDGYDGIELKGIEKQFNASLSTYHDLLKIIKDKEFMDDPKNEAILENIVHTLTIFEDREMIKQRLAKYASIFDEKVIKALTRRHYTGWGKLSAKLINGICDKKTGKTILDYLIDDGYSNRNFMQLINDDVLSFREAIKKAQVVGKTDDVKQVVQELPGSPAIKKGILQSIKIVEELVKVMGHEPESIVIEMARENQTTARGKKNSQQRYKRIENALKNLAPGLDSNILKEHPTDNIQLQNDRLFLYYLQNGKDMYTGEALDINQLSSYDIDHIVPQAFIKDDSLDNRILTSSKENRGKSDNVPSLEVVQKRKAFWQQLLDSKLISERKFNNLTKAERGGLTEYDKAGFIKRQLVETRQITKHVAQILDARFNTEVNEKDKKNRKVKIITLKSNLVSNFRKEFRLYKVREINDYHHAHDAYLNAVVAKAILKKYPKLEPEFVYGDYQKYDLKRYISRFKDPKEVEKATEKYFFYSNLLNFFKEEVHYADGTTVKRENIEYSKDTGEIAWNKEKDFATIKKVLSLPQVNIVKKREEQTGGFSKESILPKGNSDKLIPRKTKDILWDTTKYGGFDSPVIAYSILLIADIEKGKAKKLKTVKTLVGITIMEKDAFEDNPITFLENKGYHNVRKENILCLPKYSLFELENGRRRMLASAKELQKGNEIVLPAYLTILLYHAKNIHRLDEPEHLKYIQKHRNEFQDLLNLVSEFSQKYVHAEANLEKIKNLYADNEQADIEILANSFINLLTFTALGAPAAFKFFDKDVDRKRYTTVSEILNSTLIHQSITGLYETRVDLSKLGED

SEQ ID NO: 5252 - protein, 1339 aa, unidentified
  REGION 1..1339: note = Description of Unknown: Cas Enzyme sequence
MEKKLDVGIKMETDIVSWCVADGLDVVKRYGRDCIGARYFGKAKTSGETRRIFRTERRRISRRKERLRFLKTLFRDPISNNEIDPSLSDPEFFERLKNEEDTLFPTKEETREFRRKYPTIFHLTLHLMQEPEPDVRLIYLALKDLMEHRGTFSLNINADADGSLSFQALFEAMLEKLRDAGMRLDLSDADKEKIEEVLKSRDNKKLKKTAMEETFAITKKDKDAAAVIGLLNGSKVDLKNLFPESMEEADKTESKICFMDDYEQERERISAFLNEDELEIMDAVRNVYDIVVISKILGSESSYIEGKAKSYDVHQADLQMLRDILLEAKKYEGCNRLYWEMFEDMTTDQPNYCRYVKKGFNSKNKRKTPSSEEFYDFVKKCFGKIRKAMEESPDEALEEKMQFCEESVENDVFMPKQRTRANGIIPNAIIRLDLMKLLACQKQMHTWLGEESKWFQSGLTCEEELLEYFSFTVPFWIGPLNPEQKTAWVVRKEPGAIFPWNLADKVDFVKTRRAFITMLTDKCQLMMDESVLPDNSYYVRKMEVFDELGRITVNGSQIPPRLKQEIFQQLFLTKNTVTQKDILDLLRAENWEVLSDLDAEEIETTGFVKKKCVHTMDVYLAAKKILPEICIEDYETIAEYVSVFKDDKKTAQDCLMDLLSIEGETLKKLISAVKVTGWSKYSKKALTEVLGAKAEGGKEKRTILETLEQSTDTLYTILGPDYTFFETFKKENAATLKQMEIGDVIDRITANPILRRSMNQTAHILNDIRRAYGKDVGTVYINMYLPANERALSMTALRRKLLVALRKAQKKSFADLLDALKEINMRQYLWFSQLGTDIYTGEDIPYAEIGNGEKWTVDHIYPQSRVYDNTYNNLCLTHRDTNRDKSNQYPIAEEIRNKMERFWKTLLSMELITSAKYDALVSSYFDMDKAFETADKILIEKRIMALEYEALISRILPDVKVVHVNKLLLNDFKKSSPAFLYRNAEIFENDKALDAYYTVLVGRTWHTIFGDYPKRYMRQNKQYTLNVYNVKTDAWDPSASLKKAEEVVTALNPVQTQMVDTNTQGELFNTMRISGFAAARSKVRKAPVKQGKEDVAKYGGYLSIKAAYFCLIQHGEGIVTLENVKIMDLPKIKGDDDLIKYFEEKGYKNVSIVKRKLGSYTPLCVGGNKCYITSGESGRIRYWNAIPFMMKPSEMRTYLLKIGYLSGRTKQFDKKEVERCTRPELKAISKDKNLRLFNEICETLKMIYACRTNGGTSVDKIFEQKKEFEKLDAFTQCRVLINITKFGQRKMQGTDLREIGLAKLFGIDTLSIHFKPGMNVSLLEESATGMYFKQEQIQQ

SEQ ID NO: 5253 - protein, 997 aa, unidentified
  REGION 1..997: note = Description of Unknown: Cas Enzyme sequence
VDSSLIFSLDLGTASIGWSAYRSSDIEQGEILGLGVRSFEEPVEAKSREPKNAKRRTARGARRVTGRRKERKRLLLSILQQNQLAPDSNAIEEWTVFNPYELRAKALDEKLSIPELGRALYHLGQRRGFLSNRKTRGLESTGIEEVDQLIELDEQADLEHGRNSKGSDEDSQMLVSIAALQNQIEAGGFRTVGEYFATKLSEKERIRARHTLRAMFSHEFELIWEFQKQFYPEKLTDALKLQIERSIFFQNPLKPVLRGKCSLEENKPVTMRAHSLFQEARIWQELANITIQTTNDWQKRGLTIEERGVIFDRLNSSRKLTWTEFRKILQLPKKDKAIINLEENAQKKHLDGNITNASLIQATDQAWSKLDQETRDVAMDTLVSRLNDKEKLVRLVNKLNIRAPIAYKLVIASLPDGTASLSLKAIKKLIPHLRDGLNYYDAKISAGYTPEHEREHPTNDILEWEKLENVRNPGVLKCTYETRKLINALIRKYGKPDEIKIELARELGQGRQEKLDILAANKKNEKLNDEARRIAAENGVSKPSRTDAIKYRLWVECNQQCPFTGKPIPLSALWTEKWNIEHIIPFSISLDDSFANKTLCDAEFNQNIKRNRLPTETFAGNPDEWNQVLLRINNFKSGLHKKNLFQLNREDIPDDFKSRQLNDTRYASVLVRDFLKKLGIPVSSCTGKHTSDLRRHWGLHTILDEEGKKNRDDHRHHAIDALVVGLTTPAYVKRIADLYKSGGSLQLSSQRVPLPWLNIREDVKNAVDKIIVTHEPRHKVRGALHEETGYGRSKVNQKFTTRKAIETLTPGEVERIVDPALRKKIEEHVFSSEGKWEDKMANFRIIDKNGVIHHANRVKIYARGESEDRYLKTNRGYFPSGANQWLIITNNRTTNARNAHIIPLYKATLAIKNNLPMKDLIPSEEDFVFLLQKNDMVELAGDKPGIYRVVKFSIIPNIYITFRPHNRADDAADVRVVSLPKLNNIVKLLRVGMIDVT

SEQ ID NO: 5254 - protein, 1272 aa, unidentified
  REGION 1..1272: note = Description of Unknown: Cas Enzyme sequence
MSRTLGLDLGTNSIGWAVLDSSNGGELVAKGVQVFPKGVGEESGREVSLTAERTGYRAARRIKQRRKIRKQNTLRELIRFELCPGLTLQDIDQWKTRNMYPSSTAFIAWLRTEGKMPDGRNTCPYGYRWLAATKKLDLSKPHNRLILGRAFYHLAQRRGYKSNRISGQEKDGKVTGAINALHEKMKGRTLGQFFYEDCIGKEPVRGEGHYTSRADYEQEFRSICRKQQLSKEMADVLHNAIFYQRPLKSQKGTVGPCVLEPKKRRAPISHPIYERFRALQFLNNVRIRPQGEAASRVLNPEERETALKWMSTLQRTEKFEKLAKKLLPRKSTCVYGETHQDVAIQSWGFNFRKDAGVPDSATTATLIKLFGKEYVSGIRKVYSKAEGKRDEEIVADVWHAMYSFDDDILLAEYASSTLGLVDEKLIERFCTPLRQGYGNLSLAAIQKILPWLETGIIYSHAVYLANLPTIFKRSGKKWSQHGLMTEKDIGHLIETQRQDASIRCAANEALKQFHDDQIEDLDLHLSVGRNLRELQSQLTERIRREFGGANWELLSEKEQSDVTGQALEMVKRNWETGRDQPPSVPILNQKSRIECYLRDTHDIPERALEALYHPSAIETYPDAETELGSPRIPSIRNPVFMRTMYRLRAIINELIQDGVINPQTRVRIEMARDLNDANQRAAINRYQREREKKRTDYAKAIEEAGFEVSERNVLKYQLWIEQEHRCLYTDQQIGLTEFLGHNPAYDIEHTIPRSRRFDDSQTNLTLCSRQFNREVKGRRIPQELSTSGDILDRVRKLWWPEVEKYESFCAKNQITKKTAADKEAKDKALQNLHYNRMWLRYWKEKIRNFETTEVPEGFTNHQLVDTRIICKYAMLYLKSYFDRVYSMKASALSTLKEIWGLNEKTRANHLHHCIDAVITASIRPAFYQELAAYYHKMDRFERDEQSRPHPPEPWQGFAQYLNHDIYDDVLVVHHHKNNLLKPTVKRAKINGKWVVKQGDSARGSLHKETYYGVIKPPVKEGRLASKDLVCVVRRKLDSTFKDIEKIVDPVIREKVRSQQHKLKQDETVWYDEARRVPIRKVRVYDATQPGSLIQLKEHRDVSRHEHKRHLSAANESNYLVALYRGHVNGKPKASWKKISNFEAVRASKNGTWDTILPQKDHAGLGIYGILKIGTQIILKQHPEETVDQLSHQEYSRRLYHVTKLEGKDTTLKHHMEARAVKDLGKGGNKRPWECTSPPPLIRCASNTLWFLIENVHFKISQSGNLIWLDQNE

SEQ ID NO: 5255 - protein, 978 aa, unidentified
  REGION 1..978: note = Description of Unknown: Cas Enzyme sequence
IPAIVKERAKEIYQRLSDIDFKEKRIHEVADDDVQKQLLKSFINKKDDLLKVKGLNTYQACYLVYDRHSERTNKTKYTDPEQFNIMEVLPNNSLRNPVVEQVVREALFVVKDVWKKYGQPDEIHIEMGRELKKNAMERQRATENSTKNFDEKRRIREILKELLNEKFEQYVNTDDDVTKSKVESAQFEVKPNPNNPTDIDRFKIWKNTSGLRDDEFEKKIKDEKIPKEHEIKKYTLWLSQKCISPYTGKIIPLSKLFDQNQYEIEHILPKAKIKNDSFDNLVISEWGVNKAKGNELAAIFIKSKGGKCTYGGKEYTLFDYTSFVNHCKETFKGKKLQNLLATEIPDDFITRQINDTRYITKKISDLLYPVAKGKNNADDGDEKGGIILTIGSITSELKKEWGLQKEWKQLIKPRFERLEKINDTSYIKQNEKDRNDIDFHIPENPDLDTKRIDHRHHALDAIVIAATTQEHIRYLNSLSAVDTDEELKKVKRTLVKNKIREFQLPWASFTKEAKEKLEETLVTFKSYNRVVDKPLNYYTKWKPILGTDGEQQNDSNGVPLFESKAIKQMPPQDGKKWMAVRQSLFAEQPHGKVYIKEIVEKKFETPKQMLEIIKLQGEREKAQNTPLQKTASYIYDKEIRELVKQKLKELKGSDEEILKQLKKLKFLNAKGSRITNVKIAEFHSYAAKRKEISKDFDHKVIDKIPYSEKSQIPQTLHRHLLEYEKKKLGVETLEWKNEKLVQLVNEVKYEPVILNEEKKKLINEAQSEAFSEEGLEALDKKVRMKIRMVTLTDGRVDKGTKIPFKNKLFEADSNPYFIMYENILTKERNDYPSYSLSSYDLIQRKKQGLSIAPEKNGTKVIILQSNDLVYVPTKEETQRIKNGEDTSNVINSENLKNISERTYIVNNFTKTDIYFKPNRFSKAIKSKELHTSYDDKCSRLIVTPQKDDKENDITEEAVLIKECCIKLNVDRLGNIKPA

SEQ ID NO: 5256 - protein, 1395 aa, unidentified
  REGION 1..1395: note = Description of Unknown: Cas Enzyme sequence
MNANREMAYYIGIDMGTGSVGMAITDENYNLLKVKGQDYWFVREFETANTQIKRRIHRISKRRLRRHQARVALIRSYFAEEILKNDPLFFIRQDNSKYYLEDKDSVLKTKDCLFADYNYHDKNYYKDYPTIFHLRQAFIKDTVKDDENHTRYARLLYLAIINMFEHRGHFLLNSVSEDINKEMVKDAGEGFTLYLQERIKEIKSVSYSDILDVLVENNISRSEKKERIVELFGIEKSCKNGTEIIRCLCGLEANVAIMFNLNNIENKLKIEVSKDDYEDKLAEVQPLVDEESFELLSQIKQLYDYSQLQSILKGYKEKEDGEDKYLSDVRVELYEKHKADLKLLKKVYKRDLDTKGKICEGKNIQRGSKYNFMFRSGKDGTYSAYTNSLNSFCSKTIENKYRRNMKNRDRASLYDTIKKDLNGIENDDVKKILRDIETEQFLPKQITGENGVIPNQIHAKELKAILKNAEKHLPFLTEKDDSGLTVSERIILLFTYCIPYYIGPVGKDSRTGWASIKEEGQIFPWNIEQKIDVDKTSEEFITRLIKTCTYLSNEKVVPKQSLVYERYCVLNEINNIKIRGKRIDPQLKQEIFKELYIGSKCGKKVTRKNLCQYLVNKGAIEEDSEISGIDKDLNTYMSSYGKMYQIFGDKIKRDDIKEVAEEIIYYGTIYGGAKEMFKKKIEQYVSENILDEAQMNRILGFKFKDWARLSKKFLYLEGYDKGNQNQLTTLMQALWDYNLNTMELMNSPMFTFKETLEKQKNEMEKVLCDFEYEDLDEYYFSAPVKRMVWQTIACLKEVVQIMGHNPKRIFIEMPRADEEKGEQGRKASRKNRLLSLYEEIEDERPWKKEIENAAESGRLNSKRMYLYYLQMGKDAYTGEDIDIEDLFDNSKYDIDHIYPRSLTDDNSLENNLVLVSATINQNVKKNDYPIPYDKIRGNSKVRELWYFLHKKNFMNDEKYNRLMSDVPLTQEQLAGYIARQLVETAQGTKGIADIIKSVIPDADIIYSKAKNVSDFRKRYGMLKSRLTNDFHHAKDAYLNVVVGNVYFTKFTQNPRKYIKDENDIENKKYNYNLSKMYDKDVIRNGKVAWIAQNGKKAGTIQTIKKVMDRNTPIITRQAFEQRGELYDLQPISKHKAKKENYVPIKATNEKMKDVTKYGGFTSLNPAYFVFVEYGSAKKRQRCFAVVHSYWASSIKNKEDLVTHLKDRGYENPIVIADKIKKNSLIKYNGYFLYIVGMDARKQVEFSNATSMCLNNNFIQYIQKIEKANTLIAEAKKRRPYIDESITAERNIALYNELKKKHLDSIFKNHPKGIGSVLESGEGAFVQLSLEQQIGILYSIIQFSSFKKGTFSLALIGGPKEVGRIRISGNMPKARELKLIHYSVTGMYKKEINLLD

SEQ ID NO: 5257 - protein, 1064 aa, unidentified
  REGION 1..1064: note = Description of Unknown: Cas Enzyme sequence
MRHILALDMGTASTGYAIIDENYNVLITGVRLFREGTAQDNVARRGFRSSRRGVRRSRHRLDRLKELLSNAIGVSGNQSYTNLYEIRVRGLSDKLSTAELVAAIIQLAKHRGIFYLSPEDLATEDGNNQSSADIIRSNENKLKAGIYPCHVQLEKLNTTGTVRGIENKFTHESYRSELIKLLEVQSKFYPQLQDITEDILCIYDSKREYYEGPGSYKSPTPYGSYQLDKSGNVIKINLIDKMRGKCTYFPDELRAPKWSYSACLFNLLNDLNNLTIQGVKITEPQKQELISEYVNKGKSVTIPAIAKVCGVKKEDIFGFRIDKSEKPIFTKFEGYNALLKIAKSVNEEATIEGKKQLVDNISEILTKEKSIEIRERTLIDDLNLPVNLSKEIAKLGDFTKYHSLSFKAINLILDDLLKTSKNQMELYTEAGIKPYNHNFSQNNQLSANLSDWIVSPVVKRSINEAIKVFNALRKYLKTKNGDDAEFSDVIVELAREKNSEEKKDLIKKIQKANEEKRYKIMELVENRKITRAEFERISLLLEQDFRCAYSLEPIELSDVFKAGLLEVDHIIPLSISLSDAQSNKVLVYQRENQAKGQRSPFQYFSSGKAKVTFERFKEYVTKNLNFSNAKKRNLLYLGNPVEDMKGFIDRNLVDTRYASRETYNLLKSFFDYHNINTKVKVINGSATSYFRKKAYLSKNREETYAHHAQDAMIIAGFANTKLMEFFSKIGAFSENLNNKDAIAEVDGNIINSETGEVLEQELFDKSENVSNYIQFLKRIESIEPLYSHKVDRKPNRALYDQQIKATRSFVENNKEVTYIITKYSDIYNTGKGNSGAKLKKRILESPEDLLMYHHDPKTFEIFLKIVEQYGEEDNPFAAYKEDHGPIRKYSKKGNGPIIESVKFRDKQLGAHRVNTKQDGHNKSVFLKIKSLRTDIYQDGENYLLLNVPYDMVSCLNGRYIINQDKYFKAKQSQKIPDSARFVTSLYRGDYITYEENGELVECIFKIINNEKTHRIEISYVDRPTNKQVMKGVKTSIKNLTKYNVDVLGNKYKVTDEKLEFDVTI

SEQ ID NO: 5258 - protein, 1198 aa, unidentified
  REGION 1..1198: note = Description of Unknown: Cas Enzyme sequence
MENAVKQRILGLDTGTNSLGWAVVDRLPEGGYELVDKGVHIFPEGVNVEKGTQEKSRAAERTEHRSLRKQYWRRKVRKIRLLAVLSNAGLCPPLTSEELHAWRVDGTYPLANEAFMRWQRTDENKGVNPYAARCQCIKSELDMENKNDRYLLGRALYHIAQRRGFLSNRKDQADDKETGVVKEGIQELTKKINDAGCEYLCQYFYQLYQRGERIRNCYTDRREHYEKEFEAICKKQHLNETLVAELHKIIFVQRPLKSQRRGIAKCPFEPSKHCAPISHSLFEEFRMWSFIRNIKVQTPTDTDLRALNSDEISKIQHLWFRKSKPTFHFEDIAKTLAGKANYCYYKSAEAKPYRFNYYLDSSVAGCPVSAQLKDIFGEDILQNRENIDKIWQALDFYTDDLKLREWGIKHFNLSDEQADSLVKIRLPQGYASLSLKAIENILPLMRDHAMSYANATLIAKLRDLLKGYDYDEEVDAYLINDIEDYLTIPTDKNGKPQITREERKQILENKWKEHYHLSDKDLQKLYHPSMIEEYSKVENKTNGVYQLGSPRTSAFKNPMAMRALFRIKAVVNQLLKDGTIDENTIVHIEFARSLNDANRRAALRDYQRIQRAEREKAIEAIKDLVPNPSDTDILKYLLWIEQDKKSIYTGEDISLPALYKTKDYEIEHTIPRCMGGATIRENLTVCEASFNHDIKKTLLPSQLPESRQAIILERIQPWKDKYESLAKQVRRMETSPRKRLLEMQRDYWRDKYEAFIKEEKDVQGFTRRQGTDISVISRYGRLYLLSLFNRVDVVKGAMTAEFREAWGIQEAYQKKDRTNHVHHCIDAITIACMGKREYDEYSAICRTNEEHNTKLIIPKPWIGFTEDIKNIEQEILVAHYTANPMGKQTRKKLRNPQGRIIRDQQGKPLYTTGDTARVVLHNDMIYGKIMNSHDIDPKHPSGKVCTVKRIPLAEVKVEEVVDPVVKQVIANAISKYGSIKAAIETEQENNDGSIWLNKEKDVKLKTIRCFQDHASGAASIRALRDTSAKEYKRFHYTRPDGNYVAAIYEGIDNKGNKKRTSVIVTNLDASKAFNKHLPIVPENKDGYALLCTIKKGDLVLLYENSPEELRNASQAELSKRLYKIVKMSDSGGLQITIRHHQEAREATKLKELYGNPKTGLFESSQEIYPQRRLSHNQFNALVQGQHFELTETGKIKFK

SEQ ID NO: 5259 - protein, 1129 aa, unidentified
  REGION 1..1129: note = Description of Unknown: Cas Enzyme sequence
MTNGKILGLDIGIASVGVGIIEAKTGKVVHANSRLFSAANAENNAERRGFRGSRRLNRRKKHRVKRVRDLFEKYEIVTDFRNLNLNPYELRVKGLTEQLTNEELFAALRTISKRRGISYLDDAEDDSTGSTDYAKSIDENRRLLKTKTPGQIQLERLEKYGQLRGNFTVYDENGEAHRLINVFSTSDYEKEARKILETQADYNKKITAEFIDDYVEILTQKRKYYHGPGNEKSRTDYGRFRTDGTTLENIFGILIGKCSFYPDEYRASKASYTAQEYNFLNDLNNLKVPTETGKLSTEQKEALVEFAKSTATLDPAKLLKEIAKILDCKVDEIKGYREDDKGKPDLHTFEPYRKLKFNLDSVNIDDLSREVLDKLADILTLNTEREGIEDAIKRNLPNQFTEGQISEIIKVRKSQSTAFNKGWHSFSAKLMNELIPELYATSDEQMTILTRLEKFKVNKKSSKNTKTIDEKEVTDEIYNPVVAKSVRQTIKIINAAVKKYGDFDKIVIEMPRDKNADDEKKFIDKRNKENKKEKDDALKRAAYLYNGTDKLPDEVFHGNKQLETKIRLWYQQGERCLYSGKPIPIQELVHNSNNFEIDHILPLSLSFDDSLANKVLVYAWTNQEKGQKTPYQVIDSMDAAWSFREMKDYVLKQKGLGKKKRDYLLTTENIDKIEVKKKFIERNLVDTRYASRVVLNSLQSALRELGKDTKISVIRGQFTSQLRRKWKIDKSRETYHHHAVDALIIAASSQLKLWEKQDNPMFVDYGNNQVVDKQTGEILSVSDDEYKELVFQPPYQGFVNTISSKGFEDEILFSYQVDSKYNRKVSDATIYSTRKAKIGKDKKEETYVLGKIKDIYSQNGFDTFIKKYNKDKTQFLMYQKDPLTWENVIEVILRDYPTTKKSEDGKNDVKCNPFEEYRRENGLVCKYSKKGKGTPIKSLKYYDTILKNTSGLDITPEISNNKVILQSLNPWRTDVYFNPITLKYELAGIRYCDLQYLKGGNYGLTEDKYKEILKKEGVTEESEFKFTLYKNDLILIKDAETNEKILLRFLSRSDLSCKNKVELKPYNKEKFSSGEFLISVIGTTPVRCTKTLSYKNISIYKVRTDVLGNKFFVKKEGDKPKLDFKNNKK

SEQ ID NO: 5260 - protein, 1264 aa, unidentified
  REGION 1..1264: note = Description of Unknown: Cas Enzyme sequence
MTKYILGLDLGTNSIGRALIEIDEHNIPIRIIAMGSRIIPLSSNDKDQFQKGQSITKNADKTIIHNQRKGYDRKQLRKKDLKDILTRYNIFLSEELMNLPALELWKLRSNAVNPEENISAEQLGRILYMLNQKRGYKSARNEANADKKDTDYVTAVKGRYTQLKERNQTVGTFFYEELKKAALNNTYFRIKEEVYPREAYIEEFDAIMNVQKEKHLFLKEDVIQKLRNEIIYFQRKLKSQKGLVGICDLEGFEKTVVDKEKKKKNVFVGPRVSPKTSPLFQLCRIWEVVNNISLKVKSPEGSKYKWEEFVPTLEEKQQIADYLFTHEHCSFAELLKILGLDKNNVFANKQIVKGIKGNEVYDSIYKIIGQNELLKFNVSSIPSGNTSILVDKKTGEILDEKEGLEIDKVLEREPLYQLWHTIYSIKELTECKNALVKRFKFDEIIAEKLSRLDFNKQSFGNKSNKAMRKILPYLMQGYDYSKSCMLAGYNHSNSLTKEEKEQQIIHEKLELLEKNSLKQPIVEKIINQMVHVVNAILVKYGKPHEIRVELARELKQSKEERNNTDLLNNKNKKLNEEISKRLSELGLPTTKRYIQKYKFIFPSLNKSLKDAQVCNQCIYCGEAFNLTEALRGDAYDVDHIVPKSLLFDDSQTNKVLVHRKCNSTKTNQTAFDYIAAKGTQELLLYIERVDDWFKRGIISYSKMQRLKVSYNEYAERKKNKKETEADKKIWENFIERQLRDTQYIARKAKEILQKVCHNVTSTEGSVTAKLRELWGWDDVLMNLQLPKYRELGQTVVKEWTSEHGNRRHQKEEIINWSKRDDHRHHAIDALVIACTKQGFIQRINTLNSSDTKDEMNRAIEHAKQTFKEKGTLLEKYLIAQQPFTTKEVMKEAEKILVSFKPGKKVATISKYKATGKNTKTGVIVPRGALHEQSVYGKIKVIEKEKPLKYLFENKDKIVNIRLKQLVEKRISDYDGNVRLALSSLKKNPIYLDEQKTEVLERASCYNDATVMKYKLEMLKPNQVKDIVDKKIKQIVEARLKEYNNKEKEAFKEVLWFNEEKQIPIKTVRLFARPDADNLLAIKKDGNGKEIGFVLSGNNHHIAVYEDQGKKLIQHICTFWHAVERKKYKIPYIINETAAVWNELLGKEYPESFLSKLPADNLNLKLSLQQNEMFVLGLSDEVFADALRNNDNSLLAKHLYLVWSISNNDYWFRHHLETKNTELKNIETAKEAKRYFRFKSIGAMIKENPIKIRLNHLGEIIRIIE

SEQ ID NO: 5261 - protein, 1352 aa, unidentified
  REGION 1..1352: note = Description of Unknown: Cas Enzyme sequence
MVNKPYYIGLTVGPEYAAYAVTNESYNLEKFKGQDMWGIYKFKEAETSADRTVFRSSRKNIKKEKKRIGLLKAYFYDEIMKVDENFFIRQDNSTFYPEDKEKVLNGSRNILFDDENYKDADYYNQFPTIYHLRSFLANSKEKADIRLVYLAVSNIMKHRGNFYTKNLEDTSNSVKDIYLNICQLASQSDIHLDEKADIDKLMEILLNPAINNKTKAILAAQTVKALTKQETALIKLMCGLKIKLVDMLPELADSLEESDKKASISFSDNNYLDNVDSIEKLAGEDNFALVSAVKELYDAVIIQNIIQGHKFISDAKMASYEKHMNDLKLLKSVLRNNVTSKEFNKFFRSEEPGTYAAYVKSNNSDGKRTRRGSDKGRTQDDLYSSIKKLLSKADENDSDAEYILDEISKGTFLPKQRITDNKLIPNQLYATELKAILDNAAQYYDFFNEKDESGLTVSERILSIFTFTMPYFVGPTSEYNTRGWVVRKEAGAVMPWNLEEKVDIKESAKNFIENMVGKCTYLSGERVLPKASLLYEKYAVLNEVNNIRVDGEKLPVEVKQEIVNGKLMAGKKLTKKQIHSFLVKKGLADMDSLITGIDEKLNNTMLSHKFFTEVFGTLNKDTEVIAEDIIFWSTIYGTSKIYIKEQIENKYPGKLNAEQMKKVLNFKPNDWGRLSAQFLNMKGTNKETEERISVIDLMWNENINLMELINDERYDFMAVIKEKSKKEVKSIFTFEYDDLNELYATAAQKKSIWAAVKIVREIIKIKGYAPESIFLDTKKMRPKDKKDNRKSRLIDLYRSLKDVSKEWKETMINRIDECDKDGSLKSKKIYLYFLQMGKDIYTWEDINFNVVKTTGDNIYNIDHIYPKHFVKDESLDNIVLTNLEFNREEKKDIYPVPDRIYKAMHENWLILRKNGFMSAEKLARLSDRHPMSDEKRASFIGKSYIQATSSTKMLAEVFNSIFNKDTKIIYAKTQEVADFRKQYGFAKVTIYNDHYLAKDAYLNIVVGNVWYTKFTLSPIWFIEKEYRTGKSEYNLNRMYDFDVVRNDRVAWIAERNKKDIPGTIAVVNKVMARNTPLTVTKTTEGHGGLTNATISKASKAKPGIYLPLKSDERYKDVTKYGGKTSIKTAYAFLVEHTDKKKGRIRTIYTIPLYLALNIKNRVDIEKYCVEELKLIEPNVRMNKIMINSELEIDGYSYLLGGKSVSQFHVANNVPMIFNQEWQTYISKIEKYINAKVVDRAVTVEKNLELYNEILSKHKTDIFLKKKLPVYNMLLTDREKFEKLVLEEQMQILCQILMLTRMGTNLANLSLLGEGSSIGTMNISCNISNYKSAVLVERSITGLYKKRIDLLEV

SEQ ID NO: 5262 - protein, 1484 aa, unidentified
  REGION 1..1484: note = Description of Unknown: Cas Enzyme sequence
MRIILGLDLGPNSIGWAKVSVDDEDSFIKDIRLGSRIIPMSQDVMSSFDAGVTESQTKARTGYRGARRLRERALLRRERMHRVLHVLGFLPEHYDQAIGWDRTEATTYGKFLNHGEPKLAWARDAEGKMRFLFNDSFEEMLHDFKMNQPELVANGKKIPMDWTLYYLRKKALTAAISKEELAWILLNFNQKRGYYQLRGEEEEENPTQVKEYHELKVVRVEATEERRGSDRWYNVVLENGWIYRRSSKISLDDWVGKTKAFIVTTEYEKDGKTLKKDKDGQVKRSFRVPDENDWTLRKKRTEHLLEDSGKTVGAFIYDHLLKEPSDKIRGKYVRTIERNYYKDELRAILQKQEEYHSELRDPEWLEACVRELYPNNQPHRDSLLKKDMVYLLLEDLLFYQRPLKSKKSLIADCPYEHYEYVDKNTGEIKYRPVKCIAKSNPYFQEFRLWQFIQNLRLFDREDDHEVTGDYLKTPDDYARLFDYLNDRKEIGQDMLLKDYFKLKKVKTSGENQFPVRWNYVDDNEKKYPCNETRHVLLSALDKAGMEKTWLDSAREYRLWHLLYSVEHKDETRTALRKLVDDDRFVEAFLKVKPFAKDYGAYSEKAIKKLLAVMRMGYLWREDEVRNRLRPQMEKIARGELDEKVMEKITGSGFSLNKIEDYQGLPVWMACYVVYGRHSEATDIQHWQKPEDLLSYIKAFKQHSLRNPIVEACVLETLRTVYDIWKEAGHIDEIHVELGREMKSPANERARRTRQILQNENTNLRIKRLLMELKNDSQIPDVRPYSPMQQEILRIYEEGALQTLSKEDENYAEIIKISQMAQPTTSELTRYKLWLEQKYCSPYTGRTISLSKLFTSAYQIEHVIPQSRYFDDSFSNKVICEAEVNALKSNLLGHEFIKQHGSEIVHCTTLGDRKILSEEEYLEFVKEHYQGNRAKKEKLLMEEIPQDFLNRQLNDSRYISKMVKTLLSNIVRQQDEAEATSKMVIACTGGITDKLKKDWGLNDVWNTIVSSRFQRMNALTESDQFGHWENKDGKQVFQTTMPLELQRGFNKKRIDHRHHAMDALVIACASRNIINYLNNESANDIRKRDDLRRKLCDKNRVIRKPWDTFTQDAYEALSQVVVSFKNYVRVINKATNYYEKYDDQGRKVRVPQKGNDLWAVRKPMHKETVFGHVNLKRKAVMMLSKAIDHYSTICYKPLRQAIAAMSKAGLAKKEIVSHFKKLEYKWNDTDVSKVEVWVFSDDREPMVATRKPLNEDFDEKKISSISDTGIQKILLNYLKAKGGDPQVAFTPEGIADMNQHIRLYNDGKFHQPIVKVRIVETLGNKFAVGHVGHKSEKFVEAQSGTNLYFAIYQAADGQRSYATIPLNIVVERLKQGLGPVPEKNDKDEPLKFYLSPNDLVYVPTEEEEQDHVITLHQDHIYKMVSSTGSQCMFVYHRVANSIVNKVEFSALNKMERSIDNRKVMIKAVCWKIEVDRLGNIINVIK

SEQ ID NO: 5263 - protein, 1075 aa, unidentified
  REGION 1..1075: note = Description of Unknown: Cas Enzyme sequence
VERKKVISIKDADDKGSLLKDSGRRSIKELDARILQFIFDRVKAEDELRLNEIYSHAKKYRQLKSTEEEKQIAKDNLEKEKQIAKAKLEQAIKESDLPGELKTPRNYENDLFEKSSFLHLICKYYKQRQRARDGRIYIHPQYRFIKGRGYENTGRFYDKNHLLSYCNHKPRQKRYQTLWDLAGVLQVSPDDFKHKALEQTPDGQLDKPMDEKLVNWLLNCTKGLKANCEGASKEQKDRRGRLKQDIQNVFGIIYHRKKSDKPNDREVKKILENSKIEDALKLYRFCERAKGLCLDVTESLYDESRQDKWKEELEKNPATAVYLLAQINNIAFKERNGNAKTCPVCSADNARRMQMISTKDGKDTIAKAQKLPAIPTRVIDGAVMRMARIVGKAIANDKWGKIEGDLEKGNEVCIPIITESNRFEFEPSKEELVKGQRTGARRGKVAERDGEHKIFESKEERIKQNSMGICPYKRPHQRHTPLGNEDGEIDHIIPRSSKWGTLNDEANLIYASKECNQNKGQQEYSLNHLRSQYKQSVFETADDEKIEQWIIDKIGDGDGDDFKFGKYRSFINLDSDEQKAFRHALFLTGHPLREKVIAAINNKSRALVNGTQRYFAEVLANALYKKAMHIGKQGLLSFDYYGVEARSNSRGDGIYDLRKLYEAVYPEIDEYDKSKDPTQPAYSHLIDAQLAFVIVADAHRNGGGVRIKIDKDVHKDPFNIKTGAIHNNILRFIQVADTDFATSELIRKKPNEDFSSHRSFTRDTYYADHYLPVLLSRKGDSIVVNIGFDLENSMEIKADTEKKRQYLMKGIVELLPLCNNTQELMDREYTDLKDLFCAMEKIACFAKQFQEKNYCYWTINKLLLHEYWRKTYNTKTGKQFETNTFIYKNLHYRTEKKTIANPKDLKDNLEESKNFSIKVKDGNVTLPSKKQWERCLEEWETQERKGVSFDTFLHSYFKPHIKNPHQKTRKIFSLPILTGQGKMMLRRKAWTGDYIYQIVNDSDSRSPDNKPNIPIRKKDGTRSVKLAKWAQSENIVKLSEGTYEPGEPIDPTKWYLVDKELKLPEEIEQLWYRID

SEQ ID NO: 5264 - protein, 177 aa, unidentified
  REGION 1..177: note = Description of Unknown: Cas Enzyme sequence
LNIESLSNLIGHISNLELKPLRKYFNDPEHKISRTNKQGDRWKKDRITELFERWILHEWRVNPQKDKQKAPGADYDYKTLRTNWKEKNDGLIGFWLQTDPGWTIPPYQDNNNRRPPKCQSLIFNVHFLDDKYPTWEDWLAELKKLQFVKTYLGDYEEELRKLKSGKEKSYFNKRCRR

SEQ ID NO: 5265 - protein, 1083 aa, unidentified
  REGION 1..1083: note = Description of Unknown: Cas Enzyme sequence
MDKPNKGEILMKYTLGLDIGIASVGWCVINEDTHRIEDLGVRTFDKAENPKTGSSLAEPRRLARGLRRRLHRKLQRMLDVRYLLTSSKIISQDELDNLVLTKNEITPYQLRSEGLDRVLKYDEWARVLIHLANHRGFKSNSKRELKKKNDESGKMNSSIEANAALMIEKGYRTAGEMLYKDEKFIEHKRNKAGSYSMTLSRGLLEEEIKTLFECQNKYGNTGANPEIENKYLEIFNRQKHYASGNQIFNKIGNCTFEPEEKRAPKRSYTTERFNLLQNINKTTYYFEGNRLFFTPEQREILINMAYSNSTGIKYSQIRKKLELPEEASFAFINYSSRGKKDKDPENQMFIELKGFHNIKKAIVSTHGEGVWKDYLAHPDKLDIIAEGLTFYKEDNDVISYLSQAGITDGIAESILDITEISGIQHLSHKAMKKMMPFLEEGKLYNEAAELAGYNHTQPNINGEKDILLPLIPAEDIRNPVVIRSLTQTRKVLNAIIRKYGSPYMINIELAREMGKSFDERNKIEKRQTENKNEKDRLKEEIRTEYGVDPRGADLLKYRLWKEQGGFCAYSQAYLDPKKLFEPGYAEIDHIIPWSRSFDDSFNNKVLVTGEQNRIKGNQIPFEYFGNNAEDDNWLNYVGWVNANIRNHKKVYKLLKTSCDAADSRELKERSLNDTRYISSYITQFIRQNLAFAEGKEKNRVRTVNGQVTAVLRGRWGLVKNREEGDLHHALDAAVVASVTPAMIQKMTLYSKWGELYRVKEKKNYVDPETGKPIENVEFGFSDKDHFPMPWEKFRYELIARLSPNPSEGIIKLKLDTYPEDDIEKIKAVFVSRAPSRKISGPAHEDTIRSIKPLKDGEKYTLVKTDLKKVNLASLENMYGKDRDKKLYNELKTQLELSGDNPKKAFAEYIRKPTNNGKNGPIVRSIKLMVSGISGVQVNKGLAHNGSMIRVDVFMKDSKYYIVPLYVSDLVNKILPNKAIKSFTDEERWPEMDEKYRFMFSLYPNDLVYIETNKESYWGYYIKTGRASGQIVIENHDKSQNPFVLSISSCRTIKKFNIDPLGKINNVKKEVRCGMEKPVYKQTS

SEQ ID NO: 5266 - protein, 1111 aa, unidentified
  REGION 1..1111: note = Description of Unknown: Cas Enzyme sequence
MTKKILSLDLGITSIGYSILEELENNRYSLIDYGVSMFDKATDKDGKSKKLLHSASSSASKLVNLRKKRKKNLAKLFEEFGFGEKNYFLYQEKQNFYKNKWELRAKKAFEEKLNIEELFSILYAIAKYRGYKSLDTSDLLEELCVELDISFEEEKAKKDDEKGKIKLALKTIENLKLKYPNKTVATIIYEEEMKKKTPTFRNHDNYRYMIRREDINDEIKKIIFSQVKFGLFEKDFKVNEFTSQVIKTIDDQKESSNNEDLFARCKFYKEHKVSHQYSLLADIFKMYQAVSNITFNKEKTKITKEQIKLIHDDFFAKIKKGKNITDIKYKDIRKILKLDDNVKIFNKEDGTLSIVKFHFLSHLSKFGDVFNAILEKPNRYEILKEIFDVLGFEKSPKTIYEKLKDKVDDKTIIELIKHKTGSSLRTSSYAMVKFIPFFEQGYTLSDIKKELNISEEENYTHFKKGIKYLSLSQFEKDDNLSINNHPVKYVVSAVLRLVKHLHVKHGVFDEIRVESTRELSLSEEAKKEIEKANKALEKQIDDIVSNKEYQAIAEYYGKNLRKYARKILMYEEQNRRDIYTGEGIEFKDIFTSKVDIDHIIPQSLGGLSVKHNLVLVHRDSNLKKSNQLPMNFINDKEDFKNRVEDLFKERKINWKKKINLLATTLEETFKDTFESKELRATSYIEALSAQVLKRYYPFPNQTKNSMEIRHIQGRATSNIRKLLHVKTKTRDTNIHHAIDAILIGLTNKSWLQKLSSTFRENLGKIDDEARANIKKAMPLIEGIEPKELVEMIEERYNEFGEESIFYKDIFGNTKTVNFWVSKKPMVSKVHKDTIYSKKPNDIYTVRENITAKFIALKITPVTKAEVFVESFKKEILTKMYLYKTNPNDVICKIVQKRADEIVKLLNEFVWLDAKDKEAMSEAKIKLDDLVHSPLIDNNGNEIRKVKFYQTNLTGFEIRGGLATKEKTFIGFKSVLENDTLQYERIDVSNTIVVNGIYKLKENDDSFKVYKNDLVFFIYPDGGVKGGKIVSFLEDKKMAAFSNPRFPASISNQPHIFLTIFNGKANSHKQHSVGKATGIIKLNLDILGNIKSYITIGDVQSELLEFIKNIKS

SEQ ID NO: 5267 - protein, 1049 aa, unidentified
  REGION 1..1049: note = Description of Unknown: Cas Enzyme sequence
MTYNLGIDIGIASVGFAGVNADLKQILFCGAHIFEAAENPKTGASLAEPRREKRGMRRVIGRRSQRKKQIRALLARHGLQDLALIDQSRHSPTLLSPWDLRKEALERKLTDAEFARVLFHIAKRRGFQSNRKGAEANDTDGKKALSGAKDLQDAMMRASTQTIGAYLATLPKKRNGDGSYERFVTRDLLREEVKIIFTAQNKFGNNKAASTLLHDYAGNGKAQDRNTLEGDGIAFYQRPLQSSEHLVGECTFEPSEKRAPKFSYTAELFVLWTKINNARIRSVNGDERLLTSEEKNLLCELAHKNKGGVTYKQARKVLSLSSDERFNISYRKIKDSDNSWEAIRDTSEASYFLKLTGYHALKAALDTGSTADWQSWIGSRKNNLDDIARILSFHEDKKQVDEMLSKHALSEAQKENLCAIKGFSKSIDLSLKAVRKILPLMQTGMRYDEACKEKYEDHHGKKGNKGLNLIPPFEDIRNPVVNRALAQTRKVINACIRKYGMPETIIIEIAREVGKNFKDRKDIERAQKKNEAYRNEARQHIAEILGIIEDNVRGEDILRYRLWKEQDGLCPYSGVYMTPEILRDSVATQIDHIIPYRRSWNNSYMNKVLCFTDENQNKGNETPVEYFNRTGRKLASLETFARQLPPKKADNLLLENFDEEKAGMWKSRALNDTRYIAKLLISHLRDNLDLGKGNHIQTRNGSLTFQLRGAWGFPDKNRRNDRHHALDAIVIACSTQSMVQRLSSWDKYEARKKKPSERPLPPKPWDSFRDDALIAVNAIFVSRMPVHKITGAAHQDTIRSKRSDGKVIQRIKLKSLSLATLENMVDKARNFKLYNVLKERLDAHNGKADKAFAKPVYMPVNDPSKTAPRISSVRIVTNEKSGIEINEGLASNGDMVRVDVFQKDGKYYLVPIYVHHFVKNELPNKAIIGGKNEKDWLEMDDTDFVFSLSKNDLVQIQRKKGIELGYYVGTDRATGAISIRAHDNDPEFGKEGLMRSIGVKTLLSFEKYSVNYFGEKHKVGKEKRLGVAQCNGTKPSKAQPQTGTATSGK

SEQ ID NO: 5268 - protein, 1158 aa, unidentified
  REGION 1..1158: note = Description of Unknown: Cas Enzyme sequence
EIKIKRDKKTGEEKSVEFTPHKKTDWKIQLEQLENEFKSKGNPHIAELFYEKLKENPWYRIRNHVILRERYKREFDAIWDNQANYYKFLNYTDKNVLKEIAEYLFPGKSDSQKKYREIILKEGLKYLIKEMIIYYQRPLKPQFTLISNCRFEKDLKVLPQSHPLYQEFRIWQQINNLSINTVTEVNGKKYYYDRPLTPEQKEHLYEILMTQKELNYSSVKKKLKLNDKTDFLNGMHIKSKLKGNETLIEIRNKIGEDLFNKLELNNFEKLTHFWRILYNWIKDDYEIINNKDYELHPEKYNTYNPNSDNEYDINSERIKKIKEFLENSLSSEDLNLINEELLTKIGKIRFKRKYGSLSAKAINNILPLLKSGKYYNYNIFPESLKLKIEKIKNAEEDDSIDNVIREYYDKYPSCFDSGGLMAPYSMILYYGRHTAETYEGINDYHNIKTYEQRKIEDPENAYKYTLRNPIAEQILNETLQLVKSIWKQYNTKPDEIRIELVRELKNNAEERKKIYENVKKNERKNNEVKQKLSELGIPQTLINIEKYRLYEEQNKISPYTLKTIEVSRLFSEDYQVDHIIPRSRFFDDSLNNKVVCEYSINNLKGNRTAWEFINSGNSPISTEEYIEHINSTFYGKKRKNLLATKIQENFVERQKKDTQYITVKVKEELGKIVGTEKVKTTTGGITNYLSQQWGIKSKLKELTKDRYEIMEKLLGEELVEYIIDDNGKRYLNIKEWSKRVDHRSHAADALVVACTEQSHIQRLNNLNKEFQKWLKENKGKLKIENYESEEDIISEYIKLPENKRQEILETMPSFRNFPLPWKNFPEQAEEKIKSIIVSHKPKPQLLIQKHPKTGEEYLRIRGALHEETLYGKEKTYRIPITKLANKNNIKKSIEQCIVSESIREILLKHIEKFKGNLKEAFTYEGIEELNKGRKNKINSVRVYYKKKNKSEGSLIPLYNDSNKITYIKTGGNFCFAIAENNGLRKYGIISLFDAVKLVSKFFRKGEKNINQIIYDYFENKYKKTKNCKLLFTLTQNDLVYLPDINDKNIPLNKNDKNYYNYWKNIDIKRIFRVVKFSGDLCYFAPHFTSNELKFKSKENKPYKEFSSYKGCCPFIYQETDNKFHQNNSMGSKSNKIKIQEFCYKIRIDRLGNIEPDLL

SEQ ID NO: 5269 - protein, 1061 aa, unidentified
  REGION 1..1061: note = Description of Unknown: Cas Enzyme sequence
MSAECQVRANEKNYVLGIDLGVLSLGWAAVEYAGDKPGGILKTGVRIWEYSDASTLTVQRGQEKPPGQERRQARQQRRQIFRRAQRLRRTCSALQAMGLLDPGRRNSQARKQLWDMVDQQAQEWLKSNIPDLADDPQLDHKFVYHLRAAALDYPLPKILLARVFFHLAQRRGFQSNRRVVGRSEKEGEVKKAISLLEHEISESGCRTLGEYFATLDPYTTRIRGRWTSRKMYQDEFERIWSAQTAINPGILDPSQKSRLFKAIFYQRPLKSQKRLVGRCSLEVIIRRGPDGPREVRPRRAPLASLEAQRIRYMQRINDLEFTSPEGQRRIPTQPEREQLYQLAEKVEEISFIQIRKVLGIPTGKKGAGWECNLERGGEKRIPGNKTAARLRKILGDKLWDGFSEARQKELVDTILSYLSPEALQIHLENVWKFDSDTAKQLSNIELEQGYHSFSRRAIRKLLPLMQQGKRLNEAIKAVYGDTGRVRSVHERLPPVWKVMPELRNPLLVRALTELRKVINNLIRKFGRPQYIRIELARELKLGKKRRQELAKEMRKQEAERERAAKVIEETFHRKARPNEILKYLLAQECGWECPYTGEKISVQTLLGDQPQFDVEHIWPFDRTLDDSFRNKTLCYHEENRRVKGNKTPFEAYSNLPDRWREILECVKRFKGPFAKEKLRRFLAEDIPQDFPMRHLNDTRWITTAAADYLGYLYGGRIDSEGRQRVFTVTGPLTALIRRGWNLDGILGGPDKNRFDYRQHAIDAIVIALINQAIVQQIAVSSSRLWGTHRPTAVQLSEPWLSFYQDAKEAILNIVVSHRISRRLSGALHEQTNYAPSDNNGRTKVRKPLAALSAKEVEHIVDDTIRKHVQHALANAEKKSPKEVFGNPENLPVLKGKNNHVAVVKSVRIWVSAKPLPVGKGDRVRYVKPGNNHHIEIYAILDEQGNPVTYDGRCVTLLEAVQRKRRGEPVVCRNHGPKTRFLFSLSKNECIEWTNEKDEKELLRVVGIADNDIEFRLLHDGRPSTLVKEAKDRIRGGYSKLFERRARKVLVTPLGEVLPAND

SEQ ID NO: 5270 - protein, 1059 aa, unidentified
  REGION 1..1059: note = Description of Unknown: Cas Enzyme sequence
DNLEGDGMKRILAVDLGISSFGYAILEESGANRYRCIDNSVVMRDTPYDNDGNSKQSLRRSHSSMRSLNEKRKRRVRELARIFDSYGLLSYEECRRVRRENKIIDKWKLRAEDALSRPLSMEELYAILVHMAKHRGYKSIATDDLLYELELELGLTQEEPETLKDDEKRKVYTALKRLERLKERYEGETIAQIIHKAVLEGELRSYRNHDDYEKMIRREDIEEEIETIVKKQCEFGALPLDSGRCMEFIEALHATITSQTMPENDLELIGKCSYYPQEKAAPRYSYLYDIYRLYKTLADLNISNYEITAQDREKIIEFVTQKASKGKNIGQLLYKDIRKLLGLGDEQKIYGKDDRLKIGGKSVERTLVKFFFLKNISKFPSLMRKIISHTESLDIFGEIAETIRAHKTPRPAMDALKDILKRYEIEYDDMELIELIKGKSAGTLHISHRFIKDALPHFAEGKNEKEIKEILGVHICENYGDFPKSLKYLHLGKDNKFESENSQIPINNHAVKSLASWSLRLIADLSWRYGVFDEIIIESARDVLPKSIQDAIDKSMKKREKELDAIIGKYKNEFQSIDRKMARKIKLLESQNFMDLYSGGTIAISDLLEGRADIEHIVPRSLGGLSADYNLVIAHKDSNMQKSNRLPMDWLGGDKQYLNRVEMLFAEHKIDWKKRKNLLATSLDEIYSEVAHSKTLRATSYLESLVSEIIKMYYPFADEKSRIDGKAVRNVPGKTTSKTRSWLGIKSKSRKSNFHHAEDAMILATISRGWQQRLHTMLKENYGKSEDELKDIWKKFTPHIEGISLAEYIDEAYERFMSKGLESIWYRDMFGGIRSVSFRIDKKPLSGASHKETIYSSRHRDPENPDKILPTVRKSILDAFGALNILNNRHKWDREKFIKKYDKEIRQKLWLYRMGNLNDPVFRAIEKRAGEIGDLMESYIYKEPSHDKEIDERYQEELRELLQKPIVASGKAVYKVPFVDDSFSHIEINRGRGNRVIVRTDKNFLAVMFERGKKDRLEISKIDLNSMHRLRHSDAMIVYLNEIIYLFNKKKIMHYGALR

SEQ ID NO: 5271 - protein, 1093 aa, unidentified
  REGION 1..1093: note = Description of Unknown: Cas Enzyme sequence
MQYRLGLDVGTSSVGLVALELDEKGRAVKPVWHSVRIFDEPLLPAKQGGVGQLKKADRRLVRQQRRLHQRRARRLKHIAHLARCMDLDPETIDADKGQRIHELRAEAATFRINLDDLLRVLLKMGKRRGYSGGFRVKKDGDKGQVETGINDLKDEMQQHDCETLGEYLRYRIENGKHLRLKEDGRSADRQMVEDELNRIWETQEKYHPVLKEDYEGKPLRKHFHKIIIQQRLLKSPAAMVGNCSLESMLPRAPMAQPIMQAFRIEKQIADLRWGTDRHAPSLCPAQRAVIQEQLRSKGEVKFTTLYKALDKAGCPDPDGRELNLTRGDRESLTGDKTAAAMKSLKLLEQWQELEEGHRISVINLLADMGSPDVFDSPRWAENLEGAKKKKRQIKPEVKAFIDTMVETGKFDRLTKMKFDGGRSNYSIKALKKLVPVMEKDGVDEHEAISRAYPDSNPTVPTELEPELPPHKPTGNAVVDVALGQVGREVNAAIATLGGTPSEIVIELSRDMRTGLTKRDEITKKIRKNEKRRRDAADMIRKYTKKEATESQIKRYLLWQEQGEQYCPYCEVPINCSDAINGGVTEYEHILPKSLTRIGKKRDFLVLAHKTCNQEKGDMTPWQRWQDTERWDIIEHRAEEFERGYKVTIDKKECTFKHKGKARQLLVKDFENEALDEEIIKDFSDRQFQETAWIAKACGRWLRSICPNVSVSRGLLIAHLRRIWKLDTVIPAVRYEEALPVFDDDYQPNKKEANQTECKISEQDFKKHRPYWEGHSDNPEARTHRRLNKRIDHRHHLVDALVIALTTRGLYQRMARHYQQVTESGGRELRLRAEPELADVRERALELIRACRPSHRPDRWLAGRMFKDNPYGIVEEDGSRFYVQRTAVADLATSRSGDAPIGAVRKRIEDILPESVREIVSREFEARIDKGKTPKQALAEPIWHPLYKTCIRHIRLRYTKAGDAVRVQHGNRRTGLYKHLEPEGYAYLEFDRSDPDSNPRPVPLHEAKKSDKQRRSQSGVVRLYKKDTVRDSRDDKRYVVQQIKAEGPTLILSPITESVANVGNVQKPRARKVGGAQIKRLVPIEDERPSDSAG

SEQ ID NO: 5272 - protein, 1085 aa, unidentified
  REGION 1..1085: note = Description of Unknown: Cas Enzyme sequence
MATANDMHYRLGLDVGTNSIGWAAVELNDDSEPCGVLRMGVRYFPDGRDPTDNSSNAVKRRVPRGQRRRRDRYLKRRDDLMRALIQFGLMPQDGDERESLEQLDPYAIRARALDDRLEPHELGRAIFHLDQRRGFKSNRKAAGSEDESEAKKTRAQISALRASIEKSGARTLGEFLARRHEKGKSIRAREGEDLYPDRAMYEREFDEIRKAQTPYHDLDDTQWDCLRQIILFQRPLKPVDPGWCQLEPGEPRAAKALPIAQEFRMLQEVNNLKILVGADPERPLDAAERKRAIKRLWSGKDINLQKPTGDLGLPSGSKFNLSRGGRKTIKGDETAVRLMKEKGKTGQKLFGDRWFALPLDARNDIVRFLLETEDPDDVARKAKDEWELDDAQAEAVANVALPSGYLSLSEKAIAKILPHMENGRFYSDAVTDAGYSHHSDFRNEESHEQLPYYGEALERDVVGADRSKDPKKDGEPARYGRIGNPTVHIGLNQIRRVVNQLIGAYGKPEDIVVELARDLKTNRIQKREYERQRREGSERNKYFLEMLESAEKIPVTPHTLLKLRLWEEQGLPQARKCPYTGKVLSFEMVTSEQTEIDHILPFSKTLDDSRANKVVCAANANRDKGDRAPYEAFGHNPRGYDYDEILTRAAELPPNKRWRFQEDAMERFEENSEFLDRQLNETRYLSRTARTYLSHLYDEKSEGRQRVRVIPGHMTALLRRAWGLEGMLRVDDTGEITGKQRDDHRHHAIDAFVVANTTQGLLQRFAQAAGSSYDTEEKLSAVAGGVTPWDGFHRNQLKPFLDDIVISYKPDHGTRGVKGKTTGQLHNETAYGLLEPLGDGDDGRYKVAVRKELSKFKKRSDLDTVRDPTMRNALQELWDEVGGKPAEFAEQAWDTGAPMPNGARHKVRRVRVVEEQRVIPIADKKTGKLYKGYLPGGNEFADIWRLRDGTWQMAVVPTFDANQPGFDIERFRPKDKKTGKPDPVAKRLMRLQIDDMGALGMGTERHIVRVRKITDAKTGPLVVLDDHNESNVDARITKARELRKKGLDHEDIREQKYSARQLKQQGFRKVGVDEIGRVQDPGPRS

SEQ ID NO: 5273 - protein, 1212 aa, unidentified
  REGION 1..1212: note = Description of Unknown: Cas Enzyme sequence
MKPFARIPGPSDDFEDEAQRRAIDVAVDKRRRATRRANLGTFTGYRIGLDIGNGNIGWCILFEDGRCLRFLTAEDIADHNRALPKAATRTQIPGLADFVPVGVHKFDARMPETQKSLSKVRAEARASRRLLDARQRRRLHVRRALQDAGLLPKEGEDEAGHVRVKSDVLRAKLLKPDFQVHPHDLGRALMNTLKRRGYMKPIGRAGADEGSGFAAKAEERYRDALKRFECETIGAFLERCAQDAKRDKVPFRKRHRSLEWQRKNRRRLSQYGDETPSYEVFQSLSPTFSLIREECRLLRERSGVSIEDDAWARIEVAAEFRRPLKSKTPGRCCYFPARYRCVAALPSFQRFRILENVSNLRDESGQPLDSASFEKARGLLETSEKISLTGLSQELGKRLRLDRGDAAGARHLVGARTDVVLGNAFGEAWLGLSVEHRDDWTMRFLRRHWPPTDGSGIREWTAGDEEALERDAGRAFGPGALERTDDPEIWNAFEDRFTAMSVEAARLLADCYARYARRLSHEEQQEVLREDGAPKPELPLYEGLPYYGEVMPDVTVPAEGFAPEERTVAEERQYGRAANPDVHVVMNRLRKVVNAIIDMMGGILPTTCVVEMARSTFSEVQADSYRKTAKARQDLRERIVAEITNVRGANRVPKGPALDRLVDRWKAAIRQGWRDYDGCEISRGALVDGTEYQLDHVRPAAFGEGRESNLFVSRFNRRKGRRLPWEAFGEDPEFRPALLAFAQFGVTRRIKQMEETMRNPPRQRQRRERLEAALERAIRERDRLAEFGTPRPDVLSALERPPTVSVSDEGNARTRGTPPFLPGDRAALFRRFHPDYASGEGRPAARDIANIGWSTKLARRYLRHLGAESEPIKAWAVHALRCMFGVDKNRSDHRNHAVDAFLVAHFDKHVLKPAFDRIRHERAYEELYETRALEDSLNRISGGVALFNDFKGNLDRLERTLPTIYTAHRANHRWNPGDKPGGSFGAFGKENVFSFKPDIKKRENLTDFFRREGSVADTKSVLTRKEILALYREMDRSNPKARRIAKKLDGTIEVSHRKDERRKIESGKMPTASSLSRQEGAFINIDSKFSIVGADKPDQRRVVSIADFSRMNADERAAVFATGQPVFRSGDTVVEEGKEGSVFLVTGLIRDGRLIAYPINEVKQTKERITPDRRMIRKFSSDVLGRRLHKLGKSPRGLKQVPYPLRDRQSRR

SEQ ID NO: 5274 - protein, 1171 aa, unidentified
  REGION 1..1171: note = Description of Unknown: Cas Enzyme sequence
MFTGYRIGLDIGNGNIGWCILFEDGTRLHFLTAEDIAARNRALPESGRRTQLPDLARFVPAGVHKFDARETDQRGGQKSYSKIRAEARAGRRLLDARQQRRLHVDRALRNAGLLPKEGEGEGHVGIEPDVLRVKLLDPSFPAHPHDLGRALKNALKRRGYLKPVGRTGPDEGSGFAKGAEAAYRQTLEKYDCRTIGEFLERCARDAGRDGVPFRKRHRSLAWQKQNRKRRPNEGDDAPSYEAFQFLSPTHTLIREECRLLKESSGIAVADDAWAEIEAAAEFRRPLKGRIPGRCRHFPDEHRCVAALPGFQRFRILERIRNLRHRDGTSLDGTTFDKARKLLEAREKITLAGLERELGAKLKLDRDDATGSRQFIGARTDIALGDARVFGEAWRRLPIDQRDDWTMRFLRRHRPSAEGEVSPWSEHDEEALERDAEAVFGEGALARVDDGEVAKHFEDRFSSLSVKAARLLGDCHEQGLGHEECLARLRAAGAPAPELALYERLPYYGVVMPDETVPAAGFAPEDRTAKEEWEHGRAANPDVHVVMNRLRVVVNGIIEMMGGILPTRCVIEMARSTFSEAQAAAYGKTARARQELRERIEGEIEKTLVGSRMPVGPALDRLVDRWKAAIRQGWRDYDGSEIQRSALVDGSEYQLDHVEPAAFGDFREDNIFVSRFNQRKGRRLPWEAFGDDPEFQPALTAFSTFGLRKRIEMTRKNLQALPDRAPRDKRERLEKVLERAERDLGRLSGFDAPRPDVLQALERPPVVSETDREEEAGTGRRARPSPFRPGSRAALFRRLHPDYTPREGGPAARDVANIGWSTKLARRYLRHIGAESEPIKAWAVRALRCMFGVNKPREDLRNHAVDAFLVAHFDRFVLKPAFDRLRHEHPYEELYETRALQDALSRIGGGSGSSLYGDLVDNLERLENVLPTIAAAHRADHQWNPGDALGGGLGALGKENIYSFRPTWTEREKLTLLLRKAGVVPDDGAVLTGKEILAWFDTISRDTGKGQRLAKELAGKIKLRYRGLSRSLKLKTALPLSDQKGAFINAEGKFAVVGALAARDRLVLSIADFLGMNSEERANVFAAGQPIYRRGDTVVRDGGAFVVTGLQHDKRLIVYPINEAERKPNRKEWITVSPNITRFASDVLGRRLHQLGKDPRGLQPVPYPLRSE

SEQ ID NO: 5275 - protein, 1096 aa, unidentified
  REGION 1..1096: note = Description of Unknown: Cas Enzyme sequence
MKPFARIPGVSEDFEDETQRRTVDAAASRRRRATRKANLGTFTGYRIGLDIGNGNIGWCILFEDGKRLRFLTAEDIVDHNRELPRAATRTQIPSLSDFVPVGVHKFDARVPKTQESLSKVRADARTSRRTLDARQRRRLHVRRALQDAGLLPKEGAATGQGVKSDVLRAKLLEPEFQAHPHDLGRALMNTLKRRGYMKPIGRAGADEGSGFAKNAEEKYRGALRQFECRTIGEFLERCAQDAKRDKVRFRKRHRPLEWQKRNGKGKPADGNDTRSYEVFQFLSPTFSLIQEECRLLREKSGIPVDDDAWARIEAAAEFRRPLKSRTPGRCRHFPGRYRCVAALPSFQRFRILESVNNLRDGSGQPLDPASSEKAYRFLDTRERVSLTELSRELGKRLKLDRGDAAGSRRLVGSRTDIALRKAFGEAWLDLPIERRDDWTMRFLRRHWPPTEGSKVPEWTAKDEENLKHDAERAFGPGALERTDHTEIQNAFEDRFTAISVEAARLLSDCYIRRLTHDERLAKLRKAGAPKVDLPLYEVLPYYGEVMPDITVPAEGFAPEERTVAKELQYGRAANPDVHVVMNRLRKVVNAIIGMMGGILPTTCVIEMARSTFSEAQAASHQKTANARRDLRERIIVEIEKVLDPERMPSGPALNRLVDRWKAAIRQGWRDYDGNEIQKSVLVDGTEYQLDHVKPAAFGEGRESNLFVSRFNQQKGRKLPWKAFGDDPDFRSALLAFAQFGVTRQIERMKKSVENLPARSEKRKRIETALERAKEECRRIAEFGSPRPDVLRALERPPNVSTAEEVNTKGRGTPPFRPGDQAALFRRLHPDYTSGAEGPAARDIANIGWSTKLARRYLRHLGAESEPIKAWAVHALRCMFGINKKREDHRNHAVDAFLVAHFDKHILKPAFDQMRHKYAYEELYHTRALEYSLDTIDGGMILFKDFKDNLDRLERVLPTIYTAHRAENLWNPGDKMGGSFGALGKENIFSFKPNYESRKNLTKIINKDRDSVMVKEEILAQYVNIGRRKSEQENVAKKKKLEEKIEVSHRKDTRSKVEKVRISATSPISGQEGAFVDAENKFAVIGADRRDQRRVVS

SEQ ID NO: 5276 - protein, 1092 aa, unidentified
  REGION 1..1092: note = Description of Unknown: Cas Enzyme sequence
CRFESSKKPCVVSHPDFEKYRAWQFINSIKFEGDSSGLHLRSLSQKEAETVFKMMTEKTSLKFDAIKKKLGREYETSNFDKDNKVPTCNTIAQLKKLFPNKMWEENYHEIWHAFHFFDDNDKLFNHLKNKFELIPDDPEKISAITLDDKYSSLSLKAIRNILPFLEKGYILSTAIVLGGVKNVFGNKWDAFKDHHEIIEKEICKLMLRTEKNKAGELIDKIKLFLINGTGIVDFGMHSDDKRLNKLYHPVYEVKQKKETLDKLPEIENLRNPLVQQALNEMRHIVNEIIEKHGKPDTIKVELSRDLRNSKKKREELQHRIRDNEKANEEARKRLIEFGLAQSRDNIRKYRLYKEIEEKSGTVHCPYTDKAISLSALLGDRNLFQIEHIYPRSISLDNSYANITLCESNFNRMKGEKTPWQFYQENPDPALWNASSWEEIVYRAYKYLPYFKAKRFTRKGDLEKEGFVNRQLSDGRYISKKAREVLSAICDDVQVLPGMLTSDLRRLWGLNNVLQPVESIDIGPFDFEENVLKPHWLVKDTKGKNKEIKPIYNQKPAVSAGETTIPGDVKRNWFYSPCLSEKKTAEGYHDGKYWAVLKLGEPLEWVRQRNQKPDQSTETLVLTGEIKNGKFSVRDRFNFTLKDKLPFEDGWYWASLPIEKITFKDVSKKPTTSTHQITYYGGIHDGRFTSYLFQCKTDLPDGNAWVILDLNTEKAEFFPVYNQKPELSEDEVLITGTIGSHRIFTSDVDPDHSMTTDKPAGKYWVRFPIEFMNPELVPQLNRPPVPQKGEKLIEGNIWVDNQGEIRFDPKKNRDDQRHHAIDALAIACTEHSFLQKLSTWYAQTDEMERGRSHSPYEFPVPWDNFFQSVQEKAQGILVSYKKNNPVLTKVIKNVYKNGKKYRSVGFAARGQLHKESVFGKRTAPDGNQRFHIRKPITSLQNNKHVDKIVDKTLRNMIKDYLQQEYHINVRGKYNIPDDAFYKDGQYRLFLPNKNGEPVPVKKVRIGEQIGFAKRLKDPVNQYVNPRNNHHALLYLDKKGIMQENIVTLWEAAERKRKGEPVYQLPEDGNEMITVLEINDMFLIGLPSIWHEND

SEQ ID NO: 5277 - protein, 970 aa, unidentified
  REGION 1..970: note = Description of Unknown: Cas Enzyme sequence
MNGFEKRRYRLGLDLGANSLGWATIWLDEGGPSGLGPAGVRIFPDGRDPQSKSSNAVSRRVARGARRRRDRYLQRRKELTDALIEAGLMPAGEAARKELQKCDPYAIRARGLDERLSLHELGRALFHINQRRGFKSNRKTDRQNEEGGVIAEAADKLDQMMLESGARTLGELLAHRHGERLGVRARNVSSGAKAAYDFYPTRAMLEQEFVKLWELQRKHHPELTAELRAKLQHIIFYQRPLVPPQVGKCALDPAKRPDDREGFRCPWAHPLAQRFRILQEVNNLTAGPVGERKRDLTADERFKALHKLLQTKSLSFDGLRKALKLESDLIFNLESDRRSKLDGDQTAARLRGNKAFGKRWHSFLPERQAEIVERLLEESDEEELVAWLIAETGVAEDCAYVIADVTLPDSHCRLGLRALKKIVPFMEQGQRYHEAASSAGYDHARLPTGEIRENLPYYGEILQDQVLGSGDARDPAERRWGRLPNPTVHIGLNQLRRVVNALIRRFGPPQEIVVELARSFKLSPDQLRKLELEQRENQRKNDDRRGQLEKLGLPVNYGNLLKLRLWEELNPKDPLDRQCPFTGRKIGLASLLSDAVEIEHLLPFSRSWDDSPANKTVCLRQANRAKGRKAPYEAFGSSPSYSGIGYDWQAIKLRAKALPPNKRWRFDPDAMQRFEAGGGFLARQLNETSWLARLSKQYLGAVTDPYKIWVVPGRLTALLRRKWGLDSLLDSGEGGRKNRNDHRHHALDALASGLTDRGLLQRMAREYDEERERIAVEPPWEGFRQDVARVLEAILVSHKPDHGAQGQLHEDTAYGRIAGAKEGEGNLVYRKPLAALRETEVERIRDAPLRDALQEAIGEGKAAGKPLLAILTAFAEEWGKKHGHSPLRHVRLTKTEKPDYLVQIGDGAAPYKAYSAGENLCVEIYQTADGTWRGEAISRYQANQKDHQPRWRAEEPGACLVMRLYKGDCL

SEQ ID NO: 5278 - protein, 1163 aa, unidentified
  REGION 1..1163: note = Description of Unknown: Cas Enzyme sequence
VEPKKYRLGLDVGTNSLGWCVLQLDKGGDPCGIVDAGVRIFSEGRDNKSLATLAATRRAARSARRRRDRFKQRRNFLLQELTDAGLFPEAGPDRKSLEKLNPLKLRADALTRRLELWEVGRALFHLNQRRGFKSNRRDQSEEARSGVVSSSARLLLEQMGLIDPPMPSEEYKNLSPAEKKRARKREARTQTQALDKLKSDKHMSYGAFLHQRQEDCKPTRARPGAAADGKLYDVYPTRELYEDEFNKIWQAQAEHHPGQMTKAARDRLHRAIFFQRPLKPQKRGKCTYMSVEDRTFRAMPSFQRFRIHQEVNSLEWRDSSRSHRVRDYPDARDAIVKLLEEVTAKNGQVLFRKMETLLKRLDLAEGAITFNFEGPKRKGLDGNLTSQFMQHEDRIGQDWHAWPLERQDEFIDVILNGTPQQQKRDRDWREGGRRQAPQDGAADDKEVQEHLIERFSLDPQTAENCLNAPLKDDTASISLKAASLMLERLRNGIANSETGEIELPLQNEAASAVAREVDGFADPHRNRGDDGKYELLPTLPYYGEAFRDGRHIIPGTGDPQDDDKTRWGGVTNPTVHIALNQIRLVVNELIERHGRPHSVAIELGRDLPLGPQKRRELERQQKEGQERNEEHNQKLRELGQAPSPANRLRLFLWEQLDKDPTGRCCPFSGRRIGIADLFSPEVEVEHLIPFSRSLDDSRANKVVCTREANRFKGYRTPHEAFGDSPEGYQWHEIFERSGNLPHSKQWRFKPDAMEIWQMGEDAEFTSRHLNDTRYIGRLTREYLECICHIDRIDVVTGRLTALLRRHWQLPRKNRDDHRHHAVDAIVVGMTNRSLLQRMATAAKRIEGMEGSLAESLGPVFSTRGSSGNAGAPWRGFEDDVRETVAGIAVSHKPKRKTLGGERAAGKDRTDGQLHKHTAYGIVRGPDDSGRCEVVRRKPVADIRNLSHVDSIRDSRLRKQFRAAFESTSESETERDAGAKAIQELAKSKRIRRLRCIERLKVIPIEDDSGKQYKAYKGDSNWGMEIYEYPAGHARAGKWQGQLISRFDANQREFKPGETFRPHPAARLVMRLQINDCVEMCHRRDGQGKNLYRLQKVSSGVLVFAEIHEANVARRDGSRTDPYSYTRISPGNLQSREARKVHISPSGRTSYENRSRRGTGRQTR

SEQ ID NO: 5279 - protein, 1451 aa, unidentified
  REGION 1..1451: note = Description of Unknown: Cas Enzyme sequence
LDDITATEQAKEILESIPDEIIDDSNLKREKNSLIEDIWHFKSSDFDLDDFDNSEENEAEGNRTKEDAIRLHLNHLAFALYQTYNELDSGGRYRSKYFDEVKKVLIKNDHTHKYLARFCKQLHDGKFGELNSDNFANLIGHLSNFELKPLRKYFNDKKHGEGDYWNQKRLEKYFHRWIMQEWRVDKKDKDKGEGKQEDYKKLKKQWREYQKQHPNSVVNFWLKTDPFLTIPPYQKINNRRPPNCQSLILNITFLDKHYPEWKDWLKLLKEVSSTQEYLSDFEDKLKELESGSGKPYFVDKGKNSKKYKNKIRTSDDLEARSFQFILDRAKDGDPFNLNEIYSHAKKYRQPESTAEEQEDAKFKLEKSIKDSELPPSLKTARNYKNESIFLTQSFLHLVCRYYKYRQKARAGRLYIHPVYRNSQEGRGYENTGRYDDKDHLLTYCNQKPRRKSYQILDDMAALLQVSTETLKECIDAKGGSAEKIGDKLFNWLKNIRCLKTKCDESAEAQKEWRGYFKIKIQSCYKSEDGAETDTSLYNLCEEAKELLQDKIFEDLKQKDDFNQWKKNWNDRFSENPAAAVYLLAQMNNIVFKERNGNAKTCPVCSIDNAQRMQMVINAGDNQDNAKASRLPAIATRVIDGAVMRMARIVGDAIARDKWEKIEYELKEGKRIHIPIITESNHFEFEPCLKELKRKSKIKIKKDRNKAKEEDEDVVKMETEKEDRIKSVNICPYTGVSIGDDGELDHIIPRSSKWGTLNDEANLIYASGQGNNIKDNNEYSLADLKTNYKKQVFNGKTNDTEITDWIVSKIDNNKSEHFKFGRYYSFIQLDEDQRTAFRHALFLEKSHPLRQKVINAINNKNRAFVNGTQRYFAEVLANNLYKRAKRIGKEHLLSFDYFGVEAWSDKDDNIYRLRKAYEKLSQREAYSAIYKDFQEYKKTPGRQQKPYSHLIDAQLAFAIVANEHKGEGGLKLKINDNIALEPNETIDKETGESHKNNTIFDVIKITSEQTQALDKPLVNDQKRRKVYDIETDHRRLLRDNKRRQVKISYPTHKASIFSERFFPLIKYQGQIKRGFHPDKAVSYSEKKFKALKDRGFLQACESINRNYEVWIINKIEAQKFLMEVGFNGANKEDKKVCKLLDELSYQTIKRTIGYVFKKGQETKEPETVGDALQLWDDEKILSDCSKSGLVLPIHDEWSKLKRLLKGADKDQRLQEFLEADDKDQLKNKCTVFKTKTRHPHQKVRKKYSLPIIAKEGNIRLRRKAWDGRDIFQIVQAKGASWYTNKGKDPLHTLLSRNSVPKKYYLGIPDELKIVERHWIDITEGVNKKNGRNCLIVKAEIIYGDADRTEVRILVNETGDLSLPPCEDQWAGKIILGNYPKDDNNDKNYYCLETEWRWFEEPFVLPFEKDKNKDVKKSRNVTIEKKYTGFSIKFTVGRKLNALLKSYHHENSE

SEQ ID NO: 5280 - protein, 1034 aa, unidentified
  REGION 1..1034: note = Description of Unknown: Cas Enzyme sequence
MSLVFGLDIGTTSIGFAVIEHDVKQATGRIRRLGVRIFPEARDPKGVPLNQDRRQARLRRRQLRRRRERRRQLADILFRADLLPARGSPAWDEAMKSDPYELRRRAFDGETLDLHEIGRAIYHLAQRRHFKGRDLAEPAGDDADDKKTESAREKTVQELKHEDKTLGAWLAERGPHERKRGEHATREIVEDEFDKVWLPLIPDPFQSSVRDTIFFQRPVFWRLKTLGECRFVPGAPLCPRGSWLSQQRRMLEKLNNLSLAGGNQRRLDGDERQAILAKLQVQKSMTWPGVRRALAPLYRARGEAGEEKGLKFNLQEGGENKLLGNDIEAKLKSIFGTGWQDQPRKQEIRDSLPRQIWQADYEEVGGQRVTILAAPERKARRAAVARRFADEFSLSDAHAAAIESMKLPPGWEPYSIEALQAMLPHLEAGVRFGEIVNGPDWEPWRTETFPDREQPTGEVLDRLPSSADPDERKRVAGLRNPTVARTRNELRKVVNNLIDMFGKPDLIRVEVARDVGNSKRQREDKALGIRRNERRRKAAREKLRENGILEPSRADVEKWMLWEECGHRCPYTGDSICFDDLFGTGKFEVEHIWPRSLSLDDSFRNKTLCRRDVNADKGNRIPHEFFRNDPDEWAAVANRLHEMKAPRGGIGMSFGKIRRFLAESIPDDFATRQLNDTGYAAREAVSYLKMLWPDAGPEAPVKVQAVSGRVTAHLRRLWGLNNILADDGEKTRADHRHHAVDALTVACCHPGVTQRLSQYWQDDDNPGASKPQLPPPWAAIRIDAEQAIADIVVSHRVRKKLSGPLHKETVYGDTQEAVSGPGGQSYRVFVSRRNVEALSKSDLREKNKELWPDPKLRETIVAWVNKHGGGDPKKAFPPYPKRGRKGPKIRRVRLRKKQQIDLMAKVSTGYADLGNNHHIAIYRLLDGKVEHEVVSLMEASRRLARHEPVVRRDRGDGAQFLMSLSPGDSLWLTRNGATSVRVVSGVWGNGQVVMTEHNDAARATEFRPGPNAIVSNGGTKISVDPVGRIRSAND

SEQ ID NO: 5281 - protein, 1023 aa, unidentified
  REGION 1..1023: note = Description of Unknown: Cas Enzyme sequence
MNSKLRYRLGLDLGTTSIGWCVLRLDSNNSPVAIIRMGSRIFSDSRNPKNGSSLAAARRLARQMRRRRDRLLQRKQKMRNALIEFGFFPKHESERKKLLLLDPYALRKAGLDRALTPGEFARALFHINQRRGFRSNRKTDDAKDSDSRLMTAAISKLDGILEEENCRTLGEWLANRHAKNLSVRARLRGATKKDKAYFYADRKMIEREFNTLWQAQAAFHPDLFNDEACNKLRDILLFQRPLKSVDPGRCSLIPDEKRAHKALICAQRVRIYQEVNHLCIQTPELREQKLSQVQRDVVVAQLEKHSHRTFKQIIKALKLPSDTVFNLQDRKRDRLNGNQTSVSLAKKDLFGARWFEFSEDLQDAIVEKLLNEEEPSTLLRWLQEKTEVDTDTAQRIADASASLPAGYGNLGRTALQRILPHLKQDVIVYSEAVTRAGFDSHSALSHSEQTGEVLPALPYYGEYLQRHVGFGSHAPDDPPDKRYGRIANPTVHVGLNQLRRVVNALIKRYGHPQQVIVEVTRDLKLSPKRKKEVQDEQADRQKRNRDNIEEACTALGRVAENLNQSQRRELSQKIQLWKELGSDPASRRCPYTGEQISIERLLSAEVEIEHILPFSITLDDSMNNKTVAMRGANRDKGNRTPYDAFGKQAQPGYDYAAMLERAAGMPKDKRYRFAEDGYQRWRREHDDFLARALNDTAYFSRIAKEYLSLICPANCVWTVPGRLTGMLRGLYGLNQLLSGNAEKNRNDHRHHALDAAVIGITDRGLLQRFATASAKTKDSGLDRLVEKMPDPWPDYRAQVKRALNAIVVSQKPDHGYQGAMHEESAWGFRRDNQVTRRETNAETGLRTRKLENKNLIRIHSTRDSQRHGIDESGSPKAYKGYVGGSNYCIEIFKNDKGKWQGDVISTFQAYQIIREHGEEAGWKKLRDPHLTQCGHPLIMRLMNNDCVRLTLNNCCQVMRIVKISGDGKIVMAEHHEANVDARNRDKEDPFKYTSKLANPLRKADAKPVTVSEIGVLRVLPLKD

SEQ ID NO: 5282 - protein, 1377 aa, unidentified
  REGION 1..1377: note = Description of Unknown: Cas Enzyme sequence
MKKLGLDLGSSSIGWALKEDKEFLGKGVVTFKAGMSEGRSGGYSSPTKDRREARAKRNLIKARKQQKWELLKILTEKNFVPIEKYELEIWSRYKKGQLRKFPETETFLKWLACDFRYNNQKNYKNPYELRIAALDGKVSDHEFGRALYHLVQRRGYRNIGVPFFVEDGSKYESTEKDKETKTQLERRERDGFKEAMDKHGVLSKALKNEFLDKGKRARNQYTLRGEYQHEFEQICEKQGYDISKGENSYNDPFIQSLWKAIIWQRPLKSQKGNIGKCTLETSRLRCPASHPVFEIFRAFSFINTIKYVSSGGEKEPIAQELRDALFEGVFLKKDKNFKFEDIRKFLDIKIGSKKQYNYPVNEKGEYDTSVSGMPITKGLISIFGDEVKKAVYTLEQYNIGTAPKIIHGKYSIYDLWHILFDFDEAYLKKYAVNSLKVENKKNKKEEVFNPFAKLKQSVQSGYADLSLKAMCKIIPFLKDGHLYNEAVVLAKIPELLGEEWETQKEEISQAFQTAKNAYADHKTIINITNKLIEQWKAEKELWDNGEGQVKAWKDYTYELDHYDEEDILKTCEGYFGEKSWEDLKDRQKITESVEEEYQAFYKDQKRTYRQVPTLSDLFKEELTKIGITTKDGDLYHHSVKENRYLKKYLNTKTGEFELPEDTKTGLSLLPEATTDSIKNPMFNKAMSMLRKVINELIKSEKIDEDTEVTIEVARELNDNNKRAAIERYQREREKKREKYRKFLEEFKEKEDRKDINVENSLDEFELWTEQIFEETTDEEGKPIQQREAILKEKSDIDRYELWIEQKGLCMYTGNTISIAQLFSNKIDIEHTIPRSILPDNTMANRTVAYAHYNRDEKGKNLPRHLYNFDKEITHRLDHWRKERDKWRKERDKCLFKSHTKAKGNEDEGAKNKRIQKKHYFKMHYDYWADKIARFEAKEVKDGWARRQLVDTQMVSKYAREFLKSYFKKVEVQKGEVTAIFRKIHGFQEEDEIKNRNKHTHHAIDAAVLTLIPANSSNRERMIKQYHKEEENKQPTQKKPFASFNPQTLIKDIESGTLIVNYTTDTILKQTVKNVRKRGRLQYLEKNGNKIQPKAKGDTIRSQLFKENYLGKIRNVKRDADGKLRREQGKWIFESGKNEFTFTKRVPVDGVKTNDIIDPKIKDIVANAKAENTIPIDAQGKTIRHVRIKASTGREVKKRLNYLSKHDYKNKFYSEAGSIPYAIMVEKEKKRLIPLPSFEIAKAAKDLNIRKWDEADIEKYLSKCPPKLSGYSGKRLLRVGQKVIVFKSDEEYHQKEDLAFQMNRMYYITQFHSDGRRIYLRYHLEARSRDEINKYPASIEVEGDTPLLLMSSKNWNFLYEGEDFEISLLGEIKFIKNH

SEQ ID NO: 5283 - protein, 1472 aa, unidentified
  REGION 1..1472: note = Description of Unknown: Cas Enzyme sequence
MKKILGLDLGTNSIGWALVKHDFDNKEGKIEGLGSRIIPMSQDMLGNFDAGQSISQTAERTKYRGIRRLYQRTNQRRERLHRVLNILGFLPEHYRQQIDFEKRRGQFKSKQESKLNYKPSWNEEKKKNDFHFLFQQSFQEMVNELRISQPQLFRKKKNGEDVKVPYDWTIYYLRKKALSQKISKQELAWIILNFNPKRGYYQLRGEEEEEASDKKVKTFEILQVDRLEDSDEKIKGSNAKLYDVYFKNGWKYDKQIVKTEDWKDTTKEFIVTSTTDKNGETKRTFKKVDSEKDWIAIKNKTEQDVDESGKHVGVYIFDELLKNPHQKIRGKLIRTIERKYYKKELEAILNEQAKHHPEFQNKRLYQNCLDELYPRNEDHQNNIKKRDLKYLLIEDIIFYQRPLKSQKSTISDCQYETYTYKNKDDIVSETSVKAAPKSHPLYQEFRLWQFIQNLRIYQKEGKVDGKIKLDILITENCFKTEEEWVDLYEFLALKKEVNQKHVIDYLVKKGKINKAEKDNYRWNYVEDKTYPAGETKAQILNRLYKVKGMTYAKSWLTKDKEFALWHIIYSVSDKQQFEKALKTFAQKHNDLHTDSFVEAFKKFPPFKNEYGAYSVKALNKLLPLMRREKYWSEKDIDSDILNRIDKLLSGEFDEKIRDRVREKTIQLNSLEDFKGLPVWLTCYIVYDRHSESKDISKWKSPEDIDAYLESFKQHNLRNPIVEQVVLETLRVVRDIWQHYGKGKEDFFSEIHLELGREMKNPADKRRRITQKVSENEKTNYRIKQILTELMNDGVAVRPHSPSHQEILKIYEEGVYENSPDDYKTVKIKDINEIRKNNELSKKDIECYKLWLEQGYVSPYTKRTIALSDLFSEKYQIEHIIPQSRYFDDSLSNKVICERAVNDEKDDQTAYEFIKNKAGSIIDLGQGEGVKVLSLDDYENHCTKYFLGKKLKNLLSEEVPEGFINRQMNDSRYISKFIKGLLANIVKEEDEKEAISKNLMPVAGAITDKLKKDWGLNDKWNELMAPRFKRLNELTKSDDFGYWDKEINAFRCKVPDEVAKGFSKKRIDHRHHAMDALVIACTTKDHINYITSINTERKNYSLVSKLRNQKEITTVKGKKKTAPTSYKLPWEHFTIQAKEALETTVVSFKQNLRVINKTTNKTWQWVKENGQWKKNLVSQNKGDSWAIRKPLHKETVSGKVLLMRGEQEKEIEATATRIELSDKFTRKQLNKVTDTGIQKILENHLSNYKDEDGKEQFDSAFGVKGIEEMNKNIIKLNGGKPHAPIKKVRIYEVGNKFPISEEASSSKNKKYVEAAKGTNLFFAIYWNEEKQKREYETIPLHKVIEHQKQVAHLPKSERTPIPTDHEKGVFIFSLSPNDLVYVPTDEERSNPNLVNFDKLNKVQAERIYKMVSSNGNQCFFIQVSVTKPIVNKKEFLVMNKMEKSIGDVMVKDRCWKIGVDRLGNIQNKIIIKN

SEQ ID NO: 5284 - protein, 1063 aa, unidentified
  REGION 1..1063: note = Description of Unknown: Cas Enzyme sequence
MTQTKYRLGLDIGSTSIGWCALKLDNNNEPCGILGMGARIFSSGRDPKTGTSLAEDRRMARGMRRNRDRTLLRKHDLMQKLIANGLMPTDKAQRKQLESLCPYQLRSKGVKGELTLHELGRALFHLHQRRGFKSNRITDKGGDESGTIKVSIKSTREAIKKAKAHSYGDYLASLHKKRESVRARLRGSTQKDKRYDIYADRSLIEEEFETLWNTQKTYHPKTLTDTARESLHGVFFRQRPLRPVEPGKCRLDPTQARAPWALPLTQHFRIVKEVNNLYWYDSRQEKHELALDEKQRLITMLLEKKEVTFKAMKKALGIDDPEAYFNLESDKRKNLKGDLVAYAIANKNIYGSEWRGLDPTDQNNIVTILLDSTLSDGDAKQRLTDEHAIPEETAERLLTVQLPVSYCHYSEKVLAKLVPMMESQGLNEYNAIITADYTPPQEYDNKALPRLPYYGQVVPSAVIGATNDLKHQEIQRYGRINNPTVHIGLNQLRKLINALIKDKHFGKPEQIIVEFARDLKKSWEERREIERQQTENQKKNDERNKKIQKLDFTPNGANRMRMRLWEETDKKCIYTGKPIPLSKLFTKEIEDDHILPFSRTLDNSANNRLVCYGYANKQKGNQTPYEAFGNLKHSKDYDGGWDGILDRASQLRKERSKRFAPDAIERYKEEHDFIDRQLHDTAYLAKIAKGYLGKLYDNPLSHVWVSPGQMTALLRGKWGLNNPLGDNQFKDRNDHRHHAIDAFVVAATSRSMLQKVSTQAAKPGNGRLIADMPPPWEGYRDQFIQHFKKLVVSHKPDHSMAAQLHNETAYGKIKVPPGTTDSYNYVVRKNIADLTEGEVARIQDEDVRGYVQEHLAQSEGKPHKEALQALVDKQPNRERIPKRGRGQKPYVKKVRIHLPNKGGAPPPLIPIKDKQGKPYKYYDRGKNHCVDVYENEDGSIYAYTYSIFEANQLNKQGKWDTKHPHPLPREGKKPLMRVYKGDCLKVTINGDTQIIKVQKLMPSASRFVTVSHTDAGDFVKRVKDRDDAFKWIFIAFNYLKKYQARKVRVDMLGRVYHVQPPQP

SEQ ID NO: 5285 - protein, 1085 aa, unidentified
  REGION 1..1085: note = Description of Unknown: Cas Enzyme sequence
MQTRLGLDIGTNSIGWWLYELEGEEIARIIDGGVRIFPDGRDSKSKSSLAVDRRIARSMRRRRDRYLRRREVLMRRLVDAGLMPGDSELVKKKLEKDPYALRARGLREELSLHELGRVLFHLNQRRGFKSNRKTDRGDNESGKIKDATARLDHDMMAKGARTYGEFLNMRRSETPEKPEYEGKPENKDGTRQDDRRTKPVRTRMSVARRGGPDAREEDGYDFYPDRRHLEEEFEKLWAAQEPHHPRVLTDALRDALFRIIFYQRPLKEPEIGLCQFENEPRLPKSHPLFQHRVLYETVNNLRITRDGDASRPLTLAQRDTITLLDAKKPTKTLASMQIKLPALAKALKLPKGERFTLQTANRDAIACDAVRASLAHPDRMAGLWSKLDEDTQIDIVARIRAVQSDAEFNDLVNWLQDKFSLPEDQARETANAPLPEGYGRLGETATRRILDVLKSDVVTYDKAVAACGWHHSDTRTGEVLDKLPYYGAVLDKHVIPGSRDESKHNPEDQAAEYYGRITNPTVHIGLNQIRRLVNRIIDVYGKPHQIVMELARELKQSKKQKDAWENTNKNNRKAAEQRSRKLVELGQEDTGANRMILRLWEYLNKDDCMKRFCPYTGERISAGMLFDGSCDVDHILPYSRTLDDSFANRTLCLRAANREKRNHTPWEAWGGTAQWSVIEANLHHLPDNKHWRFAPDAMDRFEGERDFLDRAIVDTQYLSRIARDYLDTLFTEGGHVWVVTGRMTAMLRRHWGLNSLLPDHDKDTAKNRTDHRHHAIDAAVIAATDRALVQRIARAAGRDEGDGQSAERVAREIAPPWDGFRKDIRDRVDRIIVSHRADHGSLNGTVGALHEATAMDWVDKHHVATRIPVNKLEPSHLIEGGKSDTLRDEFLRTKLARATDRLEGKAFEHAVTEWFSRPGPYYGTRRVRVLKALGEKSRVCVQHKNTDKKKVYQGGSNHRFEIWRMPDGEIIPQVVTVWEFHNLKTPKRPHPAAKRLLSVHKNDMVAIERDGNTRICSVQKTSVGVGAVLVPHNEADADARRRRKEAVEWFQMSATSLIKGGIRRVFVDGLGRVRDPGRPVWAGLT

SEQ ID NO: 5286 - protein, 1029 aa, unidentified
  REGION 1..1029: note = Description of Unknown: Cas Enzyme sequence
VRIFGIDGGIATIGWAVLDQSSDSMTIVAAGTRTFDAPETDKERTPTNAVRRLHRGQRRVIRRRRLRMNELRRLFHGAGLLPDATRDALAPRVGEPRTDPWHLRAQGLDRALTGAELAIALGHIARNRGFRSNAKREAGANAADETSKMKKGIAAIQERMAGHRSVGEMFAKDFPDRKHNRGLNFDRSILRSDQEHEVRDLFAAQRRLGNGAATEALESQFASIAFFQRPLQDSEHMVGPCLFEAGEKCTARRSYAFEMFRLLSRLAALKLSTRGHDDRTLNAEEVALASADFGRQKKLTWKWLRKTLDLDPSVRFAGVTEKDESNDFVARSGNAAEGSYTLRELLGDAGWRVMMHNPVQRDRVAEVLTFREDPGSIREGLIQAGVEPLIVDTLMHGVDIGAFSQFTRAGHISAKAARRLIPPLSQGKVYSAACEDIGYDHAARPEVSLEDVRNPVARKAVTEMLKQVRAMMHAFGGLPDFIHVELARDIGKGVEERDKISKGIEDRNKQRDRLRKELEETILGRTASLEDLVRYELWKEQNGFCLYTGDYIEPSLIAAGDNRVQVDHILPWSRFGDDSFWNKTLCMAAANQAKCGRTPFEWFEADKPEEWALYAERVERCKEMRGRKKGAFYLRKNAKEVEDTFRSRNLNDTRYATRLLLDLLARLYPVDGKRHVLARPGPLTAKLRRAWGLDDLKKDEKGNRLDDDRHHALDAIVVAATSESWLNKLTKAAQKAERQGLRRGWDFDQVPLPAHGFREIVREVVEGVFVSRAERRRARGEAHAATIKQVREVDGKDVVFERKLVEKLSLQDLDNIPVPAPYGKIADPGKLRDELVAELRRWIEAGKPKGDLPKSPKGDVIRKVRVASKDKVAVSVRGGTADRGDMARVDVFAKASKKGKREYYLVPIYPHQVADREKWPVPPDRAVVAYKDDAEWAPIDSTFQFLFCLYGNSLLEITKSDGEVIFGYFKGVHRGTGALAIAPHHDARSIRGGIGAKTLLSFRKKTVDRLGRHVVIETEVRTWHGEVCT

SEQ ID NO: 5287 - protein, 907 aa, unidentified
  REGION 1..907: note = Description of Unknown: Cas Enzyme sequence
MEKKILGIDLGVTSIGWALINEIDGKPKQILGMGSRIIPLNTEDKDEFSSGNTITKNQKRTQKRTQRKGYDRYQLRRFQLISLLKSIGFYPDENLFNLPSIELYNLRNRAIKERIEKQEVGRILYLLNQKRGYKSSRSDANLDKKDTEYVAEVKNRHQLIKDEGLTIGQHFYAELLKNKYSRLKQQVFPREAYIEEFNLIMDEQKKHYPQLTTQLINKLKDEIIYYQRKLKSQKALVSVCEFEGRIVKYKKDKKVKEIFAGPKVAPRSSPLFQMCKIWETINTISLKNKRGELYEITNEQKKKLFEYLDNNKSLKQNDLFKILELESSDGWIGNKHISKGLQGNQTKASILDILQHFDEKEKLIKFDIEIIDKNEETYLIDRKTGEIKNSTTKKSVSEKFEKEPLNRLWHLIYSIADIKECSQAIQNTFNIPVEVADKLASLDFTKQSFGNKSAKAIRKIMPYLMDGFVYSDACSFAGYNHSNSLTNEERMKIELLEKIPNLSKNSLRQPVVEKILNQMINVVNAIITKYGRPEEIRVELARELKQNKEERDNTFTNLKKREKENNLIIERIENEYKHLGIKATRNTILKWRLFHEINNDENKINATCLYCNKSFGISDALSGNSIDIEHIIPKSRLFDDSQSNKILTHRKCNEDKGDNTAFDYMEAKGEVALNEYTNRVQYLFKNGIIGKTKRDKLLIRAEKIPNDFIERQLRETQYIAKKSKEILEQICRNVWSTSGSVTEYLRRIWGWDDILMNLQLPKYKNLGLTEIIEWETNDGQIHKKEKIKDWSKRNDHRHHAIDALTIACTQQGFIQRINTLNSKKNRNEMFAKVEELGKETRTKLTLLDKFLIIQRPFQTADIEKETAKILVSFKAGKKVATISRYKAQGKNLLSHQAQGEAYFRRYN

SEQ ID NO: 5288 - protein, 1067 aa, unidentified
  REGION 1..1067: note = Description of Unknown: Cas Enzyme sequence
MKYTLGVDVGIASIGFAGVNILSQSIPFCGVHIFEAAENPKDGASLAAPRREKRGMRRVISRRAQRKKALRCLFRRHGFGNVDAAIDAAPFAPPEKSVWDLRKEALERLLTEGEFIRVLFHIAKRRGFQSNRKGGEDNDTEGKKALSGARELQEAMRAAAAPTIGAYLATLDKKRNGDGSYERFVTRELLREEVRKIFEAQARFGNAKATPELLTDYAGSGKKEERNTPEGDGIAFYQRPLRSSEDLVGFCTLEPAEKRAPRFSYTAELFVLWSKLNNTRIRNVDGRERELTLDEKNRLAEKAHMLKSLSYKQARKDLGLQDEERFNLSYRKISEEDNTWEKIRDAAEKADFLKLPGYHALKGVLGAGGDMAWQKWTAESGRKKLDEVARILSFYEDRKEVDALLAALDIDFQQREELAKITHFSKVVDLSLKAIRNILPHMQQGLTYDKACDAAGYEHSRKQNKKLKKVPVFEDVRNPVVNRALAQARKVINACIRKCIRKYGMPESIIVEMSRDLGRSFKDRKNIEREQKKNQAYREEARQHLAEIIGIIPDNLSGEDILKYRLWKEQKAMCCYCGSEITPAMLKDAVATQVDHILPYSRSWNDSYINKVICHTSCNQEKANRTPYEWLAGTPGWESVVLFARQLPPRKAEHLLMQNFDDEKAGQWKDRALNDTRYISKLLKNHLENSLDLGDGVRVQTRNGMLTSNLRGAWGLSKTRENDRHHAVDAIVLACSTQAMVQQHTNWNKYEARRKNPAVRPVPPSPWENFRQDVMNKVFGEKNAQGIREGGIFVSRMPVRKVTGAAHEETIRSIRKSDGKAIQRVKLSALTPARLEDIVDKERNIKLYSVLKERLDAHGGKPDKAFAEPVYMPTNDPAKKGPRINSVRVVTNEKSGVPINGGLASNGDMVRVDVFLKEGKYYLVPIYVHHFAQDKLPNKAIVANKPEDEWPEMDDKDFIFSLHKNDLVRIRSKKEEFWGYFAGAHRGTGAINLKYHDADSSVGKDGVKEGIGTKTLLSFEKYSVDYFGNIFPKHSPGIREKRRGVAQRDDSKSGAAEPVQRAAATGE

SEQ ID NO: 5289 - protein, 1151 aa, unidentified
  REGION 1..1151: note = Description of Unknown: Cas Enzyme sequence
  MOD_RES 442..448: note = Any amino acid
MVTSSENITGIRYRVGIDVGLRSIGFCAIEVDDEDHPIQILNSVVHVHDAGTGGPGETDSLRKRSGIAARARRRGRAQKKRLKRLDALLEDLGWGVVSNEMLESHAPWHVRKRLLSEYITDEVERRQCLSIAAAHIARHRGWRNPYSKVDTLMLEHEPSDRMRGLKNRVEEQTGLCFSDQATQGELIATLLEHDKDVTVRGFVRKGGKATKELGVLQGKYMQYDLVAELRQICVKQKVSDEVFKQLVSTIFYSKAPQADKKNQRKRVGIDELQLAVDPQAEELRAERAHPTFQKFKIVATLANMRIQEDGVGERALRPDELRSVTAYLLDESGVGIPAWEEVAGQLGVPRHRLRGASKASLETGGGLRYPPFDETTARVAESEIDWLVDWWIQADDESRGHMIDEISNGCGSETNDIEDEEVIELISSATAEDVVKLERLAXXXXXXXPAGRAAYSLKTLREVTSSILETGDDLSRVIERLYGVEPGWAPTPAPIEDPVGNPSVDRVVKQVARWLKFAEKRWGIPQVVNIEHTREGLKSASLLEEEKENRIIYEERREERLKKMYAKLGISGPFRRSEQTRYEILYLQDCACLYCGCEIGFETFEIDHIIPRVDASSDSRRENLAAVCHNCNTAKGGMPFGQWVKLNDCPNGVSLEEAIKRVKIWDKNRVGLTEKAMRKRKDEVISRLKVEKPYEEFDGRSMESVAWMAIELKKRIEGHFNLDCAAGSVVKVNAYSGRLTACARRAAHVDKRVRLIRLKGDNGHHKNRFDRRNHAMDALVIALMTPAIARTIAVREDRREAQQLTHAFESWKNFLGSEERMQERWESWIGDVEFACDRLNELIDANKIPVTENLRLRNSGKLHADQPESLKKARKGSKRSRPQRYVLGDALPVEIINRVTDPGLWTALVRAPEFDDQLGLPADPARGLSLRGSRISADFPINYFPTDSPALAVQGGYVGLEFHHARLYRIMGPKEKVTYALLRICAIDLCGIDRSNLFSVELKESSISMRTADPKLKEAMKEGNATQIGWLVLGDEIQIDPSKFPKQSIGKFLDECGPISSWRVSALNTPSKITLKPRLLSNEPLLKDRHGGRKTDLVASECVDKIMKKTGWVVEINALLKSGSIRVIRRNALGEVRTSPKSGLPISLDLR

SEQ ID NO: 5290 - protein, 1087 aa, unidentified
  REGION 1..1087: note = Description of Unknown: Cas Enzyme sequence
MNYVLGLDVGITSCGWAVLELNHEDEPVRIVDLNSRIFDKAEAPKTGESLAAPRRMARGIRRLTRRRKFRLHRVRGFLVRHHILTKEEIENLYITPHKTDIYELRYRALTEKVSPSDWARLLIFFAKHRGFQSNRKNEKSGEDGLMLAAIGENKKILENYRSVGDMLYSDEKFKDCKRNKGGTYRFTVSRSMLKEEVQTLFKKQRELGQTFAGEDLEDEYISIFSAQRNFDEGPGANSPYAGDQIEKMIGNCTFEDGKNGRPPQKRAPKASYAFMAFNLWQKINHIRVNSKGIERSLETEEKNKIAGLAWTKENITYHDLRQITGLDEETRFSGVTYPLDSTTEEAEKKVKFSWVKPYHAMRRALDKVEKNYIQKLRREEIDAIAYAFTVYKNDKKIRTALAEKGIEDNVADVLITHLDGFSKFGHLSEYACYKLLPFLEKGEEYYKACESAGYDFRKSSMEKLEDIPNPVVKRAVTQTMKVIKAVQRKYGNPVEVHIELARELARSFKDRAAMDDRMKENYAKNEKIKECLSKEFHIMNPTGQDIVKWKLYEQQKKCCAYSQKLFDVDRLLHDRTYAEVDHILPYSRSFDDTYRNKVLVLTKENRDKGNRTPMEYLADKPERKEKFIAWVKTTIKDSKKREHLLRVKYGRDEEAEWKQRHLQDTQYISRFLYNYLRNTLELAPGYTDRKRRIIPVNGAVTGYIRKRLGIHKIRENGDLHHAVDAVVIAATTQGMIQKVTRYSQIKENETWIDDHTKVDERTGEIFFVKKAHEKDAFPEPWPRFRQELEARVSEDPGEAIRRLHLPAYENVGEIKKPFVSRMPRRKVRGAAHKETVRSGKLREDGYTILKTDLSALKLKNGEIEGYYRPESDRLLYEALKKRLEAFGGKGKEAFKTPFYKPKADGTPGPLVKKVKIIEKSSLNVPVHKGKGVAYNDTMVRIDIFGVNEKGKTAYYFVPVYVSDTVKKELPCRAVVQGKSYENWKIMDDKDFLFSLYSNDMIHVVAKRDLSFTAAEGSSLTATMETKDTCVYYKTADISTGNIKVITHDNSYEKRSFGIKTLLQLEKCEVDVLGNISFVKKEKRQGFR

SEQ ID NO: 5291 - protein, 1362 aa, unidentified
  REGION 1..1362: note = Description of Unknown: Cas Enzyme sequence
MKKKAEKIYLGLNVGTNSIGYAVTDEQYNLLKFNGNDAWGSIVFDAASSNEDRRNHRLARRNLDRRQQRIVWLQEIFAKEISKVDDRFFIRLSESFRWREDVQDQYVFFNDKEYTDVQYMKENPTIHHLICELMDNKAPHDVRLVYLACAWLIAHRGHFLNNLNVEKLDEIMDISSVYQNFINYFTENGYKRPWGEIDVSALAEALKRRSGVTAKTKELLKILLNGKKPEKSGTEEFPFSQDSIIRLLAGGQCKLKDVFCKEEYLDLGSISLDMDEDKFGEISGSIGEDYDLLMALRGLYDWSVLADLLNGHSKTISAAKVQMYEQHKEDLRVLKYFMHKYLPGKYNEVFRKAKADNYVAYTGHMDKETASQLKKKANVEDFSRYIQKLVRSINPEEKDQQTYQDMCERLELKCFLPKQRSTNNRVIPHQLYEYELIRILKNASLYLPFLNEVRNGVSEIDKVVSIFRYKLPYYVGPLNEESSFAWISRKQGKITPWNFKDMVDEDTSENVFIRRMTNKCTYLPGEDVLPKDSLCYQKFMVLNELNNLKIDGRKVPVEVKQGIYHELFEKKKKVRRKDIEEYLISNNYLAKGSTELISGIDEQIHSGLSSYCAFFNLLNKKILSEDDVERIIERASYTEDKSRVIKWLRKEYPGLSEDDIRYIARIKIRDFGRLSKTFLTGLKGCDVSKGFDGQDVEMISILQTMWETNDNLMEILSDKYTFLEALEAFTQEYYTGKKKSLKERLDEMRVSNSVRRPVYRTLAVVKDIEKAFGKPNKIFVEMTRGGQADQKGKRIKSRKQQILDLYDKCKDDVHDLMWQLESLGEYADSRLQSDRLYLYFMQFGKCAYSGAHIGFEQLMAGSVEYDIDHIYPQSYVKDDSLNNKVLVLSDLNGTKDNIYPVSPEIRGKMQGLWSWWNHVGAISDEKYKRLIRSAPFTDEEKMGFINRQLTETSQSTKFIADLLKERFPDAEVVYVKAGLVSDFRHEFDLPKSRSYNDLHNAADAFLSVVAGNVYDMRFSKKWFRIDEKYSVKVKTIFTHEVKCRGDIIWDGMPMLEKVEDTARKNTAHFVKYAAFKTGGLFDQNPVKKGTGLIPLKAGLPTEKYGGYNKAGVMFLIPVRYNIGKKSEILILPVELMHGKHFLEDKVFARNYTFTRLENILGKKVGEVSFPMGMRPWKINTMLSFDGFRVCLTGTGGRGKCLVAQPVMQFSADEHWRFYIKRLERFVEKIGINPDLLYDKDHDKVSKDENLKLYELYVDKLQNTIYKKRVNSPVQTLLKGKEEFKKLSIEEQCQVLLNIQSVFGRMTGGCDLTLIGGSAHSAATGSLSTTISNWKKKYSTVRIIDQSPSGMWEKSSENLLDLL

SEQ ID NO: 5292 - protein, 913 aa, unidentified
  REGION 1..913: note = Description of Unknown: Cas Enzyme sequence
MKNILGLDLGTNSIGWSIVKSETDENGKEHLVGIEAAGSRIIPMDAAILGDFNKGNSVSQTAERTKLRGVRRLRERYLLRRDRLHRVLDILGFLPTHYAQQLDRYGKILKNHEPKLVWRKNAAGVYEFIFKDSFDEMLRIFKAQNPDQGDGKIPYDWTIYYLRKKALTEPISKEELAWILLNFNQKRGYYQLRSEEEEEETNKSVEFQALKVVNVEDSGDKKGKETWYNVRLENGLIYRRLSDVFLDWVGKVKEFVVTTELEPDGTPKRDKDGEIKYSLRAPKEDDWTLVKKRTESNIDASNKTTGAYIWDALLENPKQKIKGKLVRTIERKYYKEELKRILVKQSEYHLELQNRELYTACVNALYSHNEAHRNNILDKNFTYLFLEDILFYQRPLKSKKSLIDNCPYEERFAKDVKTGQVTNVPVKCIAKSNPLFQEFRLWQFISNLHIYRKDVIPETDVTSEFLKNEDDYTALYDWLNDRKDIDQKAFLKNPLWNLKKNAENYRWNYVEDKVYPCNEFRHVVLSRLSKCSVSANFLNKETEQALWHLLYSIEDKEELVKGLQKFAVKYNLGDAFVDVFQKVPAFKKEYGSYSAKAIKKLLPLMRMGKYWNENEINSDVKERISKITTGEYDEKIKDTVREKAKHFESISDFRGLPLWLACYVVYGRHAEAKEIVKWNSPEDIDSYLKSFRQHSLRNPIVEQVITETLRTVKDIWKQVGHIDEIHIELGREMKNPKDKRVKLTQQISENENRNLRIKYLLTEFLNPEFEIENVRPNSPSQQEILRIYEEDILNNTSELPEDIAGIMKKLVESDVKKRPSKSEVLRYKLWLEQRYRSPYTGQIIPLGKLFTPAYEIEHIIPQSRYFDDSYSNKVICESEVNKLKANLLAHEFIANHGGEVVELNYGQTVKYFH

SEQ ID NO: 5293 - protein, 185 aa, unidentified
  REGION 1..185: note = Description of Unknown: Cas Enzyme sequence
MLDDIPDQFIARQLNDSRYISKIVKGLLSNIVREENEQEVTSKNVISCTGGVTDRLKQDWGINDIWNKIILPRFQRINGLLGRTDFTAFNTSGHEIPVMPLELQKGFNKKRIDHRHHAMDAIIIACASRNIVNYLSNESASAKAEVSRLDLRNMLCDKIKTDDAGNYKWLLRKPWESFTQDVYSL

SEQ ID NO: 5294 - protein, 1086 aa, unidentified
  REGION 1..1086: note = Description of Unknown: Cas Enzyme sequence
MEYKLGLNIGITSVGWGMIECSTNNIINSGVRLFPEANPENNQTRRMARGKRRIIRRKQHRLLRLKRLLVENNIINSLDCDFSAPAGQVFLCRKKGLTELLSDRELAIALHHLIKKRGAEDYDLTDTSNDDDGTKAILVKNEAKLGESKYVCEVQLDTLNANGKVLGKENIFKTKDLKKEALKILETQKELGNKKVTDDFIKNCIEILERKRTYFEGPGQESPFSWANEKEWIQGLMGRCTYFPEEIRMIKHSYSAELFNLLNDLNNLKIARETGEEKLSYEEKEGLLEIFKSQKTVNLKKIAKYLGVEPEAITGYRIDTAEKALFTPLETYVNVNKVFKTDDRELIDSIAEICTYYQEASDRKSYLAELLKEYNLDNSILEELAKNKFTGTHAFSKKLLNILIPEMLETTKNSMQVITELGLVPYKMNFKGQSKIDKKYIDEWIVNPVVKKAVGQCINIINEILRIYGTPKEIIIECCKEYSSKEEQKKIKSLQASREKENKKIKEILGSLELEKRYFPYIKFWKEQNEKCMLTGEHIPLDDLVKNISKYEIAHIIPMSISFDNSNNNKILVKRSANLLRGVKAPFGYFTKFNTERTFEEFEAQVKELKISKTKRELLLYKGNLSKNYDEFISRNLNDTRYIIKEVKNLLDRFFKDNDKKVKVRGINNSFVTYVRNLWDLPRLKSKSYSHYAEDSLILLVGHSILENLKWYKSYEEENGEKSFYYIRTGEILDDDNFKKIFNFSYRKKIVDYNEYKYSHYVDKKPNRQLFNETVYFLKPYTIKNKEVECAIITLKDIYAKDKFVLSNLFETETTENLFIYSSDVKTYKKFEKAYEDYKERAKAENVNPFYLYYQDNGYIKQGEKNNGTLVKTLKMLDKGINTYFDNSHKYKNPKGKVIFKKMATYRLDLYSNGEKYKFISVRYPMLRSLKDKYTIDENLYNSELERKKITEDYKFVCSLHDGDIFELVTPKISGIFKFRGINNDKQSKIAIDYVDKSNSLLIKALTELKAKLTKNMETKIANDLNELLGLNYTEEEAKEYVLKVSLSSNQKIITISDIKYFKKKSVDVLGNIYNSEEKFKKFLKK

SEQ ID NO: 5295 - protein, 1085 aa, unidentified
  REGION 1..1085: note = Description of Unknown: Cas Enzyme sequence
MNTLGINITNNLISYAILNEDENIITSGVRIFDEVEIDGNIKRREQRSKRRILRRRKFRLLRLKRLLKQYQIIDNIDFNFYSQNENPYLLRKKGLTEELTNEELAKALYNILKHRGSLDLDISEDDEEGTKGILMANEKRLVNKYICEIQLENLANDGVLRGKNNTFKTKDYIKEVSAILATQQKFNKKIDKNFVEKIIDLINSRRLYYQGPGQESPYSWKDEEEWLNQLMGTCTYFPNEIRMIKHSYTAELFNLLNDLNNLKINGKNSLSIEDKKELLSIFKKQKSVSLKKIAKSLGISEDDISGYRIDPKGKPIFTALETYIDITNIFPSEDRNLIDNIARICTYYQDKESRLNKLKILLEKFDVIEEILDKLSDKKYAGTHSLSKKLMDMLIPEMLETNKNSIQIISEKKLVPYKMDFTKSDKIPSDYIDKWILNPNVRKNCKQVILILNELLKEYKIDKIVFKSLEKKNSFEERERIKKENSKNKDFNDDIKKILTTYKLPDKYFMLIKLWKEQDCRCIYSGEFIKLDDIIQKPEAYEVSHIIPISISFDFSQNNSVFSKKSENNKKGSQTCYEYLNSISSSRTFENFKEQVEELYKNQKISKGKRNRLLIEETISKYCYNNLNKILSDNSYVMKSIIELLTKYFKDKKLKIKIETVNAGLFNIIKRKNKILNDKIYYKERIGDSILLVKINSIIRNIRYLNLEEDETVIYHVKTGEIMSDTTFLDLFKFPNFNRKMDGIKFNLSTEKDKKANRKLANETIYSTRQIEGVEYQIQKFGIYDKICKKVDDFFGNKEKYSKLLIFNSDRKTFDKMLDIYLKYKKETKKGENPFYLYYQENGYITTARENGGVPVKELKILGDNIKIGFDLSHKYINPKKRVLVTKLSGLRLDFYKKKDENKYRFLIIRYLDLKEVKDGYLIEQSKYNAIKNRKNIDENYEFVCSIYKGDKFKVNDGNTEKKYIYRGVNNELQNRLQVIPEDKNYINYITEIIELKKKMEDLNYQIRNRVYDICNIEFDTEEEAREYISKYPTSTKQQIIYLKEDKIKSFKKVHTNLLGKEYNASNNEKLRLYFPKNNKLTKML

SEQ ID NO: 5296 - protein, 1032 aa, unidentified
  REGION 1..1032: note = Description of Unknown: Cas Enzyme sequence
MGKKILGLDLGSNSIGWALLEEQDGQPNKIIDLGCRIFIKAVEEKTPTPKNVKRREARLTRRVLQRRAQRKERMLETLIQQGLLPQELSTHPQPEIILNVLGDPYLLRAKALDEKLEAHELGRVLLHLVQRRGFLSNRKTLLGDMLDDPDVQAVLDELEQDEDLSNERAKEESAFKKDIAELKREIALTGCRTLGEYLAGFDRHRCRRNRAHDGGHLRTDRQMYQEELELIWQTQQEYHPQLTETFKEAIESIIFYQRTLKLKADRIGKCSLEPKYNRIRIARLEYQCFRYLQDINHLEYLESQTERWLKLNEAQRNKLVELFEREANITLPKIRKTLCFDRTVEINLERGDKKLKGNITACEIRKILPDWDNFDAERQQALVEDLLTFQKKSALKKRLTTHWRFSPDIAVNLCLLEFEPGHGNLSCKAISKLLPFLERGQIFSDARISAGYDYEPETIAVIDKLGLPPDIANPIVRKGLHELRRLINALIAEYGKPDAIRLEMARDLEMNTQRYADYIKQQKANTKANDEAAEKFGEMRRLNPHLQLSRYPSRDDKLKYRLWRDQKECCAYSGQTISLSTLFGPEIEIDHIVPYSESLDDSYMNKVVCYAKENRNKGQRTPIDAFSGNEQQWNQIVQALDRWPKSLQAKKRRFFMTGTESQQRDFINNQLNDTRYMSRVALDYLKPLGADISVSKGQTTAWMRHQWGLNNLLGDGNEKDRGDHRHHAIDALVIACIGRSFYRNLVETAKQLERQRSQLTMRDIHLDPPWPNLRNDLQQKLTEMIVSHAPHRKLSGELHEATGAGFIEGIGNVNRKVLDGGFTQVDKIIDPTVKQLVTRHLQRFDGKPKEAFANGVNVYHKDGKTPIKRVRVVQSKTTLAKLQKTKFGAKNKQGQVFKWLSYGNLHHVEILRDKETGKFYGEFVTMMEASHRARGIGKPKQAIAKTGHGEQYEFMMALHINEIVSVEHERKRVFYRVQKFEREQKRIKLRLHTAATLNNDQETLADRYSTIEALMTSGLKKHRINAIGKILS

SEQ ID NO: 5297 - protein, 1102 aa, unidentified
  REGION 1..1102: note = Description of Unknown: Cas Enzyme sequence
MSYVLGLDLGPSSIGWAAVTIDENGNYKGLAKIPDGPNFMPAIGARIFPAGVERYGQGKREQTRNKTRREKRGTRRTLRRRKARRTKLIALLRTNNILPQDDAELQKLQQTDPYELRAKAIKENEQLSLTELGRIFLHLCKKRGFKSNRKAPPKKEEKGKINDAKNKFKEELGNKTPGQLWHEKRTADKFKAIKNKGGKFQGLAVREQYKEEFNRIWDNQKKIYQKNGNGSVEMKKQIESLLFDQISYKQLPSKMRKMWGRCSLMPKEFRCSLANRKAQRFRFLQKVNDLRVIKRGITRGLNDEERKKIINLLSCKDEVNLKDIRKELELADDERLNFEFDDDNTLTGNEIDSQLCKLVGKDVWLNFSEETRDKIWQEILRYIEDERGEITEIKTADEIYRICGIKSIDLKKISEIELPDGNVKFCEKVLNEILPKMSKEGLPLSDAIKAAGFKQKWDELPSLPVPDKKAGFYITNPNVATVLYQVHRLVNRLIAEIGKPEKIVIEFTRDLKASKKQRQKILKQQSERRRTKALIAEDVQKSPEWKWGKKIPPWAIEKYLLWVEQNTLSPYSGDQISVGQLFSEDTQIDHILPYSMSLDNSMSNKVVCFTAENQDKKQKTVFDWLGHNEIKWERVQNAIDHWKPQRKTRGSKKTARNSADSKLINERKWERFFITGDQIDEIYEPERYLNEAGYIANETREYLERLYNSNEAKKRVKTTKGGVTGELRKWWDLNRILGVERKIDESEENTDAQKQPAKKNREDLRHHAIDAAVIAVTEPKTIEKVTHELQRAYPRKRRKEIYVERPWKDFEEELAAAVDLVKISHRTQRKVCGELHAATHYWKETNGKYAGKYITRKFLTDLSKAEVGQICDEAIKKLVKDRIKEKGDVKGAFDSSIYLPNKEGTPVPIWKVRIWTKHTDENMIPIRGKEGEPQTVWVEKPENHHIEIFQIKENGIKRYICKIWNIWEISQRIEEYKKQEIKDKDPIVLRKHPNHPDAEFVMWLSKADTVLIKNNDKKEILARITGIGEGDERDESVDLKLWELRVNCKSTDLPTKETKDGYRLRNINDFMAMTPKKVTVDLLGRIRWAERKTGWAKCFGND

SEQ ID NO: 5298 - protein, 1031 aa, unidentified
  REGION 1..1031: note = Description of Unknown: Cas Enzyme sequence
MAVSVALVLGLDGGIASVGWALLDDEAGRIIGAGSWCFDAPEHPKDRTPLNAIRRQHRGQRRVLRRRRQRMAGLRALFAGHGLLDGAGADALRHRPGCDPWELRVAALDRKLSGLELALALGHIARHRGFRSNSKRDRGANAAPDTSQMLQAVAATTERLQGRTVAQLAAEDPDWQKRKRNRGDYARTVLRSDLEHEARRIFEAQRRLGSDHAANGLQHAYAPLAFDQLPLQDSDGKVGKCSHEPGEMRTAKRAPSFEMFRLLARLRNLRLLTAAGPVELTPDQVSLAVDSFGKELAKLTFKVLRKRLDLALGVRFDGVPPADEVRDVASRTGGAAEGTHALRAVLGEAGWRSLLPHPERLDRAAEILTFREDLDRIRIGLAETGMDEWCVNLLGDAAGNGRPLASFKGAAHISAKAARAINPGLHRGLRVDEAFAEAGYNHAARPAMEVDAIANPVARKALGQMLKQVKTVIHEHRHLFGPLGLPDRIHVELARDVGKGQEERDEITRGLEKRTAARERLREELSRHFPGTNISGDDLQRYELWKEQGGRCLYSDAEIPLPGVLAANNAYQVDHILPWARFGDDSFRNKALCATGANQKKQGRTPFEWLGGDAAAWAAFTMRVEGCKEMRGGKKGGHYLRPNAEEVEARFRTRNLNDTRYACRVLLDMLARWYPEEERGTDAADPRRRVFARPGALTSRLRQAWGLEGRKKGPDGARLADDRDHALDAMVVAACSEAMLQRLTEQVKITEASGGRRLFAGLPEPWPGFREQAHAVLDGVFPARPERRRARGKAHEATVRQLREQEGRDVIYERKAVGELNEKDLGRVKDGDNRNAPLVESLRAWIARGKPLGSLPLSPKGDPIRKVRLKGRDKEAAVLVRGGVARRGNMARVDVFEEKRPGKPVRFHLVPIYPHQIADPAQVAPPDRAVVAHKLESDWQPVASFSFAFSLYINSLIKVIRSEGAPILGYFKGLDRDGGQIEVVSPLSQQLIPKRIGSKTLMSFRKLSVDRLGRISDVPGEVRTWRGAACT

SEQ ID NO: 5299 - protein, 1660 aa, unidentified
  REGION 1..1660: note = Description of Unknown: Cas Enzyme sequence
MKKILGLDLGTNSIGAALINIPETLSDFGKEGNIEWLGSRIVPVDAQYLNKWEAGAQAETKAGARRIKRGARRLKHRYKLRRTRLIQVFKILGWLDEGFPENFKKEMNDDENFKFKISDYLPFDKSTIEEATKLLGVENKKGEFALPEDWIIYYLRKKALSEEISFTELARITYMMNQRRGFKSSRKDLKDDTVIEIKKAFELTIQNVQLKSEEKNKKGQSTYIITPDNEEIQSWEEIMYKKPEWIGRKDKYVVTWRNGKQLKPQRATNDDWEVVVVALDNEMEEQKKHPGEFFFDELTKDKNYKIRQFPVLRKRLKNELEDIWKKQIELNEDLRQLNNDKTVLQKLAEILYIAQTKANKPKLKEILSNDLLHLISDDIIYYQRELKSQKNSISECQYEKVKGVDGEIYGVKCAPKSSPEFQEFRIWQDIHNIKILQKQGVVDGFEKVDIDVTKLFINEAAKEKLFDLFDTSKEITQEHIFKELNKLTSDVKLTNETHRINMFFDADKKLLGNETKEVFRKIFRKKFINQKANTEYDYVSEGEKLLSDKQTLRNLWHIVYSISSSDETLSEKGITTGLEKYNIPPEVIQAFAKLPEIKKQYASYSTKAINKLLPLMRCGKYWSYENIHPKAKERIEKITKQGWAFEADKRTGELIKERHFDKQEEFKGLPVWMAGYVIYDRHSERLDSKKYTDPKEFNIMEKLPNNSLRNPIVEQVVRETLFVVKDVWEKYGQPNEIHIELGRDLKKNAKEREKATKNSTSNFEEKQRIKKLLYELMNDGFEQYINPNDDDLTITQVENTKFEINPNPESPVDIDKFRIWKSASGLRDADFEKTVKDEKIPKHQEIKKYTLWLSQKCVSPYTGKIIPLSKLFDPTQYEIEHLLPRGLIKNDSFDNLVIAEWDINKAKGRQLAALFIKNSNGKCSYGGKDYKLLEYSDYVEHCKRTFSRKKLQNLLASEIPQDFIERQINDTRYITKKISELLYPVAKGKTDAEEGEEKGGIVFTIGSITTELKREWGLNKEWKKIMKPRFERLEEMTGETYILENKKDRNDIDFNVKENENLDIKRIDHRHHALDALIIAATTIEHIRYLNSLNAVDTNEELKQVRRALVKGKIREFLLPWSSFTEDAKNKLEETIVTFKSYNQVVSKPQNKYTKWEDKNGKWEKVEKHQEHSRNWMAVRKSLFKEPQGVIYLKVKKDVSVLDAFKIQIERLKVENNKEKRKTASYIYDQSARPLIKDVINKIGIDVYNTEKLVAEIEKFLKKNSKKIETGKIDQNGQVKKKTVYTLGGIQFETIQIVEFVQKAGKRVSLDKDFDHKKIDKIPYAEKSRIPQALHQHLREYERKKLEDASYDWGNSKLTTAQEKLIKEAQSEAFSGEGLEALDKKNGMKIRMVTIKEDVGIKIPFKNKLVEADGNPFFVIHENIITKKRDFSSLSSYDVIKKIKAGQPIAEEREGYNTIILSTNDLVYVPTREELEKIQKGVLEENAINWNNQKKNSKRIYKVNDFSKSDIYFKPNSFATAIKSKELHTSFDDKCSRVIEYSKKSERGNSINENAVMIKEVCIKLQVDRLGNISLPSKKPTIYSTPNEQTTVNEPEAIYQSKQQQLRTFNSFEEANEADAKEMAAISPETHLQNATMLAKKVFSEELKQPMDKTLKFKEL

SEQ ID NO: 5300 - protein, 1056 aa, unidentified
  REGION 1..1056: note = Description of Unknown: Cas Enzyme sequence
MVSRIATGLRFGIDLGIASCGWAVIRQDQAEQQGEVVAMGSRTFDASETPKERTPLNQLRRTARGMRRVLRRRRERMARIRRLFAGAGLVPSSSPDALKIVDLDPWTLRAEAFNRELTGPELAVALGHIAKHRGFRSNSKHDRGANAADESSKMLKAIEESRDRLAGRTVGQMFAEDARYRYRKRNRDGNFDRSILREDQEREVRAIFTAQRRFSSRFPTEDLWDRFAKAAFAQGELQDSEDRVGYCLFEETERRAALRAPSFERFRFFSRLAALRVGPRREPERLTAGEIEAAEAQFGLTKTFTYKRLREAIGLPEELHFVGVPRGYESRDFVARSGAAAEGTASLRKAITDGAGELAWGALLDKPETLDGIARVLTFRDDLDSIRRGLDDLGLEPEVLAAVMEGVEYGRAFANFKGSGSLSVTACLRIIPGLRRGLDYAEACAAVGYDHAKRRTVDIADVKNPVARKALGEARKQVKTLIEEYGLPEYIHVELARDVGKSKEERDEIERGIEKRNKAKDKLRDEFRDLYRREPVLGSTDLLRFELWKEQKCRCLYTDDKIDPGDVIASDNSAEVDHILPWSRSGDDSFVNKTLCAAGTNRNKKGRTPHEWFGADEARWDHFVGTVESIRDLKGRKKRNLLLKDASVLEERFKDRNLNDTRYACRLLLEALKAFYPKEEPRLDADGVLRRPVRIRARPGPLTDRLRRAWGIQGLKKDKDGNRIPDDRHHALDALIVAATTQGALNRFTRQIQKEEEVGSDRDFARFPLPWLGFVAEARSWIGEDGDGRPRIVVSRAERRRARGEAHGATIRAVEEVDGKAVIYERKPVEKLTLADLDLVKGADRNGEMIGELRRWIEAGKPASAPPRKRFGGLNQRGEEKEPEHHEAIRKISLRSKKKPDVLVRGGAADRGEMTRIDVFRKQNRRGAWEYFLVPVYPHQIFDRKSWPTPPNRAVQAYKPETEWPEMGDGHEFMWSLYPLSYIAVQLADARHEGYFRGLDRSTGAINLSAHHSNDALIRGIGVKTAKDLRKYTVDRLGRRFEIERETRTWHGAACT

SEQ ID NO: 5301 - protein, 970 aa, unidentified
  REGION 1..970: note = Description of Unknown: Cas Enzyme sequence
MKKILGLDLGTNSIGWSLVDLDFDNKKGAIEGLGSRIIPMGQDTLGKFDAGVKISQTAERTGYRSTRKLYQRILIRRERLHRVLNILGFLPEHYANEIDFEKHLGQFREGVEPKISFKKNDQGSHQFIFMDSFNEMIEEFRAKGINEKLPHDWTIYFLRQKALTEKISKEELAWVLLNFNQKRGYYQLRGEEVEDDPSQSKELFELKVKEVIDSGEKVRGNILFNVVFENGWEYDRQIVKVEDWIGKTKEFIVTTSLTKNGETKRTYKAVNSEEDWIAIKSKTEQQILNANKTVGQYIYETLLANPDQKIRGKLVRTIERRFYKEELEKILETQCKFHPELASESLYSACIEELYPFNLAHQYKLKNKGFRYLFLEDIIFYQRPLKSKKSSIGNCQYEVRTYKKLIEVTEDDKSIKNEVIIKEPLKGISKSHPLYQEFRLWQFLRNLRLYRKTGIIDGKAEVDIDVTKELMKGKSDWVDLFEFLNQQKDIDQNQLINYLVKAKIIDRKEKLDYRWNYVEDKKYPCNETRYLLLSRLGKVENVEPATFLTTEIEIKLWHIIYSVTDRIAYEKALKTFAAKHELDVQSFVENFVKMPPFKSDYGSYSEKAIKKLLPLMRLGKMWRQEDVPADIAQKAKVIINLLKGIDFDKKRLSELKTDSDFSLALLKSFCDFENDNPIEGLNTYQACYLIYNRHSEVGDIERWRRPADIDDFLKEFKQHSLRNPIVEQVVTETLRVVKDIWEYYGKGVENFFDEIHIELGREMKNPAKKRQEISKTIAENENTNFRIKEILEELMNDSSIEGDVRPYSPSHQEILKLYEEGVFQNPNASYELLKLDEIEKLRKTTSPSRQEIRKYKLWLDQGYVSPYTGQVIPLSKLFTTDFQIEHIIPQSRYFDDSLSNKIICESEINQLKDNRTAYEFLKGENGRIVEMANGKSMRLFSVENYESHCNKYFIRAQQQNTPLNLSLKEC

SEQ ID NO: 5302 - protein, 1424 aa, unidentified
  REGION 1..1424: note = Description of Unknown: Cas Enzyme sequence
MKRILGLDLGTTSIGWALINEANEKSESSSIIKTGVRLVPLTVDEETNFAKGKSITTNADRTLKRGARRSLQRYKQRREHLTKLLIEKGIISSETIIAEEGKNTTFELWSLRSKAATEKISLENFARVLFSINKKRGYKSNRKAKDENDGSAIDGMAIAKELFEKKLTPGQYSLQLISEGKKKLPDFYRSDLRDEFDRIWKTQSTYYPEQLTEDLKHGLEGKNSNETWKICESPFGIEGIILKGTKTEIQEKKYELRSSALKEKVELEELAIVLQEINGQINGSSSYLGEISDRSKELYFNSQTIGQYLFNQLKGNPHSRLKNQVFYRQDYVDEFEKIWELQSNHHKELNDELKNEIRDVIIFYQRKLKSQKGLIGFCEFESKEIELKDNEGNPVLRGDGKPKKVRIGSKSCPKSSPIFQDFKIWQLLNNLEFRNKETRKKEKIQDIDEDLEIRNQLFSELSIHGSRTATQILKIVFAKPNDWELNYKDGLDGNHTVESIYKAFQKIAEDTGHDINFRDDASKIQKNTYDLFSFLNLNPEVLMFDEVSETKDYQQLPSFQLWHLLYSYEGDDSNSGNELLERLLQEKFGFSAEQVKILSQIAFKDDYGSLSTKAMLKILPFLKQGMRYNDACTEAGYNHSHSLTKEENDKRLLKDALELLPKNSLRNPVVEKILNQLVNVVNAIIKEYGKPEEIRIELARDLKKSAKERAKATTEIAAATRKHEEYKLELKKLYPFSAGVRITKKDIIKYKLYLELKENGHKTIYTNTYVPLEKLFTKDFDIEHIIPKARVFDDSFSNKTLATRQFNLDKADETGIDFMQTKFGENSNEFQTYVSTIESLYKKKVISKAKYNKLLTPKDKIKDGFIERDLRNSQYIAKKAREMLLEVVRNVTPTTGKITDKLREDWQLIDVMKELNLPKYEALDMIDIEETKDGKKIKKIRDWTKRNDHRHHAMDAIAIAYCKHNHVQYYNYLNARRDENHKEHANIIAIGNKETKENEKGKRVMIPPMPLVEFRKEVKQHLEQTLISFKAKNKVVTWNKNKIKKEKGTAFQRILTPRGQLHKEMVYGKSKVRVTKLEKVNASFDESKIETVSKKVVRAALLKRLAEFGHDPKKAFTGKNALVKNSIQIGNTDEYITDKVEIVNWEYQFTIRKAINSDNFKNEKSIDKVVDLEVREILKQRLYTFNNDAKKAFSDLDKTPIWFNEKAGIKLKRVTITGVSNAEALHTKKDHIGNELLNAKGEAIPVDFVSTGSNHHLALYQNAEGDIIDVVTSFTNAVKRSTYGVSIIPKDTSKFLDEVLANGIEDESFLLSCPPPGYSLVQSFKQNEMFLFPHPDWNGLNPIDFNNYNVLSKYLFRVQKFSKLTYGKSAVRDYVFRHHLETQLLDNKSLKDVAFRSVKSIRGIIGLTKVRINHLGNIVHIGEY

SEQ ID NO: 5303 - protein, 1375 aa, unidentified
  REGION 1..1375: note = Description of Unknown: Cas Enzyme sequence
MKKILGLDLGTTSIGWAFVNEAESDDERSSIQQVGVRVNPLSTDEQTDFEKGKALTTNADRTLKRSARRNIQRFKQRRENLIELLRENHFINDSTLLAETGNDSTFETLAVRAKAPNEKITKEGLARVLLSINKKRGYKSSRKAKNEDEGQAVDGMAIAKRLYEEKLTPGQLCFHLLKEGKRVLPDFYRSDLQDEFTAVWGFQKQFYPEILNEVLFKAIDGQGLQNTKKRFLSIYEIYTVENKGTRDEKKLQAYQWRSSAISEKLEISEVAFVLAEVNNNLSSSSGYLGAISDRSKELYFNKETIGQYLYKQLVANPHTRTKGQVFYRQDYLDEFNQIWEKQKEFYPEMTDKLRNEIRDIIIFYQRRLKSQKGLISFCEFESKQKEVTVDGTIKLKTIGSRVIPKSSPLFQEFKIWQNLSNVIIKNKKTKKFFDFDLETKELLFKELNIKGNLKKTEVLRLITDNPQEWELNYSQLEGNRTNEVFYEAYQKIIHLEGSEGFDFKKLTALEAREAVGSFLKSFGVNTTILEFDALNEGAEFEKQLSFQLWHLLYSYEGDNSTSGNEKLLQKLKSKFGFKREHAIVLSNIVFQDDYGSLSAKAIRNIFPFIKENQFSDACALAKYNHSKSVTKEENEKRILKEHLELLPKNSLRNPVVEKILNQLVNLVNTVIKDPTMGKPDEIRVELARELKKNAKERADMTQSINKAKDDHEKYRKIIQSEFGIPNPTRNDLIRYKLYLELEPNGFKTLYSNTYLSKEKLFSKEFDIEHIIPKSRLFDDSFSNKTLEVRQVNIDKGEDTAFDFISQKYDTSRLNQFTATVESFLKDSKISKAKYKKLLMQGSEIGEGFIERDLRESQYIAKKAKEMLFEVCRSVVATSGSITDKLRADWDLVNVMKELNLEKYRSLGLTELVEMKDGNKKEQIIDWTKRNDHRHHAMDALTVAFTKHNHIQYLNNLNARKNENNKKHSNILAIEQKETCKDENNKKRFKAPLENFREEAKKHLENTLISFKAKNKVLTRNKNKTHGNKTVQIALTPRGQLHKETVYGLSKSGVVKEEKVNGKFDKDTIKKVSNPIFKEALLKRLEEFSMDAKKAFAGKNSLDKKPIWLNETKTKQVPEKVKTVTFKNQYTIKKEISPDLKINKVTDEGVKRILQNRLDEFNGDAKKAFVNLEQNPIWLNEEKGISVKRVTITGVSNAEALHHKKDHLGNLILDDKGSTIPIDFVSTGNNHHVAIYRDEKGNLQEQVVSFYEAVARVNEGLPIINKTPTEGWDFLFTMKQNEMFVFPNHDFNPAEIDLLDSENYSLISPNLFRVQKISTKSYVFNHHFETSAVNNDTLKNKKMSKVTYNFIQTPSNLESIIKVRLNHLGQIVKVGE

SEQ ID NO: 5304 - protein, 1000 aa, unidentified
  REGION 1..1000: note = Description of Unknown: Cas Enzyme sequence
MLRLGLDIGTNSIGWWLYIIADNQPSQILDGGARIFSDGRVAKTGASLAVDRRNARAMRRRRDRYLQRRAMLMKRLAGAGLMPADPVEAKALEVLDPFALRAMGLDNSLPLTHLGRALFHLNQRRGFKSNRKTDGGDNERGKIKDGSARLDQAMMAAGARTYGEFLHKRRAAAPDPRHVPAVRTRLTLRQGEGSDKPEPGYDFYPDRHHLEEEFQKLWSAQLHHHPELTEDLGALLFETIFYQRPLKPVKVGRCLFNDELRLPKAHPLTQQRVLYETVNNLRIAAPGQTARPLRRDERDTIILALNSKEPLKSPGGTKLTLKSLAKTLKLHNSEGFTLETTARDAIACDPVRASLAHPDRFGPRWSALPEADQVILIDRLRNDADRDALVAWIRETHSLDAPRAESVADAPLPEGYSRLGETATRKILAALKSDVLTYDKAVAACRLHHSDLRTGEVLDALPYYGKTLDRHVIPGSQDPAHDDIARYGRITNPTVHIGLNQLRRLVNKIIEVHGKPDQIVVELARELKQSEDQKLEDSKKNAQNLRAAQLRSEKLGQLGQPDTGANRIILRLWEELNPNDAAHRFCPYTGKQISAGMLFSGECDVDHVLPYSRTLDDSTSNRTLCLREANREKRNQSPWEAWGGSAKWAQIEDNLKYLPDAKRWRFAPDAMAKYEGERDFLARALVDTQYLSRIAREYLDALFTEGGHVWVVPGRLTEMLRRHWGLNSLLTDKDRGAGKSKNRLDHRHHAIDAAVIGATDRGLIQKIAKLSSQHRENGLEEFAASVPPPWETFRADIGSQLARIIVSHRADHGRIDPAARAKGRDSTTGQLHNDTAYGLTGETLKGVPLVVTRKPINSLTPAMLEKIRDPQLVQGLSAATKGKEGKDLSAAVRAFSDRPGPYQGIRRVRVIEPVTVIEIKDQNGKAYKGYKGDSNQCYEIWRLPDGKLKAQVITTFEAHRNTPARRPHPAAKRVLRVSQRDMVALKHSDTELICYGHLDF

SEQ ID NO: 5305 - protein, 1288 aa, unidentified
  REGION 1..1288: note = Description of Unknown: Cas Enzyme sequence
MRRILGLDLGTNSIGWALIEVDGNNNPTHIIGMGSRIIPLGADDRDQFQKGQAISKNKDRTTTRTQRKSYDRKQLKKSDDFKYSLKKLLEKLNIFPTEELLKLPSLDLWKLRSDAVSESENIEPEQLGRILYMLNQKRGYKSARSEANEDKKDTDYVAEVKGRYAELKDRNQTLGQYFYKELSMAHQNNTYFRVKEKVYPREAYIEEFDTIINVQKTKHSFLTEDVIHSLRNEIIYYQRKLKSQKGLVSICEFEGFETTYFDNKTHQYKTIFTGPKVAPRTSPLFQLCKIWEIVNNISLKTKNPEESKYKWSDRIPTIEEKQEIANHLSINENLSFVELLKILNLKKEQVYANKQILKGIQGNMTYATIHKVIGDSSYLKFDIQTVPSKHSAILVDKKTGEILDDKESLELDSALERKPFYQLWHTIYSIKDLEECKVALIKRFDFSEAVAEQLSRIDFNKQAFGNKSNKAMRKMLPYLMLGYNQSDAECFAGYNRKLTKEEKANNVIDEPLKLLPKNSLRQPVVEKILNQMINVVNAIIDKHGKPFEIGVELARELKQSKDEREVSDKQNGFNKKLNELIITKLTELGLPTTKRYIQKYKFIFPAKDKNWKEAQVANQCIYCGKTFNLTEALSGDNFDVDHIVPKALLFDDSQTNKVLVHRSCNSTKTNQTAYDYISKNGNGALNEYLKRVDDWFKRGIISYGKMQRLKVSFEEYQERKKNNKETEADKRIWENFIDRQLRETAYIAKKAKEILEKVCYNVTSTEGNVTAKLRGLWGWDDVLMNLQLPKYKEIGQTQIKEWTSDHGNRVHQKEEITNWTKRDDHRHHAIDALVIACTKQGFIQRINTLSSSETKDEMQRQIDVAKKKYGNDYDEKILAEKNEIVKGHKEKNNTLNSYLISQRPDNYTTNYIEKEAEKILVSFKAGKKVATISKFKAKGKNETTGVIVPRGALHEQSVYGKIKVIDRDKPLKYLFENSKKIVNLKVKNLVETRLTENENNSKSALSTLKKNPIFLNREKTEVLEKASCYSHATVLKYKLKSLKASQADDIVDKKVKDLVKKRLAQFGNKEKEAFKDTLWFNKEKQIPILTIRLFARPDADNLQAVKKDENGKEIGFVITGNNHHIAIYEDRDNQLVQHSCTFWDAVERKKHSIPIVIKNTSDIWNQSLDKEYPESFLDKLPADSLSLKYSMQQNEMFILGLSQEEFAEAFKNKEKSLLSKHLYLVWSIAEGDYWFRHHLETKNSELKKTDGAKESKRYYRLSTKGFIDLNPIKVRLNHLGEIVKVGEY

SEQ ID NO: 5306 - protein, 1272 aa, unidentified
  REGION 1..1272: note = Description of Unknown: Cas Enzyme sequence
MKKILGLDLGTNSIGWALIGTNEEGRPEKIEGLGSRIIPMTQDVLDTFSGGKPLETQTAVRTGYRGVRRIRERHLLRRERLHRVLNILGFLPEHYAGQIDFNKHYGQFFDETEPKLPYNNREFIFKSSFDEMLNEFKQSQPHLFYKKPNGSETKIPYDWTIYYLRKKALSQKIEKEELAWIILNFNQKRGYYQLRGEEAEDNPNKLVEFHTLKIVDVIADEKPNSKGDIWYSLYLENGWIYRRSSKTPLFDWKDKVRNFIVTSDLNEDGTIKTDKDGNEKRSFRAPGEDDWTLLKKKTEQEIDNSDKTVGTFIYDTLLNNPSQKIRGKLVRTIERKFYKQELISILKKQIELQPNLFNQDLYSDCVRELYRNNESQQIGLSKRDFVHLFVEDIIFYQRPLRSQKSSIGNCTLEKRPTKDENGKIIRDKSGKPVLFSLKAIPKSHPLYQEFRVWQWISNLKINKKEDDSDVTTQFLKSDEDYVNFFDFLMQQKEVGHKDILKYFLAPLLKEQYPNAKGTALNKEVDSEISKYRWNYVFDDSKEKEEDKSKKYPCNNTGYEIRRRFEKVDNLRAGFLTTEIEYHLWHIIYSVTDKNEYKSALETFAKRYSLDEYSFVANFEKFPPFKSEYGSYSEKAIKRILPLMRIGKYWNWDAIDLKTQDRINKIIDSEYDENIKIRVRDKAINLTKPNHFQGLPIWLIGYVIYDRHSEADIAGKWNSVEDLEKYLEDFKQHSLRNPIVEQIITETLRVVRDIWKKYGQGAKDFFNEIHVELGREMKNTSEDRKRLTEQVSKNQATNLRINALLIELKENSDGSLPVENVRPYSPMQQDALRIYEDGVLNSKFDLPEDILKISKTAQPSKSELLRYKLWLEQKYRSPYTGQIIPLGRLFTEDYQIEHIIPKSRYFDDSFNNKVICESAVNQLKDKQLGLEFIKNHYGQHVELGFGKTARVFTETDYIEFIKDYYSKNKIKRQNLLMEDIPEQMITRQLNDTRYISKFISGLLSNIVRQDKGDDGINSKKLIPGNGKITTILKKDWGLNAVWNDIILPRFERMNQLTNSSAYTYWNEQHQKFLPANFSPIDSKRIEKKRIDHRHHAMDALVIACMTKDHVNLLNNQSANSENSRYDLQNKLRHKSKETWFDKQTNKQIEKDVFKEFKKPWDSFTIDSKNALDNIIVSFKQNLRIRTKATNNYQKWIEKDGEKVKEKVKQEGINWVIRKPLHKETVSGKVDLKRIKVPEGKILTATRKSIDTTFDLKAIESITDTGIQKILKNY

SEQ ID NO: 5307 - protein, 1459 aa, unidentified
  REGION 1..1459: note = Description of Unknown: Cas Enzyme sequence
MTKLGLDLGSSSAGWAINENGQIRDKGVIIFDTGMSKGQSGGYVSPTRERRIARSKRNLIRARKYRKWELLKVMVSAKLVPLCETELEIWSKYVKGRVRKFPENEKFLKWLSCDFSYEGGTKYKNPYQLRVNAIEGNVSHHEFGRALYHIVQRRGYKDIGEIDKETEKQIERRNENGFKDALNKHGSIAKALNKEFLGKGIRARNQYPLREEYEHELIKICKLQGYSVEKEDNEEYKDEFVKSLWKAIIWQRPLRIQKGNIGKCTLESTKRRCPVSHPIFEIFRAWQFINTIKFYDENNEKQPLTLEMRQVLFNEKFLQKESNFKFEEIRKFLDKKFKIAKKYNYPIDRRTGEYDTSVSGMPICKGLITIFGEKVKQDLGEIEQFHIGNAPNTVDSYSIYDIWHILFDFDDQNLEKFGIEKLKIENKIITRKKKEFTISPLIELKGKLQQGYADLSLKAMCKIIPFLKDGYLYNEAVVIAKIPELLGEDWQNKKAEILKILEVSTNTYIQSKTIVNITNNLIDKHKGLPNAEKFAYKDFSYSLQDDDIVEVRNACTSYFGENSWKAERNKEEIINKVSSEYQEYFFDTKRAFRGTQTQTEIFKGNLSEKKISLNGELYHHSNRENAFNKNLETSWETGEKYLPTDRKTGIEILPTPLIDSIRNPMFNKSMSVLRKLVNELIISGKVDQDTDIVIELARELNDNNKRAAIERYQNLRRNNREKYRLFLEEFKSNVKSNLNIEESVPVFEMWAEQTFQSTQDENGKIIKNKDHIEILGEKDALRRYELWFEQKGQCMYTGKMISIAKLFSNEIDIMHTIPRSILPDNTMANMTVGYARYNRDLQVQKLPKQCNNYHKNVDGWGTSIEPRLDMWKQERDKWKRLYEDRIKPKGNEDETNKNIRIQDRHYFKLHLDYWKDKVERFEAEEIRDNWARRQLVDTQMVSKYAREFLRLYFKKVTVQKGLVTANFRKLYGFQEEDEIKSRNKHSHHAIDASVLTLIPVNSSRREQILKDYYEALENKDKNALERLRNIVKPSVDFNPQALIRDTEERTLIVNFRKDKILNQTVKKVRKRGKIQYVKDNNGKFVLDKGGNRIIKYAKGDTVRSELYAQTYLGKIKDVKRDHKGQPQREEGEWVYKNGKDEFLYVKRENIDKVKTSQKLIDAIIDPNIKELIDKQKNQLEIQDFQGNNIRHVRVKTKGGREVKERINYRSVHDYKNKFYSEAGSGALHYAIFLQRTLEGKINREMLPIASFQVAKAYKKYNKFDIDAFINDENPRYKKWDKDLLKVGQRVLVLKTDNEYGKRKESGFQQKRLYVITQFTDGNIWLKYHLSAQSKDEVMKSIKLKKDELMRYHELKHKLPEVVHDSSILDRKIQKVDYNNRKFRFDTIGNSFRLTRLMEILGREKTVMIKNELDRYKAIPSIIEIEGETELLKMSKENWNFLFEGKDFKVSLLGDLIWNI

SEQ ID NO: 5308 - protein, 913 aa, unidentified
  REGION 1..913: note = Description of Unknown: Cas Enzyme sequence
QKVAGDHTLKSIKSLFEEEIWNEFYDEIWHCFYFYSDDDKLFQKLVKNYKYSGDLNVITNIKLKEGYSKVSLKAIHNILPFLKKGYQFDKAVILGGVKNAFGKNRWKYFEKYNGDIEGETLNILKQDNKEGEAIIKIKEYLSDPINQFGFVENDPHFLHLYHHSQEVDKAEKLQSKIPFIENLRNPIVQQALYETRRLVNALIDKYQDKYGEGFYFDQIKIEMGRDLKNNKTGRQEMNFGIDENEKKNNIARERIAEYGLQPSRDNIQKYRMYMEIEKNISGPVVCPYTGKVVSPSDLLGSNNAIQIEHIIPYSISLDDSFGNKTICEANFNREKGELTPWQFYKNNPDYKLWGINKYPNADDGWNEVSERAFQVLPYRKAKRFTSKSDFHSEDFIKRQLNDSRYIAKKSVELMSHICKDVRVMPGQLTSELRHLWGLNNVLQNVKNLSNVEFDVEENKSIPYHAITDENGDILNLTRKFNKRPNTQADEILASGIVNKDVFSSKYFKIEIDTPGLLDGKYWAKLKVSDPIQIIPKFIQRPETKNIVFKGEVERGYFKNDTYGRIKTNVDDGSYWAKFEILSVKFETPNKDIRPKIKRNQVLLFGNVYGDKFKCYIYECETNLPDGKYWIIMDLNPDNVEFIRSENPKPEILNNQILISATINETGNLVADIDSKFNVKTNEKKGKYYAVLEIFTNAPELCKIENDPPKTESNQTLVEGNIWVDKYTGEIKFDPKKNRDDHRHHAIDAIAIALTEQGYLQKLSTYNAQRKEKQRQKLNSTEKFPEPWVGFGNDVSRAVNSILVSHKKNNKILTKSKKGYGVRGQLHEDTIYGKKDYCKKEEYTSRVSIDKLKFKRTKGQAVYIDDIIDAGIKMAIYKTIEEKLIDKSDKDILQKIIEQNSRISYLKTNKEIAE

SEQ ID NO: 5309 - protein, 1051 aa, unidentified
  REGION 1..1051: note = Description of Unknown: Cas Enzyme sequence
MVWRLALDMGTNSLGWAAFSLNGSSEAQELIDAGVRIFSDGREPPSNGRVGDSLAVQRRLARGARRNRDRRLKRKQQLIERLVKLGLMPEDKQARKALASLEPYGLRAAGVERVLTAFELGRVLFQINQRRGFLSNRKSDGDDDETGKIKPKIGELRKALKDETLGQWLNSQLGDGKSIRFRGEEGDLYADRAMYLDEFDAIRNRQEEHHALTSDDWTELRNGNREQGFDGIFFQRKLKPVERGRCEFFINEYRAHKDLPIAHQFRILQEVRNLQYYGENLQKFDLDVKQRERLIECLDTQKTLTFGAIRKLKNPDGSSVFPRGCLFNLETGPGDKLNGNATAVDMRKPEMLGADWDALSPDEQNDLLEILHHAESDEGLISQLIGRFLFLERQAIAVSKFKLASATGHLSRKFMMRCAAIMQETGKRYDEAVQEVWDDDGVLLHHSHRPVDQLLPRLPYYGEVLKGSVIGGKPVHFEAGQFPEQHYGKINNPTVHVALNQLRKLINRLVARFGPPAEIHVEIVRDLKKSAKVRNDISAENAKYAKANEQRSKLFKELNNGREPTGLDLKKIRLWEELGADQLTRHCPFSGRIISASMLFNGEVEFEHILPFSRTLDNSSANLTIAFRQANRLKGNRTPYEAFVNEQHAAQGMVWAEIAGRAKALPKNKRWRFDADAMDRFEKEGGFLARQLNDNAYISKLTKRYLGQICDQNKIATIPGGLTAMMRGKWHLNDLLGDHNRKERNDHRHHIIDAFVVGLTDRSTLQQVSNQTARGADDRVHIELPDISDLRHQLQDRLDSIIVSYKADHGVNGKMFNETAYGLVDEKKQDPELPGYTLVTRKKIESLSEKEIGAIRNRGWRVRVQADVEKARATGAKLDKNGLAKVLGQFGKDNNIKTIRVLVSNQSATPIPSAPYKAYAPESFVCVDIWQVPKGKPGKWKQGEHEWQGAFWSYARCKGNMPDKNAGMINGGPIHPAAKFIARLFKNDLVELAENGHSKIMRVAGFSTTNNRIDLRPQFETDGNRGFVSINVLSRSFKKRLGVTEDGSLKG

SEQ ID NO: 5310 - protein, 1492 aa, unidentified
  REGION 1..1492: note = Description of Unknown: Cas Enzyme sequence
MTQNILGLDTGTNSIGWALIKHDFENKTGKIVGLGSRIIPMSQDILGKFDAGVSISQTAERTGYRAARRIRERSLLRRERLHRVLNVIGFLPEHYQNSIDFENRLGQFRPNTEVKLNYLRTGTGKYEFLFKESFQEMVNDFKANKQEGKVPYDLTLYYLRKKALYSKISKEELAWILLNFNQKRGYFQLRGEELDSSDSGKLKEFKELEVANLIDSGEKVEGKVLYNVIFKNGWIYDKQIVAAEEWRNKSKEFIVTTNINSEGQPVKDKEGNIKRSFKKVDSEEDWVAIKAKTEREIDTLSKTPGEYVYDSLLQNPYLKINGKLIRTIERKYYKEELKRILESQVAHHPELADIKLYSSCLEELYSRNEAHRNNIIDKDISYLLIEDIIFYQRPLKSKKSTISGCQYERRRFIKTTINPITKKEEKSTISEPVKAIPKSNPLFQEFRLLQFLLNLSIYQKEDEFGNLIDKNITSKVLKNEEDLLLLFDHLNTIKSISQKDLLKFLIKKSLLDSKDKDNFRWNYVEDKSYPCNETRHLFLTKLKNSGTNKDLVSFLTELTAVGKKSKSHFLSREIQLWHIVYSVKDKKEFEKALHKFAIRHGLNSNNFIESFKKTPPFPNDYGAYSEKALKKLLPLMRIGKYWKSEEITDDVRKRMQQIEERLLKINYNPEVFKSDKNSLLTTIADDEIPKQYLKSFISFKNKNHLKGLNTYQACYAVYERHSESENVKIWKSPEDIDQFLNDFKQHSLRNPIVEQVLTETLRTVRDIWKYYGKSSEGFFDEIHLELGREMKNSAKKRKTLTNRVTENENTNERIKALLTELMNDPEIRGDVRPYSPSHQEILKIYEEGVAQNPNVSHGQINEKDIINIRRSASPSKSDIIKYKLWLDQGYVSPYTGKTIQLSRLFTSDYQIEHIIPQSRYFDNSISNKVICESDVNLEKGKQTAFEFITEKGKSIIAGHRILSLDEYILHCNSYFKRTRLKLQNLLSEDIPEGFINRQLNDSRYISKLVKGLLSNIVREENETDSTSKNLISAPGAITSKLRHDWGLNDKWNEMISSRFQKLNDISESNAYGEWDSKINAFRCSVPDEIAKGFSKKRIDHRHHALDALVMACANRRHVQYLNSLNNELVKVDLQPSLMMKNKQGDYTKTFLHPWANFTGEAKQFLEKTIISFKQNLRVINKSRNKTWQWTEKNGQFKKKLVLQTKGDNWAIRKSMHKETVSGKLNIATPKGKIASATRVPLSSIKTIKHIAKITDGSIQKILLNHLKNYIDNKGRHQFELAFNQDGVINLNENIVILNNGKKHQPIYKIRFLEVGNKFPVGQSGNKKDKYVESAAGTNLFFAIYWDNKKNKRAFNTIPLNEVIEHQKQDANLPRKKRTAIPIDSSKGSFLMSLSPNDLVYLPNKEEIEYPNLVNFKNIDANMVSRVYKMVSSTGSECHFVPAFVASLIKSYDPKSKVGEFGSLNKSELSMDNLRIKESCIKLNVDRLGNVSV

SEQ ID NO: 5311 - protein, 1397 aa, unidentified
  REGION 1..1397: note = Description of Unknown: Cas Enzyme sequence
MKKILGLDLGTTSIGWALVNEAENENEKSDIVQLGVRISQLDNFDKVDKTGKVTESKNPIEDFASGKGLSPNAGRTQKRSARRNLQRYKIRRTNLIDAFKKAGIIEDSTILAEDGKNTTFQTLAIRAKSARQRVELDEFARVLLTINKKRGYKSSRKAQTEEEGQAIDGMGIALKLSEEKITPGQLCFQMLKEGKKVMPDYYRSDLQVEFDLVWKFQRQFNKELFTDDLLKELNGKGSKATWAICAKAFNLVGVKRTGKAIEKKIENYKWRVEGLCKKLELEQIAIVLQEINNNLNNTSGYLGAISDRSKELYFGKQTVGEYLYKQIIDNRHTRLKSQVFYRQDYLDEFEQIWETQKQFHSELTVELKEELRDIIIFFQRKLKSQKGLISFCEFESKQVDIEIKGKKKIKTIGSRVCPKSSPLFQEFKIWQNLSNLEFKNKKTKAVERWIEYGLEEKLILFDELNVKGNLKKKEIFKLLNLDVDEWEMNYTELQGNNTNRILYAAYQKIFTHSGHEIDLSKMGATEVKEALTSVFEMLNIDTKIFEFNSELDGNEFEKQKSYQLWHLLYSYEGDNSNTGNDKLYEKLKQHFGFEREYAQYLVNLKFQCDYGSLGSKAIRKIYPFIKDHKFSDACALAGYNHSHSVTKEENDKRELKDRLELLPKNSLRNPVVEKILNQMVNVINAIIEDPKLGKPDEIRIELARELKKSAKERDEATRNINAAKSKHEEFKKILQTEYFIPNPTRNDIIRYKLYKELSFNGYYTLYSNTYIPPHKLFSKEFDIEHIIPKARLFDDSFSNKTLEKREVNLKKGDETAYDYVKNNFGEKELADYVERVEKFFKEGKSALDKPISKAKYKKLLMPGNEIGEGFIERDLRESQYIAKKAKQMLLEISRTVVSTSGSITGRLREDWGLINVMKELNMPKYRSLGLTEVEERKEGKKVEKIIDWTKRNDHRHHAMDALTVAFTKHNHIQYLNNLNARDDKYGKKKENIYAIEQKETFKNENGKRLFIAPMPDFSVDAKKHLENILISHKAKNKVVTQNKNKITGSNVLQTALTPRGQLHKETVYGKQKKYATKSVKIGTAFDEILIRKVANLSYRKALLQRFIENDNNPKKAFGGKNSLSKTPIITEKNETIPEKVKLVWLEDNFTIRKDITPDLKLDKIIDNGVQQLLKKRLDEFDGNAKEAFTNLEKNPIWQNKEKGISIKRVTISGVSNADSLHCKKDHLGNVILNKTGKEIPTDYISTGNNHHVAIYRDEKGNLQEEVVSFFEAVARVNAGLPIINKQHEKGWEFLFTMKQNEMFVFLSDNFDPSEVDLMNPDNYTIISPNLFRVQSLSSKYYIFNHHYETKNADGTLFKTKKQLSGVSYYFYQNEKWLEGIVKVRINHIGKIVKVGEY

SEQ ID NO: 5312 - protein, 1393 aa, unidentified
  REGION 1..1393: note = Description of Unknown: Cas Enzyme sequence
KVEHLTLREKLLSGFSLFLSFRYAPFQKERKAILSHLLIELTLLLKSNYYNMTKILGLDLGTNSIGWAVVEKDNQQFSLVDKGVRIFQEGVKIEKGIESSKAAERTEYRSARRIKYRRKLRKIETLTVLSEYGYCPKLTLVELNNWRYQKIYPTNVAFRHWWLTDEATEKHPYFFRNLAVTQKLNLKNETDRYKLGRAFYHIAQRRGFLSNRLESTRESDGKVKQSIAKISEQKGDLTLGQFFYNKYLKGEKIRDTYTHREAHYLDEFNRICEFQNIPNEIKGKIYKAIFYQRPLKSQKGLIGKCVFETNKQRCSTSRPEFEEYRMLCFINNIKIKTPNDEKLRVLNSEERSKILPRFFLQREHFDFDDIAKQIAPKKQYKYFKDRNKNPEDWLFNYSMKTTVSGCPVSARFKEMFGAKFIDENFVMQTDEKGLISKIISDTWHALYTFDSDEKLLEFADKHLSLNEEQKKQFLKIRLKQDFASLSLKAIKKIIPSLREGLIYSHAVFLANMDEALPQDVWSNTEDREIVKNAIKGIIENQNDDKTIVNTVNGFITNARRNNESWSNEAKSIYFEDIEKSVVSVFGTNKFNSFSEEKKIGLVTNAQELLEKNFPNDYRIGKHIKVKRIDEAVTDFLIDNFGDINADKIYHPSAIETYKPAKRADDGKLYLGSPMTSSVRNPMAMRALHQLRIVVNELIMEGIIGSDTKINIEMSRGLLNANERAGLKRWQDSREKLRKVYASEIKEHFNDDYEPSEDEILKYQLWEEQKNVCLYTGDKIALSQFLGSDPLYDIEHTIPRSLSYDNSQVNKTLCENEFNRSIKKNSIPFELDNHSAILERITHWIEKVENFEKEIQKTIKQTKGASDKEQKDRAIQKRHQLSYERDYWRDKCKRFTMTDVPNGFKNSQMVDIGIITKYSRLYLKTIFDKVYTVKGNTVADFRKIWGLQNLYKKKERINHVHHCIDAVTMACMDKSNYETLAKFYHDSENAFLLRNEKRPYVKKPWDTFTEDVLNIENEILISHYTPDNLPKQSKKKLRKRGEIQYNKQGNPIYQQGDTVRGSLHKETFYGAIEREEINKKTRELEKQIKYVVRKPIASLEDSNIKNIVDERVREIVFEARNQDKVLKKQIEALEKERKMAEENEEPEIDRKIAEIKEQIVLLYSLPNKNGSPIPIKKVRLFQPTVTNPLHIKLQRDKSGKSPKDYKEHFHVANDGNYLMALYEGFDKNNTIIRDFKLINNIDAGEYLKFSVQNELKAQGIDKLEGLIPKTKTVKKTEVPFRAAIKTGTMVILWENSSEEVWELGMDDVKRRLYKVVGLSEQRIKRPSNKIDYYATIVLRFHQEASMASDLKTLDGVFNQGEQYMAQRKMNHNQFNALIEGIDFRISPLGKITKL

SEQ ID NO: 5313 - protein, 1521 aa, unidentified
  REGION 1..1521: note = Description of Unknown: Cas Enzyme sequence
MFSQRNNPYCELLQIVGANIEIINKRKPKAMKKILGLDLGTNSIGWALVEQDFEKKQGKILGMGSRIIPMGADKIDYEKGVGITKNATRREKRTARKMNKRYKLRRNKLLVILHELGMLPEQFQFKNGIPDPNKIQDLELLPIKKGSMQLVSLVHYKLRVRALGINKDDKPLQLKELGKIFYQFNQLRGYAGGNNDEDTNKKKGDDAIEETDKKKYEVIVQKVEIIKVDKSDSIFKVRGGANKGQEMNKYNATIIFEEEKLEGETELQNLEDKIGKVEELEIRIKRNKNGETSYVFALPKKTNWRKQMETTEEALKNENLYISQLIVNDLEKNKWTKIRNRVFLRHRFKEEFDAIWDFQYDNNPKFKKIVDDKDKMEQIINYIFPERDRSMPETEQSKKSKKEEYRAKAREKGLKFIIRDQVIYYQRPLKSQEELISTCQFEKSEKVVANSYPLFQEFRCWDQINRMYITSKQEIWNERKKKDVFKYTDRFLTNEQKQEIYNRLQTQKQLSFSEVAKIIALKNNKTEYLNGLNVKAKLKGCDTTITIRKMMGEHFEGLYEKDNKIVSKIWEALFNNANNGNEYDPSSIKVSSIIEVLKPLTGNEIATEYALRLSQKVRFPRKYASLSKKAIKNILPLMRLNPSDVLEKVRQTFNLVQTGEIPDDFPLDKLEDYVISFIEQNPKAIEMGGLMYAFASSLVYGKHTKETIKPQVKDYHEIKYMERNLRNPIVSQITNETLQVIKAIWKKYKINPEELEIRVELARDLKNSANEREKIHNGQIKNRNINEIIKKTLIELKQEPSQGNIDLYKLWSKQNIEDYPAPKKANEPTQEEIQKLRLWEEQCCISPYTGKPIQLSKLFSPERLFDIDHIIPKTRYFDDSLSNKVVCETHINEEKSNRTAWEYLSQQNSKYKDQDGNFEIFTIENYMSHVNRIFYGRKKKNLLLEKIPTNPVERQLKDTQYISVAIKNELAKIVGSDNVKSSTGEVTSFLRSRWGLKKLFMELTEERFKQMELWDIDPETGSPRTEWIQKYFDKNKEKHIYEIKNWSKRYDHRHHAVDALVVALTKQSHIQRLNNLNKHLQDQLKKRKDEFKLEVKEGETILEAYFNLEVKRREAIQKKLESSRYFEMPFDDLIMQTKKLLQSMIISIKPKNNLGIQTDKEGKIRTDNNGNKLLKIRGALHQETNYGKTKDPNTGILRDTKTIGLTALSIKDIPQIIDDVLKREIDSHRKEYKSMKDAFTGEELQTFNENRFQKKIPEKLKPPVYKVKVWYNSKATEESTLQRLYDSNEKLSVVTGDNYLFLVMELNGKRVFDIASLYDSADIAKRALKEKVENFKQRICEEYRLSYGESHKIKGKPQENPDKVLFTLQKNDLVYLPKNADDPVLEFNNEKLRDWLSDTVNKRNFNKRVYKVVMFTGKNCKFIPHNYANEISIPKDLTENQKEILKRKHADKKGIPKAELNFVEFGSFRDCSPYEMGEQFIKESVKVVSKGKRKTIDLPLIQDHCIKIEVDWLGNISKSKK

SEQ ID NO: 5314 - protein, 986 aa, unidentified
  REGION 1..986: note = Description of Unknown: Cas Enzyme sequence
EFTSLDLTKASYLVYGRHSELAQAIFWDSPKQIIDGLHQELKQHSLNNPVAEKVLLEMMQIVAAIWEYYGEKKEDSEEYKKLFDKIHLEVGRELKKSVKEKEADSKRQSGNRAQNKRLRQVLEEFLTGNPYNANPINSDHFERLKIVEEGAEHTKNNDKDFFKGKSYTKKDIDDILKKQSISKTDFEKYKLWIEQGYRSPYTNKTIKLTDLFDGKKYNIDHVFPQASITNNSRSNKVVCELEVNKLKSDQTGREFVNNPKQRKVSCEAHKSESNKYGEVNIVNDETYVGIVKAQFSGNKRLILLSKEIPKGFTNSQLNNSRHIARKAMELLSHIVREPEEVEFRSKNVLPVTGAVTGKLKEAWKFDQVWKELVAPRYIRMNELTQSELFGSWQKSKSGHDYFDCNLDETIREKDESYNIKRIDHRHHALDALIVALCTEEHVNYLSNINADKKLEKYGDQRKLEAYRKKLKRKIMFSKPKKENPKENDWYYLKPGEARQKDAENSREDSVLTKSYFYKESDLFHNDYKKIILTALQNTIVTFKQNLRVINKTVNRYNNIPDKNKFAEQKGNEAGNKTNWAIRRSLGKDSYYGKKIIGGEEKVVIRKDLDTTFSRAKILTITDTGIQKILLHHLKEFDTFKLSFNEAIFHYDALMEKPEFEAIVKDGENKFNSTDDFISHLRVNNYKFNKIDYSMLNVFIDKVSKRDFRNETTADGKNNHVIVEHPEIAFTLEEIEEMNKPEKIRWLNVNEKGEGKYHTPIKKVRISRGFGKQRKVSENELSVKSKQYIVSDEGSNLYLGFYERAYFDDAGKEVRERKFKDIGLMDLIETLKQYKDNRNHPLPDKLYDDAQNEFDRKFILSPLDLVYVPIKEDIENPALVNFKNLTQVQMNRVYKFVDGNEDIANFIPYSSAKPIWRFHGKKNKEIFKELSANQKINISESELIQNEFGLGSQQNKNQNMIDGKTQIKKICWKLKVDRLGNITGIIK

SEQ ID NO: 5315 - protein, 1161 aa, unidentified
  REGION 1..1161: note = Description of Unknown: Cas Enzyme sequence
MKVLGLDIGSNSVGSAWIDTEKKAIKLGVSVFPAGVEESGGKRGDPKNQARRSQRQQRRSIGRRAKLKRRVRGYLIEKHWMPSDNEEVQKWESLNPWILRRDGLHRELDEYEFGRILLHLAQRRGAWWFDEEPDEVEDRKRKGKDPKEIPGTVEYTKTVMKEKGAETFGELIAIEYERRTTITKNKKIRNERVRNRTDVFGQKVSEFVADRHMILAEFAKLWEVQGNFDGTLAGELTDDCKKELYNREKTSTWRCQGVLFSQRKAYWNVGTLGRCELEPTDMKCPKADMYAQEFLVLTSINNIRITPRTEPSRKLWPGEREKVIGAFRKQKTASEGTIRKALGIDKGVKKAHYTLNTDGDKFRVNGDWFYSQIVCSIFGEDAWKEFDGKKKEAINRAIFKFDPGEDSDVEKLTAGCKEWWELDDEHARKFIDAWRNRPKIDNRVNLSRKTIRNLLPYLRDGWSVTEARDMYAEDASHNADGLTRSRYSTEEVVVDKRIRHFQEKHTDSLPPVSGGISNPVVRKSIHEVRRHLMEYFKEYGRPDRVVIELAREARQSERVISRRMQKNKAIDALRKEIIETHRLDSSEITSTQRERAIKRVRLCKQQRGMCAYSGITITDAGASGGEGLEIDHIVPRSKGGDNSMSNLVLCYAVANQGKGNRTPIEWLSKEDFEKLEQIFRHLQGAKKSKRSEESQRTTRKDNVDMVDKRKWENLHRRTPEEGFTEEQLRSSAYAATQTSDWINKVLYGSEDRSKRYVFASRGGYTGMLRRDWGLFFDESGERSERGRKLRGDHRHHAVDAAIIAVTAQCLQRIKDSFVDFERQKENKNVKARWKTVDEPWDGFGKQVVNEYKKLKVSHRAYNRQIAGRLHKDTLYGAAVIYERHKMDDNKKGIRKGDLKRDKDGKPIVKKGMYIKTIAAIGIKQNHLGMPNGWDKLKNEYGNATIGSKKKAIRKKMLGLEDVAPGKSGVIRDIELRDKIRKWLEEHKFADMGEAKAYLKENGLIINGTPIRKVRLLWKLNEVTPPIRRKGFDYENSTPEARIKSLRFYQTQNNHHIEIRKKVTKKGKVGWSGDVISNFDAAKRIRRNNEPIVDKNEKEKGKFVMSLSRGEVVYMRHPETQEANCFVVFKIDNNKTIHFTAHTDANPASSKEKGVKLREDIA

SEQ ID NO: 5316 - protein, 1562 aa, unidentified
  REGION 1..1562: note = Description of Unknown: Cas Enzyme sequence
MKKILGLDLGTNSIGWSLIERNFEKKKENTLGEGKIIGMGSRIIPMSQDVLDKFGQGQSHSQTAERTGYRGVRRLYQRDNLRRERLHRILNILGFLPEHYADKIDFDDRKGQFINNAEVKLNYKEIEPKKFEFIFKDSFNEMVQEFKKAGQETKIPYDWTIYYLRKKSIQEKISLQELAWILLNFNQKRGYYQLRGEEVEVDNTKLVEFHALKVVSVKSEDSNKKNEIWYSVELENGWIYRRKSKNPLDDWIGKIKEFIVTTPLDENGEPKKDKEGNINRSFRAPKEDDWTLVKTKTQNHIEEYNSKNNTIGISNYVFSALLKNPKQKINGKLVKTIERHFYKNELIAILEKQKEFHSELKDEVLLENCITELYPNNYAQQNILKQKDFTNLFVNDIIFYQRPLKSKKSLIDGCKFESRVYKNKDGELETKAIKVIHKSHPLYQEFRLWQFVENIRILQREKNIDGKVSIDYDVTPEFINNIDEKVKLFKFFNDKEKIKQNLFLGQYKTEFGKKLTDKDYRWNYVENKEYPLNETRALFISKLNKHKDFDWKSYLTQENEIKLWHLLYSISDKKEIEAALDNENSKLGFPFEIRQKFKKVKPFKNEYGAYSEKAIKKLLPLMRIGKYWKYDNIDINTKDRIQKIINSEYDEKIQNRVREKSINLNTENDFTALPLWLASYVIYDRHSESDDSAQWKTPAQLEKFIKEFKQHSLRNPIVEQVVTETLRVVKDIWQHYGESKENFFDEIHVELGRDMKNPADKRKQMTESINKNQNTNQRIRILLREFKNQNIESVIPESPNQQEKLRVFEDDVLSQYSEKDLEKEIQDGVNISKVIKSIDPTSNEIAKYKLWLEQKYRSPYTGQVIPLSKLFTTEYEIEHILPQARYFDNSLGNKIICESEVNRFKDRQTAFEMISKNPGYSIELDQNKRVSLFTIEAYQNFVLQNFQRGSKKQKILLSEDIPDNFISRQLTDTRYISKIVKGLLSNIVREDDEHEVTSKNVVSVTGSVTSVLKQDWGLNDKWNEIIQSRFERMNKLVTKDGDELSTAFGYFDKKVVNGKKTGKEFFRNNVPIELKKDFNKKRIDHRHHAMDALVVALASRNHVNYLSNQHAKSKNSRYDLRNKLRRIDEKTYKGENRKYAKEFLLPWLSFPLDAKNSLENIVVSFKQNLRVINKATNRYQVKKKGKTEIKTQKGINWAIRKPMHKETVYAKVNLIQKIETIDLIIAINKDYVFVDDKIRNLISDAKRKGLSKTEIIETFQKLDGITEKSKLKKVKVFSKISAARPKKNIDESFNFNKIKSITDVSIQKILVNHLEKYNETNEKGETVERSDLAFSEVGLVEMNKNIKELNGGKNHQPIYKARVYEILGNKFAVGQIGNRKDKYVEAAKGTNLFFAIYKGENKKGEIVRQYDTIPLNVVIERLKQGDSPVPEKYYDKDEHVYDLLFTLSPNDLVYVPTEEEQENINPINLTNMSVKQKGRIYLFTDGSGTTANFIPYRTASLLFNCNLKKQKEIGIGFVIQNEYGVGSTQSKNQKSIDNIMIKEYCRKLKVNRLGKILKVGEY

SEQ ID NO: 5317 - protein, 1501 aa, unidentified
  REGION 1..1501: note = Description of Unknown: Cas Enzyme sequence
MKKILGLDLGTNSIGWALVEIDDEKRNVRILGIGSRILSMDAGEIKTFESGGKLKSLAAQKTERKTPRKLNERYLLRRDRLHCILNILKVLPKQYSISIDFETTKGYRNGKFKKGTEPKIAYAKNEFGKYEFLFKGSYKEMVDEFRVKHPNLFRLKKNGKETKIPYDWTLFYLRKKALENEITKEELAWVILSFNQKRGYVKAQGEDKKEQKEGQLFESFIGKVKSVQLTDSADGWNKYEIKLVDPDNGIELFTYMEESKSAIAQVNELKEVEIVSKYDDNGNIDSKETIYTVNEIRSLMVEEVKYTEVKNKFEVILETGWAKIETKKYFPNWKGKTRDFIVRTKYDYHGNFKGSDKDRSIKAPEEDDWTLQKLKSDAELSSYNANNNTQGVASYVYSKLLENPNQKINGDLITVIDRKYYKEELNRILECQKHFHDELKDENLYLKAINLLYPHNETHRKQLEKHLLSEKHNPFNLLISDDILLYQRDLKTKKSLIADCKYEKINFEKINSKTGKKQRTPLKAIHKANPYYQEFRIWQFIKRLRIIKPDGIDERGKIVINQDITNQVLTLGIKEELFSFLNNRENIKQSVLLKHLFGKEAKNYIWNYDEDHIEPCNTTRYEFILRFNRVEKDLYKKILTPDIEYQLWHFFYSVKRAVEFNKGIETLFARILEEKSLSTDYLPHLIKNFKPFSGYSNDYGTYSEKALKKILPFLRIGKYWNKKEVEHILNNLTHDIKEEVLLKENIQGELEDFQGLWISSACYIVYNRYSEVGDLQFWKKPDDIEDFLRNDFKQHSLNNPVVEKVLVETLNVVKDIWKFYCKTEPDDNGNPVYQKLFDEIHIELAREMKKNMNERKRENTRNNENRKNNERIIRLLKELKKENQDISPKSPYQQERLSILEKDLLSSIEYDKDNIKYKIKDKSGQITYDEISKKEIREFVNKDVTKINNGEIERYALWLEQRYQSPYTGRFIKLSDLFDREKYEIEHIFPQERITLNARYNKVISETEVNKIKGAKTAYKFIIESSGEKEIYCKAHGNKVKVLDQGSFESLVRSHFTDNRKQEVLLSEEIPDNFTNSQLNNARYIAKMAMKLLSNIVREEDEETFRSKHVVPVTGMVTTVLKREWKLNNSWNRLIQPRFERLNNLTNSNLFGSYRNINGHSVFDNRVPEELENDFDKKRIDHRHHAMDALIVALTTVSHVNYLNNIYSSDKKFDSKQKLEYRQKLKNKLTKTRKLENREKERSFIQPNQTIENGELLSCTYYYKSFESDQFHNVALEALSGTVVSFKQKKRLIRQRSNITDRWNETTNKIEPQKQEGLHIKENYNIRQRLHEDTFYGKVKLNYKTRWIDLDDFVKKLKSSRNSIDNVVNHTLKSKIEHALKDDIAIKKLKEENPRILIYDDLVATRFQNTLEAFAEVDPDKIIDKIETVTDKGIQEILKRHIKQYDPVTLAFSPEGVKELNRNITKLNNGKPHKPIYKVRLFTALGNKFAVYENEGAKNKK

SEQ ID NO: 5318 - protein, 1040 aa, unidentified
  REGION 1..1040: note = Description of Unknown: Cas Enzyme sequence
MEQIVLGLDLGEASIGWAFVKYENNQPAELMETGVRIFEPGMEGDIDAGRSESRGVTRRDARQIRRQTARRAMRKKHVHRRLVKMGLLPDGLPKLVLPELDKKLIAIHQDNFNSDHAMQLDQLLPYWLRARALDHPLSEEELGRVFFHLSQRRGFLSNRKSPKKKDEEAGKVLGGISELAAGIRQTGARTLGEYFAQLNPHEKRIRVRYTRRTMYKDEFEQIWAAQKPHHPAILTDANHDALFHAMFHQRPLKSARHLVGKCDREPRCRKAAWASIQAQRFRMRQAVNNLEILHIPTGEIFKPDQEQRETLCDLLERKGDQTWAALKKALGYKSKEVKFNLEEGGDKKLPGNQITAAMAKVFGDAWFNLPAEIQATIIHDVHSIRNPDVLETKARKTYRLDGDSARQLGETVFAPGYCSLSRKAIEKILPLLEQGLPYATARKQVYGDNFVAGEPMDLLPPVETCFDIRNPIVTRCLTELRHLVNHLIGEVARPDVIKIELARNIKQSAKRRKATLKKNRDNQRQRDKAKKSIEDWTHNQYPSRDDILKYQLAVECNWECPYTQRRIGMKDLFGDQPLFDIEHIIPYSRSLDDSYLNKTLCYADENRHVKTNKTPYEAYNGTDRWDSIIGSTRRFNGPARDAKLRRFQMTPEDVSSDEFISRQLNDTAYASRLAAEYLGNLFGGQVDANHKRRVVPVAGRITALLRREWEMNEVLGHDGEKSRDDRRHHAIDAVAIALTTSGIIQRLTAAALPYHERRRRRSRFEPIPEPWDTFKQDLAGSIERIMVSHRQNHKVFGPLHKDSNYGRPRPGTGQKFTVRRELTALKPKEVDKIVDLRVRKLVKGKVDELNVPPEKAFADPANHPTWTTKNGLTKVIHRVRIQVSASPRPLGSSEPERLVTTKSNNHMEIFTHLDEQGVVTQWDAEVVDLLEAYRRRNSREPIVQRDHGENTKFLFSLSGKDVLQLGEPGDWPEFLLVRTIAVSSTGRINISGVSLTDGRMKKDITDAKEFYQIQSLGRLQELAPEKVVVLPSGKVRRASD

SEQ ID NO: 5319 - protein, 1375 aa, unidentified
  REGION 1..1375: note = Description of Unknown: Cas Enzyme sequence
MKRILGLDLGTTSIGWAFVKEAENENEKSSILNTGVRVVPISTDEENDFKKGNSITINADRTLKRGARRNKFRFQLRRKALIDELKIINFINDKTRLTETGNNSSHELLSLRNKAVSEKLKKNEFARVLLSINKKRGYKSSRKANNSEEGELIDSMDITKKLYDHNLTPGEFSFMLLEDGKKSLPDYYRSDLENEFNKVWNHQKKYYPEALTAVLFKEVEGKNKNQTWKICEKPFSIRGIKINGNKAEKKLETYKLRKLALYEKIGLEHLAIVLQEINSEINKSSGYLSEISDRSKNLHFKNMTVGEYQYKQIAKNPHNSLKNQVFYRQDYLNEFQKIWGKQAEFYPELTNELRDKIQNEIIFYQRRLKSQKGLISYCEFESWEQEVILDGEKKNKIVGHRVVPKSSPLFQEFKVWQNLNSVRITDIKTNEVYHIEEETNKELFQTLNWTEKLTDKQFLKELGLKPNDWEINFKTVEGNRTNYNLLKTYKEILRIEGYDNIDYSNTSGNDLIEILKKCFDEIGIDRGILKFNSTLKGNPFSRQESYELWHLLYSYEDDFTRTGTESLEQKLKSTFGFKDEHLHYLINISFQDDYGSLSARAIRKILPYLEDGKLYSEACELSGYNHSNSITKKQNKERELKPKLEILKKNSLRNPVVEKILNQCINVVNAIIEDSEMGRPDEIRIELARELKNTKEQRSEMTKAIGRATKDHERYREEIKSKFGLPHVSRNDLIRYKLYKELETNGYRTLYTNEYIKPEDLFSKKYDIEHIIPKSRLFDDSFSNKTLETRESNLDKGGETALDFVERKYGKEGLEKYRKRVEELFKSGKIKYSKQSKLLMSLNDIPEDFLNRDLGTSAYIAKKAAEILLDITRRVSLTSGKITSKLREDWGLIQVMQELNWDKYEKVGLTYYKENKEGKKLPRIKDWSKRNDHRHHAMDAITVAFTKPGFIQYLSNLNAKSNKEIYKLENAYTYKDERGKRKFIAPFPTIRKESKEQLSQILISFKTKNKVTTKNKNKIKVEGKNKFKYQTIETPRGQLHKETIYGKSQYYETKLEKVGGKFDQELIELVASKTYRKALLKRLKEFENKPKKAFTGSNSLTKNPVYINGTQETVPDKVKLTWLEDRYTIRKEVTPDNFKTQKNIDKVIDEGIKAILKKRLKEFNDKPNDAFANLDKNPIWLNKEKGIKIKRVKITGVSNAEPLHHAKNHINEELKDKYGDSVPTDYVSTGNNHHVAIYKDDKGNLQEEVVSFYEAVTRKNIGLPIINKHHEKGWEFLFTMKQNEMFVFPNEENSFKPKEIDLLASSHQSRISENLFRVQKFTNRDYFFRHHLETNVDSIKETHHLSWLRTGLSGVGQIEKVRLNHLGIVVQIGEY

SEQ ID NO: 5320 - protein, 999 aa, unidentified
  REGION 1..999: note = Description of Unknown: Cas Enzyme sequence
MKKYRLGIDMGSTSLGWCALELDDNYEPVGILRMGVRIFDDGRDAKSKEPLGVTRRLKRSMRRNQDRYIQRRTDLINSLIQHNLLPSDEISRKALVPLNPYELRAKGIKEEISLHELGRAIFHLSKRRGFLSSRKVDNDEKETGKTKDAIKNLKGELKELKAHTIGEYLYKLNASVGPHQQHKKFSLRFHADGTDKAIFPDRKLIVDEFKQIWDKQASYHPELSDAIKAELLDVIFYQRPLKAQPKGKCIFELTEPRAMKANPYFQEFRILSEVNNLVLVDMEFKKAELNKEQRELVLDILSKQKTSKFKALRKKLLSKAVFDEYQFNLEDEKRKELLGNATLIMLSDEKAFGKGWDKLSSDVQSEVVTLILNDENDPEIENNLLSRLTSEYSLTPEQADYVIHLHLPAGTGNLSEKAIKKIIPFLRQGFIYSDACEQAGYKHSNPGTGEVFVDGDLPYYGKIMPTHVAFGDPNGTTDEEKYGKIANPTVHIALNQLRKLVNQLTIEIGPASQIVIELARELKLSRKQLDENNKRQFKERKHNEFIAEELESLNMPNTYSNRLRYKLWEDLNKDPLKRCCPYSGKPIERSELFSAKFEIEHILPKSKTYDDSFNNKTISLREANRNKGERSPFEAFGHSPKGYDWELIKARSQEIQSYGKRMKFTHDAMEVFADEGKLLDRMLNDTRYMTRIAREYMTYIAGPNQVWSIPGMMTSRFRHFWGLNELLSDTGKKDRSDHRHHAIDALVVGLTSRSMMQRYYKAIKKSGEDRFLEKMPEPFENFVSDTQVQVDAIIISHRPDHGNAQEAIKVGKGITAIHDETAYSVFEGEFNGKENKKGYVWTTIRKPISSFTSEKDFAKIKDNNIRLSIAQFLNEHLDSKFSEAMTKFSEEIGVKRVKLIEEKKLATLFGVKDKTGKVYKHFAGGGNYCADIYAFPEKFRDKKLEGKWKCEIIPNFAVHQHAFIPNWKQEYPMAKRIMRLQINDMVALDTENGVEYFRV

SEQ ID NO: 5321 - protein, 1378 aa, unidentified
  REGION 1..1378: note = Description of Unknown: Cas Enzyme sequence
MAKILGIDLGTNSIGLALREENEFEWFGVYTFKKGVGEGKTGEFSFAAERTKHRSTRRLYNARRYRKWETLKVLIENGYCPLTIDELNKWKHYEKGTGRVFPLNNESFNNWVKLDFINNGIQDYNSPYQLRKELITNKLDISIDEDRHKIGRAFYHIAQRRGFKSSRKSGDNEKTSVYKGSNETKTIGRNDYEDLIISKGSLGAAFAYLEDEGIRVRNRYTLRKDYLEEIEKIIELQNLETRLSESIKKAIFYQRPLRSQKGLIGKCTLEKNKHRCPISHPKFEAFRAWSFINTIKYKDENLDTFIPIAFELKKKIFDEVFFRKSKANFKFIDIRKFIEKNGGKQWQLNYKSKLDDSNISGCPISERLKSVFGDNWQDIIIETGETKKNKKGETINIKYNIEDIWHILFSFEDEEVFEEFIIDKLNLNEEQVDDLKRLWNSFPVGYANLSLKAINNILPFLKEGLIYTEAVLLAKIPSLIGVKLFNKNKHLLLDEIKEKIKTNRNAKDIVIIINNLISKYKALEIKFAFKDTSYELDNSDIEEIEENSKGHFGIKKWELKTDEERNLILDEVTKKYQDFFATSSRGYIKPPHLLEQIKDFLIVKFSLSVAEVKKMYHPSQIDIYSKEDNQLYLKSPKTAAFKNPMAYKTLFRLKDVINHLIEIGKIDNETKIVVEIARDLNDANKRNAIETYQRRREVENQEFAIAISELIKDPGFDGLADPNNKTDKDKFRLWTEQLENKDELIKTITATKDDVKKYRLWKEQNCQCMYTGKIINLTDLFNPNTIDFEHTIPRSKSFDNSLANLTVCFADYNRSVKNNRIPTDLPNFNEQSGGFSAIEPRLEKWKNRIDELDKQIDSWRFKSKIAIDKDSKDKAIREKHLRYFEYDYWKNKVDRFTREDIPQGFKNSQLRDTQIISKYAFHYLKTVFNKVEVQKGEVTSQFRKIYEVQEKDKKKSRVKHHHHAIDAAVLTLIPDSAKREEILKTSYEWEEKYKKQYTTKPFTGFKQNLITGIDKTILINNIPNKDQALTIGKKNERSRGKIVWLRDKKGNFILDGNNNKTKKVAQGDSIRGQLHEDTFYGKIRLPKYNEKGTLLRDDKGNIVLSKEYWSVKRELISNLSILKGKIKDEIIDFKLKEFIEKQISKGAELHNIVDFNNKKIRHIRIRAKAGRGFVVPSSLYELKKHVNVSKHEHKQDFFVKTGDNYAFALYISDEGKKKIVPRNLFEISKFEDKSQITDIEDLFEKAIMLTKTKNAQLYHVFQPGQKVIFYENNRYELKDLDNLSDRLYFVKVLSDAKQGLIKFQHHLEARDDKQLLLDFPEKDNEGNKKFGKAGINGFSIFSLDFIQPRLLLSANNLNCIIESVDFKMTLDGDIKFLY

SEQ ID NO: 5322 - protein, 968 aa, unidentified
  REGION 1..968: note = Description of Unknown: Cas Enzyme sequence
MKNILGLDLGTTSIGWALVNEAETKIEKSEIIKLGVRIIQYDNFSKVDKSGKVSESKNPESDFLAGKGLSPNAGRTLKRGARRNLQRFKLRRTNLIEILLKNKIILKSTALTEVGESTTHQTLNLRAKSAKEKIELTEFARVLLAINKKRGYKSSRKANSEEEGNSIDGMKIAKELYDNNLTVGQYVSNLLESGKKFIPDFYRSDLQQEFNLVWNFQKQFYLDVLDDEFYKIIEGQGQQTSRKVFLKYKGIYTAENKGKREEVKKQHYLWRSEAISKQLKIEEVAYVLVEINNNLNQSSGYLGAISDRSKELYFNKETVGENLYNQIKENKHTSLRNQVFYRQDYLDEFEQIWETQVKFHSELTSELKKEIRDIVIFYQRKLKSQKHLISDCQFERYHKAIPKSSPLFQEFKIWSILNNLEFENIETKEKKILGEEIKQDLFEKLNGSKKLTEKEILKFVDLSDKLWKTNFSEGVEGNKTNEKIYEVYKTIAENEGYGFDWDKKSSKEIENELKAVFKMVGIKESILDFNSDLEGNDFDKQDSYQFWHLLYSAQDDDKISEVDKITYGNSNAALKKKLHQKYGFKPDFGNLLVNVPLQQDYGKLSAKAIKKILPYLKSGQEYSEASRLAGYNHSNSLTKEELENRVLKDNLELLPKNSLRNPVVEKILNQMVNVINGIIAEYGKPKEIRIELARDLKKSAKERADTTQYINKATLENESVRKVLQDEFRIKNPTRNDVIKYKLYQELKNNGYRTLFTNTYIPAEKLFSKEIDIEHIIPKAKLFDDSSSNKTLAYRKVNLEKADTLAFDFIDNKYNSDLEDYKLRVESTFKSGAITKGKYKKLLLSEKNLPDGFIDRDLRNSQYIAKKAKQILEEVFEKVTPTIGNITDKLREDWDLINVMKELNLPKYRELGLTEWEERKYDKKVEKIIDWTKRNDHRHHAMDALTVAFTTHNHIQYLNNLGAINSSF

SEQ ID NO: 5323 - protein, 1047 aa, unidentified
  REGION 1..1047: note = Description of Unknown: Cas Enzyme sequence
MKDKEKIILGLDIGIGSIGWGVVNVTEQEYEIENKNGDNGIKYRISDGKIIDAGVRTFQVPQDRQKQSLALKRGLSRRSRKTTRRKAQRMKRLIRLAKEYKLIDGNFDRNLLLKPKKGDKEKKWDVWFIRKKALEGKLTDIEFFRVLYHIAKHRGFFFHTKAEELQEGDKKSEDGKAKAGLTRIKNKLAESKWETVGEMFCEVFKQTNPEFNRKRNAADKYANSIHRSLLKDEIEIIFERQKKFGNKKVTEEFKQRYIDKILMCEKGINEEKLQRMMGKCEFTGKRRSPKEGYTNERFVLFNRINILMLVDISNKDEGILLDEKQRQKIEALAYKNSKVTFAQIRKELELDNDLDKRFNLCSYKENNPEYDKKLTCKVEDGKLCFEEKHKVAIADITTGDVTYLEKEIKHFFKQRKKSWKNAKSLYVYYSDIRKQLNIGNNFRFADLKGYTKSESELGSKAKYIKQFEDGTFIELKGYHNIRKAIEKYCDKDKWKELSQNTDKLDIIAEVLVYHKSDETRMGYLKDNGIDDEAIVEAVLTLNMKQVGSFSNEALKKILKYMGKGKLFEEAKKEAGFGKIEESKQPILEPYNGFYENNPVVARVISQTRKLVNGLIRKYQKQYPIDQIHIEVATDVANSEKRKNQIRQGQNRYREAKETAAERCKEFGFDPHEGQNLLMFRLAEEQDCRCPYTNQAITLYQTGASDEVYIKDCEIDHVLPMSRSFNDSLNNKVLCAQQANQNKKNRIPYEWINETQGDEKWYEFELRVKNMRGLPYRKKQNLLRKSFTEEDKEKFMSRNLNDTRYATRHIADYLRKYFDFSCSKRDDIKEVSRIQLRSGSITAFLRHMWGLNKIREENNLHHAVDALVVACSTYGHVYLVSNLSKDIERKGKNWYKHFGRDKFKPWDSIRRDIEEAVRNIFVSRMQRHKVTSAAHKETVLSKDEPTNKRMVEVNGGYAEMGDIVRADVFIDEQGRNYVVPIYSVDIFSNKPLPNKYVPDDRKIAYNQWPEVKEEYFKFSLFKDDLISINGKMVYVSFFEATAPNVNVE

SEQ ID NO: 5324 - protein, 956 aa, unidentified
  REGION 1..956: note = Description of Unknown: Cas Enzyme sequence
MKKILGLDLGTNSIGWALIDIDHENGTVKIIGLGSRILPMDAGEIKDFESKGKIKSTASQRTDKRGIRRLNERFLLRRDRLHLVLNLLNALPRHYKLEINLTNKKGEKCGKFKDNMEPKLAYLTKQKGKKADFLFKDPYQEMLDELNIENKKGERIPYDWTLYYLRQKALKEKISLEEFAWVLLSYNQKRGYEKIEVEDKSTMDNEIIEELDLRVKDVVPKVDIDGDQYYEVYLDGNDPFVYNEFSEVQMTFKDDLKEIIKTSKVDEQGNIDNNKTEFTVVDIYTLEIKDAKYEKEDGKNKYTLTYHNGWQEVKQPKKFTFKYKNALNKHFDYIVETVYDNHGKIKNQQGKERKLREPDFSDNSSDWTLLKKKIEKEALTFNINEGYKNNDGSAKNYISPKIYNTLRNDAKNGGRTKIIGGMFQVVDRDFYREELMQIIATQKKYHANLDDKKMFEQCVRTLYPKNKSHQESLLKNKGAIQHLLIEDILLYQRPLKSKKSEIANCKYEIKYWKDIIHKQTGEILEKQEPVYHKVVSASHPYFQEFRIWDKIHNLQLIQIEKEVEGKLKTNQDVTKEYFKSEVDYLQLFIELNNRKSLNQDQFLKYCKDKFKIPYIKKKSNFVWNFPEDEELKGNETRVSFATRFKRCGFTDYSEFITQEKEMDLWHYLYSVSYKERIANSNKSATTFFNRFLDDSNITDEVKGKIIKDFSNYPKFASKYCAYSEKVLKKLLPLIRLGDKYETDSWAIEKWHLEWKGQLLEREKEILRRVENVDFNAEKIDFSEIIDTSVDLKNGEIPYPKGLFTAFRNFEKVEDFTHLNLTQASYLVYGRHSELAQAKYWASPNQIRDELHQELKQHSLNNPIAEKVLLEMMQIVADIWDYYGSGANKFFSKIHLEVGRELKKSAKEKEMDSKRQTGANSGSIRTPIPETFGQVFLNYSDTHSGIIRAVIPETSGH

SEQ ID NO: 5325 - protein, 1177 aa, unidentified
  REGION 1..1177: note = Description of Unknown: Cas Enzyme sequence
MKNTYDNYYLGLDLGTSSIGWAVTNKDYEILKYRNKSLWGIRLFDEAEKAVERRVFRSSRRRFERKKHRILQLQNVFKEEISRIDNTFFLKLNNSSMHNEDKHIDLQKNLFTIFNDKDYTDKDYYKQYPTIFHLKKALLSGLVDDSRLLYLALHNYMKHRGHYLLSGEINKLEDIKLDELIEKIHNFLCENYNTSFILNSNSLEKLEYFFKYRKNKDTNESIFGVTNSKNYLIEITGADTKQKKQICNVLANGTINFKELYDKEELKDFKEIKKISDNEVADKIINCESTLQELTELLYILKEIYDYCMLKNICKDHNYISEAIVEKYETHKRHLQILKDNLIMEDKKNLLSYQPKINNYCSYIGYYIKNNQKIRIGEKCSYEDFLKYLKLIISKPIYNENSDIQSLMSEIENNSILPKQRCNDNSVIPYQINKLEIIQILKNCQDKFAFLQEVDSEYNITNLEKIIKIFEFKIPYYIGPLNPHSHFAWVKRIEKGKVTPWNFHQKIDENQSAIEFIQRMTNKCTYIIGEDVLPKNSLLYSEYLVLNELNNLKINNEKLDNDTKWDIYNKVFLTKNNIVFNDIIKYYNQQKGIKIKKEDISGIDEEFKSSLKPYMDFKRILVDYSKVKKYRKEIEEIIKWNTIFPEGNILQKQIKNSYGNIFTDTEINQMCRIKYSGWGALSERLLSGIKYKDNEGEYLSIIDIMRSRELNFMVIYWDKDYDFVSKVSEINNKVFAQDNKVTYKTIDNLYCSPAVKRQIWQNVLLLNELKKTLKNDPKKIFIEMPRGDKENSGRTVSRKYSIEKIYKLLKEEKSVFLKQEIDSLKSNITKANNNELKGKKLFLYYIQLGRCMYSNRRIDINNLSNYDIDHIYPQSKIKDDSFDNTVLVERKINDDKKDIYPLSNTIINSNKVFWNYLLKNGLITKEKYNRLTRKSSLSIEELGKFINRQLVETRQTTKVVSQIITMIFPNSKIVFPKANITSEFRDKFGLYKCRELNNLHHAKDAYLNIIAGNVYNTVFGYDARKFFKEKNITSFNIKYLYDKDRVGAWETDITINAVTSQYCKNDILISYKNYKVNGKFYDQTIYRKGGKDLIPRNNMLSDTSKYGGFKGQQTSYFICFTYEKKGKIEKRIDIMPTLYSDKYISTRDIEKYLCDLGYNNAKLIHKFNKNSIIRYDK

SEQ ID NO: 5326 - protein, 1068 aa, unidentified
  REGION 1..1068: note = Description of Unknown: Cas Enzyme sequence
MMQWRLGIDLGTNSLGWWAFAVKKNGTRWEVTDSIDGGSYIFSDGREPSEKGRVGESKAVARRFARGMRRNRDRRKVRLRALMQELLTLGLMPKEASERQSLFQSKKNDPDPEKNNPYRLRTEALNRTLKPEELGRVLFHLALRRGFKSNRIEASDEDGGKLKERIEALKEKLSGRTLGQFLWNLYQQEKTSQGKDQNAAGIRFRGDGELYPDRLMYEAEFDAIRAHQEQHHKLSTDDWQRIRDRYILFQWPLKPVARGSCTFFPEYERHWKDTPIGHDFRIYQELNTLRWIDENHAEHALDKDQRRAILSLLLTRKSEVMFKSLRKEKRADGSLLFPECTRFNLEDVKRKGLKPHRIAVHFSTDPLLGFLWEARESDAGDDGRLDDIFELLLKESDSTLLNTSLAERFSLKPDVINALSALKLSRVTASVSREFMESVVPILRDQGLLYWEAVGEIKNADGTPLDFTLQSAEGDQDKLPYYGEILRGSMLGADPKADPVTDPEKHFGRINNPTVHVALNALRRVVNTLIRRFETNPVAIHVELSRDLKKTKKLRDEQMKRQAANQRENDRIRVLLVTHGIANPSALDIKKVKLWEELGENNLTRCCPFTDKPISFAQLMNGDVEIEHILPFKRTLDDSMANLTVAFRWANRLKGNNTPYEAFAGNRFEKDGVVWDQVRTRGDALHHKSWRFGPDAMTRFENDNDFIARQLTDNAHIAKSAVKYLGCLKGVEQIVPNRGGLTALLRGKWRLNGILSDDNFKSRADHRHHAVDAAVIGLADRSVLQAVSSATARGADDRLHIKVPDLDEKIEKALRDRVPQIVVAHKPDHGWQAPMFKETAYGFVQSERRDPDLPEHNLVVRKPLVNLTPKEYATIRDPIIREKVLACIADAKTKNQKPDKALVDFGKVNGINKVRLLIKDQTVTPVGSAKYKGYKPDSYVCCDIWRCPKGKQGKWKAGQYEWTGKYWAYADTPEGVPEASTRKPHPSAKLVARLYKDDLITYEEAGLWKVMRIAGFSTTNNVLDVRPHNMAEADRTFVSINVLGKQGLRKLRVEPDGRVRGLPPGRPA

SEQ ID NO: 5327 - protein, 1261 aa, unidentified
  REGION 1..1261: note = Description of Unknown: Cas Enzyme sequence
MKRILGLDLGTNSIGWAVVDKTNKTFELTHKGVHIFPKGVGEEKNNEYSLANQRTGYRSARRLKFRRKLRKIETLKVLIKYGFCPKLSDDELSFWRNKKVYPKNEEFRSWLLTSDNDNKHPYYFRNLVASSKLDLSIEENRFAIGRAFYHIAQRRGYKSNALDQTEDGSGAVANGINELQVLKDGKTLGQYFYSIYDSKNKIREHYTSREEDYLHEFNCICELQDFEPVFIEKLNNAIFYQRPLKSQKGNIANCPLEPMKKCIAISHPLFELFRMYQFINNIKIETPNNDKLRPLTYEEREKIISCFYVQAPFKFEKLAKVLVPNKAKIAYYKRKNEDSQYLFNYDLNTTVANAPLLGKLIKLLKVESYDKLLEKLSEKYTKSAGKTKQQVLEDVWHVLATFDSSEKRIEFAKEKLGLSQEQAETFDKTKLKQGYGSLSSKAIKKILPFLEKGIIYSNATFMANVPTVLERYGDNVNIDEIYLEIKRIVDSHREYKQRVDTVNVLVKHTRDNMLNPGDSSGIIKDYKQMIADKLENLIGKTKWNNLLLDQQNLKINQILDVFDNDTKNGSEYVKSVTVQNRINEFLHDTYGVSIDDYSKIYHPSAIEHYPKAETSSDGNIYLGSPRISAIKNPVFNRTMHRLKTLVNKLIEEDVVDSNTEIHIEMTRELNDANRRKAVQQYQKQREDLRTGYAKKIKELWDEKGLSWTQSDSDILKYQLWEEQKHICPYTGKTITLTDFLGDNPTFDIEHTFPRSKSCDNSQENKTLTCREYNRQVKGNKIPSELPKYDEIWARVQAFGWEDKVFGLKKIIEKTRNVPSDPEAKSRVIIKRHVAELEMRYYQNKLFRFQAEEIPDGFANNQLRNTQTICKYAMLYMKTVFDRVYSYKALGLKPFYEAWGVNEKTRISHINHGIDAVLAACIDRSSYDEIAKFYHEKELYERGGRAKPKTIEPWDGFSAYMNNEIHNDILVTHHMIDKLLKKAKKKVRKRGVIQRKSNGEPLVAQGNSARGSLHKETFYGAIKSDEKVKYVVRKKIADMNVNEKKKIVDLKIREIVLANEEKIKNNEKIWLNEEKGIEIKSARFFASVSNPISLKKHQHVSKDDYKQNYYVTNDVNYAIGIYGDIANEDNRKHVTSKQVVSNLDAVKKATSDTELFSSIDAKGMPLRGVLKVGTKIIVYDNNPYECNNLKIVDIAKRVYIVIGIEGTGRLKLRQHLSVSIELGDSNVDFEKLPERLLARPNKVLIERIDFEIDILGNVKFMF

SEQ ID NO: 5328 - protein, 1029 aa, unidentified
  REGION 1..1029: note = Description of Unknown: Cas Enzyme sequence
MSKKILGLDIGSNSIGWALLEEKEDNPTTIVKIGSRIFSKAVEEKTPTPKNVKRRDSRLARRVIQRRSRRKQRMLNYLVKLELLPKVLKGHSQPEIILNDLGDPYELRAKALDERVNPFELGRIFLHLVQRRGFLSNRKTMLGDMVDDPDVQAALAELEGEEDNSSENAKEETAFKKDISELRKLIHERSCRTLGEYLANLDMHTCKRNRTHNGGHIRTDRQMYIEELNLIWDKQAPLHDELNDNVLEQLEEIIFFQRPLKLRSDRIGKCSLEPSRKRARVARPEYQRFRYLQDVNNLSYFDPYTEKHLPLDESQRTTLIAYFEENNSITFPRLKKLIGLDRKYEFNLERGNKKLTGNTTVCTIKGVFPQWGDYSESDKTALIEDLLTINKKSVLKKRLIENWGLPTDLAVELCFLEFEPDHGSHSLKAINKLLPFLKIGQLYSDARVNAGYGYEVEEVEVVEKLGQPPETSNPIVNKALHELRRLVNAVIAEYGKPDIVRVEMARDLEMNTKRYKAFEKQQKENTKANDEAVDKYRDVGGRTPHLKLSKYPSRVDKIKYRLWKDQNERCAYSGKAIPLSALFSADIDVDHILPYSQSLDDSYMNKVVCYAPENRYKGQKTPVDAFSGDEEKWNQITQSIGRWDRRLHAKRDRFYKTSKDLLERDFISSQLNDTRYISKVALAYLRPLGADIDTTKGLITAWLRHQWGLNDLIGNSKEKDRVDHRHHAIDALVTACVDRTFYKGLVGAAKGHERSHPELQIKDLHVDPPWAALRADLNDQLKDMIVAHAPLRKLSGALHEETGVGFIEGVGNVMRKELSPEFKQVDKIYDGAVREAVVAHLSKHGGNPKAAFREGVTVLHKDGRTPIKRVRIVQSKTTLKKLEESKFGVRKKDGEIFKWLAYGNIHHVEITKHRESGKYSGHYVTAMEASHRAKGINMLSQPIIKTDHGVDNEFVSFLHINDLVSVDIDGDRIFYRVQVLESPSKLVLRLHTAASLGNSAEAIRKSISSLMRDYKMEKKTVNVLGNLIE

SEQ ID NO: 5329 - protein, 1017 aa, unidentified
  REGION 1..1017: note = Description of Unknown: Cas Enzyme sequence
MNIREGITLGIDLGIGSCGWALIQDKRQILAWGVRTFDVPETDKKRTPTNQLRRQHRGMRRTVKRRRQRMRAVRQLFARSNLILSDRRDALKIKYLDPSALRAAGLDRPLSGIELAVALGHIAKHRGFRSNSKRDRGTNAPKDSSAMLGAIEATRDRLKNYRTVGEMLTKDPEFARRKRNRDGDYSRSILRDDQEREVELLFSQQRRMGNDLANEELERDFLGIAFFQRPLQDSEDRVGWCPLEPEERRAAKRSPSFEVFRFLARLVVLRLDTSNGPRPLTPDEIAIARRDFGSQNGMTFKRLRKMIGLDQGVRFDGVSLEDEGKRDVVNRSLGNGCMQGTKALRDVLGESGWNSLRATPEMLDRIVATLTFREDQASIREGLAKTGVARPILDALMDGVERGDFGDFRGAGSLSARACRAVIPHLERGLVYSEACATAGYDHAKRPETKLDEIANPVARKALTEGLKQVRAIVQEYGLPERIHVELGRDVGKSPEEREKIRSGIEKRNRAKDRLIQDFRETVGAEPRGEDLLRFELWREQKGRCLYCDQPLHPEAVVRSDNSVQVDHILPWSRSGDDGFVNKSLCHATCNQDKKGRTPFEWLGKDTRWATFAASVEGVTEMKGRKKRNYLLKDATILEEKFRPRNLNDTRYAARVLSEALSREYPADGKVHVYTRPGPLTDRLRRGWGIQDLKKTLESDGEKRRADDRHHAVDALIVAATSQAALANLTRAFHEAERLGSHRDFSRLEPPWPSFVDDVRDAYSSLFISRAERHRARGEAHAATIRQVGERTGMKVVYERKPVAALTEGDLERIKDPDRNGQLIENIGAWIEAGQPKDSWPKSPKGDDVKKVRLKTTKKVGVLIREGAADRGDMVRVDVFRKKSKKGRWEYYLVPIYPHQVADADGWPSPPNRAIKGASDESEWLEIDEGFEFCWSIRPLTFLSLTKPDGEVIEGYLRSVDRNTGALTLSPHFTKQETRKGIGARTLRKVTKYHVDRLGRRFEVGHERRTWRGAACT

SEQ ID NO: 5330 - protein, 1058 aa, unidentified
  REGION 1..1058: note = Description of Unknown: Cas Enzyme sequence
MTSDATPKARAYHLGLDIGSRSVGWAAIAIDNDKPAGLLHVGARCFEAGVEGDIETGRDTSRAAARREKRLPRRQHFRRARRLYRTARVLQSLDLLPDGPVLEPGDRQTFFQLLDQEIRDRWLKDADHRQHQLLPFLLREAALTKDLTRHDFGRALYSLAQRRGFASNRREVAEDAEEEGKVYAGIGELTEEIKASGKPTLGAYFASIDPHEIKLRRRWTARDMYTAEFDAIWAAQAPRLNLTDTDRAIVNKVIFFQRPLKSQTKLIGRCELMPERRRATLALPIAQSFRLLQRVNDLLIVTPQFERIPLSAEQRLQLIAALRENGNMTFAAIRKMFNLKRTMKFNLEEGGEKSLVGDRTAAKIRPILGDQWDNMPPDRRDRLVLELSHYQKQDALRNRLSRHWGFDDDTAKDLAAVKLEQGHASLSVRAFQRLMPSLEEGTPYMTAVKDEFPHRIHHGEVCDILPPVAEACEEIRNPAVMRALTEVRRVVNALIRKYGKPAKIRIELARTVKQPRKRREEAAKRNRVNQLEGDKASAKITAQMKGVDPNNRDNKLKVRLAEECNWICPYTGKSICMETLLGPSPQFDIEHTIPLSLSLDNGYLNKTLCYHEENRSRKGQRTPWQAYGGNETRWNEILDRVKRFQGAAAELKLRRFKLTDLPNNFAESQLNDTRYTSKLAGQYLGLLYGGFWDNNGVQRIESNTGGATHHFRNAWHLNGILDDGGVKTRNDHRHHAVDAITVALIDAKSVKQLAQAASSAEEKQMARLFDAVDPPWGEGDQFVNDVRAGIEAIHVSHRVDHKLGGPLHAETIYSKPIVNDKTKQPGHHVRKALTQLTPAHIAGEDIVDPVVRLAVQTKWEALGKGKPLQVFADPANHPYLTAKDGRQIPIHKVRIRVKDKPNQVGRNATARLVSAGSGTNHHAEIIANLNAAGDETKWAVKVVSRMEAATRWAEARRNRRKPAIIKRDHGKDTRFKFSLMPGDSLLMDDKNGDQQLYRVASISQGDIEMRLHSDARLAKEIQAAKARVRITGTGDNFRKPNAQKVVVDPLGRIHPAND

SEQ ID NO: 5331 - protein, 1051 aa, unidentified
  REGION 1..1051: note = Description of Unknown: Cas Enzyme sequence
MKKYRLGIDLGATSLGWSILELNEDNSLKGLVDMGVRIFPDGRDAKTSVPLNVKRRENRDRYLQRRAYLMDTLVKYGLMPEKEKERKQLEHLDPYTLRAKALDEEISLYELGRAIFHLNQRRGFKSNRKLDSAEKETSRMKDSIKELKKNLNEAEARTLGEYLNKLNIDVPQNAQHKKRPQRIRDYGKDYNFYTDREMYSDEFDLIWKKQSEYHKELIDKKKEHLKEIIFFQRPLKPQPKGKCRFELEEFRAPVAFPIVQKFRIYQEVNALKLLDFERKEHDLTQDQRDVIIKTLLKQKTSTFKSLKKKIIKDNPEDYVFNLESEKRKDLKGDETSFIMRKDENFGNKWDDLPDEQIDEILRRIINEDNDVEVETTLETWLQENFEVTETQANNIKNIRLPQGIGRLSKKAINKILPYLKEGYLYPEACAKAGYHHSDFRTGEVYDEGNLPYYGKVMPHHVAFGKNDEDNIDEIQYGKIANPTVHIALNQLRKFINALTKKYGAPSQIVIELARELPMGKENLQKLEKEQRDNKIHNEKIREELERIEVEDNYQNRLKYKLWEELDKDNAKKCCPYTGKTILLNAVDGLYSNKFEVEHILPKSRTFNNSIANKTVSYYEANRYKKERSPYEAFGNSSDGYDWEKILERGLRLPENKRWRFYPEAMKRFENENELIARLLNDTKHMSRVALEYMSFVCGKNNVWAIPGQLTAEIRKKWELNKLLSEKNVKNRKDHRHHAIDAFVVACTDETMLKTVSNAIKISQEKFIKKLPYPFTGFSFHKMQKKNEEIVVSYKPDHGNAKAAITDDRRKGKRKTVGQLHDETAYGFVSETEDKITLSVRKPIVALNTIKKINDIADDRIRETLLNIIGNNKEKKIESILEEFSQKTGTKRLKLHVEKDKKTIIPIRNNKEEIYKYYLSGNNYCADIYCPDKDEKAGIWQIEIIPMFYAHQQDFEPEWHKKYPTAKKIMRLFINDNVAYDEDGKRRIVRVKKMSVDGRLFFIDPTISKPEKEPNATSVKQLQERSARKVGIDILGNVFDPQRHEHNRDKKE

SEQ ID NO: 5332 - protein, 1064 aa, unidentified
  REGION 1..1064: note = Description of Unknown: Cas Enzyme sequence
MTERNRDYRLGLDLGSNSIGWFVIWLGDDGKPCGLGPGGVRIFPDGRDPQSKESNAASRRVARGARRNRDRYLKRRDRLMDELVQFGLMPADKQNRKALEGFDPYELRAAGLDRALPLHHVGRALFHLNQRRGFKSNRKTDGGDDESGPIKEAVGLLKQKIKDSKSRTLGEFLFRHNQPDVHGKRAGVRARNSGTGTKVAYDFYPSRDLLEQEFAALWDEQARHHPEMTDAARAALEETIFFQRPLHEKPVGKCSLDPAAPGSPNDAGGFRMARAHPLAQRFRILQEVNNLEVGEVGRESIKLDEDQRKMLVLALSQKNKLSFDRMRTLLKLPEGTRFNLESEKRKDLKGDETAAKLSHKTLFNKDWRAMDNARRIVIAERLLGEQNEEALVAWLVAETGVEETQARRISNAMLPDGYSRLGSRAIGRLIPHMEKGMRYDEAATLEYGSHSMKKTGEVVDRLPYYGAWMPDAVLGSGDVRDDNHERWGRLPNPTVHIGLGQLRRVINAVVKDYGPPEEAVVEMTRDFKLPPQRVRELEREQATNQQKNEDRNGDIKRLGHAPNGRNRLKMRLWEELNPGDPLDRCCPFTGEKISIQRLFSEEVEIEHLIPFSKSWDDSAANKIVSMRFANRAKGQRAPFEAFGVSPTINGYPYDWDAIAQRAENLAKNKSWRFDPDAMERFGKEEGFLARQLNETGWFARLAKDYVEGLTGPNKVWVVPGRLTEMIRAKWALNSLLPDHNFTGRKNRADHRHHAIDALVTGLTDRSLLQAMASAYDEDRDRVEVPEPWDSLREDLGTALETMTVSHRMDHAASDKLHEATAYGVVANPETEDGNLVYRKAFLGLTKPEVGRIRDIRLREMVEAHVMREASAGKKLDEALASFEDAHKDHPHVRGGIRHVRILKREKPEYMVGVDNGAGRTFKAYSAGANAFIDIFETSDGKWHGEATSVFQASQKKHRPAWRDLDDAAFVMRVRKGDLLALEYEGTRTIMVAHRLDAAADRFKLAAHNETGNLDRRHGEDGDVDPFRWLMASYNKLKALGAERVRVDELGRVWRIAPEEGERSL

SEQ ID NO: 5333 - protein, 357 aa, unidentified
  REGION 1..357: note = Description of Unknown: Cas Enzyme sequence
  MOD_RES 28..54: note = Any amino acid
  MOD_RES 255..269: note = Any amino acid
  MOD_RES 316..336: note = Any amino acid
MKKILGLDLGTNSIGWAVVNADEATREXXXXXXXXXXXXXXXXXXXXXXXXXXXGNSVSQTAERTGYRSTRRLLERNLQRRERLLRVLDLMGFLPEHFASQIDRYGKFINHAEPKLAWEKDETGKYQFLFMDSFNEMLADFAQNQPQLVADGKKVPYDWTIYYLRKKALSQKITKEELAWILLQFNQKRGYYQLRGEEGEENQDKKVEFLAQKVVRVEATTEKKGDDTWYNVYLENGMIYRRPSRIPLDWEGKIXXXXXXXXXXXXXXXLEKDGSPKKDKEGNIKRSFRAPKEDDWTLLKKKTEYDIDNSHKTIGXXXXXXXXXXXXXXXXXXXXXARLNANITKMNYDRFLKFKKP

SEQ ID NO: 5334 - protein, 1009 aa, unidentified
  REGION 1..1009: note = Description of Unknown: Cas Enzyme sequence
  MOD_RES 967..976: note = Any amino acid
LYNACIEELYPNNEAHRNNIAKPDFANLFINDILFYQRPLKSKKSLIRDCPYETRFDDKGNEHPIKCIAKSNPLFQEFRLWQFVQNLKIYQREKEIGGKLYTDVDVTNEFLQSEDNFVELFDWMNDKSTIKQETLLNTYFKIKKAKGKDQYPYRWNYVEDKEYPCNETRAEILKGLGKCGIDPTFLSCKMEMSLWHILYSVEDKFEIGKALKKFAEKNHLPGNFAEVFIKIKPFKKDYGSYSEKAIKKLLPLMRLGKYWSADAIDTKTQERIDKIISGEYDETIKNRVREKAINLTDVNYFRGLPLWLACYIVYDRHSEAKEIDKWEKPEDIDKYLKSFKQHSLRNPIVEQVVTETLRTVRDIWKQEGHLDEIHLELGREMKNPADKRKRMTENILQNENTNLRIKAILMEFMNPEMGIENVRPYSPSQQDILRIYEDNALDNLSKDDPEFDFVTKISKSSQPTKSEILRYKLWLEQKYRSPYTGEMIPLGKLFTPAYEIEHVIPQSRYFDDSFSNKVICEAEVNKLKDRQLGFEFIKNHGGEKVQISQGKPVEIFSVEAYEKFVKDHYANNRPKMRKLLMDDIPDDFIERQLNDSRYISKYMKGLLSNIVREKLPNGEYEQEAVSKNLISCTGSITDRLKKDWGMNDVWNEIVLPRFKRLNELTGKDCFTAITPEGHEIPEMPLELKKGFNKKRIDHRHHAMDAIVIACATRDHVNLLNNEAAHSKKHDKSYRYDLQSKLRRKDAEGHYQEFLKPWDSFTTDARQTLENIIVSFKQNLRVINKTTNHIQHYDENGKKVLVKQEKGDSWAIRKSMHKDTVFGKVNLRFKKTVSITEAVIYPERIVNKEFKKKVQELLKQGHDAKQIKKYVEQNTDVWSDIDLKKIDVYYYTNETNDRYFATRKPLDTSFNKKKIEESVTDTGIQKILLAHLGTKGGVSELAFSPDGIDEMNRNIAALNNSKSHQPIXXXXXXXXXXTSLLLDKRATNPPSMWKRPKAQICFLLFLFPKS

SEQ ID NO: 5335 - protein, 1103 aa, unidentified
  REGION 1..1103: note = Description of Unknown: Cas Enzyme sequence
MKYRLGLDLGTNSIGWAIYSLDKDNEPQKLEDMGVRIFSDGRDPNTNEPLAVARRTARGQRKLIYRRKLRRRAVFRLLQSQELLPKNREEASKLKLLNPYVLRTKALDEKLQPYELGRALFNLAVRRGFKSNRKDSSNEQSSETKTAGKTLSQSEMCNELNKAIKDSDCRTLGEFLWKKQDEHGGIRFVPGRMHYYPLRQMYIDEFNAIREKQEPFYKDVDWDSISKEIFFQRPLKPQPRGKCQYMPDKERTFKAMPCSQKIRMLQEIRNMYYQNAKGQKIPLQEDDEEILLTLLDSKDKVPFDAFRKALKLDSACTFNLESESRTFLLGNSTAVKLRSKNRFGSLWDTFSLEEQDNIVETLITADEDKQVYDMLAKYELSDEQKSFIVKTVLSSGTTMLCKEVSEKIIQKMKSTGCPFSVAVQVLGYKYADQKVEKYDTLPYYGKVLVGSTMGGDSSKPENMPELKYGKISNPTVHVALNQTRTVVNALIKQYGKPAQIAIELSRDLKASREAKDAIKRKQNENKKRNEILNKNITDGYKIEYPNRIDRLKYRLWEELGTDTMSRRCLYCGKIISGSELYSKNIEIEHILPYSRTLLDAESNLTVAHSSCNAFKKERSPFEAFGNNPAGYNWNEILSRANQLKNPAKRSCFAVDAMETFEKESSFIARQLTDNAYLSKTARKYLQAICDDIWSVNGGMTKLLRDKWEIDSVLKRKIGTEEIVHFGLKDEQIGEYKKNRYDHRHHALDASVIALIDRSMVQQISTLNARSQTNLIEVPQMAVPRLELEEKAKNIVVSIKPDHGAEGKLSKETLLGKIKREELVEIAKIEENDIPLIKSEKVRSDFESKFAETNDIKAVRKALKDIYPQVKVYREFFVARTPIIKLKENNINDIVDSKIRALLIQFRDSHSDEKFESVLQKFTETKWNGRFIKKVRCINRVQTPIVINDKVPRYLAPEDYFAAIIWQIPPKKEGAKPTYEAQYIRRNEVGKDNKPKLDVIKAPHPAAKKLGVLHKNDYLEFSDNGRFYKCRIASFSATINNIDIRPVYAVTDCKDWIIATSENMLEHCWKFQKGHNFISVNVLFGEKQAKFITVNPIGRVFRKR

SEQ ID NO: 5336 - protein, 1382 aa, unidentified
  REGION 1..1382: note = Description of Unknown: Cas Enzyme sequence
  MOD_RES 39..42: note = Any amino acid
  MOD_RES 1362..1365: note = Any amino acid
LRDSQYIAKKAREILEELVRIVVSTTGSVTDRLRDDWQXXXXKILGLDLGTNSIGWAVVNEAETAEEKSSIVKLGVRVNPLTVDELTNFEKGKSITTNADRTLKRSMRRNLQRYKLRRENLIEILKENGFIDDEALLSENGNKTTFETYRLRAKAAKEEISLTEFARVLLMINKKRGYKSSRKAKSTDEGQLIDGMEIAKRLYEENITPGQLSLNLLKQGKKYLPDFYRSDLQAEFDKVWCSQSAFYPELLTESLRHELQGKNAKQTWAICENPFKLVGVNRSAKGRDLKIENCQWRSDALSRQMDLEKLVVVLQEINSQINNASGYLGNISDRSKELYFNHQTVGQYLMAQLDADPNYSLKNQVFYRQDYLNEFETIWETQAKFHKELTAELKKEIRDVVIFYQRPLKSQKGLISFCEFESRQIEVEIDGKKKLKTIGSRVCPKSSPLFQEFKIWQKLNDVEISIPGMRKRRLLMEEKQLLFDELNYKEKLTKADVAKLLFKNYRDVNLNFKELDGNHTQAELFKAYQTIAELSGHEINGWAKKSSGEVVEDLKAIFATLGIDNSILTFDSSLDGQAIERQPMYKLWHLLYSFEGDKSNLGNEKLIEKLHGTFGFAKEYGTILANIIFQPDYGSLSAKAIRKILPHLKDGLDYSTACEYAGYNHSKRSLTKEEIKNKILKDKLALLPRNSLRNPVVEKILNQMINVVNSIIDTYGRPDEIRIELARELKKSAKERDEMTKSINETNRLHEEYVKILQKEFGLSHVSRNDIIRYKLYKELESNGYKTLYTNTYIPKEKLFSKEFDIEHIIPQAKLFDDSFSNKTIEARQANIDKSNATAYDFVVTKYGEDFAKGEYTNRIDKLLSDKIISKTKHDKLLIKEADIPSGFINRDLRDSQYIAKKAREILEEIVHFVVPTTGSVTDRLREDWQLVDVMQELNWDKYNKLGLTEIIETRDGQRIRHIKDWTKRNDHRHHAMDALTIAFTKHSFIQYLNNLNARVQKGVNEWFDLDMVELADLSKEERSSVMYGIEKKELYRDSHGKLRFRPPMPLDEFRAEAKCQLDNILVSIKAKNKVVTRNVNKAKNKVSSSIVSKEGEKRTIQGQVTKTPRGQLHLETVYGSSEQYVTKLEKINASFDEEKIKTVAKQCYREALMNRLNQFGGDAKKAFTGKNSLDKNPIWINDQHSEMVPEKVKTVGFETIYTIRKEITPELKIEKVIDTHVRQILQARLNEYGGDAKKAFSNLDENPIWLNKEKGITIKRVTITGISNAVALHDKRDKDGDPILDENGNKQPVDFVNTGNNHHVAIYRKPKLDKDGQEIVDENGNIQYELDEKIVSFYEATSRALQGLPVIDKSYKREDGXXXXTQIIMPSSVRIYLGCKK

SEQ ID NO: 5337 - protein, 1391 aa, unidentified
  REGION 1..1391: note = Description of Unknown: Cas Enzyme sequence
  MOD_RES 1313..1316: note = Any amino acid
MEMKPYYLGLDIGTDSVGYAATDERYTLLKYHGEPAWGVTLFDAASQAAERRAYRTNRRRLDRRKQRVRLLQELFAFEIAPIDPRFFIRIAESALYPSDKAEPNAIFNNSGYTDADYHRCYPTIHHLIHELMTSDEPHDVRLVYLACAWLVAHRGHFLSQIGGDSVEAVTDFATVYDLFRDHLIDQEYAIPWSENCRPQIEAALRMRSDVRHKREALCHACFPDGKVPKGPVDGFPLNCQKLMHALAGGEINAKDLFNNPEYAEIEKFSLGSEEEVLVGIIGRLGDEGILIQDMKALYDWSLMADVLGGCNTLSEAKIAVYRQHEVDLAFLKHVMRKYCPDQFNSMFRNPTIADNYVAYSYHGTDKNTKKKCTQEDFCKYVRKTVKDIEPDADDKKPFEDMLKRLESNRFMPKQRTGDNRVIPYQLYLSELNCLLVRAERYLPFLATPDADGLTVSDKIRCIFTFRIPYYVGPLGHNGGKRHQWAVRRQAGRILPWNFERIIDMDASENAFIRNMTNTCTYLPNEDVLPKESLLYHRFTVLNEINNLKVNGTPISVEQKQSIYNNVFLTQVRVTLKRLKDYMCANGIMCPSDELSGIDETIKSNLKPWHDFHLLMERGVLTQEDVERIIERRTYSEELPRFLNWLKQEYPDLPETDVRHISRLRYKDFGRLSKRFLVELEGINLKTGEYTTIMQALWETNNNLMELLSDRYTFSHAVNEARQAYYRENASTTSERLEEMYIPVAVRRPVLRALDITGEVIKAFGHAPECIFVEMSRGGSPEQKGRRTQSRRDQLLALYEKCQDEDVSELRDQLEGMGNAADARLQSEKLFLYYLQLGRCLYTGNPIDLNSLLNDNLYNVDHIYPQSLVKDESILNNKALVTSEANSQKGNGMVPAEVRQNRLAWWEHLKKEGLISDEKFRRLTRSTPFSQDEKWGFINRQLTETAQASKAVTGLLQELYPDSRIVFVKAQLAADFRQAFKRIKSRDYNDLHHAKDAYLSIVVGNVWHEKFTKSWFLKGESYNLKPQELYTKPVVYGQRIIWDGTPMLEKVKAMLLKNNAHMTRYPYQRQGGLFNQQPVKKGPDLIPRKQGLDTEKYGGYNSATISFFVLTKFSTAQKTDVMFVPVELLIAKRYLTDPAFREVYARKKISAILGKDIQTVSFPLGERILKINTVLSLDGYRACITGSSSFGKKVRLSGQTPFAASYREERYLKRLRSLCDKLSDNPRYTFSAEADKVTADENLHLYDLYIQKFKNTVYGKRPNHPLQTLVGGRDKFMELSPTLQARVLLSIHTVFGRLPDGTDLQDIGGVKTAXXXXKRYLKTELLDRNLSAIITQAFEVRNASDYDDFYIVAKEDVDLQIDNAILFMRTIGNYLIAQGVAISLEEIEGAEA

SEQ ID NO: 5338 - protein, 1675 aa, unidentified
  REGION 1..1675: note = Description of Unknown: Cas Enzyme sequence
  MOD_RES 55..75: note = Any amino acid
  MOD_RES 127..1218: note = Any amino acid
  MOD_RES 1261..1280: note = Any amino acid
  MOD_RES 1408..1459: note = Any amino acid
  MOD_RES 1502..1516: note = Any amino acid
MMLLNLFGNIVNIVAKVFKRNLAWATLKTRLSLWKNAIKQSNSAQHIFSCRADTXXXXXXXXXXXXXXXXXXXXXIRFRLRNEPCGIDALRKNEQVFIIEFTRKQTILATTPSIIYIHAIVIAQSGXXXXXXXXXXXXXXXXXXXXXXXXXXXXXXXXXXXXXXXXXXXXXXXXXXXXXXXXXXXXXXXXXXXXXXXXXXXXXXXXXXXXXXXXXXXXXXXXXXXXXXXXXXXXXXXXXXXXXXXXXXXXXXXXXXXXXXXXXXXXXXXXXXXXXXXXXXXXXXXXXXXXXXXXXXXXXXXXXXXXXXXXXXXXXXXXXXXXXXXXXXXXXXXXXXXXXXXXXXXXXXXXXXXXXXXXXXXXXXXXXXXXXXXXXXXXXXXXXXXXXXXXXXXXXXXXXXXXXXXXXXXXXXXXXXXXXXXXXXXXXXXXXXXXXXXXXXXXXXXXXXXXXXXXXXXXXXXXXXXXXXXXXXXXXXXXXXXXXXXXXXXXXXXXXXXXXXXXXXXXXXXXXXXXXXXXXXXXXXXXXXXXXXXXXXXXXXXXXXXXXXXXXXXXXXXXXXXXXXXXXXXXXXXXXXXXXXXXXXXXXXXXXXXXXXXXXXXXXXXXXXXXXXXXXXXXXXXXXXXXXXXXXXXXXXXXXXXXXXXXXXXXXXXXXXXXXXXXXXXXXXXXXXXXXXXXXXXXXXXXXXXXXXXXXXXXXXXXXXXXXXXXXXXXXXXXXXXXXXXXXXXXXXXXXXXXXXXXXXXXXXXXXXXXXXXXXXXXXXXXXXXXXXXXXXXXXXXXXXXXXXXXXXXXXXXXXXXXXXXXXXXXXXXXXXXXXXXXXXXXXXXXXXXXXXXXXXXXXXXXXXXXXXXXXXXXXXXXXXXXXXXXXXXXXXXXXXXXXXXXXXXXXXXXXXXXXXXXXXXXXXXXXXXXXXXXXXXXXXXXXXXXXXXXXXXXXXXXXXXXXXXXXXXXXXXXXXXXXXXXXXXXXXXXXXXXXXXXXXXXXXXXXXXXXXXXXXXXXXXXXXXXXXXXXXXXXXXXXXXXXXXXXXXXXXXXXXXXXXXXXXXXXXXXXXXXXXXXXXXXXXXXXXXXXXXXXXXXXXXXXXXXXXXXXXXXXXXXXXXXXXXXXXXXXXXXXXXXXXXXXXXXXXXXXXXXXXXXXXXXXXXXXXXXXXXXXXXXXXXXXXXXXXXXXXXXXXXXXXXXXXXXXXXXXXXXXXXXXXXXXXXXXXXXXXXXVLSKYNGDKSDTYPVPAQWRQEMYGYWKKLRENNLITEEKFRXXXXXXXXXXXXXXXXXXXXRQLVETRQSTKAITALLQERYPETEIVYVKAGLVSEFRHEYGLLKSRTVNDLHHAKDAYLNIVVGNIYHERFNRNFFRIDQEYSLNTKQVFGRPVYVNGICFWKGESDLGRIKSIVQQNHIHVTRYAXXXXXXXXXXXXXXXXXXXXXXXXXXXXXXXXXXXXXXXXXXXXXXXXXXXXEKDPEATAKEAVEKVLGKAVDRIELPIGARKLKVNTVFSVDGXXXXXXXXXXXXXXXISPLAALKIDANSELYLKRLESFINKKAKNKGLKIQQTYDKISAEENIKMYDLFQSKLSSYPFFKRPANISDAVEKGKERFESLPLEDQVTVLEQILLSFGRSGGGSDLKLIGGVAKAGVPKMSSSLSNWKKNYTDVRIIDQSASGLFEKQSVNLLELL

SEQ ID NO: 5339 - protein, 1338 aa, unidentified
  REGION 1..1338: note = Description of Unknown: Cas Enzyme sequence
  MOD_RES 10..844: note = Any amino acid
  MOD_RES 915..927: note = Any amino acid
  MOD_RES 1153..1159: note = Any amino acid
  MOD_RES 1198..1214: note = Any amino acid
VTFIKKRTTXXXXXXXXXXXXXXXXXXXXXXXXXXXXXXXXXXXXXXXXXXXXXXXXXXXXXXXXXXXXXXXXXXXXXXXXXXXXXXXXXXXXXXXXXXXXXXXXXXXXXXXXXXXXXXXXXXXXXXXXXXXXXXXXXXXXXXXXXXXXXXXXXXXXXXXXXXXXXXXXXXXXXXXXXXXXXXXXXXXXXXXXXXXXXXXXXXXXXXXXXXXXXXXXXXXXXXXXXXXXXXXXXXXXXXXXXXXXXXXXXXXXXXXXXXXXXXXXXXXXXXXXXXXXXXXXXXXXXXXXXXXXXXXXXXXXXXXXXXXXXXXXXXXXXXXXXXXXXXXXXXXXXXXXXXXXXXXXXXXXXXXXXXXXXXXXXXXXXXXXXXXXXXXXXXXXXXXXXXXXXXXXXXXXXXXXXXXXXXXXXXXXXXXXXXXXXXXXXXXXXXXXXXXXXXXXXXXXXXXXXXXXXXXXXXXXXXXXXXXXXXXXXXXXXXXXXXXXXXXXXXXXXXXXXXXXXXXXXXXXXXXXXXXXXXXXXXXXXXXXXXXXXXXXXXXXXXXXXXXXXXXXXXXXXXXXXXXXXXXXXXXXXXXXXXXXXXXXXXXXXXXXXXXXXXXXXXXXXXXXXXXXXXXXXXXXXXXXXXXXXXXXXXXXXXXXXXXXXXXXXXXXXXXXXXXXXXXXXXXXXXXXXXXXXXXXXXXXXXXXXXXXXXXXXXXXXXXXXXXXXXXXXXXXXXXXXXXXXXXXXXXXXXXXXXXXXXXXXXXXXXXXXXXXXXXXXXXXXXXXXXXXXXXXXXXXXXXXXXXXXXXXXXXXXXXXXXXXXXXXXXXXXXXXXXXXXXXXXXXXXXXXXXXXXXXXXXXIIKYKCWLEQKYRSPYTGKQISLSKLFTSAYEIEHIIPQSRYFDDSFSNKVICESEVNKLKDNQLGFEFIXXXXXXXXXXXXXQGETVEILSIDAYENFVKEHYFKNRGKMKKLLLENIPDDFIERQLNDSRYISRLIKGFLSNIVREKDSNEEYEQEAISKNLIPCNGAITDRLKKDWGMNDVWNSIVLPRFQRLNQITGKDCFTTTNGEGHEIPAMPIELQKGFNKKRIDHRHHAMDAIVIACTTRDHVNLLNNEAAHSKSNINRYQLQRKLRKYEKVIIDGKARDVPKEFLKPWDSFTTDAKNTLXXXXXXXESSIKHQTIRNTLTIKRKKFLLNKQKVIVGQFVNPCTKXXXXXXXXXXXXXXXXXPSRIIDRELKNKILSLKSAGKTTKEIKKEINLSKITVYYFTNETNDRYFATRKPLDTSFDKDKIENEITDTGIQKILLAHLATKSNNPELAFSPDGIDEMNRNIKILNGGKFHQPIYRVRWYEK

SEQ ID NO: 5340 - protein, 1594 aa, unidentified
  REGION 1..1594: note = Description of Unknown: Cas Enzyme sequence
  MOD_RES 20..38: note = Any amino acid
  MOD_RES 258..261: note = Any amino acid
  MOD_RES 643..646: note = Any amino acid
  MOD_RES 1101..1483: note = Any amino acid
  MOD_RES 1549..1552: note = Any amino acid
LRFLKKLIGESKWRKRKKFXXXXXXXXXXXXXXXXXXXKWTKIRNRVILRQQYINEFNAVWEQQAKFYPFLNNCSQDILEHILNYIFPGESDTQKQLRKDGLKNGLKYIIEKQVIYYQRPLKSQSDLIGKCQFEKEEKVIPISHPLFQEFRCWDQINRLYVTSKKEVWSERKKKNVLQYINQYLSDDEKKTIYNKQQSQKQVGYNDVAKIIGLKSDNTEYLNGLNVKAKLKGCDTVISIQKILDASGIQNANIEAIWXXXXEGSEYDPSSKRVQSIVSALPENIEDDLRLGTALKLAQTIKFPRKYASLSKKAIENILPLMRLNPQSQEIPEIVKYNFNQIQHLLETGEAIEDYLLNDYIIEFVENNPNALEKGGLMYAFAASLVYGRHTKENVKPQITNYHDIKYDREREENLRNPIVSQIANETMQVVKAVWKNYRLNPDELEIRVELARDLKNSAQERDKIYKSQIKNRKINENIKKRLIELNQEVNERNIELYKIWSRQENPFDKDGKPISRPKFKNENAPTQDEIEKMNLWEKQQFISPYTLNPIPLSKLFDDRLYDIDHIIPKSRYFDDSLTNKVVCETNINEEKNNRTAWEYISQQNSTLGICSLEKYLEHVNKNFFGQKKRNLLAEKIPSNPVNXXXXNDKGFFPCQLFVEDLRKNKWTKIRNRVILRQQYIKEFNAVWEQQAKFYPFLNNCPQEILEHILNYIFPGESETQNQLRKDGLKNGLKYIIEKQVIYYQRPLKSQSDLIGRCQFEKEEQVVPISHPLFQEFRCWDQINRLYITSKESIWSEKKKRDILQYTNRYLTDEEKIKIYKKLQSQKQVGFSDVAKIVKLKSDNTEYLNGLNVKAKLKGCDTVISIQKLLGASGIQNANIETIWQAIYDNVHEGSEYDPSSKRVQSIVSALPEKIEDESRLDLALKLAQTIKFPRKYASLSKKAIENILPLMRLNPQPQEIPDIVRYNFSQIQHLLETGEAIEDYLLNDYIIEFVENNPNALEKGGLMYAFAASLVYGRHTKENVKPQITNYHDIKYDREREKNLRNPIVSQIANETMQVVKAVWKKYQLNPDELEIRVELARDLKNSAQERDKIYKSQIKXXXXXXXXXXXXXXXXXXXXXXXXXXXXXXXXXXXXXXXXXXXXXXXXXXXXXXXXXXXXXXXXXXXXXXXXXXXXXXXXXXXXXXXXXXXXXXXXXXXXXXXXXXXXXXXXXXXXXXXXXXXXXXXXXXXXXXXXXXXXXXXXXXXXXXXXXXXXXXXXXXXXXXXXXXXXXXXXXXXXXXXXXXXXXXXXXXXXXXXXXXXXXXXXXXXXXXXXXXXXXXXXXXXXXXXXXXXXXXXXXXXXXXXXXXXXXXXXXXXXXXXXXXXXXXXXXXXXXXXXXXXXXXXXXXXXXXXXXXXXXXXXXXXXXXXXXXXXXXXXXXXXXXXXXXXXXXXXXXXXXXXXXXXXXXXXXXXXXXXXXXXXXXXXXXXXXXXXXXXXXXXPNQETGFDPQKIDLLDSKNNALISPNLFRVQKIASKNYFFRHHLETNVAEPAKLKGITYKPQLGLXXXXLFIKSKRHSTDYRSCFTRRNRKTSQKTCQRHYEGSFFWGKSH

SEQ ID NO: 5341 - protein, 1358 aa, unidentified
  REGION 1..1358: note = Description of Unknown: Cas Enzyme sequence
VKTFEAGLTARFFFLVSFINFETLTINEMKKVLGLDLGTTSIGWAIVEQAENNDEKSSIIRAGVRVNPLSSDEIGSFEKGKAITTNSLRTQKRSARRNLQRYKQRRDRLVSVLKEHGWISESSSLTEEGIYSTHSTYALRAKAVEEAISLEDLARVFLMINKKRGYKSSRKTVGTDEGHLIDGMTVAKKLVDTGQTPGQYCLQLLKSGKHQLPEFYRSDLMGELDAVWKYQSIYYPEILVPDFREQISNKSKTNVTKMFLDRFGIYTADNKGKDKKLQEYQWRADALSQKLESEVLSFVIAAICGDIYNSSGYLGAISDRSKELLFKNKTVGQYIYEKLSSDKTYSTRNEVFYRQDYINEFNKIWEIQSAYHPEMTESLKKEIRDLIIFYQRNLKSQKGLINFCEFEQRDISVVIDGKTKIKTRGCKVAPRSSIIFQEFKIWQTLNNISISGPGICGSRKLEIEEMELLAKELSFKNKISSSDVLKLLFDSTKGYEMNYKTIEGNNTLYCFFKKYLEIIFASGHGEHDIDKMKADEIIQTISEVFNAIGINTSILEFDSSLPKKEYEQQPLFKLWHLLYSYECDKSNTGDESLVEKIGQICKTTPEYSKIIASISFTDDYSSLSHKAISKILPYLKGGNSYDVACAYAGYRHSKNSLTKEEIENKHLLDRLDNLPKNSLRNPVVEKILNQLVNVVNAISDEYGKPDEIHIELARELKQNAQQREKASQEMASRTKENTKIAEILKTEFGLQYIRKTDIVRYKLYEELKPRGYKTLYSNKYIAPEQLFSKDIDIEHIIPQALLFDDSFTNKTLEFKDVNIEKGRMTARDYVVSKYGNDGYESYILRVEDLFKIGAISKAKRNKLLMTQNEIPEDFVNRDLTCSQYIAKVAKEMLESYVKTVVPTNGSITARLREDWQLVDVMKEINMPKYEKAGKTYISEDVYGHRTQRITDWTKRNDHRHHAMDAITIAFTKPAHIQYLNNLAAKSDKSSSIYAIQQKETIKAADGGRVFLPPMPVNVLRAECKAQLESILVSIKAKNKVVTRNVNVTKCKSSNKKTTSLTPRGPLHKEQVYGLRHLYNTVWLPIGGKMTMDVVETVSSKDEREALIARLSAYGGDPKAAFTGKNALNKNPIYLDAGHTKSIGQKVKCTIIKTVYCIRKEIDANLSVDKVMDSKVKEILKTRIAEYDGNQTKAFANLEENPIWLNQEKGIKLKRVTIAENFDLVAIHNKRDKHGDLLTDNNGYAIPNDYVNLRNNHHIAIYKDANGNLQEYVVSFFEALNRINAGLPVVDRDFKKSEGWDFLFSMKINELFVFPNPEQDFFPEEIDLMDENNNLIISQNLYRVQKLTNGDYCFRNHLE

SEQ ID NO: 5342 - protein, 1362 aa, unidentified
  REGION 1..1362: note = Description of Unknown: Cas Enzyme sequence
MKLGDIMTKKEQPYNIGLDIGTGSVGWAVTNDNYDLLNIKKKNLWGVRLFEGAQTAKETRLNRSTRRRYRRRKNRINWLNEIFSEELANTDPSFLIRLQNSWVSKKDPDRKRDKYNLFIDNPYTDKEYYREFPTIFHLRKELIINKNKADIRLVYLALHNILKYRGNFTYEHQKFNISTLNSNLSKELIELNQQLIKYDISFPDNCDWNHISDILIGRGNATQKSSNILNNFTLDKETKKLLKEVINLILGNVAHLNTIFKTSLTKDEEKLSFSGKDIESKLDDLDSILDDDQFTVLDTANRIYSTITLNEILNGESYFSMAKVNQYENHAIDLCKLRDMWHTTKNEKAVGLSRQAYDDYINKPKYGTKELYTSLKKFLKVALPTNLAKEAEEKISKGTYLVKPRNSENGVVPYQLNKIEMEKIIDNQSQYYPFLKENKEKLLSILSFRIPYYVGPLQSSEKNPFAWMERKSNGHARPWNFDEIVDREKSSNKFIRRMTVTDSYLVGEPVLPKNSLIYQRYEVLNELNNIRITENLKTNPTGSRLTVETKQRIYNELFKNYKKITVKKLTKWLIAQGYYKNPILIGLSQKDEFNSTLTTYLDMKKIFGSSFMENNKNYNQIEELIEWLTIFEDKQILNEKLHSSNYSYTSDQIKKISNMRYKGWGRLSKKILTCITTETNTPKSLQLSNYSVLDLMWTTNNNFISIISNDKYDFKNYIENHNLNKNEDQNISNLVNDIHVSPALKRGITQSIKIVQEIVKFMGHAPKYIFIEVTRETKKSEITTSRGKRIQRLQSKLLNKANGFKPQLRKYLVPNEKIQEELKKHKNDLSSERIMLYFLQNGKSLYSEESLNINKLSDYQVDHILPRTYIPDDSLENKALVLAKENQRKADDLLLNSNVIDKNLERWTYMLNNNMMGLKKFKNLTRRVITDKDKLGFIHRQLVQTSQMVKGVANILNSMYKNQGTTYIQARANLSTAFRKALSDQDDRYHFKHPELVKNRNINDFHHAQDAYLASFLGTYRLRRFPTDEMLLMNGEYNKFYGQVKELYSKKKKLPDSRKNGFIISPLVNGTTQYDRNTGEIIWNVGFRDKILKIFNYHQCNVTRKTEIKTGQFYDQTIYSPKNPKYKKLIAQKKDMDPNIYGGFSGDNKSSITIVKIDNNKIKPVAIPIRLINDLKDKKTLQNWLEENVKHKKSIQIIKNNVPIGQIIYSKKVGLLSLNSDREIANRQQLILPPEHSALLRILQIPDEDPDQILAFYDKNILVEILQELITKMKKFYPFYKNEQEFLASNIENFNQATTSEKINSLEELITLLHANSTSAHLIFNNIEKKAFGRKTHGLTLNDTDFIYQSVTGLYETRIHIE

SEQ ID NO: 5343 - protein, 1125 aa, unidentified
  REGION 1..1125: note = Description of Unknown: Cas Enzyme sequence
MTDRISLGLDIGVASVGFSVLDIDKGKVIELGARLFNATVAAGNQDRRDMRGSRRLLNRNKQRRKDVSKLFQEYGLLDNFDRDNFHTAFNNNWNPYELRVKGLTKQLNKEELADSLYQIIKRRGISYALKDADANEDGTDYSSSLKINSQELIEKTPAQIQLQRLNDYGKVRGKVIVGDDIDDQKVLLNVFPTNAYEKEARQIIATQQQFYPEILTGEFVKEYCQILTRKRDYFVGPGNEKSRTDYGIYKTDGRTLDNLFEELIGHDKIYPDELRASAASYTAQLFNVLNDLNNLRILSYEDGKLTQIDKEKIIAEIKNNTTVVNMLNVIKKVTGCQKDDIKGFRLNEKDKPEISSMPIYRKAHKDFLKVGIDITDWPIDFIDRLSFILTLNTENGEIRKQINKRLVPDFDFLNDDLVQLIIDNKDSFDIKTNNKWHRFSLKTMNKLIPTMIERPVEQMTLLTEMGLIKKDTKRFEGNKYLPYKEIANDIFNPVASKSVREALKIVNAVLKKYGHIEYIVIEMPRDKNLDEERKQIADFQKKNKKIKDAAFNAFVKAVGSKKNVKIALSKNRKLQMGIRLWHQQQGIDPYNGEEINANDLISNPDKFEIDHIIPQSISFDDGINNKTLCFASMNQVKGQKTPYEFLNEGHGQGYAKFKAIVSKNKNFSKAKRDNYLFEENVSNIETRKRFLSRNLVDTRYSSRVVLNSLQEFFHEKSDDTKVTVIRGKFTSNMRKHWHIDKTRDTFHHHAIDASIIAATPFLRMWKKGSTIFPTKINETSIDIETGEILDDKNFDKVMYEEPYSGFISEIMNADDRIKFSHQVDKKMNRKVSDATIYSTRIGKLSKDKKDAEYVVAKVKDIYSVDGYENFKKVYKKDKTKFLLYKYDPRTFSELEKIVIDYPDKIEKVQTNGKIKAVDISPFELYRRDNGMVRKYSKKTGPAIKQLKYLDKKLGSHIDITPKNANNKHVVLQSLKPWRTDVYLNHETGEYEIMGIKYSDLKFNKNEGYGIKKDKYLKIKNIEGVSENSEFMFSLYRKDRIKVQDMETNESVELLFWSRNFSNKKYAELKPISQIDNDKVLPIYGRGRLIKRLIPKNCKIWKVNTSILGDTYYLEKESNYPQKILD

SEQ ID NO: 5344 - protein, 1253 aa, unidentified
  REGION 1..1253: note = Description of Unknown: Cas Enzyme sequence
MQRTLGLDLGIASVGWCLFDDDAEGNPIRIRDIGSFVFDQIENPKSGITENIERRQKRLLRRQRRRRVRRLADARALFQEEFHLDFFSVLAGEKQHVSPFDIKKKGLTEKLTPEELTIALYHYLKYRGYKSNRKIDGGDESDKKILSGISSIRNQIDARRKSGESLYITQYLVEQMAARPKEAQRIHNTASDFFLTVSRDMYLEEINALLDRQIAFGVIDQSFKTRYIDLFTRQRDFSEGPDVSSKYHVSIEDKIGLCAFDGQKRAPKDSLTSSRFVLLSSLNNLSYKTNAEEGYRRFTPSQIVELEKMALEKKETTYASLFAKIGVVPFRIKGLALSRKEYRSVFAKFCADEKISNGNISSEQYEKLNRLLVEKTFGKAFFKNSELVYGLRKAILSLREPKKTVFCDDEQFYDDAAVILLLNKTDARIQKACQEKGYPSEVEAEILKQKNVAKTIDLSLPIARLLIPLLEEGNTYDKAMAQIGYNHSQSQHAEKIGFMPDIDTALKNAGLRLTNPVVKHTLVQLRNILNAISEKYGCPDHFSIELARELGKNFLDRKGIRNTQLDNQENNIEIKTKMLEKYPNHFHTIFDISKKRQDVLRYKLYLEQRGMSPYTNHPIAESDLFDDNLYQIDHILPYSKSFDDSYNNKVLVETKENQNKKNQLPLEYLADEKPLRDFLTATPSLPREKVARLLAKDISDDFTAKDFEDSSYIATLAKNLITYYFLPENASCFCTSGRITEKLRQLWGLAGKTHSFRSSYEKGYSAKFMSDYAFDSFEENEKENGLTFHFIYREKEPFDVVISKRSAPKGRILSTEDERLNRSLDLFGENAAYFRDRFHLVYHQAFRELYSAIHYESVNENSSERREAGEVVLGAVLNEITKDINLKDRSNDLHHALDAAIIGCVSHKIILRLTKFFQTHENLVDPTTGEIDPKIRLDPPYRDFASEVLARVYERDQAKLLTILNSLVPYQDEPATFQSAHVLLPTRTPEKNISGAISKETIFGKDEKTGQIIKRVPVGKLAKASDLDGLIDKDGGNKAVYDACVAWLAMPKSTRPPFPRLAKKGSLVRSVRILQPTSASKEVDLSNGRYADNSSNIRVNVYQKKDGDPRLYFVPIYYYQLTREKIRKEQIAKVQAGKLAPEKVLPEAQYSLMWSQAEDGTAQISQSDLNEHYKLVACMPRYSLIEIHMGSRSCLCYSGGASSGKLEVYSVLGDDFDLHAASIVGEKAERNRITVSTISSLKLRSISVLGRVS

SEQ ID NO: 5345 - protein, 1703 aa, unidentified
  REGION 1..1703: note = Description of Unknown: Cas Enzyme sequence
RNNPYCDLLQIVRLRYNKILKYITVMKKILGLDLGTNSIGWALVEIDHENRIVRILGLGSRILTMDAGEISKFESGGKLESAAAQKTKDKTNRKLNERFLLRRDRLHCVLNLLETLPSHYQVSIDFENDKGYRSGKFKKDIKEKLAYVKDENGKSQFLFNNSYNEMVSEFKEKNSSLFYKKKNGNETKIPYDWTLYYLRKKALVKEITKEELAWITLSFNQKRGYEKTIGQDEKKQKEGELSEIFVGKVTSVNEVGESGGLKTFEIVLVDENDNEIYRYKEECLAQITFKDDLKEVEKISKYDADGDIDPQNTVYIVKEIRKIKIVDVKYTDRKNKENLIFEVVLSTGWIKEQQSKYLPKWKDTERDFIIKTTYDIEGNRILKGSDKGRNINIPKDEDWTLLKLKTETALSSFNAKNKTVGVASYIYNELLKNSNQKIKGDLVTVIERKFYREELEKIFECQKQFHPELRDVELYKKAINLLYPHNESHRKELEKFLDNEKIIPFSKLIADDVILYQRDLKSKKSLISNCIYEKERFIKIEKKTGRKYQEPLKAIHKANPLYQEFRIWQFIKRLKIIQYEVKNENEILVNQDVSESILTNENKENLFEFLNNKEYITQSALLKYLGLSDKEFKWNYEAEHKEPCNETRYNFILRLKRIKGFDWKSFLTFKTEYRIWHFFYSVKKQDEFSKGLKTLFEKLVNENNMSLDFKDDLVKNFTSFGGYANDYGTYSEKAIKKLLPFLRIGKYCSDDDILEYKSRIDSILTRVNSINSKDHINSIVDDEISKGTINSFWGYKSISDFQGLAIHQACYLVYNRYSEVGDLQYWTTPYHIENYLRNEFKQHSLNNPVVEKILVETLQLVKDIWIYYGVKNGLDENGRIIYDKLFDRIHIELGREMKKNAKERDRESRKNYENQKANERIIELLKELRNENTDIKVKSPFQQEKLRILEEGVLSSIEYDKDSTIYNLKNEEGNITKKEIREIISKEISKISKKDFERYRLWLDQRYQSPYTGKLIKLSDLFNREKYEIEHIFPQERITLNALYNKVICETEVNKEKRALTGYQFILASNGSRTIKCAAHDNKEIDILSANAYEKLVKLNFTDKRKQEILLSKEIPENFTNSQLNNSQYIAKMAMKLLSNVVRDENEDSFRSKNVLPVTGVITSRLKQDWQLNDAWNELIQPRFERLNRLTNSNFFGNFEKRNGHNVFINRLPEGLSNNFDKKRIDHRHHALDALVIALVTENHVNYLNNIYSMDSKEDKFEHRVKIKNKLTYNKKDDDGEKSRYFLPPAQYKRDGQIVDFAYEFADIHKNIFKDIALEALQNVIVSFKQKSRIIKQRTNKIRKWDDSESIFKIVTQEKLNNKENYNIRQSLHKATFYGKVKLENKNKIVPINVAINQYDMIIDNNIKSIIIDLKEVKRLSNQEIIKLLEEKYPQMKIYEAYVATRYDNFLESFANIPADKIIATIDAVTDTGIQKILINHIGKTKNVKEDGSFTYQPDIAFSYDGVKELNKNIKELNGNKNHKPIFKVRIKSPLGTKFSVSDEGEKSNKYVTTAADSNLFCGFYENEQGERKFTVPTLRETIENLKQGNPPCKDVIFDEKTQEKFELIFVLSPNDLVYLPYDNESINAVNIKNFSKEQINRIYKFRDASINKEGGLQVNFVPFAWANMIFKKDKNSPKILLENGKELQGEVALTSDKDKSQN

SEQ ID NO: 5346 - protein, 999 aa, unidentified
  REGION 1..999: note = Description of Unknown: Cas Enzyme sequence
CEFEGFLRKGKDGKEYFVGPKVAPKSSPLYQLSKMWENVNNIKVGSKSGGEIEISTEQKQAIFQHLDNNEKLTVSDLLKILQLDKKNCYINKQIEKGLIGNITKHAIRQCFGNSIQYNHLLSLNLSTVETDKTRYLIDKKTGEILTEKTIQLIDAHVEKEPFYQLWHTIYSIQDKQECSNALQAKFDIEPAIADKLANIDFGKFGFGNKSAKAIRKTLPYLMQGDKYSEAMSYGGYEHSDSLTKDENLKRKLLEKLKPIEKNSLRQPIVEKILNQMVNVVNAIIEEYGKPDEIRVELARELKQSKEERNDTDKAMSKRQRENENITKRLAEYGLKATRNNIVKWRLYEEIDNEEKKLNAICVYCGQPISLTEAIKGNDVDIEHIIPKAKLFDDSQSNKTLAHRHCNKNKKDMTAYDFMKSKPTAVFEAYINRVNELYANHVINKAKRDKLLMPEDKIPDNFIDRQLRESQYIARKSREILQTVCHNVWATSGAITAELRHLWGWDDITMNLQLEKYKQLGLTEIVEWESEHGKNKHQKEVISGWTKRDDHRHHAIDALTIACTKQGYIQRFNTLSAEKTRDDMKAIVEQRSVAFNEKRSLLERYIISEQPIAVSDVEKAVANILISFKSGKKVAVVGTRKIGKLGSKKVIQKGIIIPRGQLHEQFVYGKIQTIDEKKAIKYIFENHELIFKPYIKILVEERIEAHQGDIKRAIASLKKAPIYLDKEKEIVLEHASCYKTEYVIKYPVDINFNKVDKVIDGNIKKILQQRLDKFGGKAKEGFKDVQLSNKTIIKWYEDEGLERPINSVRCFTGLSAVVPVKKDQEGKDIGFVKPGNNHHIAIYTDKDGNRFEHVCTFWHAVERKKYGIPVIIKNASEVWDKIQMQPECTYPESFLEKLPDVHFKLELSMQQNEMFVLGLTSEDVRISIEANDYRPISDKLYRVQKLAEKNYMFRHHLETQLVDDCNAQSSNRFINIRSLGSLFSLNPYKLKVDRLGNITT

SEQ ID NO: 5347 - protein, 1472 aa, unidentified
  REGION 1..1472: note = Description of Unknown: Cas Enzyme sequence
MAKKYLLGLDLGTDSVGWCLMDESNHIIKKGGKSLWGVRLFEEAEDCSSRRMSRESRRRTQRRAERVDLLQSLFAPEMAKVDPTFFVRMNNSALLEEDKETAAKGKDGTLFAGVGGINDKAFYDKFPTIYHLRDSLLTGEEKADIRYLYLVCHHMVKYRGNFLHYGEEINLKSDQEIIEAFHEIDVALEKMAKKPLALSEERISSFLKLALNSFGINDSKRAYYEFLKQDDSFIKNGICPLLAGGKVAVSKLYDLDEDDEPDPKNISVRSSTFEDDFSKLNFTFSDRPETAIIKAAKTISDFILLRRILGSSNSLSDAMVARFNLHKTQLKELKSYVRSHCPELYDRVFRTYDPKVNNYVRYVGMTRIKGKRLRVEHCHREEFYDFVKTEVFKIAKNVEVTDPFVQGIVAQMDNGDYLPRQNSTDNGVFPYQLNLTELKCILDKQAKFYPFLKVKDEEGYSTDEKIISILTYHIPYYVGPLVQQKEGDEHGKFAWVVRTGKKIMPWNFQKGGIIDFDQSAENFIRRMLNKCTYLPNCYCLPKCSLLYSRFEVISFLNNIAINGRPIPAHSTVEGEVSKDLLMSQFCLKGTLTVKGLTAFLKNHFGHFDPELLTTRTGKEIDSIDASMKSYADFVGIFGQSYVEQHLDLIESIINDLSIFTDRDIVERRLRNKYGFTNEKVIRQIKALNYSKFGRLSKELLELTSDVPDLSTGEIRKQTLIDSMYESGENLMEILADSRYSFGAQVAARQKEASYVVKQGASKLEQVKAVVDELYVSPSLKRPLLQAYEVVDELQKIVGHPIDEYYVECTRGSNPKEKGKKKPSRLEDLLRIYGRAKTDSVKLLKELEKKENPSYFDQEMKKQILENGDSLDRCFSELKDQANRHNDMCFRSDKLFFYYTQLGRCMYSLKPIHLEDLFADAQQYDIDHIVPQSLVKDDSLENRVLVYQDYNRKKADVYPLPSGFLAPGAASFYRYLSKIGLIGEKKLGALLRSSAEPLKDEELVGFTNRQLVSTNQAVKGLITILTTFEKVKGKEPEVIFSKAGLVSDFRQKFDILKSRDANDFHHAHDAYLNVVVGRANHEYFRYMNGRGWFEAMHRSKLSTNPSNIFDQNSKEAQAKGHVKAPIKDSQGNICWAFEPSLEQIKRDIYHRFDIMVTVRQFIQPGLFGKATLLKKTAWRDGNLFPIKNNRDPAKYGGYYGLNNGFFTIVELFDKKGKPIPTLIPVLNISARPDEEDKILHYCSGITGQKVGKLLVPCLRINSVIKKGKVVFLLSGKDHLNSASCKTLTEMIFSQEEIRVIRSVSKLCEIIKLKRTKDFSPDREDFDEKLASLLGSPLSADELVISPAANDQRNKAICLTSKEELELYDTLLKKLSSPFFEETGGPSDTAALMADPQKRALFESLSIGKKALVLSEILKETSANSAERANLKLLNGPAEQSKRLLSWQKIGSCQVLAQSVTGFYEKTIFPTKQK

SEQ ID NO: 5348 - protein, 1471 aa, unidentified
  REGION 1..1471: note = Description of Unknown: Cas Enzyme sequence
MRKTLGIDLGTNSIGLAVRDEDKGTDIQNQLTHFSSITFKSGVGKGKSGEFSYAAKRREKRSTRRLYQSRKYRIWNTLRLLIEYGFCPLSYEELEGWSKYDKTKKQKRQYPVDAKEFERWVRLDFNGDGISDFSSPYQLRYELMNKQFDFNSETDRFKLGRALYHIAQRRGFKSSKGETIKEQEELVTSLDSETDIDIASELKKSEEKKSKSLSNYMVEKNLPTVGCALAFLENSGERIRNSEFQAVRSQYKDEIKRIFEYQQGLDIHSDFYKKLTSERKGEGCIFYKRPLRLQKGLVGKCTLEPNKERCPISHPDFEEFRVWCFINNIKYRINQNSDWQQLPIEMKQQLYQDKFIHTSSNLKFSSIRLWISKRLGIELSYKEKTINYKDNVTISGCPISGRLKKLLGDNWKLITLSATRTNLKTGAEYVTKYDYIDLWHICFSFDEADNITEFANNILHFDNNKTQQLVRIWGAIPQGYSMLSLKAIRNINRFLRQGLIYSDSVLLAKLPEIFGDKWEENETSVIEQINCLIQENRSQKFIFNVANGLIANYKSLTDKEQFAYRNLEYQLDDDDMRDVRKATIIAIGEKTWMGKAENEQDSLLSSIATLYQEFFSTSRRDYLTLPRVVDSLTNYLQKTFSFINTKNLQKVYHPSMIDFYTPSTDGLLGSPVIGALKNPMAMRTLHILRKQINNLLENGTIDQETRIVIETARELNSANMRWAIEAYQRYREEENREFKKVMEELFPNRIISDTDIEKLHLLIDQQDISDTENEKTKIKTKTIEKGDIFKKDITKYRLWMEQGCCCIYTGKIINVSSLFDDNNTDFEHTIPRSISFDNSLSNLTICDAHYNRAIKKNRYPTQLPNYDKEAIIDGEKYTAILPRLKPWTEKVEKLKDNVEFWKGQSKRAQDKIRKDYCIRQQHLWNMELDYWQKKVNFFTMTEITSGFRNSQLNDTRIITKYAYHYLRSLFNKVEVENGRYTSDFRKMLGIQELDDKKNRDKHSHHAKDATMLTMMPTSAKRDRMIELFYKIQDEKKYGYETSILESQLDKERKECNFGKISNLGEFIEENIIINHISKDQTLTPAKRRMRSKGKITPLKDENGNILYEKDEDNICKLDQYGHKVPKPKMWVQGDCIRGQLHGETFYGAIKLAKKDENGNILYDDKNKMIIDSNTSFVVRKELKYKSNATDSGFKTWDEIEKAIVDKSLFNIMKCQFPEGTTFKDAMNQGVFMFDSKGNKINTIRHIRCHADTRNPIVVKQQTYLSSKTYKQYYYATNGENIYFAIYWDGKIDSNRSYDYRSLMQLTNIKKEGIVRNPKDYFESNKSIGKGLKTKNLPLYCVLRSGTRVLMFDKKELNQEDLTIDDFKQYLSEMDRSDLVKRLYVVQRIFDPKQGLLQLKYHLEARDDKKLSDDFPKEKSDEKGKYGEKGKNGFSEINISNPYPKLLLSPSKFTFLIEEKDFRIETDEILFL

SEQ ID NO: 5349 - protein, 1381 aa, unidentified
  REGION 1..1381: note = Description of Unknown: Cas Enzyme sequence
MKKVLGLDLGTNSIGWAMVNEAEKNDEKSEIIKLGVRVNPLTVDELQNFEKGKSITTNADRTLKRSMRRNLQRYKLRRENLIEILKENRLIKDQTILSENGNHTTFETYRLRAKAANEEVTLEQFARILLMINKKRGYKSSRKAKTQDEGQLIDGMSIAKRLYEEKLTPGQFVYQQLQEGKKYIPDFYRSDLQAELDRIWDFQKKYYPEILTNDFRQQIAGRGKLNTSKILLARFGIYTADNKGADKRLQAYKWRVDALNKQLTKEELAFVISEVNGSISNSSGYLGAISDRSKELVFNKQTVGQYLMDQLEKDPHTSLTNQVFYRQDYLDEFNTLWDCQAKFHKQLTPLLKEEIRDVIIFYQRRLKSQKGLVSVCEFENRQIEVRVEGKTKKKTIGLKVCPKSSPLFQEFKIWQILNNVQVIEKASGAKRFLEQEEKEILFFEASYKDKITKDDILKLLYKNFKELDLNYKEIEGNRTQAALFKSYQIIVEASGHGEYDFSKMPSNAVLEIVESVFNALGYNSDILKFNADLDDPEFDKQPLYRLWHLLYSFEGDNSITGHEKLVEKIAALFGFEHEYAGIIAKMSFQPDYGSLSAKAIRKILPHLKEGNAYSLACEYAGYRHSKNSLTKEELENKHLDNKLDILPKNSLRNPVVEKILNQMINVVNSAIDVYGKPDEIRIELARELKKSAKEREELTNTINRATAEHEKIRETLKKELGLPHVSRNDIIRYKLYLELASNGHHTLYSNTYIEPGKLFSKEFDIEHIIPQSRLFDDSFSNKTIERRSVNIEKGNDTAYDYVLAKQNQDGLMAYLQKVEELYKAGKISKTKYNKLRMKGSDIPDGFIERDIRDTQYIAKKAKELLERLVKRVVSTSGSITDRLREDWQLVDVMQELNWDKYDKLGQTEIIENREGHKIKRIKDWTKRNDHRHHAMDALTIAFTKHEHIQYLNNLNARSDKAGSIYAIEAKELERDERGKLKFKPPMPINEFRAEAKKHLEDTFVSIKAKNKVVTTNINVTKTGDGVRKKKQLTPRGQLHLETVYGSILRYVTKEEKVGSGFTEELIQRVAKKGHREALLKRLIEFDNDPKKAFTGKNSVDKNPIWLDDAHTRQLPEKVITVAPETVYTIRKEITPELKLEKVVDIKIRRILEARLKEFKGDSKKAFSNLDENPIWLNKEKGIAIKRVTITGISNAEALHDKKDKEGHLILDAHGKPQPVDFVNTGNNHHVAIYRDAEGNLQDIVVSFFEATTRTNIGLPAIDKDYKKDRGWQFLFSMKQNEYFVFPNELFGFKPTEIDLLDHSNYKLISPNLFRVQKFSKLTYGNNAVREYVFRHHMETSIIDNKELKDITYKNIKSLPYFEGIVKVRINHLGQIVSVGEY

SEQ ID NO: 5350 - protein, 1074 aa, unidentified
  REGION 1..1074: note = Description of Unknown: Cas Enzyme sequence
MCAHTPHPYILGLDIGVASLGWSIVECDPADNFRPCSLLNAGAHLFEAGTEGDIERGKDEARNVQRRTARLVRRQTWRRARRKRKLLKALIRYGLLPDPASLGMGIDPELRRPLDIDAYLKHLDYGPSGLARKWARCNGSPHTDQLRWCYLLRGAAAARPVDVFEFGRALYHLAQRRGFQSNRRADAKKSEDAGTVKQAIGELSQRIEQFAASGGTPTLGAYLASLNPDEQRLRGRWTARSMYSAEFEHIWNTQAAVHGVPDQAKEEIRKAIFWQRPLKNQAHLIGHCSLIPTEKRCPIANRRYQRFRMLQAVNHLQIAEPDTSPRFLSPEERAVLVRVLETEGDLTFARVKTLLGLKKTTAFNLERGGEKRIVGHRTDAKLRAVFGERFDAMTDAERDAVVHDLRSFGLPEALERRGARKWGLTGDVLKNFARIDLEDEYAPISLLAIERLLPAMESGLPYATARKQVFPESLAPAEPLDELPPVTDTLDELRNPAVIRALTEVRKLVNAIIRKYGKPAIIRIELAREIKNPRKVRERITRNIREREKERAAIVARIQREAGLSRVTRDDIERVLLAEECGWICPYTGRQICWDTLLGKSSQFDIEHIWPRSRSLDDSLMNKTLCYHEENRSRKRGFTPCEAYGGDPARFEEILGRIRLWKCDPFVRAHKLARFQEKAIPEGFTNRHLSDTRFIARATADYLGLLYGGRVDGGPEEGSPGIRRIQVCTGGLTAWLRSGWGIAGLLGATGEKNRTDHRHHAVDAIVIALSDARAVQTLARAATEAEQRGKARAFETIDEPWSGFRDDVKSVIDRIIVSHRQSRKVSGPLHDQSIYSRAMNGPLGPHRIRKELHKLTPSEIRDGKIVDQRALAAIRAKLEELNKPNPSPQDLIKIFADPNNAPLVKGHNGSMVRLRKVRVVADAARQVGRADKGAARWVNPKNNHHTVIVECKDAKGRVRWEDRPLALIDAYARRAAKLPIVNRDLSQTERFVFSLAPGEFVEMDVPGNATQRAIYRIASISQGDIELRLHRDGRTSDQIKKDKDRVRVSGEKLRKLRARKVRVTYLGEVVSAGG

SEQ ID NO: 5351 - protein, 1237 aa, unidentified
  REGION 1..1237: note = Description of Unknown: Cas Enzyme sequence
MSQNSVKTILGLDLGVSSIGWALIESENDRPKAIKGMGVRIIPLSKDDQTEFTQGNAISKNQYRTSKRTQRRGFDRYQLRRRALIKVLNETHMMPDKHLLLELSPLEIWGIRAKAVTEKVPLQELGRILLHLNQKRGYKHIKTENTDSKEQTDYVQAVNDRYSYIKARGLTIGQHFFQELQRYFASEQKTDTAFRIKEKVFPREAYIEEFDKIWATQQKEYPSILTDNLHDTIRNEIIYYQRKLKSQKGLVKTCQFETRAYEKDGKKIYAGPKVAPRSSPLFQVEKLWESINNITIKNRRGDFLKITLEQKKEIFKFLDSNDKLTQSELYQILNIGRKDGFFTNDLIRKKGIQGNLTKSTFVKILGPEHPALKFDLQITATKHVDVETGELKEIPVIKESFEKEPLFKLWHIIYSLEENDCRNKLQKEFGFDENTVAKLASVDFTKAGFGNKSTRAIRKILPHLQMGLTYDKACEKAGYNHSNYLTKEDNQKRKLDKEIPLLLKNSLNQPVVEKILNQLINLVNTIISRYENPYEIRIELARELKQSREERNDAYNNINKRERENDKIRKLLLEHPEFRKRSVSKRDIDRYRLWEEFGKVSPYDPSKCIGIGELFSGDYEIEHIIPKSLRFDDSFSNKTLCHRKFNSGDNAKNNFTAYDYMSSKRSNNDFQSFLTCIEKAFNEKRISKTKYENLLRKSIDIPSDFINRQLNETRYISRKATEILSKVCRHIYTSTGSITQRLRYLWGWDEILEKINLPKYKSIGLIEEVEIVQANKTRTIERIKNWNKRDDHRHHAIDALTVACTRQGFIQRINSLNAQKNREEMRQEIGVYNNKLSLLDNYLLQFKPFQTFEIVKQIEAINISFKPGKKVATYSVRKSNRGKNREIVQKNIIEPRGPLSEESVYGKIYKKITRTIKLDKNFTQVDNIIDEKLKRLVKSRLAENDWKPEKAFGNLKKSPIWLDPNNKIPITKVDIIDFEHKYVIRYPVTSITSKDVEFVVDKKCRELLAERLKLHNNNHKEAFKDITNNRIWLNEKKKIHIRNVRCYTNIGSDSITPVKVFDKGWDIEYEKYLKPGNNHHIAIYRDTTGKLHEHVVTFWHAVERKKYGLPVIIKQPATIWDDILNNRELPQTFLTKLPLEKWHYVTSMQQNECFVFNMSKEELKAAIQKKEYTVIAPNIFRVRKLTKGSYWFNQQFETTPRENLEDKKAGRCIQASLSSMTGVKIKVNILGEIFLDE

SEQ ID NO: 5352 - protein, 1442 aa, unidentified
  REGION 1..1442: note = Description of Unknown: Cas Enzyme sequence
MTKNILGLDLGTNSIGWALINQDFNKKEGKILGMGSRIIPMSQDILGEFGKGNSVSQTASRTGYRGVRRLRERFLLRRERLHRVLNVLNFLPEHYASQINFEKRFGKFKEETEPKLAYNKEGFVFKNSFEEMLSDFKKHQPQLVENDKKIPYDWTIYYLRKKALSQKIKKEELAWILLNFNQKRGYYQLRGEDFEEEKDKTFVRLKVDKIVDSGDNVKGKILYDVYFDNGWKYDKQIVKTEDWIERVKEFIVTESFLKNGDIKRTFKSVDSEKDWIAIKTKTEQEIDNSDKTVGTYIYNALLQNPKQKIKGKLVRTIERKFYKDELKQILEKQKEFHPELKDDDLYSDCVRELYQNNEAHQLTLSKKDFVHLLMDDIIFYQRPLRSQKSSISNCTLEFRKYKDENGVEHTQYLKAIPKSNPYYQEFRIWQWIFNLNIYKRDDDSNVTKEFLNSTEDFEILFEFLNNKKEVDQKALLKHFKLNEKSHRWNYVEDKKYPCNETKTMISERLKKVENISADFFTRDIEQKIWHIIYSVNDKMEYEKALKSFANKNNLDEVSFFEAFRKAMIKENTYGAFSEKAIKKLLPLMRLGKYWNYAEIDKYSRDRIQKIINGEYDENIKDKVREKAVHFTTENDFQGLQLWLAQYIVYGRHSEASMIGKWNSADDLEGFLKEFKQHSLRNPIVEQVITETLRVVKDIWVKYGNGAKDFFDEIHIELGREMKQTKDERLDATKRITENENTNLRIKALLAEMVNDSSVENVRPYSPMQQEILKIYEDGILKSDIEIEDDILKISKTAQPSSSDLKRYKLWLEQKYKSPYTGQIIPLNKLFTPEYEIEHIIPQSRYFDDSFSNKIICESAVNKLKDNYIGLGFIKQFGGTKIETGFGKSLTIFKTDEYEDFVKKHYVNNRGKRNKLLLEEIPEKMIERQLNDTRHISKYISGVLSNIVRAEDGSDEGINSKNIVPGNGKITSQLKQDWGLNDVWNDLILPRFERMNQLTNSTDFTAWNENHQKFLPTVPIEFSKGFSKKRIDHRHHALDALVIACATKDHVNLLNNQSAKSETKRYDLKKKLMKFEKVVYNHPKTGERIERDVPKQFLKPWDNFTVEAKNSLESIIVSFKQNLRVINKATNHYEKWVEKDGVKTKERVEQKGTNWAIRKPMHKETVSGKVDLPRIKVPKGKILTATRKSLDTSFDLKTINSITDTGIQKILKKYLEFKGSPELAFSPEGIEDLNNNIEKYNEGKAHQPINKVRIFELGSKFQVGQSGNKKDKYVEAAKGTNLFFAVYEDKNGKRSYETIPLNEVIERQKQGLTSVPLENEKGSRLLFDLSPNDLVYVPEADENIDGNFNLSNLNNEQIKRIYKVEKTSGVECYFVRQDIAYLIKQYDAKTKIGELESQNKLQVTMTDDRIKIADVCLKINCDRLGNINFLTKEKVKQMFNEYR

SEQ ID NO: 5353 - protein, 1125 aa, unidentified
  REGION 1..1125: note = Description of Unknown: Cas Enzyme sequence
MPERLFSFDVGTNSIGWCVFNLNQFKEPIEIVDAGVRIFADGREPKSGNSLAEGRRLVRSMARRRDRYKRRRKAVLRTLTEYGLMPRDPQARAALVAQTNDAKRGEPANDVYALRARALDETVPLHLLGRVVFHLQQRRGFKSNRKADRRSKDNEVGAITLGEDRLRAAMSEAGARTLGEFLAGRRGSDPTTRGNVRVRIDAEASTAEGRREKPGYDFYPVRAMLEDEFEQIWDKQAGFWPDVLTDERKRHLFRVMFYQRPLKPPVVGKCSFNPSEERLPKAHPLFQQFRLYKEVNELELVMSDQSHRKLTLDERDALVAHLRGVRSAGFSALRRTLKLSERSVRFNKEYEGRDKLLGDEIHAVMSDKALFGNRWSAMPTEQQWEIIEKLREEGDPLVLHQWLVEHTGLSDEAAEKVADAKLPEGYGRLGASAISAVLDELVNGVAHDETGREVPVVESEAIQRVFGKHQPDKLKADGLLPKYQEILQRRIPPGTNDPDDEYDIRKGRITNPTVHIGLNQLRAVTNRLIARYGRPERIHLELARELNQSEEQKRDATARNARDRRDAERRSALLREFGQADNGFNRQLLKQWEELNPQNPLDRRCIYSGTVITPTMLFSGAVDIDHILPWSRTLDDSQANRILCTREANREKRNFAPAEVPAWADRYDDILERAQRLPPNKRWRFARDAMDRFEKDRDFLDRQLTDTQYLARLAHDYLGALFPDEEVDEDGVVKRRNHIVVVTGRMTEMLRRKWGLNGILPDHNFADPTKVKNRKDHRHHAIDAAVIGVTSRTLLKRVADAARDGEAQGAEDALRTVAPPWPHFREDLKAVVDRIVVSHKPDHGTLPRKGEFGRTAGQLHNDTAYGLTGEVDARGNPIVVRRKPFLSLQPKDLPAVRDEELRSALENATRGLSGRDFTAALMKFRQAGGHHYKGIRRVRMVESLSVIPICDKDGRPYKGYKGDANFRYDIWEMPDGRWVADVVSMFDAHRPGVDWQKRRPHPAARKILSLKQNDMVAYDDPRRGPTIGIVVKFGQNGQITLVPHNEAGDLKSRDALPNSVEEALARGAEPDKDGFVAFDPFKYYAPTASGLKKIGLRQVRVDEVGRVFDPGPRDVKSARAQAAGN

SEQ ID NO: 5354 - protein, 1190 aa, unidentified
  REGION 1..1190: note = Description of Unknown: Cas Enzyme sequence
  MOD_RES 147: note = Any amino acid
MIKNILGLDIGVSSVGVAVIKEENGKSSVEKLSVRIVPEDLDFHGKFYSGNTASKNLDRTIKRGIRKNNQRFKARRDKLYQTLKENNMFPEENLFNLSATELYGLRAKAVSEQISLEELGRVFILLNQRRGFLSNRKSVSEDENSTXYKERIATLEKELAGRTIGQKLYSELQDTKNAFEVLLRERTYQRSSYIEEFDRIWDEQKKYHSVLSGGANEDNNIATLYDLIRNRIIYYQRPLKSQKGLISECSFEKYHKATAKSSPYFELFRIWQKVNDLSWKTPSGETFKPTPDQKQKLKDALWNGENLNAKYKLSITEIKKLLGYGRNEKIYLNFTELDGSRTYAILKNALKEAEIENIEQYLFFNLDISDEKGGLFELWHITYSLSTEEEVVNALRKRFAFSENQSKIIAKKVGYASDYGSLSTRAIRKLLPHLENGLGYSEACDKVGYDHSGYKTEIKLKSKLKQLKKNELRNPVVEQILNQVVNAVNLVIEKYGKIDEIRVELARELRNNAKTRKNISQANSKNKRNNDAIRKKLIEEYGFKLVNGRDVKRYILWEETTHECLYCNSPINGTDMLTGNADIEHILPKSRSFSNAMSNYIIAHRKCNFNKGQKTAYDFMESKGEDALGQYIEKVNALYNDGKGSISKSKFDNLLCKGEDIPSDFVERMKKDSQYIAKETVKILKTVCPNVYTTTGQVTDFLREEWELKNLLQELTFDKYKAIGQVEEKTIKTNNGQTKTFEIITDWSKRDDHRHHAVDALICALTDQKIIFKLNNLNKIYQYERDALSQKEIEEIEEFLEGKFSIKEFSAQQGNIIECSIPNIRKEAQKHLEEIFISFKKENSKVLTKNINIPKNVEPKITWVPRARLHEDTIMGRVKRIVEKKMKLSDKISVEEIEMIVNPEIKEILYQHLAKFDNNPTIAFAVKTLKKEPILYKNEELKEVAFYQWINTKRVKVNENITEAQIEKIIDNECKRVIKERLNGGKIKEVFKNLSQNPIRLKNGMILKTVTVSDESKVEKVRSGYAKTGGNHHALIYKDENGKYNDKVVSFWEAVEIGLLNIAEHNNPYPIVNRNDNDELGVFQFSMQINDLFVFDLKHSDNPQEENEIDFFDVKNRKLISDKLFRVQKMSKSSNGQFVLEFRHHLETSVIRNDLVLKNITWTKISKNSDLDRLTKIRINHLGEIIKIGE

SEQ ID NO: 5355 - protein, 1209 aa, unidentified
  REGION 1..1209: note = Description of Unknown: Cas Enzyme sequence
MEKVLGLDLGTNSIGWAVISREDDGSCSLIDKGVHIFKDGVSHDKSGEKPAVQERTAARASRRHYFRRRLRKIELLKVLTEYGLCPPLTQEQLKKWKEEKVYPLTDAFLAWQRSGNAADGNPYYDRYVALTQKLDLSDINDRYILGRALYHINQRRGFLSNRKNAVEDSEDGKVIQDISQLSESIEKSGCRYLGEYFYKVFREGGKIRRQYTARVEHYHAEFEAICEKQGLDAVLKHSLERAIFYQRPLKSQKGQIGKCSFEPDKPRCSVSHPKYEEFRMEQFINSIKVQRPEEDSLTSLTNEEKKSIRPLFFRKSKPSFTFEDIAKKLAGKGNYSYFEERRDDIYRFNYRMSVSVSGCPVTTALINALELDSFNDWETELCAVYTKAERKTTNEIINDIWHALFSFDDNRLLSQWLRSSLQLSEEKAEALAKCRIPQGYASLSLKAINKILPWLKKGLVYSDAVFYANLPEVLPSSIQKNPAKMSEIEENIRIILEDTPKDQKCRESSKVKNIIDYLLGVADGVRPQRLYHPSMIETYPAVLPDEKGRIHLGSPRIESVRNPMAMRSLFRLRALLNELLDDGVIDPDTKINIEFARELNDTNMRKAIADLQRENETIRKKDYEEICQIMGEGYEPTEEDLIKYRLYEEQKHICLYTGKQITPRMFLGNAQIFDIEHTIPRSKGGDDSLANKTLCDSKFNREIKLAKLPSSLEEHDQILQRISNWKDVIESLEIQMSIQGNKARNASSKEEKDSAIRRRHFLRMKRDYWKGKYDRFIMTTVPEGFSNRQGVDIGIIGKYARMYLNTVFKRIYIVKGSTTADFRKAWGIQNEYTKKERVSHSHHCIDAITIACIGKKEYETWAQYMRKEEDYRFGRGVKPHFAKPWETFTEDVLAISSGLVTSHYSPNNLSKKSKKKIRVRGVIQRNADGTPKYAQGHAARVLLHKDSFYGAIQKDGEIRYVIRKSIDSIEEKDISKIVDDVVRAKVTEAVAQYGSLKKAVSETIWMNKDKGIPIRKVRLYAPMITSPIALKPHRDPSDKEYKRNYYVANDSNYCMAIYGSDKPSFKLINSLSAVNHFNGKPGDWVEPCDEKGRHLRCIVRPGTMVLFYEKSPEELYLCSQAELSKRLYEVIGLSISTIQNKYHYGVLTLKHHLEARPSSELKEKKGLWKVGEDIRPIIGINHNQTMFLVENHDFILTVSGRIHFLKEGL

SEQ ID NO: 5356 - protein, 1067 aa, unidentified
  REGION 1..1067: note = Description of Unknown: Cas Enzyme sequence
MAQATQPYTLGLDIGIASVGWSLLGERRILDLGVRTFDKAEGEKGASLNEERRLARTLRRRLRRRAYRLLKARRLFKHEGLFDGDEAVLFAMGEDARTPWELRAAGLGERLSPVEWARALYHILKHRGFHVVRRTEAKSDEGGKLIQGVQGTEKLREEGRFRTLGEMAARSASFAQNKRNKGGDYSHTFARAGLEEEIRLLFEHQRNWGSPHASPEFERAVLELLWAQKPALTGEAMLKLIGHCTFEKTEFRAAKRSYSAERFVWLTRLNNLRISLDGDYRSLTESERRTALDLPYKLGKVTYHQLRTALAKAHDFPESARFAGLSYRAGEKDPEEQKLIELAGWHGLCKAMEKAGLATEWQGIATRPELLDAIATVLTVEKTDDGIQKGLANLGLAGPVVEALLEVSFSDFIRLSLKALRNILPHMEAGLRYDEACVNAGYHHSQIEEKRLSLYLPPIPKDDIRNPMVFRALNQARKVVNAIIREYGSPMTVHIELARDLSRPWEERMKIRKGQEQFRDSKEKDLTAFRENFGRDPRGKDRELLKWRLYREQMGQCAYSQRGFDLKRLLEPGYAEIDHILPYSRSFDDSQNNVVLVFTEENRNKGNRTPHEYLDGEGISERWHRFEAWVKGNKAFRKAKVDRLLRKNFGAKEAEEFRERHLNDTRFICRFFKNFIEQHLALAAKSEAQRCVVVNGQLTAFLRARWGVVKNREASDLHHALDATVVAAASHALVKRLADYSRRGELAAMRDGFIDPETGEILSVENIRQLEADFPSPWPWFRQELVARLSPGPGEGVAGLPNYTPEESAVVCPIFVSRAPKRRGSGPAHKATIGSARKLGEGLVIERVQLKDLSLKDLDNLVGRHDPRNAALYGLIEERLKAHGGKGDKAFAEPLHKPLKDGAPGPLVRGVKVTKNRSSGVRVRGGIAENATMLRVDVFAKNGKHYLVPVYVADVARGRLPDRAVVAYKDEGEWDAIDDTYQFLFSMYSNDLIGVVLKKERHFGYFVSCNRSTGAINLLVHDRNQQVGKKGVIESIGVKTALSVEKFHVDPLGRYYKVREETRRDLA

SEQ ID NO: 5357 - protein, 1062 aa, unidentified
  REGION 1..1062: note = Description of Unknown: Cas Enzyme sequence
VDQLRYCLGIDMGTSSLGWAVVELKSNQDSENQKFVPADVIDLGVRIFDDGRDAQTNEPLAVGRRNARSMRKRRDRMLRRKQYLLHTLQNAGLWPVDKEKQSKLIGQNPYEIRCRALDQKITPFELGRALFHMAQRRGFKSNRKVDKDDSSSNMKQAIGVLESKIATSGARTLGEYLYRLRPDERTVPHKQQPSLRVRTSMKGSKTEYSIYPDRYMYEAELRAIWERQKEFYPNMLTDDLFQKIHRTIIEQRPLAPQEVGVCQFEEGEKRAPKASPYFQRARILQDLNHLELVSGTLSPENREKVKKLLLTKKEVRFDDIRKKLGLPPSAIFNLEANERRKIDGDLVNSFMGNKNAFGEKWDKLTIDQRHEVISLLLAEHEDEALSALLMQNPYNLSEEQAGRVLHLTPRLPNGYGSLSVKALQKIIPFLEEGARYDEACQKAGYHHSYLAVKEFAKLPYYGVVLDKAVIGASKNPKEDPSNPANNLDDTIGNWERYAGKINNPTVHVALNQTRKVVNAIVEKYGRPTQIAVELARDLKMSQKEKLTFTRRQNENTKRNEKIMTELEQLGLPNNYENRMRYKLWEDQARDPQHRVCPFCGKVVSISELFAPVFEIEHLLPFSRTFNDSHTNKVISCTSCNRDKFNKTPFEAFGHDTQRWEKILDRIKDYPFVKQRAFREDSLSDEKEKELIARQLNDTKYMAKMARQYLGCVCEDGNVRPIPGGMTAHLRHAWGLNPMLGDPDDEKERDDHRHHAIDAFVVACTSWGMLKQISILSGKGIKRVHFPPKPFDEFDYSQFQDMLERTVVSHKIDHGGVGTAILTHRTTGALHEETNFGFAKQLDEKYALFSTRKELASLVKDKNIETIANRKIRNNVQRLLAGISDEKVRKARLLNFARKNNIRRVTVCEKRDISTMIAIRDKNTGRPYRYVSGGSNYCTDIYCPNRGPQKGKWCAETISTFDAHRKDFIPAWKKAEPEAKLIMRLFRNDTMAYDEDGKRIIARVKKMSGGNVVLIAHNVASPKEEGRKISANRLKDLNARKIKIDMLGKVLDPYRMGSTQTKE

SEQ ID NO: 5358 - protein, 1078 aa, unidentified
  REGION 1..1078: note = Description of Unknown: Cas Enzyme sequence
  MOD_RES 337: note = Any amino acid
  MOD_RES 634: note = Any amino acid
  MOD_RES 645: note = Any amino acid
  MOD_RES 648: note = Any amino acid
  MOD_RES 667: note = Any amino acid
  MOD_RES 669: note = Any amino acid
  MOD_RES 674: note = Any amino acid
MKWRLGLDLGTNSLGWAALELGEDNIPIGIIAAGSRIFSDGRDPKSGASLAVDRRDARAMRRRRDRFKQRQAALLKHLTLAGLFPAGQEARTALAGLDPFELRARALHEALPLHHLGRAFFHLNQRRGFKSNRKADRGKNDESGKISIGVSRLREKMLEAGAETLGAYLHGRRAAATDPNAIASVRTRLRAETGDGARGDGYDFYPNRQMLEDEFEAIWDAQAPYHPDALTDEVKGRLFEVIFKQRPLKKPKIGKCSLLGNEERLPKAHPLFQQRRLLEELNALKIVTAGAIARPLTLEERDLLYLKLKDKRAVTFESLRKVLKLDLDARFNKESDXRKDLKGDEVAAEIGAAKRFGKLWQHLDSAQQWDVVSRIREQESDDDEAMLLAWLQETHNLTPEQARATVGANLPEGFGRFGKTATERLIEALKFEVIVYSEAVKKAGLPHHSDRRTGEIIEKLPYYGTALEPYIMPGTGEPSDPEEMRVGRVTNPTVHVGLNQLRRVVNSLIRQYGQPDDVAVELARELKLTNEEKQKKNAENNKNREAAEARSKKLREHNIPDTGANRARLKLWEDLNPGNCLDRRCPYSGQQISVTMLFSEAVDIDHILPFAQTLDDSNANKTVCLSGANKLKRXRSPYEAAADFXGRXGDDGSWEAISARAALMPNXRXRFAPXAMEKFRKEDGFLARQLTDTQYLSRLARDYLSALYSEKGEGSSHVWVSPGRLTEMVRRKLGLNDLLPDHNFGGGAGQPKNRLDHRHHAIDAVVIAIVDRSMLQAIARASGEEGADGRERIVIPEPWESFRNDLRNTVNAIVVSHRPDHGTTAKSDKTRDGTAGRLHNDTAYGLTGERDAKGNDIVVHRVSLSSLTKREHIETVRDETLRLALLAWTDGFEGKALEEKLRKFPDLGPLPFRNIRRLRVVEPLSVIPIRDRNGRSYKGYKGDSNYRYDVWQLKDGKWVAEVVSMFNAHQPGWTSTIRQQNPTAKKVLKLHRDDMLAVERNGHVELARVVKFSEKQFALAAPNEGGALKARAADKDDPFNYLYPSPNTLKAWKARQVRVDELGRVKDPGPRKGNTVAG

SEQ ID NO: 5359 - protein, 1130 aa, unidentified
  REGION 1..1130: note = Description of Unknown: Cas Enzyme sequence
MNQAANDTPPINQFLTLGLDIGIASVGWAVLNEARIVDIGVRCFDKAETAKEGESLNLARRQARLLRRRLYRRSWRLTKLGRLLKQQGLIDSAAFFKQLPSASVTTWQLRVEALERLLSNQEWARVIYHLCKHRGFHWASKAEEMQAEGDAKGEGGRVKKGLADTAAKFASKGYRTAAEMVLAEFPHAQRNKRGEYDKALSRVLLDKEFALLFEHQRRFGNPYASADFEARVRGDGDRKSGLFWNQKPALAGADLLKMLGHCTFEKAEFRAPKASFTAERHVWLTRLNNLRVIVDGASRALTQDERALALLLPYQTEQFKYKTLKTALVKAGHIPDTARFGGLAYPSEAQKEAGKTKDPEDQPLVKLPAWHDLRRALNKAGLQDAWRQISVAALDGRPQWLDSVGWVLSVYKDDAEVERELAALALPQAQAVIPVLLGLRFDKFHALSLKALLQIVPHMERGLRYDEAVAQIGDYGHHSQRVVLGTGTNRYLPSFYKDERSSTGSMVFRDDIDVPRNPVVLRALNQARKVVNAIIKKHGSLSAVHIEMARDLSRPLDERREVKKLQEEFRDRNDKARESFEQDHGYRPKGIVFEKWMLYREQHGKCAYSLEGLDIDRVLNDANYAQIDHALPYSRSYDDSKNNKVLVLTRENQNKGNRTAYEYLTSFAGGEDGDRWRNYAAWVNSNKSYRMAKRNRLLRKNYGPEEASGFKDRNLNDTRYICKFFKNYVEEHLQLAPRADGNANKRCVVVNGQLTAFLRARWGLSKVRSESDRHHALDAAVVAACSHAMVKALADYARNREVAYLKEGFPDPETGEILNPEAHARGVQHFPEPWAHFRHELQTRLYTDELQALREDLQRLGTYSAQDLLEVRTLFVSRAPQRRNDGAAHKETIYAQPESLRKQGGVVQKVPLASLSLKDLDNLADPHRNAKLYAAIRARLEAHGGKSDKAFGPVQPFYKPGKSGDPTGPIVRTVKLVIDKLSGIPVRGGIAKNDTMLRVDVFTKAGKFHLVPVYVHHRVTGLPNRAIVAFKDEEEWTLVDESFEFLYSLFPNDLVRVQQKGKAALTGYFGSCHRGTGNINLWLHDRNTVSTKVGAIEGIGVKTALSFEKLNVDVLGHIHPSRPEQRHGLA

SEQ ID NO: 5360 - protein, 1122 aa, unidentified
  REGION 1..1122: note = Description of Unknown: Cas Enzyme sequence
MAQHVFGLDIGIASVGWAVMDAQRIIDLGVRCFDKAETAKEGDPLNLTRRQARLLRRRLYRRAWRLTQLARLLKREGLIEDAKLFVQIPSFTDSAWELRRQGLDRLLTPLEWARVIYHLCKHRGFHWTSKAEEAKADSDAEGGRVKKGLKDTAARMRAKGYRSAAEMVLAEFPDAQRNKGGQYDKALSRVLLGEELALLFASQRRLDNPHASERFQALILGNGDHRSGLFWQQKPALAGADLLKMLGKCTFEKDEYRAPKASFSAERHVWLTRLNNLRIVVDGRSRPLNEAERKAALPLPYQTESFKYKTLKTALVKAGLWGDDLRFGGLAYPSRAQAEADKAKDPEDQILVKLPAWHELREAFKEQPSLWQRISLPALEGNPNLLDRIATVLSVYKDGAEITQQLRQLPLPEPDACIEVLEKISFDKFSSLSLKALRRIVPLMEAGARYDEAIAQIPEYGHHSQRVSPDAAKRLCLPPFYEAQRKFGKNDRVGSMQFREDANIPRNPVVLRALNQARKVVNALVREYGSPMAVHIEMARDLSRPLDERNKVKKAQEEFRDRNEKARTDFERDFGYKPKAAAFEKWMLYREQLGQCAYSQQALDIQRVLDDPNYAQVDHALPYSRSYDDSKNNKVLVLTRENQNKGNRTAFEYLTGFPGGEDGDRWRAFVAWVQGNKAYRMAKRSRLLRKNYGPEESSGFIDRNLNDTRYICKFFKNYVEEHLQLTPRADGETNRRCVVVNGQLTSFLRARWGLTKVRSDSDRHHALDAAVVAACTHGMVKALADYARRKELAFLQEGFPDPETGEIVNPAAFDRGRQHFPEPWPHFSHELKAHLFTDDLAALREDMQRLGTYADNDLNRLRTLFVSRAPQRRNGGAVHKETIYAQPERLLAHPETKGSVIEKVVLTSLKLQDLDTLVEPHRNERLYAAIRQRLEAHGGKAEKAFGPGNPLHKPDKNGLPTGPLVHSVKRVVKQTGIPIRGGLAKNDSMLRVDVFTKVGKFHLVPVYVHHRVTGLPNRAIVAFKDEEEWTLIDESFAFLFSVYPNDFLRITLKKEVFQGYYSGADRSTGAISLWVHDRAASVGKDGLIRGIGVKTALSLEKFNVDVLGRIYPAPPEVRRGLA

SEQ ID NO: 5361 - protein, 1150 aa, unidentified
  REGION 1..1150: note = Description of Unknown: Cas Enzyme sequence
MRKILGLDLGSSSIGWAVISESEESNKIEGLGSRIIPLSTDDATEFSQGNDISKNAKRTLRRTQRKGYDRYQQRRENLKQFFHGNNMLPDEELKTLDKLSLWGLRARAVEEKLSLSEIGRVLYHINQKRGYKATKADYDMDADKKQGDYVKSVMGRHKEIVERGITIGQLFFEKLSGDPSYRVKEQVFPRRAYEEEFDRIISCQRGFYPDVFTDENIDTLRNRIIFYQRGLKSCKHLVSVCEFEKRAYINADGKTVFSGPKVAPRSSPLAQVCKIWESVNNLTLKNKKGETLEISPAERRAMFEHLNDHDKMTLTDMYRILGIRKSDGWWGGKAIGKGLQGNTTRNALRKALDGEHEELLRFELRKIDTDLVDTETGEIVQITSDNYLNEPLYRLWHAAYSIPEKEDLARALDKQFGITDPAIVDSLFALDFVKAGYSNKSAKAMRRILPYLELGLMYSQACEYAGFRHSESLTREESSSRELQAKLKPIEKNELRQPVVEKILNQMINLVNALMEKHGHFDEIRVELARELKQSKDERNETTKRISKNERENKSIAERIAQEYNLTPTRSRIQKYKMWEEADHTCFYCGQPVGVTEFLRGFDVEVEHIIPRSLFFDNGFSNKVCSCRKCNKEKNNRTAYDYMKSKSESELNIYLERIEKLYKDKKIGKTKYERLLTAGDKIPTDFIDRQLRESQYIARKSREILSEVCRSVTSTSGSVTDFLRRTWGWDRVLHNLNFDRYKAAGLTEVKERIHNGNCWNEEVIRDWTKREDHRHHAIDALVIACTKQGYIQRINNMSEWKDEIFAPSDRQGEEYQDRKTRLEKYIESQPHFSTAEVEKAAGSILVSFKAGKKAASTGKRYVHRGGKQVKVQENILIPRGALHEESVYGIVEHYTKRKGETVIEKRSVLRYPLHTVDRKQIDSIVDGAIRRLVQQRFDNHTGSDKDVWKDLENNPLLFNGVPVKSVRRYARPDAATLVSLGNGAYVLPKNNHHIAIYKDRDGKYHENCVTFWHAAERKKYGVPTVITKPEEVWDTLPEGLPEKFMEQLPMPDHSFEVSLQQNEMFVIGLEPEIFEEALTNRDYALLGGHLYRVQRIATSDYWFRFHLETKLDDTKEGKEANKFRRFSTKAFFASNPQKVRVSLLGEITRI

SEQ ID NO: 5362 - protein, 1013 aa, unidentified
  REGION 1..1013: note = Description of Unknown: Cas Enzyme sequence
  MOD_RES 25: note = Any amino acid
MKKFKDYFLGLDIGTGSVGWAVTDXQYNLLKANQKTLWGVKLFETANTAEERRIFRTSRRRLKRRNQRIKLLQQLFAEEISKIDSGFFLRLKESKYTPEDKLDVKGENPKLPYALFSDKDFTDIDFHSKYPTIYHLRNELINSKENHDPRLVYLALHHIIKHRGHFLFESLNENSDVQTFKECWREFAQTLADSELEIINFGAGLEDKIESILKNKNYSPKKKVQELKAILKIKDPIETEILNMIVGNSVNLIKLFKDDSLKEEEIQKFSFKENKYEEESEKLESILQERFEVIAKGKGIYDWEILTDILNDCKTLSEAKIKTYNKHKEDLISLKKLVKKLDSTNNLYKKIFGINIEKGNENYSNYVGFQKKGNKKIAIEKKISKDDFYKMLRKSLSDYEKEDEVKKIIAEIELGTFLPKQVIKDNGVIPSQLHLKELKLILANAENYLPFLKEKDENNISVNEKIQSVFKFRIPYYVGPLSATGDNNAWIVKKSNQNIFPWNFEKIVNTEKSAENFIKRMTNKCTYLVGEDVLPKNSLLYSEFTILNELNNLRINGERVEPNLKNKIFEELFKKNKKITMKKLKEFLKCEGISCNDDEISGIDGDFKSNYAPYMDFKGLDLIKILSSDEIEDIISDITLFHDDKKLLKARVKEKIKNHKNITDRICKLSYKDWGRLSKKFLTEIEGTSKETGEIYNIINFMRNTNKNLMELLSYNFDFVEKIENYNKDFSPNMNLNYETVKNLYVSPSVKRSIWQTIKIVKELKKVLKSEPKKVFVEMAREKQESKRTESRKKKLLDLYNSCKKEEAELYEAIEKRDDHQFRSDRLYLYFTQKGRCLYSGENISLDNLYNNNMYDIDHIYPQSKITDDSLDNRVLVRKNDNSKKSDIYPLPAEIINNNKSFWNHLKDIGFISQEKYNRLSRTTPFTTDELGGFINRQLVETRQSTKAVASILKQVFPKTEIVYVKAKNVSKFRQDFDIIKVRELNDLHHAKDAYLNIVVGNVYNTKFTNSPI

SEQ ID NO: 5363 - protein, 1434 aa, unidentified
  REGION 1..1434: note = Description of Unknown: Cas Enzyme sequence
MKKILGLDLGTNSIGWALVEEAENSDEKSSIIKLGVRVNPLTVDELSNFEKGKSITTNADRTLKRSMRRNLQRYKLRRENLIGVLKKHCFITDQTILSESGNKTTFETYRLRAKAVNEKISLEEFARVLLMINKKRGYKSSRKAKTQEDGKLIDGMEIAKMLYDKNLTPGQLVLKLLQQGKREPDFYRSDLQAEFNKIWEFQKQFYPEILTDKLHEEVKGKNKGQTWVILKEPLSIVGIKQKGKPAENKIEKYRWRTESLTKKQDLEVLAVVFQEINHMLNNSSGYLGAISDRSKELYFNKQTVGQYLMTQLDKDPTISLKNQVFYRQDYLDEFNTIWGKQAEYHKELTDELKQEIRDIIIFYQRRLKSQKGLISFCEFESKQIEVEIDGKKKIRTIGQRVIPRSSPLFQEFKIWQILNNIEVFGKGQKRKKKKNDLPDLFSDTTEVLPIEGRRNLYQEEKELLAVELSIREKLTKGEVLKLLFDNHKELDLNYEKIEGNHTQAALLNAYKQIIEHSGHELNFDKISTTEILNSIKEIFIGLGINIDILNFDSDKNLDEQPMYKLWHLLYSFEGDNSNTGNEKLIDKLGELYGLEKEYAVILAGITFKDDYGSLSARAIKKVLPYLKDGNTYDVACKYAGYKHSKSSLSSEELADRPLKNKLSILPKNSLRNPVVEKILNQMVNVINLVIDTYGKPDEIRIELARELKKNTKERESLTKAITKAANEHMDIRKILQNEFGISNVSRNDIIRYKLYKELEPNGYKTLYSNTYISREKLFSKEFDIEHIIPQSRLFDDSFSNKTLELRHVNIEKGNTTAYDFVKTKYGKSGLDDYMNRIENLFKSDQTKTNKLKKLKMQEKDIPDGFIDRDIRNTQYIAKKAKEILEELVRYVIPTTGSITSRLREDWQLVDLMKELNWDKYDKLGLTEIVENKDGRKIRRIKDWTKRNDHRHHAMDALTVAFTKRSFIQYLNNLNARRVKNEQSISNTDMENWEYKSITTEDLKLTTKDVLGIEKKELYRDNKNKLRFNPPMALDEFRTEAKKHLENTLISIKSKNKVVTQNINISKKAGGINKKTQQTPRGQLHLETIYGRQKQYVINEEKIGTTFDEAKIQTVTSPVYREALLKRLQQFNNDPKKAFGGKNAPAKNPIFTDEAKTNQLPEKVKTVTFKYIYTIRKEVSPDLKLDKVIDINVRGILENRLKEYENDAKKAFSNLEENPIWLNKEKVIRIKKVTISGISNAESLHNKRDKEGNLILDKNGKKQPVDFVNTGNNHHVAIYRVPVLDKKGQFVFDENNNQKFELQENIVSFYEAVTRKNLGEPIIDKNYKKSDGWQFLFSMKQNEYFVFPNEQTGFYPKEIDLLNSDNYSLISPNLFRVQKISYKNYVFRHHLETTVADFSANLKGVTWTDFRSSKGLDKIVKVRINHTGQIVHIGE

SEQ ID NO: 5364 - protein, 1016 aa, unidentified
  REGION 1..1016: note = Description of Unknown: Cas Enzyme sequence
RRQERLQKIRNLFVKYGVGSQAEIEQFLFTNVVNCSCTERNCECNSPYKFRTQGLERQLEKYEWLKALYNVAVRRGFKSNRKSEGKENKEVGLLLSGIQENRQLLQAKNYRSVGEMLYKDEKFQECKRNRAGSYSHTIERKLLEDELKLLFQKQREFGNKYAATELEKEFIEIFNRQKHYAEGEQIIKLVGFCTFENSKNGKQDELRAPKNSYSAQMFALLTKLVNLRINNYGESRPLSVAEIKKLQSFALTHSKVTYKQARKELALEEHMTFNGLSYKNEQKDPESKTLVELKTYHTLQKALEHAVGKTVWLNLSQDVDKLDAIAEGLTYYKTDESITKYLTDKGVEQPIIEAVLPLSFDKVIHLSLVALRKLLPLLEQGKLYNEACDVVGYNHYRPTQALRERFLPVLSDEITNPVVRRALSQTRKVINTIIRTYGSPYKVNIELARDLSRSFRERYEIRKGQDEFQREKERAAERFQDLTGRAAKANDILKFRLWEEQKGFCPYSGRAIEINKLAKDGNYTQVDHIIPYSRCFDDSYNNKVLVLAGANQAKGNKTPYEFFGQEETRWHSFTVWVAQNIRRGSKKRNLLFVGAQEDLEKMKARNLSDTRYISRFLTSFIQDNLLFHAESGKQPVTTINGQMTAFLRHVWGLNKERAASDLHHAMDAAVVAAATNSFVQKVANHSKKGELRNIPLGDSRYADPETGEIVTSQYQSRHDEKHFPQPWPSFRDELKDMLTAMAQEGLWQKSEVDERQANIVSRMSNRKATGALHQETIRSKEVLVRDDEVLEGTAIKVPLAKVKLKDLENMVGKERDTKLYKALKERLQAFDDKPEKAFLEPFYKPTNDDSQGPLVRSIKVFSKGTAGVEVRGGLADNDRMVRVDVYYKDKKYYLVPIYTIDIALKKVKDRAIAAYKPEEEWTKIDKSYEFLFSLYQYDLVEVDTGKELIFGYYIGSDRATGAISVVCHDKNKAWGKDGVKKSIGVKTAKSLRKFTVDVLGKDVVEVKKEKPPYELA

SEQ ID NO: 5365 - protein, 1545 aa, unidentified
  REGION 1..1545: note = Description of Unknown: Cas Enzyme sequence
MKKILGLDLGTNSIGWALIERNFDERKENALGDGKTIGMGSRIIPMSQDILDKFGQGQSHSQTSERTNYRGVRRLRQRHLLRRERLHRVLNILKALPEHYASQIDFENKKGQFINNAEIKFNYIETVSKKSEFLFKDSFSEMIEEFKQVQPNLFYKRKSSDETKIPYDWTIYYLRKKALKEKIRLEELAWILLNSNQKRGYYQLRGDEVDEQEGKTKTFEVLEVERIVDSGDKIKGTDDVLYDVYFSNGWKYDKQIVKTENWQAKTKEFIVTTSTNKDGSIKHSFKAVDSEKDWIAIKKKTEQDIWQAKKHVCEYIYDTLLSDPKQKINGKLVKTIERHFYKKELTAILGKQKEFHKELQDDKLLNECINELYPNNYAQQNILKQKDLANLFVDDIIFYQRPLKSKKSLIDGCKYEVRPMKDSNGDLSKDDNGIQITKPIKVIHKSHPLYQEFRLWQFIENIRILQREKNIDGKVNIDYDVTSEFLLDIESKVKLFELFNDREKIKQSVFLGQFKDNSGKKISESDYRWNYVEDKEYPLNETRALFIKEFKKHKDFDWRAYLTQANEAKLWHLFYSISDKKELERALDNENSKLGLPIEIRQELKKIKPYKNDYGALSEKAIKKLLPLMRLNKNTEEIKLEYKNRIDNIFYRLDEINQDKTKISEVGDDDITKGMLKSFCGFGKKYSGLKLHQASYIIYGKHAEANDTNVWKTPAHLEKFIKDFKQHSIRNPIVEQVVTETLRVVHDIWQYYGKGKENFFDEIHVELGREMKNPADKRKRMTDKINKNQNTNQRIRVLLQEFKNQNIEGVIPESPNQQEKLRIFEDDVLSQFSEKELEKQEGVNISKILKSKEPSTKEIEKYKLWLEQKYISPYTGQVIPLSKLFTTEYEIEHILPQARYFDNSLNNKIICESEVNRFKESQTAFEMITKNSGRIIDLSQNKSVKLFSIEEYQKHITQHFAKGSTKQKILLSEDIPENFISRQLNDTRYISKLVKALLSNIVREENEQEVTSKNVVAVTGNITSFLKKDWGLNDKWNEIVEPRFIRMNEITNSNDFGYFDDKKGFFRTDVPTELKKDFNKKRIDHRHHAMDALVVAVATKNHVNYLSNLHAKSDNSRFDLRDKLRRMEEKIYKGEKRKYAKEFLMPWNGFPVEAKKCLEDIVVSFKQNLRVINKASNKYQIKKKGKAEIKTQEGTNWAIRKPMHKETVYAKVDLRHKKSIAINAAIDGFMKNKFVFVDKELKQKIKNLVQLSYDNKMIIRYFKENKFKNKKLKKVEVYYQDNYFSAVRKTIDESFKSKKWIEESITDSGIQKILSNHLEKYNETDENDKIKERPDLAFSEEGLIEMNKNIVGLNGGKNHKPIYKARVYETFGNKFAVGQTGNKKDKYVEAAKGTNLFFAIYQGKNIKGAEVRQYETIPLNIVIERQKQGEDSVPEKFFDKDKCEYSLLFHLSPNDLVYVPTKEEQEDINNIYFGNLSLEQKMRIYKIVSFTGNRLYSISYNVAKSIFDKNEYTLLNKVEFTDERYSVKETCIKLKVDRMGNISKP

SEQ ID NO: 5366 - protein, 909 aa, unidentified
  REGION 1..909: note = Description of Unknown: Cas Enzyme sequence
  MOD_RES 225: note = Any amino acid
  MOD_RES 612: note = Any amino acid
  MOD_RES 625: note = Any amino acid
AKGDEDGSLIDGMQIAERLYEDKITPGQYCYDILKSGKKTLPDFYRSDLQNEFDKIWNFQKVFHSQLLDDELLSAISGQGLINTRKRIFAIKNTSTVDTKGTRKEKLLDSYRLRSEAINKKLSAEEVASVVSDINGKIKSSSGYLGAISDRSKELFFNKVTVGEFLYEKLKNDSHYSLKNKVFYRQDYLDEFESIWETQKQFHPQLTEDLKIEVRDIIIFYQRKXKSQKGLLSFCSFESKNIEVVIDGKKKLKTRGMKVIPKSSPLFQEFNIWSNINNIELRQRKGDKQEFELNDEQKQSLYEELNLKGNLKGDNIFKLFKLDKDDWDINYSEIQGNRTNKILFETFIKILDDEGYVIDMKKESANKIKTAVSNILTDLGIDSSILEFDPSLDGKALENQSSYKLWHLLYSYEGDNTETGHEGLTKKLMNDFRFKPEHVPYILNINFEDDYGSLSAKAIRKILPYLRENNKYSEACALAGYNHSSSITKEENKERELKDRLTLLEKNCLRNPVVEKILNQMVNVVNAIIDDSGMGKPDEIRIELARELKKSTEERKLMTEGINKAKNRHEQIKELLNANPFNIMNPSRNDIIRYKLWEELKENGYKTLYTNXYIPPFKVFSKDIXVEHIIPQALLFDDSFSNKTLEFRNINIDKGNKTAYDYLEQKFDETGFNEYKQRVDKYYKDGYITKAKYQKLLKKSSEIGDGFIERDLRESQYIAKKAKEMMLEICRTVVSTSGSITDRLRQDWGLINIMKELNLPKYSITDRLRQDWGLIDVMKELNLPKYRLAEMTTKEERRGGRIIEQIKNWTKRNDHRHHAMDALTVAFTKHSHIQYLNHLNARSDEKNQNHSVIHAIENKETEKSENGKRIFVSPMPEFREEAKKHLKRILVSHKAKNKVLTRNRNITKK

SEQ ID NO: 5367 - protein, 1123 aa, unidentified
  REGION 1..1123: note = Description of Unknown: Cas Enzyme sequence
MENKALEQQAAAPMVFGFDIGIASVGWTVLGPTRIIDLGVRAFDKAETAKEGEPLNLARRTARLMRRRLRRRAWRLTKLARLLKRHGVIDEVALFMPEHPYPHSLWKLRVEALDRPLAAEEWARVIYHLCKHRGFHWISRAEEKKAEADSKGEGGKVKQGLAGTKRLMEDKGYRSAAEMVLAEFPDAQRNKQGDYTKSLSRVLLGDELSLLFTRQRELGNQHATPELQLSVLGTGDHKSGLFWAQKPALAGDALLGMLGKCTFEKSEYRAPKASFTAERHVWLTRLNNLRVVADGRVRPLNEQERQIALRLPYQQASDLTYKQLRAALVKAGVLPDSFRFTGLAYPNATQQSDSKIKDPEAAPLIRIPAWQEIRLTLKKAGLETEWEGMASLAIDGKPELLDQIAWVLTVFKEDDEVRAELRKLNLPQADKMVEALLDIRFDKFHALSLKALRNIVPHMELGLRYDEACEKAGYHHSQLFTVGAGTHRYLPPFYSKRDASGRMIFDQELDIPRNPVVLRALNQARKVINALIRHYGPPSEVRIELARDLSRPFDERKKIQTAQDEYRERNEKEKIRFLEEFSLSGTAKGRDFEKWQLYREQQGKCAYSLEALDLHRLFEVGYVEIDHALPYSRSYDDSKNNKVLVLAKENRNKGNQTPYEYLDGMENTERWRAFASFVESNKTYRVAKRSRLLRKEFGAKESSEFKERNLNDTRYICKFFKNYVERYLQLAENSEAKRCVVVSGQLTSFLRARWGLIKVREDSDRHHALDAAVVAACSHGMVKRLSDYARRRELEKVSEGFVDMETGEIVNPAMFRQLEQHFPEPWPNFRHELEARRKIDDPASLRSEIERLGTYSSDVLQILKPLFVSRAVQRRNRGAAHKETIYSQPERLKEQGGVTQKIPLASLTLKDIDKLIDPHRNEKLYAAIRSRLEAHGGKGDKAFPSNNPLRKPDREGNATGPIVRTVTMVIDKLSGIPVRGGVAKNDSMLRVDVFTKAGKFHLVPVYVHHSVAKTLPDRAIVQAKDEDEWTLIDNSFDFCFSLYPNDLIKISQKGKPPLIGYYGSCNRNTGAINLWAHDRSNAIGKNGLIESVGVKVALNLEKFHVDVLGNIFPAPKEERRGLA

SEQ ID NO: 5368 - protein, 1087 aa, unidentified
  REGION 1..1087: note = Description of Unknown: Cas Enzyme sequence
MALNPPLPYTLGLDIGMASVGAALLTEQRILGLHVRAFDKAETAKEGDPLNKTRRESRLTRRRIRRRAHRLLRLARLFKRTGLIAAAHPEAFALPGISPWDLRADGLNRLLTPAEWAAVLYHLVKHRGFQSTRKSEAKEDEKAGQMLSGVSANQQRMKEKGWRTVGEMAARDEAFAEAKRNKGGAYTHTFARTDLVAELKLLFKQQAGFGNPHVGVDFENDVEQLLLARRPALAGDALLKLVGKCPFEPTEYRAPKASYSAERFVWLTKLNNLRISEVGEQRALTAGERQILLNQPYLLAKFTYKQARQRLSLADTAKFTVLTYRGDKDPESTTFFEAKAYHELRKAYEKAGLESRWQRDALDPTRLDRLAWALTCYKTDDDIRAHLAEHGVEPEITEAVLGESFDKFVGLSLKALGKILPFMEQGQRYDEAVQSAGYAHHSQLNRDTTKNQYLPPPDKDQIRNPVVYRALNQARKLVNAIVREYGSPAAIHIELARDLSKPMDERRKIEREQKEFQERKAKDREAFIEQFSFDPKGLDLQKYRLYREQMSQCAYSQKAIDVTRLFEPGYAEIDHALPYSRSYDDGQNNKVLVLTAENRNKGNRTPYEYLDGASDSPQWQRFEAWVLQNKAYRRAKRDRLLRKHFGEDEAEGFRERNLIDTRYICRAFKTMVEDHLQWHADSDAKNRCVVVAGQLTSLLRARWGLIKVRENGDLHHALDAAVIAAANRSLVKRMADYSKRNELAQVRDRYIDPATGEILDIAAMRQVEEHFPSPWPHFRSELLAWLSPNPAHGLDGLAHYPPEELEHLRPMRVSRAPTRRGLGAAHQETIRSVGREGRLLADGQSAVKTPLTAIKLKDLENIVGYSHSHNHAMIEAIRKRLETNGNDGAKAFKMPLFKPSATNGYDADKSHVGETDQRAPQIRSVKLLATQKSGIPIRKGIANNGSMLRVDVFGKGGKFYAVPVYVADAARAELPYRAVAAFKPENEWPEMDEKQFMFSLHPNDWVTVKLKAETISGYFAGMDRSTGAISVWAHDRNQSIGKDGQWRGVGMKTALAVEKYHVDLLGNLHRVHTEMRLPLHGSKASKD

SEQ ID NO: 5369 - protein, 1494 aa, unidentified
  REGION 1..1494: note = Description of Unknown: Cas Enzyme sequence
MKKILGLDLGTNSIGWALVDQNFEEKQGNILGLGSRIIPMSQDIMGEFDRGNSISQTAERTGFRGVRRLRERHLQRRERLHRILNVLGFLPKHYSDKIDFGKRLGKFLPETETKLVYNERNEFIFKNSFEEMLHDFQRSQPDLVSNGRKVPLDWTIYYLRQKALTSKIEKEELAWLLLHFNQKRGYYQLRGEEEEENQNKLVEFHSLKVVDVKADEPQKGRPGIWYSIILENGWIYRRASKNPLFDWNNKMKDFIVTTDLNEDKTVKTDKEGNEKRSFRAPSEDDWTLLKKKTESEIEKTRGTVGQFIYNTLLANPNQKIKGKLIRTIERKFYKEELNLIVRKQVEFHPELKNTDVYNACIEELYPHNESHKNSLLNKDFVHLFIEDILFYQRPLRSQKSLISNCPFEYRSYIVEGIQKSESIKCVSKSHPIYQEFRLWQWIQNLKIYDRKTDENVTSEYLFSEEDYVRLFNFLNERKEVEPKMLLKHFKISEKSHRWNFVEDKPYPCNETHSMIKSRLEKVEDISPDFLTPEIEEKLWHLIYSVNDKIEYEKALKSFALKYNLHPESVLENFRKFPPFKNEYGAYSLKAVKKLLPLMRLGKYWNSENIDDKTKVRIQHLLTGEYDESIRERVRDKAIKLITESDFKGLPLWLASYIVYDRHSENAETGRWNTVKDLENYLAAFRQHSLRNPIVEQVITETLRVVKDIWNQFGNGEKDFFKEIHIELGREMKNPADKRKQMTERNTGNENTNLRIKALLMEMLNDSNVENVRPYSPIQLEILKIYEEGVLNSDIEIPEEIEKISKLSQPSGSDLMRYKLWLEQRYRSPYTGETIPLNKLFTPAYEIEHIIPQSRYFDDSLSNKVICEAAVNKEKTNQTGLEFIKNHHGQIVETGSGKKVRIFSEDEYQEFVKQHYNKNRGKRNKLLLDDIPEKMIERQMNDTRYISKFVMQLLSNMVREETSKDDGVNSKNVLASNGQITSVLKNDWGLNDVWNDLILPRFERLNELTHSQNFTTYNERYQKYLPQVPFELQKGFQKKRIDHRHHAMDALVIACATRNHINYLNNQNALDKKKSKEQKQVAREDLRAVLCDKKYNDGSNSNYQWVFKQPWETFVVDAMQKLETTLVSFKQNLRVINKTINKHEKYVDKDGRWLKEKVEQTIGESWAIRKSMHKDTVAGHVNLRERKIVNLPAAIDKWEVLVDKNLKTKIKQLINEGFDKKKIVRFFSDLEYKWMNKDVSKPELYYFSDEKEMLVASRVNLDVTFNEEKIKSITDTGIQKILLEHLGQKQNNPEIAFSPEGIEELNQNLTFLNDGKPHQSVYKVRTFEPKGNKFSVGQSGNKKDKYVEAAKGTNLFFAIYQDENGKRSYETIPLNIVIERQKQGLAPCPEENSDGLPLLFYLSPNDLVYMPEMEERDNLQPIEFQKLKKKQAQNVYKMVSSSGTQCFFVKSEVAVSIVNKIEFSALNKMEKSIDGRMIKDICAKLKVDRLGNISI

SEQ ID NO: 5370 - protein, 1512 aa, unidentified
  REGION 1..1512: note = Description of Unknown: Cas Enzyme sequence
MKKILGLDLGTNSIGWALVEQNFDEKQGKILGLGSRIIPMSQDVMDAFGGGGQIQTGAANRTLARSTRKLYQRDNLRRERIHRVLNILGFLPEHYKSQIDFNTHKGQFINGAEPKLPYCINAYGKFEFLFKLSFEEMAEEFKLQHPELFENGKKIPYDWTIYFLRKKALEYKISKEELSWVILNFNQKRGYYQLSEESGANDDKIQTYEVLKVKEVIDTGETIKGKNDKLHEVYFENGWKYDKQIVKIGDWIDKTKEFIVTESIVKNGEIKRTFKAVDSEKDWIAIKQKTEQFIEKSGKTVGQNIYDTLLKNPTQKINGKLIRTIERKFYREELALILSKQIEFHPELQNEDLYKASILELYPYNEAHRNNIANRRFDYLFNSDIIFYQRPLKSKVSLISECSLEYRLRKDTGEKVYIKCIARSNPLFQEFRLWQFICNLKIYEREKIVNSRTRFDVNVTEEYLFTNEKWIELFGFLNDKESVTQKQLLAYFKLKEDKFRWNYVEGKEYPCNETRSKFINRIKKNEGIDKGFFNVNNTQHLWHILYSVTDPEQRKSAIARFALKHQLSADFTESFSKFPPFKREYGSFSEKAIKKLLPLIRVGEYWSFDNIDEMTKNRIGKIISGEYDENIKLRVRENAFNLQQKENFQKLTLWLASYIVYNRHSESADTIKWKTAQDIADYLNPRLKASFKQHSLRNPIVEQVITETLRVVKDIWTEFGKGEENFFDEIHIELGRDMKNDKKTRERISNQVTENENTNQRIKEILKELMNEGIDVKPYSPSHQEILKIYEEGIYHNESKKDQLDLIDKIRKSNSPSIADIQRYKLWLEQGYVSPYTKKTIQLSELFTPKYQIEHIFPQARYFDDSLSNKVICEAEVNQLKDNRTALEFIIEFGGTKVEIGNGREVEILKMNDYEGHIKAYFGKNKAKREKLLSVDIPDSFINRQMNDSRYISKAVKTLLSNIVREDNEQEVTSKNIVTITGSITSKMKQDWGLNDIWNDIITPRFKRMNQITNSNNFGSINPNTNKFLPTVPDGISKGFSKKRIDHRHHALDALVIACLTKDHVSYITSINTERKNYSLVPKLRKIEEINKNIIDSHGNKSVEKRKIAADFLKPWQTFTQDVGEKLETTIVSFKQNNRIINKTKNKHWKWEQEEGQIKKNLVSQTKGDNWAIRKPLHTPLPYGKRNYDFSVLEICKNVGQRNYIIDEELKVKVIDTFELNGKKVGNTEKYLKKNPIIDNDGTEITFTSFSVAETRYRKRQPITKLANRGLGGVKTKEQAVSLINKVSDKLIRIDLLNHLKSNNNDIDQAFSIEGIARFNSSRKIPVYKLPISEASDLKFPLGYKPNTFKKFGEAESGTNLFFAVYRNEIKQKREFETIPLNVVIEHQKLIAHLPKEQRTSVPINKGKGNFLFSLSPNDLVYLPTVEEQENSTLVDFNSLSKEQTNRVYKMVSSSGNQCFFVRNDVSTTIQNKIEFSALNKTERSIDDLMIKDTCWKLIVNRLGMIIKVVKD

SEQ ID NO: 5371 - protein, 1093 aa, unidentified
  REGION 1..1093: note = Description of Unknown: Cas Enzyme sequence
  MOD_RES 35: note = Any amino acid
  MOD_RES 40: note = Any amino acid
RITDRFVRSWHPKSDADRQRRAELMRALKSKEIMXLLTTXQPVMTIPPYDDMNNRGAVKCQTLRLNEEYLDKHLSNWRDIANRLNHGKFNDDLADSTVKGYSKDSTLLHRLLDTTKEIDIYGLRAKEPNDLLVKTLGQSDANRLHGFAQNYYELIRQKVRAGIWTSSDGMLKRCDHNPPHKTNQVHNLVAGILGVKLDEARFAEFEKELWSAKVGSKKLSAYCKNIEELRKTHGNLFKQVSEAGEDKDVLKYQKDLEFWTTKIAEFFGIDNECKQRFNNLFSMAQLHTIIDTPRSGFSSTCKWCTAENRFRSETAFYNDETGEMYNKATATCQRLPADTQRPFSGKIERYIDKLGYELAKIKASELESLEAQNIHLPIILEQNAFEYEESIRSAKIKNANKKANEKLDKALKNNQKSLDAKTDRIKAFSGGVCPYCGEMLGDDGEIDHILPRSHTLKPKNGGTVFNSEGNLIYVHQKCNQAKADRVYKLSDIKAGVSAQWIEEQVTNIKGYKTFSVLSAERQKAFRYALFLPNDNEAYKKVAEWLRTDQSARVNGTQKYLAKKIQEKLIKILPNKHLSFEFILADATEVSELRRQYARQNPLLEQQNKQAPSSHAIDAVMAFVARYQKVFSGGTPPNADEVVNLATLDSWSPASNEPLTKGLSTNQKIEKMIKSGDYGQKNMREVFGKSIFKDEAIGERYKPIVTDGDKIYIGYPKKISGGYDLQYCYEATSKKEREQINSILASKYARLAKDEQNIKLYEIDKKAVSEASNVLFGSAYSDLNDLQKMEATLVEAIINNCKYYVKKTEVVNAPQFVAKADMRAYPFYDDWVRFDNAWKAQIKDGYKEKLEQGKKVYDISQVADEWVEFCKSYFGITKSDIRYKARKTFSLIALTSAPGTVFRLKRKTHRKDDFVYQAIAIDNQQISGDYANILLKNGKQTIALAGQYPSSSLKKEISVKETKEIRSVVIDPKILFRDDFDVNGIDVILNKTSATIKNFPISKVKDFLLGSEKRFALLYISGQKIKKSKNRSKPKTTLELLSKNKQANKLCVKKDAVDAILKLSTRDGSVSQIAVRDGVIDFVLPFKSTQKLLK

SEQ ID NO: 5372 - protein, 1491 aa, unidentified
  REGION 1..1491: note = Description of Unknown: Cas Enzyme sequence
ILGLDLGTNSIGWALVEQNFDEKQGKILGLGSRIIPMSQDIIGEFDKGNSISQTAERTGFRGVRRLRERHLQRRERLHRVLNVLGFLPKHYSDKIDFNKRLGDFLPETETKLVYNERNEFIFKKSFEEMLHDFQRNQPDLVADGRKVPFDWTIYYLRQKALTSKIEKEELAWLLLHFNQKRGYYQLRGEEEEENQNKLVEFQSFKVVNVVADLPQKGKPEIWYSIILENGWIYRRASKNPLFDWQNKMKDFIVTTDLNEDKTVKTDKEGKDKRSFRAPSEDDWTLLKKKTESEIEKTGGTVGRFIYNTLLANPNQKIKGKLIRTIERKFYTEELNLILRKQVEFHSELKNIDLYNACIEELYPHNESYKNSLLNKDFVHLFIEDILFYQRPLRSQKSLISNCLFEYRSYVIDGIKKSESIKCVSKSHPIYQEFRLWQLIQNFKIYNRQTDEDVTSEYLFSEEDFVRLFDFLNERKEVEQKMLLKYFKINEKTHRWNFVEDKKYPCNETHSMVKSRLEKVENIPADFLTPEIEEKLWHIIYSVNDKIEYEKALKSFSLKHNLNQDSFFENFRKFPPFKNEYGAYSLKAVKKLLPLIRMGKYWSYENIDSNTKSRIQHLLTGEFEESIRERVRDKVIAITSELDFKGLPLWLTSYIVYDRHSENSEIGKWNTVKDLENYLAAFRQHSLRNPIVEQVITETLRVVKDIWNQFGNGEKDFFDEIHIELGREMKNPADKRKQMTERNTENENTNLRIKALLMEMLNDSNVENVRPYSPIQQEILKIYEEGVLNSGIEIPEEIEKISKLAQPSGSDLMRYKLWLEQRYRSPYTGETIPLNKLFTPAYEIEHIIPQSRYFDDSLGNKVICEAAVNKEKTNQTGLEFIKNHHGQIIETGSGKKVRIFSEDEYQEFVKQNYNKNRGKRNKLLLDDIPEKMIERQMNDTRYISKFVMQLLSNIVREETSKDDGVNSKNVLASNGQITSVLKNDWGLNNVWNDLILPRFERLNELTHSQNFTTYNERYQKYLPQVPFELQKGFQKKRIDHRHHAMDALAIACATRNHINYLNNQNALDKKTSKDQKQVAREDLRAVLCDKKYNDNSNSNYQWVFKQPWVTFVFDAKQKLETTVASFKKNLRVINKTTNKHEKYLNKDGKWLKEKVEQTKGESWAIRKPMHKDTVAGHVNLRDRKTVNLSSAIDKWEVLVDKKLKTKIKQLINEGFDKKKIVKFFADEEYKWMSKDVLKPELYYFSDEKEMLVASRVSLDVSFNTTKIESITDTGIRKILLKHLEEKQNNPEVAFSPEGIEEMNQNLTVLNNGKPHQPILKVRTFEPKGNKFTVGQSGNKKDKYVEAAKGTNLFFAIYQDENGKRSYETIPLNLVIERQKQGLAPCPEENSAGLPLLFFLSPNDLVYIPSFEEKESSLLVDFKNLRKDHLARIYKVISFTGKRLYGIQSNVATTIVDKVEYSLLNKLEFSIEKIAIREFCIKLKVDRLGNISI

SEQ ID NO: 5373 - protein, 1271 aa, unidentified
  REGION 1..1271: note = Description of Unknown: Cas Enzyme sequence
  MOD_RES 503: note = Any amino acid
MAKILGIDVGTNSLGWAVIDHQKGKILTLGSRIFPEGVNIDKGREVSRNVKRRMSRMGRRKYFRYKLRRKKLLRLLNEKFGVSPDKNYYTFEKKPSSEKKCLWEQDSAEEKVLITSKKLYFLRKKALEEQISLSELGRIFLHLNRRRGFLSTKLDESGSDKKKKDETGKVKSGIKTLKNEIEECVKSGNIKIGTLGEYFYWLISQHPDAPNIRIRGRYTERQMYEFEFDKIWDFQRQFYPSILTDENYSEIKEKCIFFQRNLRSQKHLRSRCLYEFRTFYKNGKECRNYLQCALKSSFEFQEFRIWQSVNNLRYIEKGDVFELTQEQKEILAAKLDSVEEFEQNRNKKNLNFGNKITFKGERKEDELKDKMKGNTTKSQIINALGEEFLRKFSDSERSKILIDIWHYLVFASHFPNGDSWLRCETAKSLKRQNYAAKIGLNETQLKNLAEINLEPDFCSLSSKAIKKLLPHLKKGKHLRQAEVEAKYVKNDDSENKKVQYSLXEIKPLRNNELRNPIVQQSINETLRQIRHLSRTFGQFEEIHIELARELKKNKKERERIRSGQNKTFFQRQDYITFLKKQGISPTKENILKFELFLELRCTEEIEKKKSSTKKEEKTEEKKDSKKKTPEEIQSELFELWKKSRILPYENMEISLHDIFNSYIEVEHIVPKSQSLDDSFQNKTLVTSEFNAKKSNKTPFEYFSKTEFEKFKKRVSHFSDEKQKLFLMKTADELTDFKNNQLNDTAYIARKLSEYLRMYFPNKIILTKGGVTKQIRQELHLDSLIKPEIFTKIRDAKNKIKFSKSVHPKNVDFESLKYDGLDKKNIGNCWAIFNEKGKFQSFIRREENDEFCENLQTNNFAVAGEIVFHEGKQIGYKFYSKKNRSDHRHHAIDALVIALTTQALIKKLSDESANHNSRKTLFETIKRDILQKFPNIKDDAKNWIKTLLISYRNKNIAVTFQRKKLYLPNGKVNIKKGKMMLSGGVSARGELHEESFYGQIKNPYEHQESNYVIRKPLESIDNKAKVEKIVDKPIRDLVKNYLRFELVVNINSVKYEVPKKAFFNEDGTTRILLKNQHGKEIPVNKVRWVNNSKSLYPIRKGKTFVETGNNFIIAIYGSEVLEKKEKREFEVVSFIKAAEITKRNKGKKDKELLFPREKKGKKLLTYLQKKDLVVVYQNHPDEIEWENQKFLFKRLFFVIQFDVNGNIILGRHNLQIDKADSANRENLDNFLGSVIDCNENSFKGIKVYFDKNGKLLRCGKNIIPQKKDNLLF

SEQ ID NO: 5374 - protein, 1455 aa, unidentified
  REGION 1..1455: note = Description of Unknown: Cas Enzyme sequence
  MOD_RES 1211: note = Any amino acid
MKRILGLDLGTTSIGWAYVLEGETQAETEIKQIGVRVNPLTVDEQTNFEKGKPLSTNADRTLKRGARRNLDRYQLRRENLIDVLTKGNIINTATKLNEDGKQTTFQTWELRAKAAKERIELDEFARVLLAINKKRGYKSSRKAKNEEEGQAIDGMGIAKKLYEENLTPGQYVFHSMLSGKKAISDFYRSDLQNEFDKVWNFQKQFYPEILTDEFYKELKGKGQRATSAIFWTKYKFNTADIKGLEDKLKNVNTIKFDARTQKKLQAYKWRNDAISEQLDKEQVAYVLTEINNNLNNSSGYLGDISNRSKELYFNQLTVGQYLYNQLIENRHTSLRNQVFYRQDYMDEFEKIWITQAQFHPELTEKFKEEVHDIVIFYQRKLKSQKGLISFCELESNEIEVNGKKKTIGMHVAPKSSPLFQEFKIWQNLNNLLIKKAGSKRRTVKKDDQTYLFEEEKEIFELNIDAKQHIFDELNIKGNLTSKSVIEILGYKPQEWQMNYSQLEGNRTNQALYNAFLKILEIEGYNEDLLKLSDADEINIKDLKTPALEIKEMVKRIFDVLGINTAILEFDAKLEGKEFENQASYQLWHLLYSAEDDTKKYSEDDKLLYGNENIGLKKQLCSKFDFKPEHARILVNITFQDDYGNLSTKAMRKIYPFIKEHKYSEACEYAGYRHSKHSLTKEDIDNRELKPRLELLKKNSLRNPVVEKILNQMINVVNTLIDKENKLLQEQGKKPDFHFDEIRIELARELKKNAVERAELTTNINVAKIAHEKILKLLQTEFGLKNPTRNDIIRYKLYEELKNNNYKDLYTNKYITREILFSKQIDIEHIIPQSKMFDDSFSNKTVVYREINLEKANKTAYDYIESKFGEEKLNEFVKRAENLFESGKKNKEEGISKAKYQKLLKRESEIGDGFIDRDLRDSQYIAKKAKEMLFEITRAVVSTSGQITDRLREDWGLINVLKELNLPKYRALGLTEMEERKFGQKVEVIKDWTKRNDHRHHAMDALTVAFTKHNHIQYLNYLNARKNEKHKEHKNIIGIEAIETEVKMDDNGDKKRVFIEPIANFRQIAKKHLENVIISHKAKNKVVTKNKNKITGKEKPQEVLTPRGQLHKETVYGKYKYYEQKEEKVGAKFDKITIEIVANPLFRQLLVQRLNAYGNDPKKAFTGKNTLDKNPIYLNEEKSEKLPEKVKLVWFEEDFSIRKDVTPDNFKXQKSINKIIDLGIRRIMEARLKEFGGDSKKAFSDLEKNPIRLNKEKGISIKRVTISGVKNAEALHYKKDHFGKPFLDKESNKIPVDFVSTGNNHHVAIYRDENENLQEKVVSLFEAVARVNQNLPIIDKTFNQQLGWQFLFTMKQNEYFVFPNEKAGFNPVEIDLLDPKNKKEISPNLFRVQKISTKNYVFTNHLETKAVDGDMLKSKKELSSITYNFIQTPSKLEGIIKVRTNHLGDIVDVGEY

SEQ ID NO: 5375 - protein, 1243 aa, unidentified
  REGION 1..1243: note = Description of Unknown: Cas Enzyme sequence
  MOD_RES 429: note = Any amino acid
  MOD_RES 922: note = Any amino acid
  MOD_RES 924: note = Any amino acid
MKKILGLDLGTNSIGWALVNEAESESEKSSIIKLGVRVNPLTVDEQTNFEKGKSITTNADRTLKRSMRRNLQRFKLRKESLLNILKEHNFISEETILSENGNRTTFETYRLRAKAAIEEITLEQLSRVLLMINKKRGYKSSRKAKSQDEGQLIDGMAVAKQLYEDNLTPGQFVFRILKSGKKYLPDFYRSDLKEEFSKVWNFQKQYYPEILTDQFKIEIEGKGQRATSAIFWKKYNFNTAEYKGTRDEKKIQAYEWRSQAINTQLTKEEVAFVLAEINNNLNNSSGYLGSISDRSKELYFNKQTVGQNLMAQLEKNPHTKLKNQVFYRQDYFDEFERIWETQARFHPELNSNLKEEIRDVVIFFQRKLKSQKGLISFCEFESRQIEVEIEGKKKTKTVGNRVCPRSSPIFQEFKIWQILNNIQVLNKVXKGSRILEQDEKELLFKELNYKDKISKNDCLKILFKNYKELDFNFKENIEGNRTYASFLSSIQQIIEVSGHGEYDFSKMKTDDILSVVIPFFEGFGYNKELLNFNSALEGKAFEQQAFYQLWHILYSFEDDNSNTGDEKLILKIKEKFGFENEYARIISNISLQSDYSSLSTKAIRKILPHLKEGNEFSLACEFAGYRHSKSSLTKEEIENKILKDRLDILPKNSLRNPVVEKILNQMINVVNTSIEVYGKPDEIRIELARELKKSAKEREDTTKAMSQTTIEHEKYREILKKDFGLMHVSRTDIIRYKLYLELENRGFHTLYSNTYIEPNKLFSKEFDIEHIIPQSRLFDDSFSNKTIEARDINIEKGNDTALDFIEKKYGENGINGFMTRIEDLYKSGKISKTKYNKLKMKGSEIPSDFIARDLRDTQYIAKKAKNILEDLVKEVVSTSGSITDRLREDWQLIDVMQELNWEKYDLLGMTEIIENRDGHKIXRXKDWTKRNDHRHHAMDALTIAFTKRSFIQYLNNLNARSDKSGSISGIEQKELERNERGKLKFNSPIQPIEAFRAEAKKHLENILVSIKAKNKVTTININQTNKAHGFQKKKQLTPRGQLHLETVYGSQQKHVTKEEKVNGNFNEELINKVANKKYREALLNRLAEFDNDPKKAFTGKNTLEKNPIFIDANQKHKVPEKVKLVWLETIYTIRKNITPDLKLDKVVDAKIRTILQNRLNEFGGDAKKAFSNLNENPIWLNEEKGISIKSVTITGISNGEPLHSKKDKEGNLILDENGKTQAVDFVNTGNNHHVAIYKDENGN

SEQ ID NO: 5376 - protein, 1514 aa, unidentified
  REGION 1..1514: note = Description of Unknown: Cas Enzyme sequence
MKKILGLDLGTNSIGWALVGEVEENKEILGIGSRIIPMSQDILGKFDSGQTVSQTAARTDFRGVRRLRERHLLRRERLHRVLNILSYLPDHYSKFIDFEKRLGQFIDDAEPKLAWNEVDNNKFDFLFKTSFYEMVEEFKISNPELFELNTKGEERKIPYDWTIYYLRKKALNAKIEKEELAWLLLNFNQKRGYYQLRGEEEEENPNKLVEFHALRVSEVTADESQKGKTDIWYNVLLENGWIYRRSSKTPLFDWKDKIKEFIVTTDLNDDGSIKLDKDGNQKRSFRAPSEDDWTLLKKKTESDIDKSQMTVGCYIYETLLQNPSQKINGKLVRTIERKFYKQELEAILNKQKEFHPELRDPKLYTTCLEELYENNESHRNSIGTKDFTHLFLNDIIFYQRPLKSKKSLISNCKYEIRYKDKGESTEEKYPIKCIAKSHPLFQEMRLWKFVNDIRILEREKDVDGKLRMDVDVTAEFLKSEDDFVALFDWLNDKKEIKQDTLFSSYFKLKKKKGEDKHSHRWNYVEDKEYPCNETRALMLSRLSKTSNVPFDFLTKEIELELWHILYSVEDKLEIEKALKSFASKHSLCDDFVDVFKKFPPFKKEYGSYSAKAIKKMLSLMRKGKYWDENNIDKNTKDRIDKIITGEFDEKIRNRVREKAINLKEIVHFKGLPEWLVCYVVYDRHSESGDILEWKTPQDIEDYLKNEFKQHSLRNPIVEQVITETLRTVKDIWKKHGDFSEIHIELGREMKNPADKRKSMTEQISQNENTNLRIKALLAELSNHNDIENVRPYSPSQQEILKIYEEGVLNSGIDIPEEILKITKTSQPSKSDLTRYKLWLEQKYRSPYTGEMIPLGKLFTSAYQIEHVIPQSRYFDDSLSNKVICEAEVNKEKDNALGYEFIKNNEGRIIELGFGKKVKVFTLQEYEDFVKIHYSKSRGKMKKLLMEDLTEDFIDRQMNDSRYISKVVKSLMSNIVREEDETEAISKNVITCTGMVTDTLKKDWGLNDVWNRIVTPRFERMNELTKSNDFGHWTVKDGKKVFQTEMPLILQKGFQKKRIDHRHHAMDALVIACATRNHVNYLNNEHAKQKNSDIRYDLRNKLRRIEEIEVDRIENGIKVRKKIKVAKEFHKPWNTFTQDAQNALENIVVSFKQNLRVINKTVNKYQRFEDGKKVIATQTKGDSWAIRKPLHKETVAGVVNLRFKKEVNLSTAIDKWEMLVDKDLKTKIKQLITEGLDKKKIQKYFAEQDNKWLGKELAKVELYYFSSDKESDILVASRVKLDESFNAKKIESITDLGVRKILTNHLNKYHEESTGKEHPELAFSPEGIEEMNVNIQLLNDGKNHQPIYKVRTYEPKGNKFNVGIKGNKKDKFVEAAKGTNLFFAIYQDNDSIRSYESIPLNIVVERLKQGLGEVPEINEKGHRLLFHLSPNDLVYLPIEDEIPNHKNGFNNDNIYKVVSFTGNRLYCIQETVAKSIVDKIEFTQLNKLESDLSTNISIKKICLKLKIDRLGNISL

SEQ ID NO: 5377 - protein, 1879 aa, unidentified
  REGION 1..1879: note = Description of Unknown: Cas Enzyme sequence
KNMKRILGLDLGTNSIGWALVEIDHEKGIVKILGLGSRILPMDAGEINDFESKGKIKSSTSQRTDYRGARRNIERFLLRRDRLHIILNLLNTLPEHYKIEIDFERNGKRCGQFKNYKEPKIQYIQNKVDKKKYDFLFEDTYKEMLCELNIEHKKKNLIPRDWTLYYLRKKALSKKISLEELAWVLLSYNQKRGYEKIEVENKVTKENEIIEELDLRVKDVTEQIDIKGEKYFKVELDGNDRLTYNEYSSLQMTFKNDLKEVKIISQIDDSGNIIGKELTIVDIYPLMIKDVTYERDGEKHNYSLTYQNGWQEIKSPKKYTSRYTNVINKPFEYIVETIYDEKGNIKTQLGKDRKLREPDFSDNSNDWTLLKKKTEKDALTFNWDNNYINEKNEPQRFISPKIYDVLKNDSLSGNRTKIIGGMFQVVERDFYREELAQIISTQKQFHITLEDKKIFEECVNVLYPNNESHARTLLSNKDAIQHLLIEDILLYQRPLKTKKSEIANCKYEVSQLKDVIDKNTGKPIEIVDTETGEIFTKKIPIYHKVVSASHPYFQEFRIWDKLHNLRLIQIEKEVNGKIKTNVDVTEDYFSTETYQKLFLLLNNKNSLNQAGLLKFLDDKFKEKKESSKNFIWNFPEDEELKRNETRVSFAVRFKRCGFTNYANFLTQEKEIALWHYLYSVSYKERNADDYKSIKSFLSKFFEGANIQDNIKEKLVKDFAYYPKFASKYCAYSEKALKKLITFIRMGESQFNSQFDITEFKSDLELINYDKSKILSHIGFNSDNRATLTIVEKQDLELKRQKLYEAIWKHSINERIQEILNRLKTINYSADEIDFSKAINNDNRNRNIPFPKGLFNTFISFDKQEDFTNLNLTQASYLVYGRHSELAEAKYWTSPKEIRDELHQELKQHSLNNPVAEKVILEMMQIVADIWDYYGEGKEKYYSEIHLEVGRELKKSAKEKQSISSNQSDNKAQNKRLRQTLEDFLSKSPYNAISQNSDHFERLKIVEDGASHTKNLDKTFFNDKPYTKKEIEDILKKPFISKEDFEKYKLWIEQGYKSPYTNRMIKISDLFDGKKYNVDHVFPQASVTNDSLSNKVVCEFEVNKLKSSQTGREFINSPKQRSIYCLSHKSEVDIVNDDTYVAIVKSQFSGNKRQILLSKEIPSNFTNSQLNNSQHIARKAMELLSHIVRELGEIEFRSKNLLPVTGEITSKLKRTWKLDEVWRELVSPRFVRMNELTKSNLFGQEQISKSGEKYFDCNIDNTIREKDPSYNIKRIDHRHHALDALVVALCTEEHVNYINNINANATSDNYGKQKQIEKYRETLKRKIMFSKPNKENPNDKDWFFMYPGQVRKSGVDKFGIETVLKKSYFYKDLEFNENYKEMVLSAIQHTIITFKQNLRVVNKTVNLYNSTSNKNKLEKQKDKEVGNKYNWAIRRSLGKNTYYGKVYLGETENKQLHKTLREIYNSNERIIDNKLREKVIAIKNTSNGFDEFEKQVKSTFKNIMIELKVYKVASREFLSGEFNKEKILKITDTGIQKLLLNHLKQFDTVKLPFEDALIYYDYLLEKPEIEAIINNKDSKFETVNDFVAHLRLNGYKYNKVEYKTLNVFIAKITERDFRSEFKEAIDEHPEIAFTIDEIDIMNQPENLKKLNEGKNHTPIIKVRCSTGYGKQRQVSDEPQSVKSKQYIVNDAGSNLYLGFYERHYIDKIGDKKTERKFQDIGLIDLVEKLKQDNDNRKNPLPEKFYDDKKNEYNLKFTISPLDLVFIPNEDEIVNPSLVDFNNLSKDQINRIYKYIDGNANFLPYSVAQPIWKFHDDKKKKEIYNQINEKHSIQVSEKELIKDEFGFGSQQTKNQNMIDGETQIKKICIKLKVDRLGNISI

SEQ ID NO: 5378 - protein, 1227 aa, unidentified
  REGION 1..1227: note = Description of Unknown: Cas Enzyme sequence
MKYALHLSDKGSIPDKDIEKISKKWQQHSFYQSDLVLGLDIGIEGIGIWLRQGKKPVFAQTVLVELPTASPLKDRRSKRAQRRARVSLKKREAMLKEWIVKYGLLSKDRVEQIWENPSVFQRGFEHRYRAIQKKDALKSPEALVSCIRHCIQHRGFDYHLSNDSTFPWGDTMDEPGPILQWASRASCPESAVSKWKRLLSDAPWSDNETKLNKVLESLDKSVERYKGDPIGTHLKEHFCEKGHPNLREPARGENYPRELVKAHLRKTCTNHASMFGDTKVMDAALLDLLGESDQKAEPASIIDFHRKTQCEIEKLWERKTNDCPYLPLLADRVKKSALTKKCSPGSAPAIRRFKLLQFLAERTFVTIKGNTLERTYTPAPLFKEIWKLLEDDIAATTAKKEATKREKTGKKEIKSLVETKAQVELAPDATSHNKDFFDQLLDLLYPRLSDLDARASLSETAASYFVDAAGVGDGSTFDAAQVRANWKETYYEWRRFAAQGGPIYPQVELLLGNPRQYDDKTGKTKDANKGNPQEHGILRRLFAGQFVDSHGRRVDISAEIGDKKVPDAVIIETIGDIPRNSDQAKEIQKQQKEKRDAKDAIAAKYKLPQDATPNQIKRALLFDQQTGKDGRAICPFTGDDLGTDPLSKDLEVEHLYPREMGGISEMVNLALTKRQTNADKGKRTPFQVAGQTVGKTTFSQWSEMRKRAESTMRWNKTKRELFCREETTCPEWQNLTRTAQLARQLRDQIIRWLRLHLIEDDNLRSNTIAARIGTPSGAMTAACRRSWRESLPEFMRESKDRGNLRHHLYDAAVLSHIPPREGMNLTSCGGIFLSDYDPKKGWVTIALPGLLPDLSSFQASTEVSCLVYKPKNSKSKTARYDGTIYSPPDEHGIRWTRFKGTLADWLGDKKITLEKIKADIRAAGIPADKLPDKLIEKWYQQKGDTDHPIQPLRFPAFKAGVAGQKIETVTRKITKPCAEPVYGPHLNAKGEVIGWKVGQEAFVRCEIWAAPNPHDQEGILQDYYQRRVFHPRHIVNLAKRCLSDGRSLTLDLPLSESDLRELALHGIADEMRATYNKEVARLEKNIAQATEKRGKTGDLFDPASVPAPIPAPTSTLRAIYCEPKSIPTNAKIVGKLYKGLVLMAPINALGSIYKRTDEIPADGKPTCGWIAYTVSAIKSSGEIEMKLAERKKLDPEAQGSAQAMRESLGVTSNDDLAYLLELQKDIL

SEQ ID NO: 5379 - protein, 1203 aa, unidentified
  REGION 1..1203: note = Description of Unknown: Cas Enzyme sequence
  MOD_RES 96: note = Any amino acid
  MOD_RES 766: note = Any amino acid
MKKNLGLDLGTNSIGWGIVENDIENGNNKILGIGSRIIPMSQEILGKFDSGNSVSQTAERRGFRGARRLFERNHLRRERLHRVLNVIGFLPEHYTXEIDFEIHFGKFFENSEPKIAYKFNIETNKNEFIFQKSFGEMLEDFKNNTPELLEGGNKIPYDWTIYYLRKKALTQKIEKEELSWILLNFNQKRGYYQLRGEEEVENPNKLVELYSLKVVEVVADDKPNNKGEMWYSIKLENGWIYRRTSKIPLDNWLGKIRDFIVTSDINDDGTIKKNKEGSEKRSIRSPGEDDWTIVKKKTEKEIKIQNKTVGCYIYDTLLKEPTQKIKGKLVRTIERDFYKDELELILEKQIEFHKELRDSDLLKLCSEELYRTNENYREKIISKDFLNLFLNDIIFYQRPLKSKKSLISNCSLEIYRFKDKEGNIVEQPIKCIPKSHPLFVEFRLLQFVQNLKIYEKDKKIDGVLKHDFDVTNEFLKTYDDWNKLYEWLNDREKISQKTLFNSYFKIKAEKNEELKYRWNYVEEKEYPCNETRHNVLIKLKKLNIPDSFLKNDNEIKLWHILYSVEDKNDIEKALKTFATAHSVDNIDYFVELFKKFPRINKVYGSFSEKAIKKLLPLMRIGKYWNEESIDLKTRERIEKIISGEFDESIKNRVREKAINLETAQDFQGLPLWLSSYIVYNRHSEASEIEKWESPSDIDKYLNQTFKHNMLRNPIVEQVITETLRVVKDIWVKYGNSEKDYFDEIHIELGREMKNNAEDRKAITKNXLNNENTNLRLKKLLIELYNSPEIENVRPNSPSQLEILKIFEEGAILSKEKNDDIEKIIKNPNPTQSELNKYKLWLEQSYRSPYTGEVIPLSRLFTTEYQIEHIIPQSKFFDDSLSNKVICEAEVNSLKNQLLGYEFINEHGGEKVTLNYGRVVEILKKEEYEKFVNNTYSKNNAKRKKLLMLDIPEKFIERQLNDTRYISKYIKNLLSNIVRQDGEMESTSKNVLSSNGGITTKLKQDWGLNDVWNSIISSRFERLNEITNSNNFGYWDEKDGKRYFQTQVPLELQKNFNKKRIDHRHHSVDALVIACATRNHINFLNNEHAKSKEEELRFDLRNKLCIKKYNDGSNYKWIFKKPWDTFTQDAKNCIEKTVVSFKQNLRVVNKTKNIYQKLEKDENGNVKKIFIKQVKGDMLAIRKPLHKETVAGRVNMKFKKSVQL

SEQ ID NO: 5380 - protein, 1213 aa, unidentified
  REGION 1..1213: note = Description of Unknown: Cas Enzyme sequence
MKKILGLDLGVASIGWALINVEDDIPVEIVNMGSRIVPLSPDDSTEFNSGNAISKNQRRTERRTQRKGYDRYQQRRTNLTNFLRKYNMLPTEELIKLDVLELWGLRAQAVNEPITLPELGRVLYHLNQKRGYKSAKTDEVEDKKQKDYVANVNNRHKKIRDLGQTIGQYFYDQLLKDVHYRTKEQVFPRKAYVEEFDAIWNFQTRHHSLVLTEEIKSIVRDEIISYQRNLKSCKHLVSLCEFEKRAYKNKGGRAVFDGPKVAPRTSPLFQVCKIWESANNLVIKNRKGEELHITTEQKLAIVNHLDNNEKLTLTDLYGILNINKKDGWWGGKAIGKGLQGNTTKIQLKKALVGSSNTGNLLQFDLKIVDTNLVDTETGEIIQQIDSGFINEPLYRLWHTIYSISDKQELANTLSKNFGITAPEIIDALYKIDFVKAGFGNKSCKAMRKILPYLQLGLMYSEACLAAGFRHSESLTVAENQARALLSKLPQIKKNELKQPIVEKILNQMINLVNQVIEQYGEIAEIRVELARELKQSKDERNATDKNMRQREKENDYFAKRITEEYGLTATRTRIQKFRMWEESKGKCFYCGQTVNVTEFLKGFDVEVEHIIPKSLFFDDSFSNKICSCRKCNSEKGNKTAYDFMNSKSENEFKDYLQRIEMYFNNGDISKTKRERLQTPKEKIPTDFIERQLRETQFISRKAKEILAQVARNVWATSGSVTDFVRHTWGWDNILHDLQFEKYKTTGQTEIVEYTHKNQTHTREQIKGWSKRLDHRHHAIDALTVACTRQSYIQRLNNLNTEREAMFQELKNQNEDYKEKFTLLEKWLNEQPHFTKEQVQRKVSGILVSFKAGKKAASTGKRFKYVHGRKVVLQEGIIVPRGALHEESIYGKIKTIEEKKPLKYLFENPELIIKPRIKELIEKRLNEHNGDIKKALASSKTTPIELAKGINLEYATCFKEEYVIKYPIQSIKAKDIDWIIDKHVKEVVSERLMQFNYKEKEAFKDLGANPVWLDENKTIKVNSVRCLTGLSAVEPARKNDSGVAIGFVKPGNNQHIAIYTDKIGKKQEHIVTFWSAVERKKYGLPIIITNPAEVWNKIQDRDLPESFLNGLPLVDWTFEVSLQQNEMFVLGMPEEDYFKAIMDKNYSLISDYLYRVQKIGSGDYSFRFHLETKLDDSTEAKRVNKVYRIRSITGFIDLNPIKLKIDCLGNIIIK

SEQ ID NO: 5381 - protein, 1315 aa, unidentified
  REGION 1..1315: note = Description of Unknown: Cas Enzyme sequence
MKRILGLDLGTNSIGWALVEIENNKIEGMGSRIIPMGTDKQDYEKGVGITKNATRREKRTTRKGNKRYKLRRNKLLFILSELGMLHNQFQFKNGIPEPTKLQDLELLPISKKTKQLDAQGLLELKVKALEEPIELKEFGKILYQFNQLRGYSGGNSNENNKTKEDEQADIEKKRYEVVVQKVEILRVEQSEYTFTVRGGKNKGEKQYYFDITINFDGEEIEGQTELQNLKEKEGLEEELEIRITRKKDDNVTYKFALPQKSNWRKAMELSEKTLQEENLFISQLHLGDLQQNKWTKIRNRVFLRNRYKEEFDKVWEIQENQYPILKDCPKDILEKIAYYIFPGNSESQQTLRKTALEKGLKYIIKDQIIYYQRPLKPQTELISNCRFEKEEKVIPTSHPFFQEFRCWKQINNLFITSKTQVGNKYTYQNRYLSTKEKQTIYEKLRNQKEVGFATIIEILNQDKSKGKLEKEQKEYFLNGLNVKAKLKGCDTLLSIKKELDDYFNDFISQDEKLVEKLWSVIFDVNNHDGSEYDVESKRVSSIIAVLENYTDKQIAKELSLRLAQKIKFPRKYASLSEKAIKNILFLMLPNPLSVPNEIQQHFKNIQHLIKTGEILDNLSYDLEEYVINFVEKNPNILEEGGLMESFAISLVYGRHTSETIKAQIKNYHDIKYEERNLRNPVVEQLSNETMQVIKAIWKQYKINPEELEIRVELARDLKNSAAERDSIWKGQIKSKKNNDRIKERLAENNIHPTAENILKYRLYEQQKEMSPYTQNKIIPFSALFDKRLYDIDHIIPKSRYYDDSTSNKVVCETNINEEKSNRTAWEYITGQHSPDVRSAEDFVKYVNDNFYGKKKKNLLAERIPSNPVERQLKDTQYISVAIKNELAKIVGSDNVKTSTGEVTDFLRSRWGLRKLFMELTENRFKQMELWDLDENGNPKTQWVTRTTIDDGEKKKNLYEIKNWSKRYDHRHHSIDALVVALTTQSHIQRLNNLNKYYQDELTARKDELKIETKENESILEAFFNLEATRRDEILRTMESSRKFDAPFPIVDENGNPVLDKNGNPKSYLIDYVRKHLETMVISHKPKDKLGIKTDEFDKNTPDKILKKQIKVRAGLHQETYYGKLNGRDTKRVELSSLSITKNKATKQEEIVELIDKVLEKEIIEHKKQYDSIKEAFTGEGLKAFNDNRIISGKQPTYKVKVWYNKEAKKESGLQRLYDKNDKQSVITGDNYLFLVMEKNGKRIFDIASLYDAVSIANGAIKNNIYDFKKKIAEDYRVKHKDKPEKVLFTLQQNELVYLPTNSDDEILRMSKLDFL

SEQ ID NO: 5382 - protein, 1704 aa, unidentified
  REGION 1..1704: note = Description of Unknown: Cas Enzyme sequence
MKKILGLDIGTTSIGWAIIETADEKKINPITGKQAETDVNNDRIGIYEDAVGVRIISADEEHRRFEQGKPLNDPKGKTLTKTATRRKFRGARRMRSRYKLRRDKLLSALDFIGMKPDGAYFLKDNSDLGELYNKVKGKTGRNLGQELYKLRNNAIQNPISLKEWGRILLHLNQWRGYSSDRFKKEENEKFEYFTGTVTELSDKPLLIKYDDETESVEFVENADKTIRWKKYFIRIQLEEPIHISEGEKKEFVEGNVYAKDIKFKKGEFTTFKFNDYKKETKIEFVNPNPNDWKAKYKLLHNTLTEWCDAGGTVGSYFYLNYYEEASIERIRNNVVNRDWYEKEFDKIWAVQYSKHKETLELYSIDDILKSTFKDEQIHKDVKQKPSFEAQLKYLIKEKIIYYQRPWQQSKNKAKCRFEKIKVVKQRINIQTKQPEKYETYEGRAVVPRSHPLYQEYRIWQQINNFRIFELKGDKKEILVDYPDLLKKYHESNSIKYNTVSEIRNVIFDKLSNQKKITNPSSFAKEELGLNPELLACNYMKRKKDGTLKPVELTGNATLCSLRTVLKEYLKDKYSESWLYEIIKSTKDNHKGESANKYKTVSYQLRNIDLLWQCIYDITLRDDKAVQDVLNKHFPFFSDELIVALSQINFEEGMGNLSAKAIRKMLPIMKDGSYWDAALIPEKVRANIQEIISLNINESDQDAEDKLVSLKSIIPDRNTRRRLSVMESIQDFKGLNFWEAAGVVYGSHSSGKIGNTEISKLNIDKIIQQVPHNSMNNPVVEKIVNETLMLVRDIYKKYDGFDEVRIELSRELKASQEEREQMWDASLNNQKRIEWAKIVLREMKKDAEHSNSDLETTNKRNIDKLRIIEDVVKYRTGKEYEKKVKEFNLSEPTKAEINRYLIWLEQNFKCPYTDQLIPFTDVFSRYKVVEVEHVIPKERYLDDSYSNKVLTWRVINDAKQDNGNRTAYEFIVSKRTRDSFTVNGKQISLVDAACWEEHVKRMFAPGRKRNNLLRREIPDEPINRELKETQYINKKVKEELERIVGSGRVWTTTGKVTDILRESWHLHGVMKELIEDRYQNFKIYENKKERVEQLWFYPIDISTGEIKIDQKEYPSYSKRLDHRHHALDAIIIACTKQQHIQYINNLNTINSSDINDESEQKSKYLNLRKELCKGNSSRKFKTPWREEDFIPRVKESMSNIIVSKKNTNVLISPSRLKIKDFKKPQRSASIRGALHKETNYAKRNYYVEESHAPIEQVIEKILKRKFENQNQTMVLPKSFVDIIRQVVFKEKYQKLLAPIFLIYDLTPLSKTDIKNIKKEILEKISIDEQLSKIEWLAIYTEKNSSARPNGLSMDLNSKDEIKVIANSRIRRLAELRMRYIDEKRSQIEKSSLEKEEKDRRIKELKQIQLYSNAIYEVRVMVNNHHEWIYLPDLTEEQFNCISFQRNSRSKIVKELLEKRIAVKKEVGFLEVFSDVFENPIFINTKPIPVKKVRQLTWFQDLYEIHPKQYVYSLDTYMLYIFYNKESKERDWKFLKFIDAIKLIDSEKPLKIKTSELLKHEEKNFQLLFTLQKDDLIFLPDKSDDLEAIVEEDSFYRNISELTSKLYVVRDINPSLNKIVIQKHTIADAIQVKKDDAHQIIDGVNKDLVEEVKYGTADMLKRCIKLFSDKLGKTIVPYWKLPNGCWEKETAKRLGLIIEVNENPTL

SEQ ID NO: 5383 - protein, 1484 aa, unidentified
  REGION 1..1484: note = Description of Unknown: Cas Enzyme sequence
MAKVKYYYKQYHFYHKKLLFLSIKILIHITMKILGLDLGTNSVGWAIVEEEKNNFELVDKGVRIFTEGVKSEKGIESSRAAERTGFRNARKLKYRRKLRKYETLKVLSLNGMCPINIEEVELWKKSGFKNYPLNPLFLDWLKTDDNLHKNPYAYRDKASKQKVTKLELGRALYHIAQRRGFLSNRLDQSAEGILEEHCPIIISNVEDIESFEDFKESIQSYFNNLNIIDNKDLDEGEKKLNSLFKSLLSIIKKNEQDFENAKKEVIEKLNKKENLGKVKGKIKEISQAIHDGNFDTLGQYFHSLYNSGKIRNQYTSREEHYLDEFEIICKVQELKSINETEILPEKRYSGLMKELYRAIFFQRPLKSQKGLIGTCSFEKSKTRCAVSHPDFEEYRMWTYINTIKIKTMDDKALRFLTPEEKQKIIPKFYRAKEHFNFEDLALELTLKNSTFEFYKSSKANSAHYLFNYKKSDTVSGCPISTALKNIFGPDWKTKSFYYKSKNSKGIEVHRNVDYKDLWHLLTVATSNEYLNHYAKEKLQLDDKKAKAFSKIRLKKDFASLSLNAIVKILPYVKEGLLYSHAVFMANINKIVDENIWNDANQRKFIQDKIAEIIENHTFENGLFEVVNSLLKEYKTEDEDGNKTYYSTQAEPIFKNDLTKKLHTFFDKNRIEDTAYKTGIINEIFLFFIEQLKKYEYAKIKRLDEKVLDFLKGKNENGEVFCSDEKRLKKLFHPSDIEVFKKKIIKDTYGNETYILGSPLTQSIKNPMAMRALHQLRKVLNTLIIEGKINEKTIVHIEMARDLNDANKRKGIQNFQNENKENRAKYFEEIKKLYFEETKNEINPTEDDLLRYQLWIEQNRQEIYEATLNNGESKSIKISQIIGSNPDYDIEHTIPRSISQDNSLMNKTLCSKRFNRDVKKQKMPTELNNYDFILPIISHWKEESDNLSREIEMITRAIKGIATKDAKDKKISKRHYLTLKRDYLKGKYERFIWKEPKVGFKNSQIPDTGIITKYAQAYLKSYFKKVESVKGGMVAEFRKIWGIQKSYQENGNKYYEEKDRGKHTHHTIDAITIACMTKPKYDLLASAWQLMDENKLQDARAKLVASKPWATFTQDLVKIEEDILVSHYTPDNVKKQSKKIKRISGKKQYISETTKDTNGKLIIKKDVHGNIIYQLDEKGNKIPRLLQGDTIRGSLHLSTIYGAIEREIENGEKVIKYVVRKPISKVFSDADVKNIVDEGIRERIEKHGLKNVLTKEDTILLPEEKKNENGATADLKPMLIKKIRLYQGSVKNPLSIKKHAPLSKSRQEHKQTIYAQNDENYAMAIYEGKDKKGNIKRSSELINFMDAGKYYKLSNRTNHIFPIAPEKDKDNYPLKYILTKGTMVLLYDKTPEELFEMSSNALLERLFQITQLDVNSSGIKLLFHKEAREKKEITEAMGLKNGMKGGKNIGEHKKYPWLKIPPNAFDCLVEGYDFNISPIGKITFK

SEQ ID NO: 5384 - protein, 1113 aa, unidentified
  REGION 1..1113: note = Description of Unknown: Cas Enzyme sequence
MKVNNFVLGLDLGVGSVGWALADLQGRSIVATGARIFDAPMDAAKFETGEPGASHAVKRRTSRHQRRQIRRRQARQRDLYITLQAAGLLPFAGKKGECRDEELTKLDKRLMEKWRPRIRTESPHIEDPDQILCYYLRSRALDSELELDELGRALYHLGQRRGFKSSRREGRSGLNAAEAKENEKERSKIKSSIKSLEKELTLSGQTLGQHLSQINPHTSAIRNRKRSDMKPIWTERKMFQEEFERIWVAQSIHYPSVLTETLKPRIEKLMFRQRTISAGKPGHCELERNPPLPRAPRSSLLAQHFRVVQTVNNLKIVDYPSPDRKLPPAERLELVSALSKVITEVKGKTRRSDLFGFRFPELKRRLNLPKRAKLNLEDDEAESYLRGNRTNAVMVRAFGMDRWNALQEQEKRRIVRKWMTEQSPEKLLQIARMQWGLDEQAAEQLARIEPEDGYAALSHVAMLKLLPSMEQDGLSYSEAVVKVYGNVFSGGDELEYLPSVDSVLPRIPNPVVKRTLSEMRKVVNAIIRKHGRPAQIRIELARSLKRNSEQRERDHENIKERTRERTSARKWIEERGQRATPEAIEKVLLYRRCKDCLYCTKPLGPCESLFSDSSGIQVEHVLPRRCQDNSFSNKVLAHHACNVRKADRTPLEAFGSTAEWHEILTLVVSLKDKALLERFTVSEGQLQEFSNRHLSDTRYISKLATEYAEQLYGGRDAAVPWEDRNRRCVYASSGVLTAELRKRWGLNSLLKEPETGEGRSDGKSRTDHRHHAIDAIVIALTSESMIQQAAFESQRHDRTQGFLRPRFFSPPWPKIGDIEEQVTAFQREIRQIVKDVKVSHRVENGLNGQLHKETLYSPKDLVGEFIYSTKFVHELTKEDIKNLDVVIRDKKVREAIRNRLMDVAGDPKKLETNIPYLEKNSKRIPIRKVRIAKEGSKSQPVRQGHNQPSVFTAENHHVVIFERSDPVKGPCWYTPGPMTRLEAMKKRAEAKREAKRKKLDQPQPYPIIVKTDGPGSTYIMHLMKGDAVEMLDHVNDVRDIYIFASMSDGDYAFLRHSTAVPSAKAMGLSQGRMRRQLQDRGDRVRVRMNLDKLREWECKKVVLDPLGKVIYLT

SEQ ID NO: 5385 - protein, 1535 aa, unidentified
  REGION 1..1535: note = Description of Unknown: Cas Enzyme sequence
GWLDEDFPLDDSRNFKQNINENGYSLKISNYLPFSDETIKEFEKELNIENKKSKKGKSIVPEDWIVYYLRKKALERIVTIQELIRIIYALNQRRGFKSSRKDLKDTNVLPYEEFIKRKESKDFGENGIETQFVTITKIESVIFKEVKKDKKGNVVSHIYTIKAKDSRMQTWEESRKKEPDWAKEVNDNGEKIDKKEFTFLVVQKVDKNGKLSQNKPQPATENDWALCTTALSEKIQEKNQHPGEYFFDELKIAFKEKRNYKIRQYPVYRWRYQNELKAIWEKQCELNPELKKINSDKATLTKLAELLYPTQAKNNMPKLAEFNSHDLLHIISNDIIYYQRELKSQKNSISECRYEKRKGIDGEIYGLKCIPRSSPLFQDFRIWQDIHNIKILKREEKVDGKTKLDIDVSGSYINETVKEKLFDLFNSKASVSEEDILKLIKQNNEQNDILIANKGDTHSHRINLFANRDVLKGNETLSRYRSLFKKAGFDGDSILSSKEILMKLWHIDYSIISSDEEKSKKGISTALTNLLPDNSNKDNVIGLFVKLSELKKEYGSYSACAIKKLLPVMRCGKYWNENNISDLVKQRAEQIKERLESINHNFKRLFEIADDDVQKQVLKSFIEKKDLTKELNTYQAGYLIYDKHSEKNKAQIKTVEELSAYIQKEIPNNSLRNPIVEQVVRETMFLVRDVWKQYGEIDEIHIELGRDLKNSSSEREKISKSQKSNFEEKQRIKKLLYELMNDGFEQFNDEDESNPFEFKNGGFEWKTKIEKGKKFEVNPNPESPIDIDKFRMWRSLSKQSEFEWNKKVKDEKIPTEQEIKKYALWLSQNCRSPYTGKIIPLSKLFDINQYEIEHIIPRAKMKNDGFNNLVIAEWGVNKAKDKQLAANFIADSKGKCKYGNIEYKLFTYEEYDAYCKDTFKFQKSKRKNLLATEVPEDFVERQLNDTRYIGRKLAELLAPIAKNENGIIFTGGSITFELKNNWGLNKIWKDIILPRFERLEELTGKKGEYVIHGKDQYGNPVIHFNVKENPELDTKRIDHRHHALDALIIAATTREHIRYLNTLSAADTNEEVRKYRLTLVKGKIREFKEPWKDFTKAAKDKLEELVVSFKTNNKIVSQPKNRTVYFKIENGKAKKEFKEQKANPKWMSVRRSMFKEPLGVIWLKETKIVSVKEAFLIEIERQLIDNDIEKRKTASYVYDKYARQSIKAIIQHCSASIDEKDLLIEELENYLNKNSTKVESGKVNKKGKAQNKTIYLLNKIEYEKITVAYFVSYKTKRMALTKKEYVENLTIEKMKNDFPYFSENEKRNNSFNNLFLHHIMEYNNNPKEAFSTEGLEKLNKKAIENPKIGKEIKSVTRLDGKVDLEDMFNKGFYETDKGAMAYFVMYENQETKEREVFESIATHKAIEKIVKGKPIAEEREGYDKIILSPGDLVYVPTKEESEKNKAGTEIGEAIVLSDKSKISERIYQVRKFSKKQCYFLKSTISDLIIPYDSKSKIGEYGSQNLSEKSDDDIKIIDTCIKIKVDRLGNIKIANQ

SEQ ID NO: 5386 - protein, 1352 aa, unidentified
  REGION 1..1352: note = Description of Unknown: Cas Enzyme sequence
MKKVLGIDLGTNSIGWTIREVNSTDNQITEKGVLTFEKGVGEDQGKEAPLVQKRTESRSKRRNYQAKKYRKWELLETLILNEQKLCPLPIEELNRWRKYEKGIERIYPQSKSFIDWLRLDFNGDGKSDYKNPYELRREASEKKLDDAHAIGRVFYHMIQRRGFRGRDEEESKTILEGSKEKETVGANEIQKIREEEKTTLGGALYLVQQKYNKRIRNRYNLRTDIEEELKTICKVQGIDENSDMFHKLHKSIIWQRPLKTQKGNVGRCTLEPSKPRCPLSHPLYEEYRMWSFINNIRVSSKIETDRKEMPLNDEQKTIVLQKVFFGKKKNKEDFEFTEIMKSLDKKGDTLEFNYKPYTTVSGCPVTFSLKDIFECELSEIKIAHKPNEKRKSKKDYYDYDDLWHALFTFDSKEKLETFAKEKLNFDDEKAKSFSKIRIPKGYASLSLNVINKILPYLHKGFIYSEAVYLANIPKVFDRKLSDQEVTRIAEGIRKQMKLHKRIREELSIINSLIGDYLNQPSEEQAGRYPNYILIKKDKELVEQKIVQRLGNKRWDELDSERRSEIKQFVEKKYQEFLQTPRNTEIKILYHKLPRLDDLIKDYLKNEWDIEETNLKYLYHPSETELYPPAKETDGKKYLGDPVPISRGFKNPMALKTLHHLKHLINYLIKEDKIDDETRAVVEIARELNDANKRKAIERWQREREKQNQEFTKAINEFAEHENLTIETTDEIIDKYRLWMEQEKQCIYTGKIISLTELFDGTKFDFEHTIPADISFDNELKNLTVADSVYNRQVKQKQIPTELPNYKNDVEIDGVLYSAIKPRLNLMEGKVDHYKKQVEFWKKESKKASTKDRKDYCIQQKHYNQFELDYWFKKLGTFTMKEYKPQWRNSQLRDTQIITKYALHYLKTVFDRVEVQKGTITAEFRKIFNVGFEKERSKHTHHAIDAAVLTLIPPPTIRDRLLKEHFAAMENNIHFHTKPNDWNNFNPSTILNIETDTLINYIAQDRTLVPTKKNLRKRGRIQYVKEKLENGKWQYKIDENGKRIPLIAQGDSIRGQLHKETFYGAIKENSNEDIIYVVRKPINGFKSEKEFEDIVDPVVKDILSKTVAERIKNGKSFKEAITEPIWMVDSSGNFKKTDKHGNPLLPIRHVRCKARAGRGYFTKALPLKEHIFKSEQEHKQWYYVQNEINYLLLLYENQTDEKISRTYQIINLLELVKMQIKNSNELFEIPAYQTLEKGKGKKRNLYQLKYILKVGQRVLLWKENSDELRDLEKKELLKRLYKIYKFNEISVTAYIYLKHHNEARQETDMPDGDKNFDLEKYQPVITLTPDKLNCLFEGIDFEITIDGEIRIKR

SEQ ID NO: 5387 - protein, 1306 aa, unidentified
  REGION 1..1306: note = Description of Unknown: Cas Enzyme sequence
MKTILGLDLGTNSIGWALVDKENKKILGMGSRIIPMSQDILGEFGKGNSVSQTAERTGYRGVRRLRERHLLRRERLHRVLNVIGFLPTHYADQIDFDKRLGQYKNETETKIAYKVTRNENNGENKYDFIFKKSFEEMLHDFRKHQPKLLNYDRKIPYDWTIYYLRKKAITQKIEKEELAWVIFNFNQKRGYYQLRDEEEDAKDKREYVATFKIVKIEKGDKDKKNDKKHWYNITLDNGWIYSATFTSEPQWLNVVKEFLVTEELDENGQIKIVKDKKTDNAGKEKRKYTPLPSFDEINLMSKNEQDRIYKKIKAKTESEISNSGKTVGVYIYESLLQNPSQKIRGKLIRTIERKFYKNELKQILQKQKEFHPELQSESLYNDCIRELYRNNESHKFLLSKRDFIHLFIEDIIFYQRPLKSQKSSISNCSFEYKKYIVNGAEQTEYLKVIPKSHPLYQEFRLWQWIYNLSIYKKDDDKNVTIEFLNTTEDYEKLFEFLNGRKEIEQKPLIKYFIEQRGLKGKALNAETEKYRWNFVEDKKYPCNETRSLISTRLAKVENLPSNFLTVDIEQHLWHIIYSVTDKIQYEKALRTFAIKYSIDENTFVDNFLKFPPFKSEYGSYSAKAIKKLLPLMRVGKYWNEKEVTEEVKDRANSIFERLKAINFDEEKIENVSDDEVPKQVLKSFLKKQEIIKGLQLYQASYLVYGRHSEATAAYKWNSVSDLENYLKEFKQHSLRNPIVEQVVTETLRVVKDIWQYYGNGSKDFFDEIHVELGREMKNTAEDRKKISEQVIGNENTNLRIKSLLSELKNDPDIQNVRPYSPIQQEILKIFEDGVLSSDIEIPDDILKISKTAQPSTSELQRYKLWLEQKYRSPYTGEMIPLSRLFTTDYEIEHIIPQSRYFDDSFNNKVICEAAVNKLKDNQIGLEFIKNNHGASVETGLGKSVRIFEVNDYEDFVKTHYIKNRSKRNKLLMEDIPEKMIERQLNDTRYISKFISSILSNIVRAERDDDGINSKNLIPGNGKITATLKQDWGLNDVWNDLILPRFERLNKLTNSTTYTEYNEKHQKNLPTVPIELSKNFQKKRIDHRHHALDALVIACATRDHVNLLNNKYAKSNTRFDLNRKLRKYEKVVYTHPRTKEKIEREIPKEFMKPWDSFTVDTKNYLDNIVVSFKQNLRVINKATNVYQKWVKIDDRMIKKEVKQPGTNWSIRKPMHKETVSGKVDLPRIKVPKGKILTATRKNLDTSFDLKTIDSITDTGIQKILKNYLVSKGNNPEIAFSPEGIEDLNKNINQYNSGKPHQPIYKVR

SEQ ID NO: 5388 - protein, 1019 aa, unidentified
  REGION 1..1019: note = Description of Unknown: Cas Enzyme sequence
ALYHLVQRRGFKSSRKSGQSAYAKNEDIEKIKTENPSFQIAALAKEKLDNGQRFRASGVVQRKYFEDEFYAISEKQNLNKELTEKLYKAIYFVRPLRSQKGLVGNCTLEKGKPRIPISHPKFEEFRALQFINNIKWKEKGTKEFVAIPIYLKKKIFEELFFKKLTSGKNKGKINEENHFNFNEIIKNFSENGTYEFNYKNLPNVSACPTIAMLMNVFDADWTERFIQDDNTYGINWEGLTISYTVKYGKKVGQNRTLKIDEIWHLLYDNLQTKDKQEDLEKFSKEVLDFDENKAKAFSSIDIPQGYGSLSYKAISKILTFLQSGFIYSEAVLFANLKKVMGVQFEDKKEVAKRLIAEVIKETGRTKEKLNITNALIQKYFAKAETNHVKSVNDTFKEMAWQDTVDRLKIYFGESDWNKKSEVEREKLEQEVFNLYSRFLNREQTKEEKTSAKDNYVPEIDYYKLPRLDEVIKQNLKDKFILSDKELKYLYHPSDIEMYPISKTEISNTDIKLLESPQPPSKGWKNPMAMRTLHELRHLLNYLLKIGKIDKDTKIVVEMARELNDANKRKAIEAWQNDKNKENQEYALAIAELYNISAPSDDDYKLFKAAVEQLVEENKSLEFLQKYKEFIETFLIKKNKNNKGQQEETENEVEETPNDYLMYLILTRDEFTKLLLNQPAGAGKILNLAKDFKNKRNTIIGMLTKYKLWKEQKFQCFYTGHYIPFTELFSSNYQIEHTIPRSISFDSELKNLTVCDAAYNAQVKNNKFPTECLNYNDSANCKTVKGIMLCSPISERVGKMIGPKVEELIKRIKNLTEASKKIPNWEKDKKNANIRLRHYLQFELQYWEKKLLTFTIKKEEWKDAWKNSQLVDTQIISKYARSYLKTVFEKVDVQKGTTTDTFKKIYKIKGNEQKDRSKHSHHAQDAAILTLIPGSAKREAILEKYFQAEENNKPTFHTKPYENFHSSHIHEIENNIIINHIPHDKTLTTTIKNIRKRGVKTGRVAQGDSIRGQLHEETYF

SEQ ID NO: 5389 - protein, 1540 aa, unidentified
  REGION 1..1540: note = Description of Unknown: Cas Enzyme sequence
MPKILGLDLGTNSIGWAVVDDESKQIIKAGVRIFPAGVDGIGKGDKEISRNAERRDKRQQRRGVYRDKLRRIHLLKTLIELKMCPLESENLNQWKNYNKRFGSPGKTFPQTPEFNLWLKMNPYQLRSKALSEVLTLLELGRVFYHFIQRRGSLSNRKGKEDGAYKGKDNMTDIEQTDANTKNTTLGNYLLSILPEENKTYQKITDESGKELRVRARYTLRDMYIHEFNEIWKQQTENLNLNSITLPKIKTRFITGSGESSRNKKKIKSLYDKYGKENVSIDDKKITTKEQVPLKEYLAGYITEQVDGSLIHKSKESIIFYQRELRSQKGLLSKCSFEGRKFFDKKNNSFRIVGPTPAPISHPEYEEFKALQFINNIKYQNDTKSLDEHQREIVLNLFNSKTAAFKFSDIPKALKMTYERFNYDNDLSIPPNYTIANLKPLFTEKIWNEKREEIWHCFYDFEDDENLIAKLAKDYDLKETNFEKVKKINLKEDYASLSLKAIRNINPFLKKGYKYNQAVILGGVRNAFRKTDLNGTCLDRWDYFKDEHDTIEKAILAIIKTHNKKGETIEKIKQYLTENNYGFGKDDASFKRLYHHSQEVEDVKLKDKLDAIENLRNPIVQQSVNEVKRLVNELIDVYGKFDRINVELGREVKAGKDKRQEMTYKIRDNEKENDDARNRLTEMGLRHSRENIHKYLLFKEIETKHGIVTCPYTGKTISFTDAMGGNNKFQIEHIFPRSTSFDDSFANKTLCDAKFNGEKGNLTPYEFYLKNPDPKLWNARDWKAIKERAFDLLPYKKANKFCTEKSATDKPDSKEFIERQLNDTRYIGVKTKEILSEICPDVRVLTGKLTSELRRLWGLNNILQPVQTVNFSGLDIDGDKVVPHCLITDKDDNIITLKPIYNRKPEIGEHEITIPGYIKAYQFNSDFLKSKKYPADEYKDGKYWAKIKLSAKPAGIFSVFADKPEKGEGEIIIKGDVKGGTYSNENLGNLPAKLDEGKYWYKAKIKNINYIKPEKKQPSKTKNQLLVYGESIAALFHCYLFDSVCDKGDGEYWALVDLDIETGEFFKIRNQTPTITEKQIIVEGNIDNAGTFSTDMDRNFTFQSAEKHGKYWAVFDNETENPEYYPVENKITAEKDQKTVEGSVWVDKYTAEIKFDPKKNRDDHRHHAIDAMAIALSKQSHVQHLSNYYENEDEKERNNLHDKIQFPEPWENFRHDAEKMASQILISYKINKNKRKALVKISKTIVKNGKKYISKGNAVRSFLHKDNVYGQRQAPNAEKAFHIRKDVKSLKDATQYEKIVDKTIKEIVIRSKAEEERINKELDKLKKQLLKAKDTEEQSILEKINELTKERSLLYTLPNKNGGDPVPIKKVRIKENFGNAQVLKQKEIVKEKTGEIVGLNQHVNPRNNHHVAIYKREDGALFEKIVTFWEAAERKKQGLPVVDNSPTDGSVFVTSLIENDMFILGLTPEQINWTEPNYHLLNTHLYRVQKISFGDYSFRHHLASTLDNPKEEIRIASYSAWKKINPIKVKIDILGNISKAE

SEQ ID NO: 5390 - protein, 1460 aa, unidentified
  REGION 1..1460: note = Description of Unknown: Cas Enzyme sequence
MENVIGFDLGTNSIGWAIRNTNIGGNQIEKSGVLTFKKGVGIDKTGEYSYAAQRTKKRATRRLYQARKYRLWSTLEVLIEEGYCPMKLESLNKWRHYNKSEALKNNNAGRIYPIDDMELDSWIKLDFNKDGKPDYSSPYQLRKELSETKLDFTIDANKYKLGRALYHIAQRRGFKSSRKSIDDNPKESENDIIDLQQSEKKKNESLQKLFTEYPKAKTVGSLFAYLELNKIRIREEKSKDVIRENYKDEIKYIFEFQGISLESTLYKDIVESSKNKNDGAIFFKRPLRSQKGLIGKCTLEPTKYRAPISHPDFEYFRAWAFINNIKYKDSDTWIPLPLELKQRIYDKFFIGRLKAHFLFSEILDLLKKEKLDIQLNYSPKTTVSASPVTARLKQIFGENYYNIKINKEPNSVSGKDYYSLEDIWHILFSCEDSEFVEEFARIKLQLNDEQTVSYLKLWNSIPVGYAMLSLNAIRKINLFLSKGLIYTEAVLLANLPFVIGIEIWSENSDLILSEITHIVNNNRRQKQILNIVNSLIAEYKNLDYYLQFGHNDYILDNKDKEGIEFSCLNFFGKSIWERMILEEKNRIIFHVTNCYQAFFKQSGFIRKDFDNERFLLVTSDDLNFYKSDSGFYKLPKLKDSLIEFIDKKFTISEEKLKKLYHPSEINIYPPAKEDKNDGIVKLGSPKTGSFKNPMAMRTLHELRKITNYLIETKQIDNDTRVVVEVARELNDANKRWAIQAWQKRREEENKEYAIAIEELLNHHSELKANKNNDDDIDKFRLWAEQSSEDSNEIPEVVDNRKEVKGIAWQTSKNERYKEIEASKNQIDKYRLWLEQECICMYTGIIIKISDLFDDNVTDFEHTIPRSKSFDNSLANKTVCYAYYNRHIKKNQIPYNLQNYSEDWNHNGKIYTAIEPRLEKWLDKIERIKQQIEYWKGKSKKGSKSVMVSPTSNVSTKDFAIRQIHLWRMDLDYWQNKVNRFTMKEITSGFVNSQLVDTQLISKYAFHYLKTYFDKVDVQKGSITADFRKIFSLQEFDKKKNRNQHSHHAKDAAVLTLIPIAKKRDDILKIYYDHLESNQNYTSVPYKGFKREYVMEIGDSILINNVAKNQTLTPASKVIRKRGKKQFIEGTNKVKIATGDCIRGQLHDETFFGAIKLGLKDENGRLLKDENGNFKQEKNPIYVVRVPLKYKKTESDSGFRNINEIEKVIVDKHLFAQIKKQVIEADNSLQKAIENGIYMFNGKGEKENKIRHIRIEKSVTEPLKIKKQTYLSKHEYKQYYYAGNASNPYYVLYQGIVKNKIERKYKIVNLFDTSKLKENGKLNVLDSVYYDKNETIKLPLYTILEIGQKVLFFKESPDEFLEMDINNLNKRMYIITGFEKDGRIRFLFHKEAREDKKLTEDFPKDKFDEFGNKYGESGKNGFSFLNWENPWPKLKISIGNLNILIEGKDFIIMPDGKISIK

SEQ ID NO: 5391 - protein, 1067 aa, unidentified
  REGION 1..1067: note = Description of Unknown: Cas Enzyme sequence
  MOD_RES 833: note = Any amino acid
MTERILGIDLGISSLGWAVVEHDAEHEENNSIVGCGVRLFTAAQTPKDHKSLNEARRNARGIRRVIKRRRVRMNQIKKLCIDHRLLQKNDFDLDNGMFNSPANRTDVWQLRHDALYRLLSGNELARVMIHIAKHRGYKFIGDDETDKESGKVKTAGKALKAKFETAGCLSMGEWLWRERQHNGKKRNRNVYDPKQKKKIPDYELSIPRDFLENEMKVIFDKQQKLASTLATNELLSAWKVIALYVRPMQSIENMVGKCTFFPHEKRAPKSAPTAEKFVALGKFFATVVVDHEGKERKIIELKTVNELMHFVITKATIDYKQLRDFLGLKNDFSTIFKGLSYKSKKSETTEWKNVIKETETKPWISLKGHATFKKVLGDEGFNHFIANNDLADKIATVLTYYKDEGQKKEELAKLSLDPHFIETLYPITFTDFNNLSLKAMRIISSIMSDGYQRYDEAVHYAMDNGLLPKITQEKAIFLPPLKATDIAILNPTVIRAFAQFRKIANALVKKYGTFDKVHFELAREVNTQADINAMKEGQLKNEKERDATKRWMAENFPLIPPTRKNILKKRLFDQQGEFCPYTNEKILVESLFDEGYCEIDHILPRSRSGDDSQANKVLCMTQANQEKTNRTPYEWFGHDALRWEHFEARMNTHSNLAKMGKGKVSRLLKKNFDDNSQNEFLSRNLNDTRYMSKAIKSYCERYWKLAHDDDKLRIQVRSGKLTSELRHRWIEGYMKDRNIHTHHALDAIVIAFATQSMVQKLSHYYKAKETRHEKAKPIFNPPMEHFRHAVDEALTLERTETIIAKDGREVPLNRLLISRPPRASVRGQAHEEXAKPYPRIKEVKNKFKRRHIPIDEDKFETFKKDKIASGHGENFYNASTIPRVDIYKKGGKYHVVPLYLSDMAEAVIPNQSLGTTPESLEVDYFCFSIYKNDLIEIETKATPKKPAKKVLGYFKQLHGANLILNSIDNAPMEGFSCSPVTLEKKQKEQCKQCPEENRAIGKCPQETVDFWVINAIKKPRQDFECDIGIKFAVAVRKYTIDPLGYYHEVRGEKRLGTIPQETQKRKR

SEQ ID NO: 5392 - protein, 1459 aa, unidentified
  REGION 1..1459: note = Description of Unknown: Cas Enzyme sequence
MKILGLDLGTNSIGWAVVEEEQNEFELLDKGVRIFTEGVKSEKGIESSRAAERTGFRSARKLKYRRKLRKYETLKVLSKNGMCPLTLEEVTSWKMSGFLDYPLSPAFLDWLKTDDSLHKNPYFLRDKASKQNVSKLDFGRALYHIAQRRGFLSNRLDQSAEGILEEHCPMIQNSVEDIENFAEFKEAIQTYFTDLNIIDNKDLDEGEKKLKSLYNAINSILKKNQNDFENAKKEVIEKLNKKENLGKVKGKIKEISQAMLDGNFETLGQYFFSLYNKGKIRNQYTSREEHYLNEFEKICKTQGLQGISDTEIIPEKRYTGLIKELYRAIFFQRPLKSQKGLIGKCSFEKNKTRCAVSHPDFEEYRMWTYINTIKIKTLEDKALRFLTFDEKQKIIPKFFRAKEHFNFEDIAKELMLKNATFEFFKSSNASSSHYLFNYKATDTVSGCPVSAALKNIFGDNWKTKSHSYTTKNSKGIEVIRKVDYKDLWHLLSVATSNEYLFQFAKEKLLLDDKKAKAFSKISLKKDFASLSLNAIIKILPYVKEGLLYSHAVFMANIEKIVDENIWNEVNQRKYIQDKIAKIIEMHTYENGLLEVVNGLIKEYKTEDTEGKKIYYSPEAEPIFKKDLNQKLNPFFKNNNIEDATQKLEISNDLFPLFIEQFKKYEYAKIKRLDEKVLDFLKGKNENGEVFCSNEKRLKKLFHPSDIEVFKKKIVKDKFGNESFVLGSPLTQSIKNPMAMRALHQLRKVLNALIVEGKVNEKTIIHIEMARELNDANRRNGIQDYQNENKKNRAEYRDKIKELYFEETKNEIEPTEDDLLRYQLWIEQNKQEIYEATLNNGESKSIKISQIIGSNPDYDIEHTIPRSISQDNSLMNKTLCSQRFNRDIKKQKIPSELNNYELILPIIQHWKEESDNMSREIEMISRSIKGIAIKETKDRKIRKRHFLTLKRDYILGKYDRFIWKEPKVGFKNSQIPDTGIITKYAQAYLKSYFKRVESVKGGMVAEFRKIWGIQKSYQENDKKYFEEKDRGKHTHHTIDAITIACMTKPKYDILASAWKLMDEDRLKEAKAKLVASKPWATFTEDLVKIEEEILVSHYTPDKVKKQSKKIIRNRGKKQYLAETITDTNGKTIPETNEKGNIIYKLDDKGNKIPRLQQGDTMRGSLHLSTIYGAIERENEKGDKEIKYVVRKPISKDFSDADVKNIVDNGIKERIEKHGLKNVFTPEGFILLPQEKKGENGATGDLKSMIIKKIRLYQGTVKNPLHIKKHATLSKSRHEHKQTIYAQNDENYAMAIYEGIDKKGNVKRSFELVNYMDAGAYFKLSNKKNNSDSLVPLIHLKTQLPLKYVVKKGDLVLFYNENKEELNEIKDIDMVKRLYKIISFEGDGRIQFRHHKTAMQQSSSNKAELTIVKFMADNNLQNSQVDFKNPLPWLRLSIKNLNFLLNKKEFEINAIGKIVKQ

SEQ ID NO: 5393 - protein, 1530 aa, unidentified
  REGION 1..1530: note = Description of Unknown: Cas Enzyme sequence
MKKILGLDLGTNSIGWALINQDFDKKEGEILGMGSRIIPMSQDVLDTFSGGKPLETQTAARTSYRGIRRIRERHLLRRDRLHRILNVLGFLPEHYSQKIDFEKHFGQFVGESEPILAHNNFDFIFKQSFDEMLKDFKQSQPQLFYIKSNGKETKIPYDWTIYYLRKKALSHKITKEELAWIILNFNQKRGYYQLRGEDDADATRTAQTRIYFDTQIINNITDTGSVYKGLKVIQITLANGDSGKYFSKEVPNWIGLKKNIIATVDLDKDGNDRFEDDGSLKRRFSIPTEEDWEKKWKLIKIKTEKEIKDADTTVGVYIYENLLQNPSQKIRGKLVRTIERKFYKDELIAILKKQIELQPELFSGDLYNDCVRELYRNNMAQQLVLSKRDFVHLFVDDIIFYQRPLRSQKSSIGNCSLEYRIHKDKDGNQVKEYLKAIPKSHPLYQEFRVWQWLSNLKIYHKEDDVDVTTELLKNTEDVVNLFEFLMTQKEVGHKDILKQLITPILKDKFPSAKPASFNKEVDKEIAKFRWNYVFDDSKEKEEEKSKKYPCNTTGYEIRRRLAKVINAPNDLLEITDTKEVKIKNGQNKGQFITVSIGTREYQLWHIIYSVTDKKEFEAALKSFANNYKLDENSFIEEFKKFPPFPSEYGAYSEKAIKRLLPLMRLGKYWCLDAIDSKTQVRIEKIISGEYDENIKSRVREKSINFTDNNHFQGLPIWLASYVIYDRHSEAEIAGKWNSVAELKQYLEDFKQHSLRNPIVEQVITETLRVVCDIWKQYGHGGRDYFSEIHIELGREMKNTKDDRKLLTEHVTNNEATNMRIKALLAELKDNTDGKLSVQNVRPFSPMQQDALRIFEEYALQSNEQYVGKDDNGKDKFDYSPIEEDIIKISKSSQPTISELHRYKLWLEQRYRSPYTGQMIPLSRLFTEDYQIEHVIPKSRYFDDSFNNKVICEAAVNQLKDKQLGLEFIKNHHGTKVECGMGKVVEIFTEEAYQSFVKEHYAKSKTKRQNLLLEDIPEKMIARQMNDTRYISKFISALLSNIVRADKEDDGVNSKNLIPGNGRITTVLKKDWGMDAVWNDLILPRFVRMNQLTNSDAFTYWNEQYQKFLPVDSVSIDSKEVKIEKKRIDHRHHAMDALVIACMTRDHVNLLNNQSAKSVTSHYDLQNKLRNKTKESWIDKKSNRQVERDVFKKFEKPWDNFTIDARTTLETIVVSFKQNLRVINKATNNYQKWVEKDAVKVKGIVKQKGTNWAIRQSLHEATISGKVNLPWVNVSKNNFLTANRKTLDTSFTIEKIRKITDTGIQKILEKYLSLKENNPEIAFSPEGIEEMNGNLLELNDGKKHKPINKVRLYEMGSSRFALGTNNNNPSKYVQGSPNLYFGIYLGNNKKSFETIPLNIVIERLKKGLKPVPEKNKDGFLLQELLSPLDLIYIPTEEEVDTPHLIDFSKLDNYHRERLYNVNDFSGVTAYFCQNSFAKSVYPKEMDLNWNEKKQKLSGSFDAKTASYNKNSIKDIFIKLKVDRLGNISLAK

SEQ ID NO: 5394 - protein, 238 aa, unidentified
  REGION 1..238: note = Description of Unknown: Cas Enzyme sequence
MQHQKLSLGLDIGSNSIGFALLRINEKDDEIIFDEIERNSIVFSEPSQAVDRRNGRGQRRKNERKSSRNKIARKIFVDFEIADKMFIDNTTNYLNSFTLNTRDVYLVREKAISGISLTKEEFILATYSILTDRGYNNMFATDSSDEEDGKINEAISINKQAYEQSKYILPSSVLVAKRNDMQLKYQNFPIRNKGMDYRNSLSRAMHKDEFIKVATSQASNEAIFLSPDECSNFIDNYR

SEQ ID NO: 5395 - protein, 926 aa, unidentified
  REGION 1..926: note = Description of Unknown: Cas Enzyme sequence
MVGYCTFYDKFNPKGSFKRIPLANIKNIESTLRQSIDNYQIIETKTGVVAQLSKEEINQIIDFWIDTPSSDEINFKNIFKSAGFKNIELFAGKNASDIVLNIKSHRALCTILEKYSIDFKDKDNQLYNELLLILFYFKNKSVRVEKINILIENYGSHINKDFAEEVSSLHGMDGFGRFSMEFIREVLNLMSEKNIGHHDALDDLGYFCKYTSMPSYKYLPPLEPTKADIKWLQENISYFDTKHLFYQPMISQKVKRVISILRKLVNELIGRHGYIDEIRIETARELNSDLEESQITENQKKDKKKNDDAIKYLKDNRINDSSKNIERAKLFIEQGKKCPYSDETVTSDEAFDENETEVEHFIPRSVIWINSYKNKLLVKKKYNQNKGSQNPITYLSSIGQWDNFRGRISEYKIAINKQDWLTNEEIIENVMKNEHWQDSYLNDTRTATRVVAKYLNHYLYPNQTKHAEGEERHIFSVSGKAISELKYMWGIHNIMPKNEDNKKDRNTNYHHTLDAFAVALCSNSAIQTLHSHFKQKENKFKTKAQKENLKANVPISKDGVGIVEHLKELVNKYETNQLLVCPYSKRKTNAKGFKDGNLKLCIVNDKNGNEILSELDNVYIDISLLIKDVGGFPKPRSDGEVLEAVKTIQSRLDAQKQNKIIDAIDVYAKKLIELRSEIGQLDAKIKEMGKDKKTGKQHKEANDKLKQEIEPYRLEKEILVKEQSYLKCTFITKNGKLQTVKRLRFTKSKAEETKADAIIFPKRIGNGNTIERLSVYKFKQAVANKEPFVAKMNESTLSVELFDAPKGQVVGLNYFSSVANHIDTKTNNKYKNVDFSDSNSLKLYKNDIIKVSDIKNSSTSYCIFNGGGLVAGSNNKLTIKNININNFKKQGKDGEVKFTKEDTVTPNVTRVIKRVKIDFFGNITED

SEQ ID NO: 5396 - protein, 1348 aa, unidentified
  REGION 1..1348: note = Description of Unknown: Cas Enzyme sequence
MNSVISLDLGGKNTGFFSFTSSVVSKINVFQSGTIIYDESFVLSQVDRRAKRHTKRNNLRNRLVKRLFLLILQKHYELKIDFLPDEILGLFNKRGYTYASFEIKEDEKEQLESSILKEFLNDKLTDFIIKNDDETEEFLNQIASNETTFSNYKRGFENLFRTSTCQPNKQLELIDEIKKELEKNEAKDLLSGLKIVKKIIDEFDKQQNQGNLPREKYFLELNEMIKSDKITLFFQTHNLQLSDMQNLIGNLSNYQLKELRRYFNDENMAKSDIWKPEQLHKVTWRFIQSWHPKNDEDKKRQKENLKSLKDTKIIEFLITTEPKNTIPPYDDMNNRGAVKCQTLRLNEDYLDTHLSNWRNITYKLSNESQKENLAESTVKGYSEDSTLLHRILDTSASIDIYSLRSDKIDAYIDILGKNDALALQKFAKHYYELIKDKVRTGIWTSTDDMLKKCDHNPPYKNNQIHNLVAGILGVKIDSEQFLKFETELWNVKFGARKLSSYCKNIEELRKSHGNLFKSYIEELSKDDKKEFSKEEQKDKKTLDSEVLNEWVKKIGEFFDIEQKYQARFTNHFSFAQLYTIIDTKRSGFNSTCQWCSRENQYRASTNIEINQESGEVITNANCQRLPADTQRPFSGKIERYIDKLGYEIAKIKAKELGDSEDTKINLKIILEQNAFEYEESIRSAKIKNANAKAKKSLEESTKKYKKSLDDKDTRIKYFSDGICPYCGENLGDDGEIDHILPRSYTLKNFGTVFNSEGNLLFVHQKCNQAKKETIYKLQDIKAPIAQEEIEKIINPISKNSYKTFTALTPQQQKAFKYALFLDNNNEAYQKVLGWLRTDQSSRVNGTQKYLAKKIQEKLKAMLPSKEFDFEFILANAEDVSNLRKTYAIQNPLLTKPDTQPPSSHTIDAIMSFLSVYPKIAKTDELPNSQKVLGWIEINNIKTKSLSKIQKDQKQNLGGTTIFKDSIYQERFAPIYEYKNRFYTGFVGSGKTLDFSNCVEIKPKDFESIKEYFKNETHKHNGLKVYEIDKQKTLTLFHNISKGLNDEIKLAELLNKFSYNLLKTSVGEAPKILKDDKKLSTKVYDKTIILPIKQEWLNFDKGFKKYLEDNNIEYKEKDGKYNVGDDMLSEFCKTYFNIQNKQVRNKARKVFSLPTVEAPSGGFRIRRKNHKGENVYQLVGINGAKSAGFGLKDGKINTALDVTLSTLAKSKNVSFKDPQIMELQEYIDMANFRDISDSVNIDGVKIFVAPASTNRPLIRSVISIDKFMQIINNQEFNYLELSDLKFINDESFGVLKEKFDELFNGCNFAPRDKLKIVKANQNGIEIEFSNNNKTIMKHYDNGIDIKLDD

SEQ ID NO: 5397 - protein, 926 aa, unidentified
  REGION 1..926: note = Description of Unknown: Cas Enzyme sequence
LGFVFEYLVVFITKNQKSDFNKSQNTHHHQKPIDKPLLLIEIPQPKNKHKYKRGKHQNNRQNQKKLPKKRCFQNGLLGITIILGDIITKERLGLLLYCIMIQKNFTLRVYHYNNRVVLQQKGCVMVKRILSLDLGITSIGYALLKEHENDRYALKDYGVSMFDKATDKDGNSKKLLHSASSSASNLVNLRKKRKKNLAKLFEEFGLGEKEYFLYQERQNIYKNKWELRAKKAFGEKLKIEELFSVLYAIAKHRGYKSLDTNDLLEELCVELNIPLEEEKSKKDNKGQAEDEKGKIKLALKTIENLKQHYPNKTVATIIYEEEIQKETPVFRNHDNYRYMIRREDINDEIQKIIASQVKFGLFEQDFKSDELSLKLIKTIDDQKESSNSEDLFARCEFYKEHKVSHQYSLLADIFKMYQAVSNITFNKNQQITKEQIQRIADDFLNKIKEGESIADIKYKDIRKILKLDESIKIFNKEDKNKDGKDLQLIKFHFVNNLSKFGDAFRAILDKPDRYAILKEIFDVVGFEKTPKSIYEKLKGKMDDKTIVEIIKHKTGSSLRLSSYAMVQFLPYFEEGMSLDMIKQTLNLNRNEDYSQFKKGIKYLSVSQFENDDNLPINNHPVKYAVSAVLRLVKHLHTAYGTFDEIRVESTRELSLNEEAKKEIDKANKALEKEIDDIVANEEYQKVAKHYGKNLRKYARKILMYEEQNRKDIYTDEGIEFGDIFTSKVDIDHIVPQSLGGLSVKHNLVLVHRDSNMQKSNQLPMNFINDAEKFKIRVEDLFRERKINWKKKINLLATTLDETFKDTFESKELRATSYIETLTAQILKRYYPFPHQTQNSREIRHIQGRATSNIRKLLKVKTKVRDTNVHHAIDALLIGLINNSWLQKLSNTFRENFGKIDDEARANIKKDIPIVKFHHVVPFHAKQ

SEQ ID NO: 5398 - protein, 1050 aa, unidentified
  REGION 1..1050: note = Description of Unknown: Cas Enzyme sequence
GESLNLIRREARLTRRRIRRRAFRLLRLLRLFKREGLIASHDTAAFADAASPWDLRAEGLERPLEPTEWAAVLYHIVKHRGFQSNRKSEVVDDEKAKSDEKKTNKKMLDGVSANKALMQAGGWRTMGEMAARDDEFAHAKRNKGGKYTHTFDRADLADELNKLFDAQRTLGNPHTSSELQEAVFQLLMARRPMQNILRMVGICTFEKNPPEKRAPNATHTAERFVWLDRLSKLRISDQGETRGLNDQERQAVIHLPFTLKSAVKYKQIRARIDLPETARFVGVDYWKKRKEGNELAAEDAALFEAKAFHALRKAYEGAGLKTEWARDAANPDRLDDLGYVLTVFKEEKDIDLELSKHGIEHAIIEAVKALSFSKFKHLSIKALRKIIPHMEAGLRYDEAVLAAGYVHHSDINQLETKTRRIPRINKEDFPNPVVYRALNQARKLVNAIIDEYGAPAAVHIELARDLSKPWDERKQIERDQKTFRDNKEKAADKYRELFLQAPKKDQLDKLQLYDEQDGKCAYSLTPFDLRRLDETGYVEIDHALPYSRSFDNGMNNKALVLTHVNRDKGNQTPYEYLGGAHGDPRWHTFEIAVRSNKKIRQAKRDRLLRKDFSEKEAEGFRERNLTDTRYIARAFKTLVEKHLQLAEGSEAKRCVVVYGQLTAFLRTYWGLNKVRADGDLHHALDAAVVAATSHGMVKRLSDYSRHKELAQIRNGYIDPQSGEVIDLAALRRLEAHFPEPWPHFRDELHAWLSHDPALNLEHVSGYDKQRAQSIKPIRVSRAPLRRGLGQAHQETIRSAKLLDQGLSSVKTPLENIKLKDIERIVGWDDPRNAKLIAAIRQRLEAHGDDGKKAFKETFYKPSKPGKAAPIVRSVNLTDTQKSGLPVRGGIANNGSMLRVDIFTDGKKFHAVPLYVADAVRPELPNRAVVAYKPEEEWTVMDENYRFLFSLHPNDWVTVSFKKDAPKMGYFSGLNRATGAISIWTHDRSDDKGKGGFMDGIGIKTALSVDKFHVDMLGRLYPVKQETRQPLASKRGVAPPQSSSTSACIPQ

SEQ ID NO: 5399 - protein, 1896 aa, unidentified
  REGION 1..1896: note = Description of Unknown: Cas Enzyme sequence
MKKILGLDLGTNSIGWALIEIDHEKAILKIKALGSRILPMNAGEINDFESKGTIKSSTSQRTDNRGVRRNIERFLLRRDRLHVVLNLLNALPEHYKIEIDFERNGKRCGQFKDFKEPKIQYLQNKVDNKKYDFLFEDTYKEMLKELKIEYKKRNLIPRDWTLYYLRQKALTKEISLEEFAWVLLSYNQKRGYEKIEVENKATKENEIIDELDLRVKNVTEQVDETSNRYFKVELDGNDKLTYNEYSNSQMTFKDDLKEVKITSKIDDNSGSITSKEITIVDIYSLTIQKVDYEKDGDNHNYTLTYQNGWYEMKSPKKYTTRYTNIVNKPFEYIVETVYDEKGNIKKQLGKERKLREPDFSDNSNDWTLLKKKTEKDALAFNLKKGYINKETGEPYKYISLRIYDVLKKDAQSENREWTKIVGGMFQVVERDFYRAEVAQIISTQKQHHTTLDDTKIFEDCVKVLYPNNENHANALLSNKDALQHLLIEDILLYQRPLKTKKSEIANCKYEVRQWKDMLDKTGNPIEIVDTETGEVSVKKAPIYYKVVSASHPYFQEFRIWDKLHNLRLIQIEKTVDGKDKTNIDVTEEYFSKEIYQELFTFLNNKSLLKQDGFISFLKDKFAWNKKDKDNFIWNFPEDEEIKGNETRVNFAIRFKRRGFTDYANFLTQEKEIALWHYLYSVSYKERIADDFKSIKSFFSKFFEGANIKEDVKEGIIKDFANYPKFASKYCAYSEKALKKLLPFIRMGENKFKGHFDISVFKSDLESINYDKTKILSHIRFNSENRESLSKEDKQNLELRRQNLFDAIWKNSINERIHEILKRQKRIDFSADEIDYSKVISNDKLNGNIPFPKGLINTFKSFEKQEDFINLNLTQASYLVYGRHSELAEAKYWISPKQIRDELHQELKQHSLNNPIAEKVILEMMQIVACIWEYYGTKNSDDTYQKLFDEIHLEVGRELKKSAKEKQSLTGKQSENKVQNKRLRQTLEEFLSQSPYNAIPQNSDHFERLKIVEDGASHTKNLVKDFFNDKPYTKKEIDEILKKPYISKDDFEKYKLWIEQGYKSPYTDKIIKISDLFDRKKYNIDHVFPQASVTNDSLSNKVVCELEINKLKSSQTGREFINNTKMRSVPCLAHKSQSNPEGLVEIINDDTYVSIVKSQFSGNKRQILLSKEIPSNFTNSQLNNSRHIARKAMELLSHIVREPGEIEFRSKNVLPVTGEITSKLKRTWKLDEVWSELVSPRFIRMNELTKSELFGQMQISKYGENYFDCNIDDTIREKDPSYGIKRIDHRHHALDALIVALCTEEHVNYINNINSNTTSENYGKQKQIEKYRETLKRKIMFSKPNKENPNDKDWFYMYPGQIRQADVDRFSIETVLKKSYFYKDTQFNEDYKAMILSALQHTIVTFKQNMRVINKTINLYNNTSNKNSFVKQKDNQDGNQYNWAIRRSLGKSTYYGKVYLGEKDNKQLHKILREIYNSEEKIIDNKLRDRIIAIKKGSNGFGEFEKQVKKEFKNITIELKVYKIASREFLSEKFNRKRIKEITDTGIQKILLNHIQQFDTVKLPFEEAITYYDYLLEKPEIVAIIQSEDSKFNKVDDFVIHLKSNSYKYKKTDYSFLNVFIDLIKDRDFRTEFKEHINEHPEIAFTVDQIDKMNQPENLKKLNEEKNHTAIKKVRSSTGYGNQRQVSDEPQSVKSKQYIVNDAGSNLYLGVYERSYIDKNGDSIIERKFQDIGLIDLIEKLKQDSSKRNNPLPEKIFDDKGNEYYWKFTISPLDLVYVPIEEEIANPSLVNFNNLDNNQINRIYKYVDGNVEIANFIPYSVAQPIWRFHDDKKKREVYNQINENHSIKISEKELIKDEFGFGSQQTKNQNMIDGKTQIKKTCWKLKVDRLGNISLDQ

SEQ ID NO: 5400 - protein, 1433 aa, unidentified
  REGION 1..1433: note = Description of Unknown: Cas Enzyme sequence
RKKALDSDLTLHELGRIYYHFIQHRGFLSNRKSNDDGKIYTGKDGVTGIDKTKEQIKDKTLGAYLYEIVPKENEPFKKIADSDGNELRARARYTLREMYVQEFEQIWQRQAEQLGLNSVTVPVKRTIFIEGGITNKRNKAYIEHKIRTLGQENVEIREKQITVTETMPLKVYLGGEIEYDEDNTLKFKSGNSVLFYQRPLRSQKGLLGKCSLEGRKVFDKKLGKIIETGPTPCPLSHPEYEEFRALQFINNIEYGRTKNLKSTAQLDEFQRKILLDLFASKESFDFTEIRKKLELHFEPFNYEDSTKIPGSPTISKLSKLFKPEIWEKHKEEIWHSFYFFDDSEKLYKKLKDKFGLMPEKNQTEKELIDKISKIKQKDGYASVSLKAIRNITQFLKKGYKYSYAVLLGGVRNAFKTTDAKGESYDRWDNFKHRHDEIENRIIEISNSKNNAEFETIKKIKAYLTAECGFEEHDKNFKKLYHHSQETEQKPIKDKLGEIENLRNPIVQQGLHELRRLVNTLIEKYGKFDYINLEFGRDLKVGKQKREEISRKIGANEKLNNKAREKLTEYGLAHSRYNVQRYLMWAELEEKNGTAKCPYTGKTININDALGTENKFQIEHIFPHSTSLDDSFANKTLCDAKFNAEKGNQTPWEFYQINSDPNLWNAKSWDDISRRAFKLLPYAKAKRFTNTKKIELTDDFLSRQLNDTRYISKKAREILSEICPKNNIRILPGALTAELRRLWGINSILNTVNDGVLDFANVKIVADKPQEHWIISDKDNKVINVIPKFYDKPKTASNQMCLSGELNDKGEFTAKYFGKTFKSEHPEYFGKPYAGKYWKIVTLSEKPVSVSKAYNDEPQRQENEIIINGEVKGKKFGNANTVKNISADLEDGKYFVKFKVLSKRFDKSDTKGKPKTGTGEIALFGEVNAAVFKSYIYECACDKGDGGVWGIFKLDFENPEFTKREIAQPDSSENQIVVSGTVNESGVFVSDADKTHDVQTDLTEGKYWFVFDISEHEAELYRNEHPKPDKQKDAEVGEGTVWVNEQTGEIQYDPKKNRDDHRHHAIDAITVAFTKLNYLNELSKYNAQLSEKQRGKATKPDFPKPWDNFREDVARVAENILISHRQNRKVITKIKKTIRKNGRKIQSEGYAVNGQLHKENIYGKRKAPGESKPKFHIRKDVASLTDAQIKKIVDTRIKEIVIHAKAKEKELLKNIDSLSKELKRPRLSEQDEQNLLNDLKSLRQEIRELYTLSNKNGEPVPIKKVRISENLSNTEQLKNMTIVKEKSGKTEQINQHVNPRNNHHVALYRTQEGELFEEMVTFWEAVERKNAKLPVINKVRADGAVFVESLQENDMFLLGIPEDYINWNEPNHALLSNHLYRVQKISSMYYTFRHHLASTINNPEQEFRVHSFSAWDAIKPIKVKINEIGEISKA

SEQ ID NO: 5401 - protein, 1202 aa, unidentified
  REGION 1..1202: note = Description of Unknown: Cas Enzyme sequence
MLSGNHRKVLGLDIGANSIGFALLKLDEQKGETLFEELASNSIVFSSPNGAEDRRKARGNRRIHERKSLRNRNSRKIFVRYGLAQQAFIDNTTQYLNDFKMKDRDVYSIRQRAIEGEMLTQEEFVLATYSILTDRGYSNMFAPIKKDTKEKEEENEEGVINEAVNHNAMLYKQAEYPLPSMVLTQKRQTLQNAFQNVAVRNKKEDYSNSLGREMHKEEFKAVVVSQSKNKNLFCNEEECLAFVDEILDEETPNRAFFQRPLKSFDNMVEYCAFYDAFNPKGSHKRMPLANIANIELTLRQSIDNYEAIHSKTGEIRIFSDEEKQKIVDFWIETPDADEIKSNNIYKNAGFKDIVIHLAETKEFRVLNIKAHRALLEVLRAYSVDFRNKDNAFYNELLLVLYYYKNSSSRIKYIEELIAKYVMAIDGAFVKECANLKNMDGFGSFSLKFANEVLELMQKGVIHSKALEELGYKSKYLNMPTYSYLPPLEPTPKDREWLQSNLPYFQTQHLFYQPKISPKVKRVIGVLRKLVNELIAKYGAIDEIRIETARELNSQTEEKAIEENQKKNDTQNREAQKFLKDKNLAQSPKNLERVKLWKEQGGFCLYSGEEIVEEEMLDENQTEVEHFIPRSVIWINSFKNKILVKKKYNQNKGSQNPITYLKSKGEWENFKGRIKLDPKSPKYKWLTHEEHIENVMQKEHWQESYLNDTRTATKTIAKYLNHYLYPNQNLYGKGEKRYIASVTGKAIGELKHIWGIHKVMPKDENDKKDRDTQYHHTLDAFAIALCSNGAMKTLNDSFKQNENHFQTKAQKAKLKEGVPTTTDGVSIVEYLKSIVEKYETHQRLVCPYNKRKTNMKGFKDGNLKLYITQDPKDKNKEILAEMEKVAIDSSLLIKKVNGFDKPRSDDEVKKVIQSIQSRLNPQKQANIIEAIEIYANRLLELRKGIDALDLEIKTEQKRLKTGKQHKEDNDSIKKQTIAPLQAQKKELSLEMQNLKCSFATQKGKRQIVRKLNLYREKIEKSSADSIIFTQRKERTIERLSVDNFREALENKEPFVIKENKNIFCVELYAHPKQNQVVGLKYFSSLANLHIKTKINEKYGDYFEDKKPMLTLYKNDIIKVFYTKEARAEYYVFNGGGDMTGTNNKVSIKKINHRTFTATNKKGVVEVSKEGAITPNSTTVVSKVTIDFFGNIEEVKQNAKSTWL

SEQ ID NO: 5402 - protein, 1280 aa, unidentified
  REGION 1..1280: note = Description of Unknown: Cas Enzyme sequence
MSKILGLDLGTNSIGWSIRNTQLSGNQIEKVGVITFNKGVGNSKTGEYSYAAERTKKKSARRLYQARKYRIWATLEVLINEGFCPLSIESLNKWRHYDKNEASRNSNSGRIYPVNDIAFEQWVKLDFDGDGVNDYKSPYQLRRELVTDIHDFGQAVNRYKLGRALYHIAQRRGFKSSRKGSDDVKENNESADVDLQYSEKKKNKTILELQERYPSATTIGALFAYLEDDGVRIREDMMQFVIRENYKEEIYKIFQFQGISEDSNLFKSLVESAPNRNDGKIFYKRPLRSQKGLVGFCTLEQETRIDPKSQKPIQVGKFRVPISHPSFELFRAWQFMNSIKYFDETSGIKRPLDLELKKEIISEKFFRKSKAYFSFFEIEEFIQKKGYQWKLNYKSKHTVTACPVSARLKDIFGQNFLETRIPKVASPNKKKDYYDIYDIWHVLFSFDDQEFVFDFALNKLKLNKEQAKQFVYAWNAMPVGYGMLSLNAVNKINKFLFKGLIYSEAVLLANIPSIVGVDKWEKNEEYILEHIDDLVSENRFQKNIVMIVNNLISKYKNLDQKFGYKNEDYQLDERDLQEVSEAVLESIGSKNWNVLSRPEQDITLNSVKDCYQYFFRSKGLNRQDINGERYLVVETNGRKFYKSDAGYYRQPKLKDELANFASKQLNVPADKLRKIYHPSDISVYPPAMPDENGVIKMGSPKTGSFKNPMAMRTLHELRKLLNFLIKTGQIDSETRVVVEVARQLNDSNKRWAIETWQRHREAENAEFAGAIEELIKQENVSADNRSDTDIDKMRLWYEQNKEESVPEMSESKKEVKGIRWSENRRKSYKEIIGKKLMIEKYRLWKEQKCICIYTSRAIGISDLFNSNVVDVEHTIPRSLSFDDSLANKTVAYMDFNRTEKKNLIPSKLHPDIYQMVLNNIKPWEEKVERIVQQIDFWKMKAKKAADKEWKDDAIKQKHLWQMEFDYWNNKIARFRMEMVPSGFKNSQLVDTQLISKYAFHYLKTYFEKVDVQKGETTSKFRKIFQIQPKDELKDRSKHSHHAEDATVLTLIPQAGKRDEILKGYYESLENRLKFEPIKPYPSFNPQAIRDIDKTLLVNSLNNIQFLSNAKRVVRKRGKVQYLPGSDSVMIATGDCIRGQLHQETFYGAIKPAKIDGEGKMVRDSEGNIVQEDKLKFTLRVPFLYKSKPEGSGFKTWEEIEKLVVDEGLKKQIKQQIDKAGGLKEAFELGFYMLDANGEKIGKNRIRHVRTWANISEPLQVKKHTYLSSKDYKQFYYAANA

SEQ ID NO: 5403 - protein, 930 aa, unidentified
  REGION 1..930: note = Description of Unknown: Cas Enzyme sequence
MRVLGLDVGIASVGWALIEIDDIGDTDGAQGKILAAGVWKFEPPEEKTQNGSRLKSEIRRNFRSQRRVLRRRRQRMNEIRRVFARHELLPRDDRDALKQPGMDPWKLRTEALERALRPVEFAVALGHIARHRGFKSNAKDVKSTQSANSNSAMNRAFAATKDKLARFRTPAHMLCADESFLVSGTSVRRLRNREGDHSRTQLREDILNEAAALFRAQARLRADHATTAFEEEFTRAAFFQRPLQDSEHMVGRCPFELDQKRSPKRGYSYERFRCLCRLRNLALVEGRETRALSASEMNVAMLDFGADAKFTYAVLREKLGLPASVSFAGVAIEEEKRLDFVVRSGAAAAGTHKLRSVIRDTLGETTWRDLLASPERLDRIAEVVSFRNSYDLIRQDLLASGFDEALARALVTAANDGGLDLFAGAGHVSAKAARNIIPALMQGLAYDKACALAGYDHTASRARHAFDVGVFGKEALARILSEKRVSRELVDSPTARKALIEALKQVKAIVEVHGVPDYIHVELARDVGKSIDERREIARRGEARGRRRNELIERFTREMGQAPRGGGDELTRFELWLEQDGRCIYSNADIEAARLVAGDNSVQIDHILPWGRFGDDSYSNKTLCLTSANQDKRGRTPFEWFHAERGRTEWEAFIARVDSLGIDGFKKRNYKLRDAEKAADKFRARNLNDTRWTSRLLAEALKQLFPRVENYGGGETMRRVFARPGALTDRLRKAFGLQWIKKNEKGERIRDDRHHALDAIIVAATTESLLNRATRQIQRNEREGLPFELTEIAAPWTGFREACLDALEKVFVACAERRRARGKAHDATFRQVATRDGERKAYERKMVADIKLADLERIKDPDRNIATIRALRAWIEAGKPAGEPPRSPKGDPIRKIRLAAKSKVNILLNTGNPNRPAAVDRGDMARVDVF

SEQ ID NO: 5404 - protein, 1491 aa, unidentified
  REGION 1..1491: note = Description of Unknown: Cas Enzyme sequence
MKRILGLDLGTNSIGWALVDLENNKIEGMGSRIIPMTQDVLDTFSGGKPLETQTAARTSYRGIRRIRERHLLRRERLHRVLNVLGFLPEHYVKEIDFEKHFGQFVDESEPKLTYNNRYFIFISSFEEMLSDFKQSQPQLFYTKPNGKETKIPYDWTIYYLRKKALSQKIAKEELAWIILNFNQKRGYYQLRGEDDADATRTAQTRIYFDTQIINSIVDTGSVYKGLKVIQITLANGDSGKYFSKEVPNWIGLQKNIIATIDLDKDGNDRFEDDGSLKRRFSIPTEEDWEKKWKLIKIKTEKEIKDADTTVGAYIYENLLQNPSQKIRGKLVRTIERKFYKEELIAILKKQIELQPELFTDDLYNDSVRELYRNNEAQQLVLSKRDFVHLFVEDIIFYQRPLRSQKSSIGNCSLEYRIHKDKDGIQVKEYLKAIPKSHPLYQEFRVWQWLSNLKIYRKEDDADITTEFLKNTEDVVNLFEFLMVQKEVGHKDILKHLVIPTLKEKFPSAKSAAFNKEVDKEIAKYRWNYVFDDSKEKEEDKSKKYPCNSIGYEIRRRLEKVANIPANFLTSEIEQHLWHIVYSVTDKKEYEAALKSFACKYKLDENSFVEGFKKFPPFPSEYGAYSEKAIKKLLPVMRLGKYWNWNAIDSKTQDRISKIITGEYDENIKTRVREKAINLTGNNHFQGLPIWLASYVIYDRHSEVESIDKWHMSYDMQEYLYHFKQHELRNPIVEQVITETLRVVKDIWEQFAEQNQIPYSLVYDEKKKKKVKSYNRFFDEIHVELGRDMKNTAEDRKYLTVQMTNNEATNLRIKALLAELKDNSDGKLPVENVRPFSPMQQDALRIYEDGVLNSTIELPEDIVKISKSSQPSKSELQRYKLWLEQKYRSPYTGSVIPLGRLFTEDYQIEHIIPKSRYFDDSFNNKVICESAVNQLKDKLLGLEFIKKYPGQKVECGMGKSVEIFTESAYQDFVKEHYAKNKTKRQNLLLEEIPDKMIARQMNDTRYISKFISSLLSNIVRADKEDDGINSKNLIPGNGKITTILKKDWGMDAVWNDLILPRFERMNQLTNTDAFTYWNEQYQKYLPIDSVNIDSKQVKIEKKRIDHRHHAMDALVIACMTRDHVNLLNNQSAKSETSRYDLQNKLRNKTKETWIDKKTNEQVERDIFKEFKKPWDNFTVDARTALETIVVSFKQNLRVINKATNNYERWVEKDGVKVKETIKQQGTNWAIRKPMHKETVSGKVDLPWVKVPKGKVLTATRKNVDTTFDLKTIAAITDTGIQKILRNYLAYKGNNPEIAFTPEGLEEMNANIKQYNDGNAHQPIRKVRVFELGSKFSLGETGNKKDKYVEAAKGTNLYFAVFESKEGKRSYDSIPLNVVIERLKQGAHPVDLKSENDFYLTPNDLVYVPNEDERINISVSKQIELTKEKRQNIYKVVSFSGNQIFFVRNEIATSIINKAEFSTLNKMERALDGTMIKESCIKLKVDRLGNISI

SEQ ID NO: 5405 - protein, 1688 aa, unidentified
  REGION 1..1688: note = Description of Unknown: Cas Enzyme sequence
  MOD_RES 876: note = Any amino acid
MKKILGLDLGTNSIGWALIEIDHENTTVKILGLGSRILTMDAAEIAKFESGAKTESGAAKRTTQRSPRKLNERFLLRRDRLHCVLNLLNSLPEHYKLSIEFENEKGKRSGKFKKGTEEKLAYYKDDKGKFQFLFKDAYHQMENDFRKKYPEMFYHKKNSAQTRIPFDWTLYYLRHKAVTDKDFELTKEQLAWITLSFNQKRGYEKVIGQDEKVQKEGELTDSFVGKVKAVNKIDDEDAYEIILIDNNNEVIELFKYKEETKIPITEIGDLKEVEIISRYDNEGTIEAKKTEYIINEVREFSIIDVRNSGRKIKENFVFEVELETGWIKEQQSKFTPKWKDTKRDFIIKTKYDENGNRILKGADRGRNINIPKEEDWTLMKLKTETSLTSFNTKNNTKGVASFIYYNLLQNPKQKIKADLITVIERDYYRDELDLIYKNQEKFHPELRNRDLYEQAIQLLYPNNSNHQKTIKELDFNYLIKEDILLYQRGLKSKKSLIADCTYEKENFERTDEKTGKKYKNPLKSIHKANPLYQEFRLWQFIKRLKIIKKEDVDNEEIKINLDVTAKLLTGDLKAELYTFLNDKESATEKDILGFLNKKYKDLGINTESYKWNFTSEKEPSNPTRYNFILRTKRVKGFDYRAFLTPDNEYSLWHFFYSVKKKDEFNKGLAKIIDRLLEKSGLSKEFQGELVKNFSSFGGYTNDYGTYSEKAIKKMLPFLRLGKYWNEKEVETILSKANQEVKQKVLDKEDINGELKDFQGLWVSSACYLVYGRYSEVGEVQFWQSPYDIENYLKNEFRQHSLNNPTVEKILVETLHVVKDIWKYYGEEIGTNEEGQIIYNKLFDRIHIELGREMKKNNKQKEKDDKNNKENRKANEXIVELLRELKRNNSSLQEKSPFQQEKLRILEESLLSSIEYDKDTTEYELSNGKITKKEIKEITTKEFSKISKSDFERYKLWLDQRYQSPYTGKFIKLSDLFDRRKYEIEHIFPQERITLNALYNKVICETEINKEKKASTGYGFISNAKSKKVYCSAHDAQTEIISIHEYEELVKNNFSGKKREILLSKEIPEEFTNSQLNNSQYISKIAMKLLSNIVREKDEDTFRSKNVLATNGTITSTLKRHWQLNDAWNEIISPRFKRLNQLTNSNLFGDYREINGHKVFINTVPEEVNKNFDPKRIDHRHHALDALIIALTSENHVQYLNNISSQEKNDEEKLTTRKGIKFQLTNSRKGFNDEKEWYFLPPAQIKTKDGIDEFEYQFGETKGKIFKEIAQNALENTIASFKQKNRVIRQRWNKYLKSEDGKLNVLKQEGLKEVVNFNVRKRLHEDTFYGKVKLQNKTITISLEKALNEKFDLVDIELLKEIDNLKQIDGKSFKQIIEELGSKYPTVNVYEKFVATRFGNELESFAQIPSDKIIKAIQSITDTGIQRILENHLNNYKEVVDDKTKFDTENAFSSDGVKELNNNIIKLNNGKFHHPIYKVRTSDAMGTKFSVSEEGQKSTKYVVTAAGSNAFCGFYQKGTDRKFYIPTLRESVESLKQGFEPCPATHPEDPEFKLIFVLNPSDLVYVPTEEEKENPNLVDFSKMKKEQMNRIYKFTDGSGTTMNFVSTNIANPIIDIKAEEHKKIKDNLLFWEEANETKKGIVKKTKPLFNEVGLGSENKTKSQNTFERNQIKSFCLKLEVDRLGNISKA

SEQ ID NO: 5406 - protein, 1415 aa, unidentified
  REGION 1..1415: note = Description of Unknown: Cas Enzyme sequence
MTNILGLDLGTNSIGWAIRDVDSGIEDQIIDYGVITFKKGVGDGKSGEYSLAAERTANRSKRRLYNAKRYRKWATLLELSKNGMCPISEEELRLWSIGNWENGGKNKGRKYPTSPDFHSWLMMDFDHFKRNNPNDANWRQFDNIYELRSFLLENYDNEDKYRLQKIGRVFYHLVQRRGFKTSRKNGKTTYADNELFKKFKEIHPDKADWKPSQIYIHLQSGQDNNLELRKVRIRNNAVIQRALNEEEFFSICQKQNIDESIAAKIYKAIYFVRPLRTQKGLVGKCTLEKGKPRIPVSHPLFEEFRALSFINNLQWRETNSRGSYKPIPIHLKRQILEKLFFRRFEKGKNKGKVDDGGTLRFEEIIDAFSENGKWEFNFRNKPNISTCPVIAGLMNVFDEEWKDKFITDENKFGINWTGLTLSYKIKYNGTVVKYKALSFLEIWHLLFDYLQTKDDEDGLINFCRNILGWNEYRITQFSEISFSQGYGSLSQNAINKILPYLQEGFIYSEAVSFANLKTVLGKEKFDQNKEKVTSIISDTIKTIDITKTKLNIVNSLIRDYFADNNTNRAKGVDDHIKEMAYEDVNKKLKIYFGEESWNKSNNENEGYCDYILNKYLNFLEGKQHREEKASATTDKNPAIDYYKLPRLDEAIKNILKINFNATDAGLKRMYHPSDIDFYSKAKFNRLEDPNPPSRGWKNPMAMRAMYELRKLVNYLLDCEKIDINTKVVIEMARELNDANKRWAIQTYQRYREEENKEFARAIIGVAQEKYPHLNEGNADDIDKIRLWWEQLENGEEIYKTIKSLKEDVDKYRLWKEQECACIYTGKPINITNLFDGVSYDFEHTLPLSQSFDNSLSNLTVCHASYNRNIKQNRMPTKLENYENDYNGYAAIKPRLEKWINKVETLREKVEKNKVATKGAIRSGDINRKNELIQQRHLLQFDLDYWDKKVKTFTLTEMPNWWKNSQLVDTQIISKYARAYLKTLFNNVAVEKGSVTAEFRKIYGIMGDEKKDRSKHSHHAKDAAVLTLIPGSAKREEILKRHYLAIEQNRKYQEQPYSTFNIFHIQKIEKDILINHITKDQTLSKTKKKVRKRGKIVFDYNNEGSKTPLIAQGDSIRGRLHKETFFGAVKVSERNEEGFAIRENGKYLVKQKNGEDEIWIVVRKPIDAVNIEKDIIVDEVLKNHIKKQIEGGKKINETIDFQNKPIRHIRCRVKAGVGFLSKEKALAIKKHAFLSKHKHKQDYLSLNEENYLFLLYEGFNEKQQLLRDYRILNLFEVANLNLKNINELKIETEFKTSEKKQGNVLTTLPLKGILRSGDRVVFFKNNKHELKELFTEEIGKRLYKILKFNELGANTAYVYLQHHLEARSDNELEKGDKKFDFSLYQPRLEFTCDKMNCAIEGIDFSIRPDGQIIWSF

SEQ ID NO: 5407 - protein, 1370 aa, unidentified
  REGION 1..1370: note = Description of Unknown: Cas Enzyme sequence
MRRNLQRYKLRRENLIEILKENGFIDDETILSENGNRTTFETFRLRAKAATEEITLSEFARVLLQINKKRGYKSSRKAKSTEEGQLIDGMEIAKHLYEENMTPGQLSLELLKQGRKHLPDFYRSDLQAEFDKVWYHQKQYYPDLLSDSLKEELKGKNMKQIWSICAKTFELVGIKRTTKGMEMKVENYQWRSEALSQQIGLEELAIVIQEINGQISNASGYLGNISDRSKKLYFNHQTVGQYQMARLENNPNYSLRNQVFYRQDYLNEFEAIWETQSKFHKELTPELKKEIRDVVIFYQRPLRSQKGLISFCEFESHQVEVEIDGKKKIKTVGSRVCPKSSPLFQEFKIWQILNNIQVSGKVIPCQQTDLFDETRSYKQGKRFLFQEEKEKLLAELNYKEKLSQNEALKLLYGNNKDLDLNYKQIDGNHTQAELFKAYQSIIELSGHGEYDFSKMPSEKTLQTVSEIFETLGFNTEILRFNSSLEGQELEQQPMYKLWHLLYSFEGDKSNLGNERLIEKIKKEYGFDKESASILASVVFQQDYSSVSTKAIRKILPHLKDGLDYSVACEYAGYKHSKNSLTKEEIENKELKNKLELLPRNSLRNPVVEKILNQMVNVVNAVVDEYGKPDEIRIELARELKKSAREREEMTKAINETTKLHEGYVKKLQGEPFYLEHVSRNDIIRYKLYLELKDNGFKTLYSNTYIPQEKLFSKEFDIEHVIPQAKLFDDSFSNKTIEVRQVNLEKGNATAYDFVADKYGDVALADYEKRVERLFNEKVISKTKRDKLLMREAEIPSGFINRDLRDSQYIAKKAREILENIVRFVIPTTGSITDRLREDWELVNVMQELNWNKYAQLGMTEVIEGRDGQRIYRIKDWTKRNDHRHHAMDALTIAFTKRSYIQYLNNLNARVQKGVDEYFDLDMVEIADLDKNQRSSVVYGIEKKELYRDSKGKLRFKPPMPLDEFRSEAKRQLENTLISIKAKNKVVTQNINVSKKKSGKNTKVQLTPRGQLHLETVYGSAKQYVTKEEKVNASFDEAKILTVANKRYREALLSRLFQFDGDSKKAFTGKNTLEKNPVWLGECHKDRVPEKVKLVSFEKIHTIRKEISPDLKIEKVVDVGIRNLLKNRLEEYGGDSKKAFSNIEENPIWLNKEKGIAIKRVTITGVSNAEALHDKRDKDGKLILDKDGDKQAVDFVNTGNNHHVAIYRKPKLDKNGIQLVDDKGLPQYELDENIVSFYEATARAMQHLPIIDRDYKKDEGWQFLFTMKQNEYFVFPRYDADGKMTFNPLDYDEEWYKNPENYATISPNLFRVQKFSFKNYVFRHHLESTIDLSGYNLRGITWTDFRSSKGLDSILKVRINHIGEIVSVGEY

SEQ ID NO: 5408 - protein, 1019 aa, unidentified
  REGION 1..1019: note = Description of Unknown: Cas Enzyme sequence
VLPKLSYRLAIDLGTTSIGWCMLKIDSNHQPKAIIKMGVRIFSDGRNPKDGSSLAVKRRQARQMRRKRDRLIRRKSKLIDTLVKHKFFSDNPIVRKSSIILDPYELRKKGLTEELVPHEFGRAIFHLNQRRGFLSNRKTNAMDGTSSLLKQAIVKLHEKLHGEECKTLGEWLAKRKSQGLGVRSRLLGKKAKDKAYEFYADRSMVEHEFNTLWSVQKSFNPVLFNEDAYSDLKNIIFFQRDLNLVRPGRCTLLPEEERAPIALPTTQLFRIYQEVNNLKILSIDLKEVGLTKSQRDHIVTLLASKNKVSFKVIAKSLGLPKDSTFNLQDGKREFLKGNITEALLSKDEYFGSAWQIFSLTEQDQIVSRLLNEPNEELLIEWLVDSCNLEVNAANRVANSLLPDGYGSLSKVALDKILPALMNEVISYDKAVAAANFDSHSALSHTYLTGEIMSSLPYYGDPLRRHVAFPKENPKNDEEHFGKIANPTVHIGLNELRKVVNALIQRYGHPSEVVIEVTRDLKIGRKKRQEIQQAQKIKQDLNEKLVDEACEVLGLSITGLDRNKRKEISQKMQLWYELSPNDISLRCCPYTGEYLSLSRLLSSEVEIDHILPYSRTLDDSLNNKTVCLSRANRYKGNRTPYQAFGQNSHNDYSYDDILRRSANMAKSKAIKFSIDGYERWLKNDKDFIARALNDTAYLSKIATEYLSLICPPNHVWAIPGRMTAILRGMYGLNYLLSHDGLKNRSDHRHHALDAAVIGIVDRALLRRFSNASSRSEDLQLGRLLESVPLPWETYKEQVKTALKNIIVSHKPDHGYQGAMHEETAWGLRENGVVTRRVFDEETGAFRREFAKKNLIEVYSNSNPKRHRLNDDGSPAPYKGYISGSNYCIEIWGDQKGRWQGEVISTYTAYQTIRCLGEMAGWKRLRDPQLTLSNKPLVMRLAINDCLKLSINGIFKIMRVVKIGSNGQISFAEHNEANVDARNRDPADPFAYISRSPNSLKSSIEKKITISPIGVVSYRIL

SEQ ID NO: 5409 - protein, 1225 aa, unidentified
  REGION 1..1225: note = Description of Unknown: Cas Enzyme sequence
MNGNIVMNANPFLTGLVFGFDFGTGSIGYAVREKDKFLDVGMLVCPENTGELSVRRESRSQRRRLRIRTRIRDWLSRQLEEQLGLPSPWMKTDDGLILKPGLDYARISNPVRLRFEALEGHIEKPEELHAAIAHLWKRRGKTEVPWKQREAKSGTLEQKKELQKVAAKLNALKYEITKGDGTKNPDGTPKTFHHPCQLLIHRQKLGIKQRDEVWPRDEFQNPDFNLKNEFLTIIKMAASLRNESGGQRFPNISKAKADWVLYGDTHKVANKGQERHVYFKITDCKNPGVLGLRWPRFDNRSPGLDILRPLDKLGRPIHVIRRNKSIFQRTQFEQAIFNFRVIDKATGKKVLPDIASLNRLREIYESARQNSKRKPKEPKNDSDAPADDKKIIEVKIGDRVLNTWASELADKYELIKDSPALFSRTGNGRAKFSSPTLRNIKQVLETLSAGQTVDTTQPLLRIPNKESKELAMNRFLGDIRHGHVRHRLGLFLRLIRKLTVKYGKPDFIVVEAVRSMAFRKRKLEKYKHEQQQNRDKRDQIYEKLKSEEQSTSEKAIMRYRLAEEAGFECPFCIKPFNRANFHNADIEISHLYPLSLTPCNEYYNLTVAHAGCNRTDMESKIPREVFGANRMLWSEIEANARKRFAGKKLQLFLAQTPEEAQALIESKTPLTATTYIAKMIRRLCLIEMEWLDKNGRDPTNNEGNIPSKQFLVTHGEITSRFRKEWQLNEILHPCVPFYSQAELAHFSPQEKRAHEEAKKQRFEKNRGDHRQSALDAMVISCTWPEYAQRVHNATNDWQDKGWWYFDTIRKRLMARHPLFDDFAPVRKAAIDWMKRLIDENRIRHHSTRTKNRQGYKLDRLGKTAPNVYVSREKVEKLSPPNDFDFAYNPRTIENEASKGKSIWPYLRTAWDTYKAGLSPGELNLKISEANGGFPNDFVARLCLDHAKKWRATAKKNIPFSWPEQITTPVRDGQGANDFDRIYCTENGKMSNSLAKYFHVAWDYYKSATPDYLEKLKLSNGKLPPDFTTRLCFAHFQNWRERGCPEEFEFPHKIKIPIKSVSYRSQNNDSTVMLTDKKCKAYVMRKGYRFVSVWKAKDCTDYVIEFVPFWKNDNRIYKRIIPNVFNGDLKWEDNKAQALTHYDLANHEQVARVFTGDVVRVKKTDAPFLFYRVLDKGQNQVRLLPTHVANDTNGAVQVAFGIKKSAITQTWPVFISVFEPCVRGAV

SEQ ID NO: 5410 - protein, 1536 aa, unidentified
  REGION 1..1536: note = Description of Unknown: Cas Enzyme sequence
MKKILGLDLGTNSIGWALINESEDKKEILGIGSRIIPMSQDILGKFDSGGSISQTAERTGFRGVRRIRERYLLRRERLHRILNKLGFLPEHYAKSIDFEDRLGKFKNDSEPKLVWKETETNGNEFIFKSSFNEMVKEFRVTHPELFTLNGSGVERKIPYDWTIYYLRKKALHDKIEKEELAWLLLNFNQKRGYYQLRGEEEEENPNKLVEFHALKVIDVIADEPQKGKNDIWYSVVLENGWVYRRSSKTPLFDWKDKIKEFIVTTDLNDNGTVKTDKEGAEKRSFRAPSEDDWTLLKKKTESDIVKSDKTVGCYIYDILLQNPTQKINGKLVRTIERKFYKQELQAILEKQKSYHSELRDKESFANCLVELYQNNEAHRKTLRNADFTKLFIDDIIFYQRPLKSKKSLISNCPYEYRTFQNETLELKKEPIKCIAKSNPLFQEFRLWQFIQDLKIYEREANINGRFQTDVDVTNDFLKSEDDYVALFDWLSDRKEIKQDTLLSSYFKIKKIKGSANLPYRWNYVEDKEYPGNETHSQINNRLSKLDDCKVFFLDKEKEMQLWHILYSVDDKSELEKALKSFSDKNNFGSDFVEVFKKFPPFKKEYGSYSAKAIKKLLPLMRMGKYWNEIEIHEQTKHRIDKIINGEYDENIRNRVREKTINLTDITHFKSLPVWLACYIVYNRHSEANDLKKWETPQDIENYLRNEFKQHSFRNPIVEQVITETLRVVKDIWEQYGDFSEIHIELGREMKNPANKRKEMTEKVTENENTNLRIKALLVELKNYSDVENVRPYSPSQQEILKIYEEGVLNSNEDVPDDIAKIVKSGQPTKSELIRYKCWLEQGYRSPYTGEMIPLTKLFTSAYEIEHIIPQSRYFDDSLSNKVICESEVNKEKDNALGYEFIKKNEGRIIELSYAKKVKIFTIVDYEEFVKRQYGKNRIKMKKLLMEDIPDAFIERQLNDSRYISKVVKSLLSNIVREEGEQEATSKNVISCTGGVTSILKHDWGLNDVWNSIIYPRFERMNEKTNSNDFGQWTNKDGKKVFQTEMPLILQKGFNKKRIDHRHHAMDALVIACATRNHINYLNNEHAKHKDDKIRFELRNKLRRIEDIIVERNENGQKVRKNIKVAKEFFKPWDTFTQDAHAALDNIVVSFKQNLRVINKSVNNYQHFVDGKKVIDKQIKGDNWAIRKPLHKDTVAGRVNLKFKKTVTLSSAIDQWEMLVDKNLKTKIKQLINEGLDKKKIQKFFTDYENKWIGKDISKPELYYWSDEKDLLVASRVSLNGSFNSAKIKSITDTGLQKILLNHLALYNEGSNSKAVEHPELAFSPEGIEEMNKNISILNDGKAHQLISKVRTYEPMGNKFNVGSTGNKKDKYVEAAKGTNLFFAIYVDDLGIRSFETIPLNIVIEQLKQGVSPVKEVKFDEKMNRFTLQTYLCPNDLVYVPYKEQTDQINLVEIDRSRIYKFIDSSDTTANFIPFTSASTIFNLNKKDQEKLGLDLGIQNEFGVGSPQSKNQKALTGEMIKEVCFKLKVDRIGNITF

SEQ ID NO: 5411 - protein, 1058 aa, unidentified
  REGION 1..1058: note = Description of Unknown: Cas Enzyme sequence
MTELNPMDNLVLGIDLGTNSLGWALLDMDAKKIVAAGSRVFKAAAEGNIEQGRDESPNVKRRQARQARRMLWRRSMRQVKVLRTLQRMNLLPSCDPTDSAARHHMLNQLDCELASRHLPKNNGTAAAHLLPYILRAKGLDSRLEPHALGRAVLHLAQRRGFLSNRKSAMKKDEDLGQVKESIAQLAKSMQDAGKRTLGEYFASLDPEQKRIRQRWTARQMYVDEFEKLWSAQVPHHPDLLTETAKKRLSKAIFHQRPLKSVRKLIGRCSLEPKHFRAPWASLPAQRFRLLQRVNDLTAYRPSTGEVLAIDADQRRALIETLVTQGDLSFAKVKSALGLPRETKFNLEEGGEKKLPGDRLISRLRVVFGNQWDQMPAERKDAVVADLQGIESESALERRGREVWGLSSEKAREFSEIPVEDSHCALSRKAMLRLIPELEKGIPFATAKKTLYPASPDNAQPSGSLPPVLKAGVTLRNPVVTRSLTELRKVVNAILREYGKPGAIRVELGRDLKKNRKQRSEIWKRNRQNESGRQVATEKIRQEAGITMPKPSDKEKFLLAEECGWQCPYTGKSFNMKALFGSAPEFDIEHIIPYSRSLDNSFLNKTICQSEENRNRKKNKTPYEAYAGTPEWEEILQRVGAFKGEAAREKLRRFRMTPDETREAFEDFSERQLCDTRYASAEATRFLGTLYGCRSEQPGVDTQGKRRIQVGAGQVTARLRNELGLNTILSDGGVKNRGDHRHHAVDAVAVALTDPGTVKMLADAAQRAPEERRRRFGRINPPWPEFLKDVRGSIAGIIVSHRQHKKLSGALHEETNYSPPKKGPDGAIVCHVRKSLANMTMKDVASIVDPAVRKAVMDKLQALGMKEPTEAFKSAERLPALRTKDGRQIPIKKARVRVAERPIKIGRKAPRHVMSGANHHMEVWEVKDKKGGVKWEGKVVTLFEACERLRAGKPVVQKDHGEGTRSLFTLAPGDMISLAQFATKDSVGKDHYVVRSVWTQRMDAHEYPSIRIVRANDARPTPEIKKAGHLFNILLEPLRKRMCQKVQVDLLGKASSAND

SEQ ID NO: 5412 - protein, 1077 aa, unidentified
  REGION 1..1077: note = Description of Unknown: Cas Enzyme sequence
MKKILGLDLGSASIGWAMIKEYEENNKTKSEILGLGSRIIPYDGTEGKDFAKGTGESRNSLRTQARTTRKGYDRYQLRRKYLVDILVKNNMFPDETLKSLPKLQLWELRNKAANSEISLPELGRILLWLNQKRGYKSSRSDANIDKKDTQYVSLVKSRHEKIKELDFTIGQYFYNELLKDEFYRVKENIFPREAYIEEFDTICKEQQKYHTVLSNELIDKIKYEIIYYQRALKSQKGLVSVCEFEGFWRKDKKGKECFVGPKVAPKSSPIFQLSKIWENINNIKLNSRTGGDITLTSEQKLSLFEHLDNNEKLTVTDLLRILNLKKENCYVNKQLSKGIQGNVTKYLIKQKLGNTPDYNKLFKLDLNIEVTSKEGYLYDKKTGEVLNSKPIKYINSLVEREPFYQLWHTIYSINEHNECSRVLQTKFGIEEEIANDLANIDFSRFAFGNKSVKVIRKILPYLMDGDGYSEAMSYAGFDHSNSLTKDQNLERKLLDKLKLLDKNSLRQPIVEKILNQMVNVVNAIIDKYGKPDEIRVELARELKQSKDERNDTDKSMSKRQRENEDITKRLAEYGLRATRNNIIKWRLYEEIDNEERKLSAFCIYCGQPISLTEAIKGNDVDIEHIIPKSKLFDDSQSNKTLAHRHCNKDKNDRTAYDFMKSKSEEALNEYVDRVNDLYNNKVIGKAKRDKLLMTESKIPDNFIDRQLRETQYISKKAREILQTICYNVWCTSGTITAELRHLWGWDEITMNLQFPKYKELGLTHVVEWESEFGKNSHTKEVITDWSKRDDHRHHAIDALTIACTKQGFIQRFNTLSASKTREDMAFIVEQRSKDFREKLSLLEKYIISEQQFSVADVQKAVANILISYKAGKKVAVFGKRKIGKHGNKKVVQTGIIVPRGQLSEEHVYGRIKMLESKPLKYLFENPHLIFKPYIKELVELRLKIYEGDAKKAIASLKKEPIFLNEDHTLELQYATCFKDEYVIKYMVNTDFNKVDKVIDGKIKEILEARLAKFGNKPKEAFKDVQLEDKTLIKWYEDEGLTRPIISVRCTTGLSAVVPVKKDIEGKDIGFVKPGNNH

SEQ ID NO: 5413 - protein, 1460 aa, unidentified
  REGION 1..1460: note = Description of Unknown: Cas Enzyme sequence
MAKIIGLDLGTNSIGWAIRDTDSATNNQFIDSKNEDRVNAGVQIFRKGVGEGKSGEFSLSAERRANRSKRRLYNAKRYRKWELIKKLITYNMCPISIEEIRLWSVGNWERLDGTNKNKGRVYPTSPDFLAWLAMDFEKIGTDWEGEKLSPDYTNPYELRIDLLENYKEDDQHRLYKIGRAFYHLVQRRGFKTSRKNGKSAYGENDYLENKLKENPNWKASQILQTGLKNESRRIRNSGVIQRRYFEEEFYAICNIQRLNENQKTTLYKAMYFVRPLRTQKGLIGKCTLEKGKTRIPISHPAFEEFRALQYINNIKWRETGNGKPFEAIPFSLKKKIFELLFFKPLERGERKGKINDRSYFEFKEIVDKFSENHKYEFNYAKYKNDKFELYSNPNISICPVIAGFMNVFHEEWKDQFICSDIRYGINWESLRIEYKIKYGTVKRKGKINVSKQIGDSRALDKDGIWHLIFDYIQTQDNEEKLKKFCKDVLEWNVVKTEEFANINISQGFGSLSYSAIKKILPYLQEGNIFSEAVAFANLSNVLGKEVFESNISEVKKSITHAIKQIDDQKVLLNITNGLIQQFFSEHNSHRAKGIDERIKELAYDETLKKLIGYFGPENWISKKDQERKFFEEHVLEKYLRFLEGKQGREEKASSRQNKNPEIDYYKLPRQDEAIKFVLSQKFGATEIGLKKLYHHSDIDIYLRSLSGLLEDPNPPSKGWNNPMAMRTMYELRKLINYLLETEKIDTDTKIVVEMARELNDANKRWAIKTYQKNREDENVEFAKAILGVAKEKYPTLNENDAENIDKLRLWWEQLENGEEIYKQIKSLKEDVQKYRLWKEQECQCIYTGKMIGIVDLFDGTKAQFEHTLHLSKSFDNSLANITICDGDYNMRIKRNQIPTQLKNYTEAWNGYPPIEPKLTKWKCKEQLLRDKIEKNKIDTKRAIRRGDIYSKNELIKKRHLLNFDLEYWAKKVQTFTVKEIPNQWKNSQLIDTQIISKYARSYLKTVFNKVDVQKGSITSEFRKIFEIMGEEKKDRSKHFHHAVDAAVLTLIPGSAKREVILEEYYKALENGRKYHTKPYEDFTTSHIILIENSILINHINKDQTLSETKKLVRNRGKIVYQQDKVTKQFILDENMKRIPLVIQGNSIRGRLHKESYLGAIKVNERNADGYPLKQDGKYLIKQEKGKDEIWLVIRKPIESIDFDKDIIIDELLKKHLADQITNGCKNIDLLDFNNKPLRHLRCRVKAGRGFLKQETAIAIKAHTFVSKHLHKKNIYVQNDENYLYLLYQGFITNQANIKINPESIIQGIDSEEKIIRGYRILNLFNIAELGLKNINDLKQEEEYRFLTKGNGKNKIKLELKAMLKVGDRVILYEKHRDEITDKNVNLRLFKIIKFNEMTSTGYLYCQFHLEARPDGELGDGDTKFDPNKYQARLKLSADNFNCLIENLDFKINNDGSIVWI

SEQ ID NO: 5414 - protein, 1229 aa, unidentified
  REGION 1..1229: note = Description of Unknown: Cas Enzyme sequence
MKIILGLDLGITSIGWAVIAEKEETKEILGMGSRIIPLSVDDKNEFSRGNSISKNQNRTTKRTQRKGFDRYQLRRKYLINELKKSGMLPDLNLIQLDKLELWALRSRAAEKEITLMELGRVFLHLNQKRGYKSARGDASLEKKETDYVQEVITRHQKLLEKGLTIGQYFYEELKLNSVFQIKKKVYPREAYIEEFVKICETQKQFHPELTEELIKVLRDEIIYYQRKLKSQKSLISICEFEGFWVKTNDENEKELFVGPRVAPRSSPLFQICKIWENINNITLQNRSGKRLIIDQDKKLRIFEYLDNNERLSLAELYKILELKREDGWYGNKQLLKGLQGNTTKFKIKKCFDNKGLFENLFELRLQTEVAEREVYLVDKKTGEIIGQNVQKLVKPIIENEPLYKLWHTIYSIGNKEECIRTLVTKFNIPEKTAKDLASIDFTTQAYGNKSVKAIRKILPYLMEGFVYSEACSFAGYNHSDSLTKEENTQRKLSDKLSVLQKNSLRQPVVEKILNQMINVVNSIIDKYGSLDEIRVELARELKQSKDERNEAYTNNNRREGENTIIADRIRNEYSLKATRNTINKWRLYQEINGEESKTNAFCIYCGQPFSLSAALSGHEVDIEHIIPKSRLFDDSQSNKTLSHRNCNEAKKDKTAYDYMKTKSADQFDAYLERVDQLFKNHIINKTKRDKLLMSEDKIPQDFIDRQLRETQYISRKAREILMQVCTNVWATSGTVTAYLRKIWGWEDVLMNLQLPIYRELGLTEFIEFEKDDQLHKKEVIANWTKRDDHRHHAIDALTIACSQQGYIQRINTLNADSTKDSMFEEVKQNFDFKKSLLENYIYKQKPFTTSTVMDAASKILISFKSGKKVATIGVRKIKKNGKKTIVQRGIIVPRGALSEESVYGKIMKLKANQSLKYLFENPQTIVKQNIRELVIERLIQHDDDTKKAIASLKKDPIYIDDQKLIELTHGSSYQEEVVSKYPVETIKVKDLESIVDKRVKEIIKMRFEQYGNKEKDAFKNLEENPIWFNKEKGIQIKTVRCYTGLTAVVPVKKDENGKEIGFVKPGNNHHIAIYLDEEGKKHEHCVTFWQAVERKKYGIPVVIKDPGSVWDTILENPDEYPNNLKEGLPLDGWKIELSLQQNEMFVLGLPKEDAIQAIKERNYKILCNYLYRVQKIASTNYFFRLHLETQLLDSTESKLAKRYYNIRSSTAFDSLNPIKVRLNNLGELI

SEQ ID NO: 5415 - protein, 1047 aa, unidentified
  REGION 1..1047: note = Description of Unknown: Cas Enzyme sequence
MEKVVLGIDLGTNSVGWGLIKVDENDIPTGIIDSGVRIFEAGLDGDISSGNAESRCAQRRAKRMARRMQARRRRRMMKVKNILQKNAFLPEGNDMGKITADIDAAVLKRISGSKFSDQPSTMILPHVLPYYLRSRALDEKQDKYVLGRTLYHLAQRRGFLSLRRTLEDKETGVIKKEISELESKIAESGARTLGEYFSKLDPKQSRIRTLHTSRQMFIDEFNKICDAQKDLISPELRGELYQALFFQRKLKSAKGLVGGCTLEKDVRRCAWYRPEAQKFRYLQTINNLHVILPDGAVRELNGKEWDILNEALDGCSGALDRHGNLKITEARKMLGLPKGARFSIEEGGEKSLKGHEINACMIPVFGNRWIEMSEYEKEELLQDLHSFEDDEALTRRIMKRWGLDGEKTGELVKVRLPEDYCMVSRKAIMKLLPDMEQGISFQTAVKKHYPNFFTAGKVHDRLLSLDDSELELRNPAVSRSLSQLRKVINAVIEKYGKPDKIRIELARDMKNSNKEKKKIIEHTRDNEAARKRAQALLFEQLGMEKPKNDDILKVLLAEECGWKCPYTLRPISMNALFGENSQFDIEHIIPYSRCLDNSFANKTLCWHEENRKVKRNRTPFEAYSGDQEKYEAMLMAVSKFQGRLAPRKKELFELTSTEDIEDFSSRQLNDTRYATKSAMQYIAMLYGGTVDDNGERRIQSMTGGITALVRKAWGMNRILGDGEKNRDDHRHHAVDAVAIAMTGPALVKRLTDFIKNREKQQLFNLRIEEPLPVGNWTNFLDDLRTAIGKITVSHSPSRKISGALHEETIYSRDFPALESNGKTSLVKHIRKPLTDIAAADVEKIVDPSIRKLVADKLAELGVKEPKKAFASADNLPVLLRQDGTAENRIKCVKIERTQSTIRIGEGDRAREVVTGNNHHMEIVALLDGQGNETKWEGHVVSMLDARLRLKNKQPIVKKDFGANSKFKFSICCNDIIEVEIEGKKEICVVRCIPLSKQIMFVRHTDSRKQADVKKAKEWFTAYPDPMRTKNCRKITITPLGEARRAND

SEQ ID NO: 5416 - protein, 1044 aa, unidentified
  REGION 1..1044: note = Description of Unknown: Cas Enzyme sequence
RLLKNAGLIADTKLFKPEQAFATSLWQLRVDSLGRCLSDEEWARVIYHLCKHRGFHWISRAEAKQTEGDSKSEGGKVKQGLAGTAKLMDEKGYRSAAEMVLAEFPEAQRNKQGEYRKALSRELLAKELALLFARQRVFGNRHATDTLETAILGNSDKKSGLFWQQKPALAGADLLKMLGTCTFEKNEYRAPKASFTAERHVWLTRLNNLRIVTDGITRQLTEQERQLVLPLPYRQAGDLTYKQLGMALTKAGLLEAGCFKFIGLAYPTEAQKAEGKTKDPESATLVKIPAWQELRQTLNKASLNDEWEKLSGDALCGQPEIFDKIAWILSVYKDDDEVRTELAKLVLPNPEGLTEALLNIRFDKFHALSLKALRAIVPHMEKGLRYDEACVQAGYHHSQLHKIGEGEHKYLPPLYDGRDGDGRMIFAEDADIPRNPVVLRSLNQARKVVNAIIRRYGSPSAVHIEMARDLSRPFDERNKIKKDQDEYQARNQRDREQFIELFGHPPKGLEFEKWRLYREQNGQCAYSQKPLASSGDVAEIFLDGSTEIDHALPYSRSFDDSKNNKVLVLTRENRDKGNRTPYEYLGGAENSERWQRFFSFVESNKAYRLAKRTRLLRKDFGAKESEEFRERNLNDTRYVCRFFKNYVEQHLKLAEGSEAKRCVVVSGQLTNFLRTRWGLLKIRSDSDRHHALDAAVVAACSHSMVQRLSNYSRTRELEQVRDGFVNIETGEIVNPAMHQQLREHFPDPWPYFRHELEARLKIDSPALLREEMARLSSYTEEELAALKPLFVSRAPQRRNGGAAHKDTIYGQPEKLKKNGSVSQKVALASLALKDIDLLADPHRNAKLYGAIRERLEAHGGKGDKAFPATNPLRKPDKEGNPTGPIVRTVTKVIDKLSGIPVRGGIAKNDTMLRVDVFTKAGRFHLVPVYVHHRVTGLPNQAITRGKDENQWAIIDDTFEWRFSLYPNDLVQIRLKDETHLGYYASTDRSTSSISIWAHDRNQSVGKDGLIRSIGVTTAKDIEKFHVDTLGNVYPAPPEKRRGLA

SEQ ID NO: 5417 - protein, 1311 aa, unidentified
  REGION 1..1311: note = Description of Unknown: Cas Enzyme sequence
IDGMAIAKRLYVEGLTPGQFVFQILSEGKKRIPDFYRSDLQAEFDQVWRKQKEFYPEIFTDEFYLDLKDKGQKATSALFWKTYGIHTADIKDIEDSLKNEFTVKLPLREKRKLQVYKWRSEGVEKELTIEQAACVITEINNNLYNSSGYLGSISDRSKALYFNKETVGQNQYRQLLKNPHTRLKNQVFYRQDYLDEFEAIWAEQSKHHIELTPDLKKEVRDIVIFYQRNLKSQKGLIRICELARKEVEVKIDGKTKTTVIGPRVVPRSSPLFQEFKIWQTLNNVRVRIKKDGLQFTEKNDLVKRKDYPNEKECFLDLTAKQLLFDELNLKGNLSANRIIEILGYKPSQIEINFKQLEGNRTNQALFNAYLKILEVEGYDEALLKLSDKDEINVADLKTPAQEIKNMVKSVFEHLGIDSKILEFDAEREKGSFEQQKSFQLWHLLYATEDDNRPYSEEDIFIYGSENIGLKKLLCQKFGFKPEHAKILAKVGFETDYGNLSTRAIRKIFPHIKENDYSTACEIAGYRHSASSLTKEEIEVRPLKPKLEPLKKNSLRNPVVEKILNQMINVVNSLLEKNRQIDPDFRFDEIRIELARELKKNAEERAEMTANINKAKLEHEKIVKILKNEFGLKNPTRNDIIKYKLYEELKNNCYKDLYTDTYIPRSILFSKEIDVDHIIPQAKLFDDSFSNKTLTYRQTNLEKGERTAFDYIVSKFGEVGLKEYLSRVESLYEHGRKSSEEGINKAKYLKLQKKESDIGDGFIERDLRDSQYIARQAKKILYDITRTVVSTTGSITGRLREDWGLVNIMKEINLPKYRALGMTEMEERKFGQQVEVIKDWSKRDDHRHHAMDALVIAFTKHNHIQYLNYLNARKNEKHELHSNIIAIETKETEIKIGDKGEKKRVFKLPIPNFREQARQHLQSVLVSHKTKNKIVTRNKNSIKSKNGEINKIELTPRGQLHKETIYGKYRYYENKEVKIDGKLDKLTINCISNPQFKRLLLDRLEKLNNDSKKAFTGKNSLSKNPIYLNEEKTETLPEKVTVSILVDDYSIRKEIVGSNPTSKQFVPDYKSIEKVLDTRVRYLLKKRLDDYGGNPQVAFSDLDKNPIWFNEEKQISIKRVKISAVKNAVPLHFKKDHKGNFILDEQGQKIPVDFVSQGNNHHVAIYRDEKGSLQERVISFFDAVQLTNAGEPVVDKYYRYHEGWRFLFSLKQNEMFIFPDKKGEFNPKEVDLMDPRNKEKISPNLFRVQSISSKDYLFTSHLESKAVDGAFMKNNKDLSGVVFHRIRSANDLEGIVKVRLNHLGDIVSVGEY

SEQ ID NO: 5418 - protein, 1468 aa, unidentified
  REGION 1..1468: note = Description of Unknown: Cas Enzyme sequence
MSSSNRILGLDLGTNSIGWAIVDKEGSEFSLIDKGARIFSEGVKSDKGVESSRAAERTDFRSARKIKFRRKLRKYETLKVLSENNMCPLSIEEVIAWRKSGFKNYPLNPEFISWLRTSEEDEINPYLFRDKASRKKVALFELGRAFYHIAQRRGFLSNRLDQSAEGIIEQNKPGLEDIIDNATSFTELQIELTDYFQDRDLIERKAPDLDEGEKKLKTIYNSFLKTIKDNPKDFDKTKTLLSERLNKKEDLGVVKQKIGEISQAMIVGNFKTLGQYFFSLYNKGKIRNQYTARDEHYLSEFEVICMAQGIEGIIAAEKLPEKRYVGLAKELYKAIFFQRPLKSQKGSIGKCTFEKSKSRCAVSHPDFEEYRMWSFVNTIKIKPPTDESWRFLTSEEIVKITPKFLRKKDNFNFEDIAKELVPSGGKYLFSKVTTKGISDDYLFNYHLNSSVSGCVVSTSFKNALGDDWKTKIYTYETLNKRGENVTRNVDYNDLWHLISVSTSDLYLQEFALTKLKLDNKKATLFSKIKLKKDFASLSLTAINKINPFLREGLLYSHAVFMANIENIVDADIWNNLEDRKYIQTKIAALISTNTFDNNLLEIINGLIKECKTGGHFYSKEAENIYKSDLDKKVSAFVVSNKIEDQKESIMGMLFPIFIEQLKKYEFISIKRLDEKVFDFLDGQNDDGQVFCNSKNKLKKLYHPSDIEVFKKKIIKDEFGNEKVVLGSPLTSSIKNPMAMRALHQLRKVLNTLISEGQIDRKTIIHIEMARELNDANKRKGIQDYQKEIENNRKVYIEEIKSLYKAATSIDIEPTEDDILRYQLWIEQDKKTIYEEQCTNISISQIIGSNPDFDIEHTIPRSRSQDNSQMNKTLCSKYVNREIKKNKIPFELNNHHDIKDRVEPWQKKYKALENEIISLSKSIKAATTKEQKDRKIRLRHKLNLQKEYFKGKYERFTDKEPKVGFKNSQIPDTGIITKYSQAYLKSYFKRVESVKGGMVAEFRKAWGIQESYMKNDKKYYQVKDRSKHTHHCIDAITIACMTKEKYDVLANAWTQEDKGKLGEAWKLLADSKPWLTFTEDLKKIEDEILVSHHTPDNIKKQSKKIVRIRGKKQFRDENVLDKKGNTIPIFGKRLNEVEISSKIEGKDYFKIQKNNETVYYEYLFDKTGNIIHKKIPFFNQGDTIRGSLHLSTIYGAIERENESGEKTIKYVVRKPISKDFTDADVKNIVDNGIRERIEKHGLKNVLTKEETIILPEEKKGENGATANLKPMLIKKIRLFQSTVKNPLHIKAHATVSKSRHEHKQTVYAQNDENYAIAIYEGIDEKGKLKRAYESINNKDAGSYYKLSNKEFSQCYDIIMNPHDKTGLPLKYILKKGLMVIFYKNNPSEIFDLDLINLKKRLYKLSKFDAQGRLTFRTHFEAKQASELKENYSVDFENPFEQIRLQVSKLDIIVEGYDFKMTPSGKISKM

SEQ ID NO: 5419 - protein, 1369 aa, unidentified
  REGION 1..1369: note = Description of Unknown: Cas Enzyme sequence
MKKILGLDLGTTSIGWALVNEAEKTTEASSIIKLGVRVNPLTVDELTEFEKGRPITINASRTLSRGARRNLQRYKLRRDALIQIMREAGFIKSESKLAEDGKDTTHETLRIRSKAASERIELGEFARVLIAINRKRGYKSSRKSKVEEDGSSIDGMATAKRLYEENLTPGQFVYQLLKEEKKYLPDFYQSDLQKEFELIWKFQAQFYTVLDNSLFSELKGKNKTQTWAILAKPLSLVCIKLEGTAKAQKFKKYELRSTALKTKLNNEELAIVFQEINNNINGSSGYLGAISDRSKELFFNKETVGQNLYKQVQKDFHVSLKNQVFYRQDYLDEFEKIWETQVKFHSSLTDELKHEIRDVIIFFQRKLKSQKHLISTCQFEKHHKAVPKSSPLFQEFKIWQTLNNLEFKNKQTGQVGSWEIFDDEVRISLFDELNIRGNFDHNQVLKFVGLSNKEWQLNYADGILGNVTNQALYDVYQKIAENEGYGFDWNAKKAQEIQEELDAVFSQIGINSNVLKFDSLAANNDFDKQLSYQLWHLIYSAEDDGKIDEADKELYGNFDVKIKKILHTKFGFNPAYGTMLANIPLQQDYGQLSAKAIKKILPHLQNGNDYAESCSLANYRHSNFLTAEEQQARKLKPTLDLVKKNSLRNPVVEKILNQMVNLVNQLGDEYGKPDEIRIELARELKKSSKERSDMTSRIASATKENNVVRSLIARDFGIPNPTKNDIVRYKLWEELAPRGYKTIFTDTYIPKDKLFSKEIDIEHIIPKALLFDDSFSNKTLAYRHINLKKSDRTAYDFISEEYHQNLESYVLNVEAFYDKGKGISKAKRDKLLMAKAKLPEGFIERDIRNSQYIAKKAKQMLQEYARNVVSTSGNITAQLRSDWDLVNVMKELNFEKYKALGLTEVEIRKDNKKIEVIKDWSKRNDHRHHAMDALTVAFTTHSHIQYINNLSASRDEKNPILYGIRQKITVVDKQADGGRKRNFISPIHNFRQEAKTHLNFTLISFKAKNKVVTRNINKTKTATKNLNTLTLTPRGQLHKETVYAKRLIRQEGMTKFNQKMGLAQAQLIINPEIKELIIKRLDAFNNDSRLAFSTKELKKNPILYKNIVITETTCFEEVYTIRKDINPTNFADVKKIEKVIDSKNRKVLLDRFNAFNKDSKKAFSDLDANPIWLNEEKRIKIRRVTMKGVNNVETLHSKRNHLGQPILDDNGQMIPSDFVSTGNNHHVAIYKDESGKLIEKVVSFYEAVERASQKLPIVDTMYNHDIGWELVFTLKQNEMFVFPSDDFNPNDIDLLDPLNASLISKHLFRVQKITTGTYMFRHHLETNVEDNKFLQDMAWKRVSSTNGLRTIVKVRLNHIGKIVEVGEYR

SEQ ID NO: 5420 - protein, 1440 aa, unidentified
  REGION 1..1440: note = Description of Unknown: Cas Enzyme sequence
MKILGLDLGTNSVGWALVDKQEGRIIGMGSRIIPMGKDKQDYEKGLGISKSGDRRTKRTIRKMNKRYKLRRNKLLFVLNELGMLPDQFQFKYGIPEPNKLQQLELLPIPNKREYDSNGRRLDRKYEGNKKIKCEPNSIINYELRVKALRHPVELKEFGKILYQFNQLRGYSGGSNNDDTRSVENEDNEDSEIRKYEVFTRKVEILKVEQTDKTFKSRRGTTQGQEFKKFDVTILLDGDELVCETELQHLKEKEGQEEELEIRIKRNKKGETTSVTIAAPQKTNWRKQMEATEEELTRSNLHVSELILKDLRENKWKKIRNRVFLRQRYQAEFDAVWETQSKAHPILNSCPPEVLEKIANYIFPGKRKSQEELRQAAINNGLKYIIKDQIIYYQRPLKPQTDLISNCQFEKDQKVLATSHPLFQEFRCWDQINRMYITSKRESFNEQKNKKIYQYTDRFLSTKEKLEIYDKLQIQKQLSFSEVAKIVKLANDNSEFLNGLHVKAKLKGCDTRISIQKCLGEHFQTLLSNAPHIVENIWQAVFENSNNGSEYDPNSPKVASIKSLLSSLQNDKLETELALKLAQKIRFPRKYSSLSEKAIRNILPLMQPNPTKIPEKIIRNFQEIQHLVDTGEILNGKLWEDYVISFVKGNPNALTSGGLMYAFASSLVYGQHTAEKISPQYGHYNDIKFQKRNLRNPVVEQLVNESMQIVKALWKQYDLNPKELEIRIELSRELKNSAAERNKIYKAQIRNNRANEAIKKRLEDENIPTTDENILKYKLYEQQKYISPYSGKPMEVSMFSSYEIDHIIPKSRYFDDSISNKVLVEGYLNKEKANRTAWEYITQQISSYKILSIEDYIKHINDNFYGKKKKYLLLEKIPTNLIDRQMKDTQYISVAVKNELAKVVGSEKVKTTTGEVTSFLRSRWGLRKLFMELTESRFKLMELWDWDIENNKPKLPWVLRYFDNEKQKHVYEIKNWSKRYDHRHHAIDALVVALTEQSHIHRLNNLNKFPQDELAKRKEELNLEIENGESILEAFFRLEEKRRSEILEKMESSRYFDQPFEDLINQARTLLEAMVISIKTKDKLGITTDQFDENTPHKQLNKQLRIKGALHQETNYGKSKDPNTGLSRSTKTVELSKLSAKDIPNIIDKVLKEEILTHIEKYGTKNKEAFTGEGLKAFNENRFQRKDPSKLKPPVYKAKVWYSNKDEENSSLQRLYENNEKLSVVPGDNYLFIIMEKAGKRVFDIASLYNSAQLAREALNDGGENFKRKICEDFRQMHKQKPDKILFTLQQNDLVYLPENNEDPVSKMNDQEFSEWISNIENKKKFSSRIYKVAKFTGGDCFFIPHNYATTISVPKDLSQEQRAALERRFADKKIPKSELNFVEFGSYRDCSPFESGEIFLRSLIDKKNSKKKQRAPLKIQDHCIKLRVDWIGNISLHRGI

SEQ ID NO: 5421 - protein, 1423 aa, unidentified
  REGION 1..1423: note = Description of Unknown: Cas Enzyme sequence
MEKILGLDLGTNSIGWAIRDTSVNGNQIVDKGVLTFEKGVAMNKDSEEPKVKKRTESRSKRRNYQAEKYRKWALLKCLIRNNMCPLTEDELRIWSIGEWQTVDGKKKNIGRKYPQSERFIQWLRFDFDGDGKPDFERFGYSKHENCYLFRMLAASEQPEHLRLFKENPHLLGRVFYQMVQRRGFKGRDEEESETMLKGSEKAGTAGRDAISDMIARYKTLGAALYHINKQGERIRKRYNLRADFEAELKEICRVHDIDSTFQHQLQKAIIWQRPLRSQKGQVGICTFERNKPRCPVSHPLYEEFRTWVFINNLKIEIPGMDRKDKLEYIQSKIYPLFSRKAEDFKLSEIAKELEKVGGKITGNFKYGEKDANGKPKKDAPDTKVLTNKLMYRFNELLGRDWKEKYNWKEVLTNSEKSVPYSYEDIWHVLFTFDSTDKLGEFARIKLGLSDDASVKFSKISLQRGYATLSLSAIKKILPYLQRGFLYSDAIYLANLPRLFGTKSLAPELVDHVAETFLNIKANHFNNRIVLGAVNGLIASHVNSDVRYAIEDNRPLDESEKKEVQEALQDAFPSSIWNELSGDQKEALIFKAENLFWEFLKKPIRSTKDVLFYRIPRLHDEVFEWLRDTYHIPEENKKYLWHPSEQESYPNAKEYRKYALNGRYVYVEVANCGSFERKYPEAHWEGVVTRRLGDPQPVSRGFKNPMALKTLHKLKFLVNYLLETGKIDEDTRVVIEIARELNDANRRKAIEIWQRIREKENEEFAKAIIGTAKPKYPNLDENDPSVINKFRLWFDQIENGQEILKQVKALKDDVDKLRLWGEQKGQCLYTGRMISITDLFDGNKFDFEHTIPASISYDNELKNLTIADVTYNRQIKKNKLPTQCPNYEKEAAGYPPIKSNLTWMHEKVRHLEKQYLEYRNKTSDKKEVRDQIVQRRHLIKFELDYWRYKYESFTCTEYKSSWRNSQLRDTQVITKYALPYLKTIFKRTEVQKGEVTAIFREIYQIAPRLEKKDRAKHSHHAKDAAVLTLIPPSAIRDQILLRYNLEKDKNIHSTYHEPPIGWKDYSPSYIHVIDEEVLVNNLTENRTLTQSKKYVRTRGKIQYVKFQDNAGKWQYKVDQDGNRIPLVAQGDTIRGQLHIESTYGKIEKDGKFIMVKRNAISEFKSLKDCSSIVDEKVRQVVENALTERINNGLTFEQAKMQPIPFPSKKAVIKKVRCKVAAGRGYLSAERAISLKKHTFLSKQEHKQFIYTQNSDNVLCLYYEGLVKGRVERAFRILGIFDLASLDLNSKHDLLKEPYFQTVEVGRGADKALLQFCWILEKGTKCIFYKEHITELKDLSLKECLKRVYRIYKFNEKSSGNSSTKYLYLQNHIEARRDDELGEGDVSFDPEKYQARLTVNAAQFTAAIEGKHFKVLPDGKIEWLF

SEQ ID NO: 5422 - protein, 1134 aa, unidentified
  REGION 1..1134: note = Description of Unknown: Cas Enzyme sequence
KNIIFTMPNKIGIFIDVNSIGWTLINQESKGIVAMGTHVFPPGSENFGMGRREISKKFNKRMYRLRRVRYARIRVRKIHLLKILIENKMCPLSLEELNTWAANKVVPDTNFDEWMRLDPYELRAKAVYGKISLHELGRILYQISCHRGYRFGERNSKLVESVLKEGSPEEGKIGFAEMRRVTREQTLGSYLHSIKPEEGKSYTKSYSRIRNRICTIQMYFNEIHTIWSMQQQFFHNLTDDLRNTLIGAPGDVDPSGVLFYQRALKSQKHKVGNCMYEPTKTRACVSSFEYQEVEAYKFINSIEFSGHPLNASQRSEVLGYFFTHYRFKFIDIKRLLNLEYSQEFNYKDEEGFKGSFIHSELSKSKFFGKGWFQIEEKVRQDIWHALYFFNSSHRLHVYASEKLGFSDHSSFSFSKIRMDKNYAPISKRACNNILFFLRLGIPYNLAVIMGGVKNALRNVWDQLSEDEINEILFIVEDTHLQSPASHFVDNLKENLDKLGYEPIDESKLYGGAAKKNSTSKLLKKLPTDSASNKQIFGLKNTILIQSVFELRKLINKVIEVYGPIQEISCELSVDVKVSRMQRFLHRMDQRRTRNNRERYIRILGLHKENITPMNLLKYELWEECKGTCPYSGMEISLDKLWTDEIRVSYINPWSHSLNDSVFNKTLCFSFFHDLLNERNPHDYFNEEDPDAWEMVKKRAAKLFASTNNHPASYSKFKRFIKKYNQRNLSVSQFNDSNYLSRAVHSYLSQLSKNVNVSPGNTTAHLIEEWLLTSLLDKEKITSDLRYSALKGYVNAFKTNEHILELSKRNKYLRSSKKSKFPIPAPDHLTHLDYHINSILVSHKKDPRVISKKTQVVVHNGVKTLNKGWSVRGMLHKETLFGKRTAPGLNSGLHVRKSLLSFKTQSQVDKIVDPIIKKIVKAAVEKNVTGSAQIPFSTFFKTASDGSLIPKLYLPNTRGGDPVPIKKVRIREVYSTDVNIKKGLNQHVVPRNNHHVLVYKNKEGIFCEQVITFWQAIKRKKAGEAVVQLPDSEQDTFVTTLRINDMFLMGAENLEDDLSLESRSYLKNHLYRVQKLSSKFYEFRLAYKQASSSTDAPEYIRINNFGKRKTGWNTYNPVKVEVDVVGRINRKIETI

SEQ ID NO: 5423 - protein, 1389 aa, unidentified
  REGION 1..1389: note = Description of Unknown: Cas Enzyme sequence
FQIVFKYIKKNLLMKKILGLDLGTNSIGWALVNEAQNEKETSEIVKLGVRVNPLSVDEKTDFEKGRPLTINADRTLKRGARRNLQRFKLRRENLIEVLLREKLIDNNTLLTETANATTFETLAFRAKAANEKIDLEAFARVLLSINKKRGYKSSRKAKNEDEGSLIDGMAVAKELYDRQITPGQFVLELLEQEKKYIPDFYRSDLKTEFDAVWTFQMQFYPEIFTDEFYKSLEGQGLQNTRKRFLAIHQIYTAENKGKRDVVKLQHYKWRVEALSKQLELPKVAYVLVEINNNLNNSSGYLGAISDRSKELFFNHETVGENLYNQIQKNPHTSLKNQVFYRQDYLDEFEKIWETQSQFHSQLTKELKDEIRDVVIFYQRKLKSQKHLISTCEFEKHHKVLPKSSPLFQEFKIWQVLNNVEFKNLETKETKVLSQEDKELLFEELNLRGDLNPDAVLKLMELPKKLWVLNYKESLSGNTTNQSLYNVYQEIAENEGYGFDWSKKSAKEIKNELKNIFPLVDINPGILQFDSDIEGNDFSKQLGYQLWHLLYATEDDVKTKEKDMLLYGSSNTSLKKNLFNKFGFKPEYGAMLSAISFAQDYGSISARAVKKILPYLKVGHEFSEACSLAGYRHSHHLTKEEEASRTLKDALSLLPKNSLRNPVVEKILNQMINVINQVVETYGKPDEIRVELARELKKSAKERAETTSYVNAGKKRHEDIRKILTKDFGILNASRNDIIRYKLYEELSSNGNKTLYTNTYIPKELLFSSQIEIEHIIPKAKIFDDSFSNKTLAFSKPNKDKGDSTAFDFIESYYLSDLENYKARVSTLYSNKAIGKAKFNKLLMKESELPDGFIERDLRNSQYIAKKAKQLLLEVFRTVNTTTGKVTDKLREDWDLINIMKELNLPKYRALGLTEMQERKNGKKIEQIIDWTKRNDHRHHAMDALTVAFTTYNHVNYLNHLNAYRFEKNKELFAVRNKITKMYGPENGSKKRKFIPPMVNFRVEAKKHIEAILISFKAKNKVVTKNKNKIKTNTGIKEVTQLTPRGQLHKETVYAGRKNVVVKTEKISAKFTLEKIEHVTKPIYKAALLKRLQENNGDPKKAFAGLNSLSKKPVLLENGKFVPNEVKTQCFETIYTIRKPVNADNFKDLKSLQKVQDLKIREILENRLEEFGGKAKEAFSDLDKNPIWLNKEKGIKIKRVAISGVSNVETLHHKRDHFGKSLLNEKGEQIPSSFVSTGNNHHVAIYEDSKGKLQEKVVSFYEAVARVNAGLSIIDKTLNESLGWRFLFTMKQNEMFVFPSDDFNPFEIDLLDTANYNLISPHLFRVQKIAIKNYMFCHHLETKVITSEILKTKKQLSRITYNFFQSTEHLKGIIKVRINHLGDIVYIGEY

SEQ ID NO: 5424 - protein, 1031 aa, unidentified
  REGION 1..1031: note = Description of Unknown: Cas Enzyme sequence
MSKTIWGLDLGSNSLGWAVFNSNQKLKPIELIDLGVRIFPKAVEDKTPTPKNQQRRNARLARRTIQRRARRKRRLEHYLTKLGFLPIELASTDCREGILNELGDPYMLRARALDQPVTAYELGRIFLHLVQRRGFLSNRKTRLGRDMLDDPDVLAIINELEGDDENDKELTAFKADISLLNQAITESGARTLGEYLSSFSQHACKRNRHDQHLRTDRQMYRNELREIFTKQSYYHASLTEEVQAEIEHIIFHQRPLKLDDDRVGKCSLESRNKRSFIARIEYQRFRYLQDINNLSYFDPYTEKHIRLSVDDREKLAELLDRSAQISFAKVKKLLGLDRRTAFNLDTGVKKLFGNKTAAAIIEVYPDWLSLTESQRHFLVEDLISFEKKAALKRRLIQFWKLDPITAVNLCMVELEPGYGQVSLKAIKKLLPHLQNGLIFSDARIQAGYEYKKQEIEVLKSLKSPPTLSNPIVNKALHELRRVVNALIKRYGKPSSIRIEMARDLEMNTKRYNSFLTQQSRNAKLNDKATEAYRQVWSEHPQLKLSSYPSRDQKIRYRIWEDQGHRCIYSGISINLETLFSAEIEIDHILPYSQSLDDSYMNKVVCFAKENQYKGQRTPVDAFGSDEYKWEQITQSITRWPKSLTGKRDRFYRGASDLLNRDFIGSQLTDTRYICREAGAYLSTLGVDVSYTRGVMTDWLRHQWMLNDLLGQTDQKERDDHRHHAIDAAVTACIDRSFYQEIVSQAKDIERTRSGLTMKDIYFDSPLTDLKSHLADNLECLVVSHVPQRKISGALHEDTGVGFIEGIGTVYRKRLDNTFGVKRAQRIIDVEVKKLVLNHLSKFDDDPKKAFPVGFSLFHKDKKTLIKRVRVIQSSTDAKKLRKNKLPILDKSGRVFKWFAYGNTHHVEILKKTDQVKAIFITMAEAAARARNNTRSPQTVIQTKFDNDWVFMMALHINDMVKVTINGKEYIHRIQKLNMVNSNLTTRLHTAAKQDDKSQSLEASVGTFIKTYNMRPILVNAIGVIADDKANC

SEQ ID NO: 5425 - protein, 1394 aa, unidentified
  REGION 1..1394: note = Description of Unknown: Cas Enzyme sequence
MNKTLGIDLGTNSIGMTLRNDDFFEWYGVYTFRKGVGDGKSGEFSLAAERTSNRSSRRLYNVRRYRKWETLKVLIQNGFCPLSIDKLYKWKHYKKEVGRIFPVEDKAFGDWIKLDFNVDGKPDYSSPYQLRRELINKKLDLNQGSDRHKIGRALYHIAQRRGFKSSRKVGANEKTAVYKGSKETGTIGRNAYETLLDENGSLGAAFAHLEDQGIRIRNHYTLRSDYLNEVNKILDFQNVKAKFKEKVIKAIFYQRPLRSQKGLVGKCTMETDTVFVGGKKVITGKPRCPISHPKFELYRAWSFVNNIKYRTDKAAKFQPLPLALKQEIVDEKLFIKSNKTTFNIIRNFICKGERKNWELNYSSKMDKMTVSTCPVSEHLKAAFGDDWQNILIENTKTRIDKDGKTHKITYTIEDIWHIAFSFEDEEYYEEFLVKQLQLDDDQLDQLKKLWNALPTGYANLSLKAINNILPFLKEGIIYSEAVFLAKIPEIIGKELFEVHKEGILEALRTEIANNRHSKTVVNITNALIADYKVLDDENKFGYKNVSYQLDELDKKDILKACAKHFGENRWDSLSEDKQTTIFDEVAEKYQEFFTTSKRDYFKQPKLVEHIQKFLMDEFNVSEEAVEKLYHPSMIDIYPSTEDQQFLKSPKTRAFKNPMAYKALHNLRHVINHLIEKGLIDSDTRVMVEVARDLNSKNKRAAIEDYQRARERENMEFGIAISELIKDPEFKGSVNPNNKNDKEKFRLWTEQIEYKDNVIKEVSATKEVIKKYRLWKEQKCICLYTGKPIKLTDLFNNNIIDFEHTIPRSKSFDNSLANLTVCYADYNRNIKKNKIPTELPNYNEESHGYTAIEPRLKEWKDKIESLYSQIQTQVKNSVKAADKDAKDLAIRRRHLLQMEYDYWKNKVDRFTREDVPSGFRNSQLIDTQLISKYAYHYLKTVFNQVETIKGDTTSQFRKIYGVQPKFEAKDRSKHYHHAIDAAVLTLLPTSAKRKEILEKSYKYEEANFGNQYTEKPFDSFNHSMITQIQNEILIHNIKDQDQTLKPAKKLVRKRGKIEYLRNKQGNYLRDEDGKRIPKIATGDSVRGQLHLDTFYGKIKIAAKDDKGSIIRNKDGEIQYEKDKYGKEVYKMVGRKLIEDVNFKTDIIIDKHLADHLKKQLEDGVKQNELKDYQGNVVRHLRCEVKSGRGVMNPDNATIVKEQTYKSDKEYKNYYYADSGDNYMFGLYQNENGRKIVSINTFEATQLALNPNEDSKKDIFKSKEPVLIGRGKKEKEGNLVHIFIPGQKVLFFIESKDELKDLEKDELSKRLYFVKKLADAKQGLIQFQHHIEARSDEELSESFPKKEFGSKGKNGFSKFTVDFIAPRLLLSTGNYEFIIEGKDFEMDLAGTINWKF

SEQ ID NO: 5426 - protein, 1514 aa, unidentified
  REGION 1..1514: note = Description of Unknown: Cas Enzyme sequence
MKKILGLDLGTNSIGWALTEQDFDNKKGEILGIGSRIIPMSKDVMDKFGSGQSHSQTADRTGYRGVRRLYQRDNLRRERLHRVLNILGYLPEHYADEIDFEKHLGQFKDNKEPKINYRKKENGRFHFLFMESYLEMVEEFKSKGIIKNVPHDWTIYFLRKKALTEKIKKEELAWIILNFNQKRGYYQLRGEEEEIENNKSKSFEVLIGDKVIENGDKLKTGEKLYDLFFTNGWKYDKPVAKPELWIGKSKEFIVTTSTTNDGDTKRTYKAVDSEKDWLAIKSKTEQEIGLSGKTVGQFIYSTILEKPSQKIRGKLVRTIERKFYKDELRKILKKQCSFHEELQSKELYLDCIEELYSRNEAHQNNIKEKDFIYLFLDDIIFYQRPLRSKKSTVSSCAYEARSYKKIIKEKENQGNFAEKEIEVTEGLKVIPKSNPLFQEFRLWQFLSNLKIYRKELEKDVDITQQLLPDDEMWVELFDDLNQRNEIEQKQFIDYLVKRNLISKSDKENFRWSYVEDKKYPLNKTRSQFANRLKNVEGIKAGFYFNKQQEMNLWHIVYSVTDKKEYEKALGKFAERNELDNKSFIESFKKIPPYKSEYGAFSEKAIKKLLPLLRRGKYWNEENIDPNTKDRIYKILNGEIDDKIRNRIREKMDERIKLNQIKDFSGLPVWLSCYVVYDRHSESPDSQKWNAPKDIDKYLSEFKQHSLRNPIVEQVVTETLRVVRDIWIQYGNEAKDYFSEIHVELGREMKNPAEKRRQISNRNAENENTNHRIRKLLIELMNDEDIDGDVRPYSPSHQEILKIYEEGVYQNPASKYAALNEDDIAKIRKNPSPSKSDIKRYKLWLEQGYISPYTGAVIPLSKLFTPDYQIEHIIPQARYFDDSLSNKIICESEVNTLKGHKTAYEFILNERGRKVELSGGKTVQIFSIDDYKSHCAKYFKNNRTKLKKLMSEEIPEGFIERQMNDSRYISKLVKSLLNNIVKDDNEKDAISYKVVPVTGAITSKLKQDWGLNDKWNEIIAPRFKRLNEITNSNHFGFFDKSINAFRCEVPDELKKGFNKKRIDHRHHALDALVIACTTREHINYLNSIESEKENYSLKSRLLVKNKDDRFTKTMLLPWSNFPVDAKNSLESTIVSFKQNIRVINKSNNKTWQWVKQNDGSFNKKLIPQTKGENWAIRKPMHKETVSGAVKIRKTKDTSFINGIKDWENLVDKKLKKIIKELYKKGMDTKNISKYFKDNPYKLNGEVVNKLSTYYFLNNATATRVALNEKLTRKQLESITDTGIQSILEKHLSNYKDEKGDEDFGSAFTPEGIEEMNKNITSLNGGRYHQPVYKVRIFEEGSKFPVGYKGNKISKYVEAAKGTNLFFAIYEGINKKGERERQYDTIPLNVVIERQKQGLSSAPEKYFDKDKCEYDLKFTLSPNDLVYVPTQEEIENPETLDFTMLSTMQVSRVYKMVSTTQSKLDCVPDSYANEIIKNELGSNNKSQNTIDNTTQIKSLCWKIEANRLGKITKVIR

SEQ ID NO: 5427 - protein, 1232 aa, unidentified
  REGION 1..1232: note = Description of Unknown: Cas Enzyme sequence
  MOD_RES 996: note = Any amino acid
  MOD_RES 1017: note = Any amino acid
  MOD_RES 1028: note = Any amino acid
  MOD_RES 1037..1038: note = Any amino acid
  MOD_RES 1042: note = Any amino acid
  MOD_RES 1046: note = Any amino acid
  MOD_RES 1067: note = Any amino acid
NKTPYFYRNLAVTEKLDLNVEEDRFKIGRALYHMAQRRGFLSNRLEGTKESEGAVKKEIAKINEEKGNLTLGQYFYEKYLKGEKIRDTYTSRETHYLDEFMRISDFQNLPDEFIKKAKDAIFYQRPLKSQKGLIGKCVFEKNKPRCQVSRIEFEEYRMLSFLNNIKIKTPEDEKLRFLSEEEKEKAKSQFFRKSKEHFDFEDIAKQLAPKKQYKFYKDSNKNPEDYLFNYSMKTSVSGCPVTSKLRELFGDNIYAFKILHNNQNGKLITIDIDDVWHVLNTFDAEDKLIEFGRAKLKLNNEEVDKFCKIKLKQEYTALSLKAIKKILPYLRKGLIYSHAVFLANMEVVLPAEIWNNEENRLIINNAIFEIIQNHTEENKISEVVNGIIKDYRDQNVSWSKHAEEYFITDIQKKLKRVYGENYYNDLPETKKNSLEKKGWQLLKEQMQKNMGKGEFINISTIKERIITFLFDNFEIDKDKASKLYHPSAIETYKPAEKAKDGKYYLGSPMVSSVKNPMAMRALHQLRKVINQLISEGVIDRHTKINIEMARDLKNANERKGLQDWQREREKTKSNYAEKIKAHFKQNGKNLEPSADDILKYQLWEEQHHKCVYTGDEIAISDFLGADPKYDIEHTIPRSISFDNSQENKTLCQNRYNRAIKKNKIPYELQNHDEILDRIKHWKEDYEKIKLQIEGTIKQAKSAGDKNQKDKAIQRRHRLTYEMNYLRNKYSRFLMKDVPEGFKNSQIVDTGIITKYSRLYLKSVFSKVYTVKGNTVADFRRMWGIQDEYDKKERVNHVHHCIDAATIACITKENYEHLAKYYHDRETSFIKGIKDKPKVPKPWKTFTEDVKNIENEILISHHTPDVLPKQTKKKLRKRGVIEKKPDGSPIIMQGDTARGSLHKETFYGAIEVKQEDKNGKTNKAIKYVMRKPLAELEQSAIKNIVDERVRNIVEDGRKKEKLLRKEIEILQTQLKNAEEADEKAINDDIDKLKNQIXDLYCLPNKNGAPIPIRKVRIXQPTVTNPIFLXEHRDKSTTXXKPWXEHIXVANDGNYCMAIYEGKDKNGKXKRDFQLANNIGAAEFFKLSVQKDLQSQNLNKIDKLFPEIKLNGKIELPLRGILKIGTMVILWENNPEEVWDLDIKSIKRRLYKVIGLSNQKIKGEKGQIWEFATIVLRFHQEATSAKELKTQDGVFKNDEEYKPQRKLNHNQFNALIEDIDFKISLTGKLIQLSK

SEQ ID NO: 5428 - protein, 954 aa, unidentified
  REGION 1..954: note = Description of Unknown: Cas Enzyme sequence
MNLDSGEILKLAVNYFEPANSGLNNKNSGHTRRDARSLRNQRKRKQKRLKEILKRLGEHSLAPKVGELPALEKWKASYSVDLLVDTAKRSLAPLELGCVLYHLAHRTGYDSNAKMVSVAEEQGDKSDHKLLKKPGGILKNRYNGKVLRMITDYRLKGIPQKAIKLTQEQHRKLIDEIFDHQKKLGGVSIPSALYDELFARQEDGYRSDGLYYARNDLKSSRHLVDNCTLYPNAKVCSKSHPVYESFIIRSIINNLVNDIHKLEEQKKLVEQAYSGKPIEDVEPKIFLALQRLKPNDLEESLKYWHMIYQAQDTIQLERIRKRGMPGCSAEDTLEAYKVIHKNKERGKYSLKAAKQILHFLEKGYIEYHAQILAGINNVIDVDANEDDFRDFLLSHQYQSGFFPSLVNFLRSRYHLTDGELTKTFIDPVYYAEQETLSDDGIIRNVNLDKKTNNPFVKRGVAELIWLHNSLVRSGFPKPDVIKVEFSREFGKSAQYKQEITSKITKNRKANQLIDERLSFLGINASPSTRKRYKLWLDSNSLKLKAGEENDSPPVPAFADSKREGSNDLPLGIDLYHENDREYIPEREIFNGQRYNVDHIVTRALGIDSMDNLILTTKETNKRKKDTLPVDFFDKAHYKRIVERLKANKSTERKIFYFTLDRLPTEFLDKHFNVNSEIARLIRKIFYSVCPKVEVVSSEVVGKFRNNNRLNTLLSEDNKKDRSDNRHHALDAAIVGLMNKFFYESFLRKRNNGVQSVTSYYPAYEKWYLGLQNQLKNTIVIRRVKNRLVDKKSISKKNGTQGAYFFHARGMLHKDNFKSKKKDEEGNILFYHRQPLQYISETNKLGKIDDTRIREEIEKLSGKKSGQKSKIESKKLISDEQSHVMLGKQGVKKVKMKVHHQGSIFHVKGKKYRESAPNDHTISYMENGKQKFITSKFVEAVSQKVKNGKRIKVPD

SEQ ID NO: 5429 - protein, 1423 aa, unidentified
  REGION 1..1423: note = Description of Unknown: Cas Enzyme sequence
MSTEAKKNLGLDLGTTSIGWAVVTEAEQSTIERVGVRVNPLTTDEQTNFEKGKPVSINAERTLKRGMRRNLDRYQLRRDNLIETLKEHHLIDDNTILAEDGKATTHETWQLRALSASHQIPLDAFAKVLLAINKKRGYKSSRKAKDQDEGQIIDGMTIAKRLYEENLTPGQLAYQLLKEGKRHLPDFYRSDLNAELDKVWSFQKSFYPEILTNEFKKHLEGKGQRATSAAFWGNYGFNTVENKGTRDEKRLQAYGWRGRAPQQQLSKEEVAYVITEINNDLHKSSGYLGAISDRSKELYFNNETVGQYLYKQLKQNPHTRLKGQVFYRQDYLDEFERIWEVQASYYPQLTDKLKEEVRDIIIFYQRKLKSQKGLISICEFERKEVEVNKNGQKTKKTVGLRVAPKSSPLFQEFKTWQVLNYLELRNKTTKEILKPDIEAKQQLFNELNIKGNLPISSIIKILGYKTKEWEANYSVLEGNRTACSLYEAYLKILELEGYDDDLFKLAGSDEINISKIDKTSTEIRQIVQTVFELLNINTAILDFDAEIDGKAFEQQASYQLWHLLYSYEGDNSISGNEKLYELFKQKFGFKKEHTQILANVAFSDDYGNLSSKAMRKIFPYIKELTYDKACLEVGYKHSASSLTKEEINNRPLKPRLELLKKNELRSPVVEKILNQMVNVVNALIDDENSKLKAQGLPEDFHFDEIRIELARDLKKNATERAEMSANINAAKIRHDNIAKALQAEFGIKNPTRNDIIRYKLYQELKNNGYKDLYTNTYIPREILFSKQIDIDHIIPQMSLFDDSFSNKTVVFRKDNQDKGNKTAYDYILDQYGEQAVTEFVTRITLLFDLGKKNTEEGINKAKFLKLQKRMSEIGDGFIERDLRESQYIAKKAKNMLLGICRSVVSTTGEITARLREDWDLVNIMQEINMPKFRALGLTEMIEKKDGGEKERIKDWSKRNDHRHHAMDALTIAFTKHNHIQYLNYLNARKDKDHKLHGNIIAIETKETELKYDDLGNRKRKFKPPMPNFRVVAKEHIERVLVSHKAKNKVVTKNNNKTKSKTGENVKGELTPRGQLHKETVYGKYRYYESKEEKIGTRFDGTVINMVANPLYKELLLKRLLANNNDPQKAFTGKNALNKLPIYLDNTQQAVVPEKVKLIWLEDNYSIRKDVTPENFRDVKTIDKILDAGVKRLLQKRLEAFDNDPKRAFSELDKNPIWFNQSKGISVKRVTISGVKNAESLHFKRDHFGNFILDKKGRKIPSSFVSTSNNHHVAIYRDAGGNLQDRVISLFDAVQLVNAGLPIIDKQYNKGIGWNFLFTMKQNEMFVFPNDKTGFDPLAIDLLNPDNYQLISPNLFRVQTISVVKYGNNTVRDFKFRHHLETLLEDRKELQGITFQQLKSLAPLEKIVKVRINAIGQIVKTGEY

SEQ ID NO: 5430 - protein, 1004 aa, unidentified
  REGION 1..1004: note = Description of Unknown: Cas Enzyme sequence
MGGNLYLGIDLGIASCGWALCTDDEIIGMGTRTFDAPETAKENTPTNQLRRQARGMRRVIDRRRQRMNDIRDLLHRHGLLDTDGKHALASCADAPWRARAEGLERKLTPHELALALGHMAKHRGFKSNSKRDRGNDPEAGKMLTAVAKTQERLEGRTIGQMFWQDPEFQARKRNRDGDYSRTVLRDDLISETRLLLRAQRRLGSTFASQELEDQFIGLAFTQGELRDSWDMVGKCPFEPTEMRAAKHAPSFERFRLLQRLAHLEVGGRRLGADDISAAMKDFGHQQGMTFKRLRKLLNLPPDQHFAGINADEEGKRDVATRTGGAMPGSHALYTALGEAGWQSLNKTPAILDEIAAVLAFRESDDSIRRHLQELGLEPLILTALLDGVTKGIFAKFKGAGHISAKAARAINPHLAQGMTYDKACEQVGYDHARRAEGDIDTIRNPIAKKALLEGMKQVNAVIEAHRRQYGIPTHIHVELAREVGKSQEERQEITAGIEKRNSRKDALRAQFRTDIGRDCANAEELLRFELWKEQNNRCLYSDTYITTEEVCDGSITQVDHILPLSRSSDDSYANKTLCRTKANQDKGSKTPFEWLGGDSATWDRLSLGVNGCLGMKGYKKRVYLLKDASILESRFVNRNLNDTRYACRLLLHALKGRYPSIKEQNIRARPGPLTDRLRRAWGIQGLKKDPNGKRIEDDRHHGLDALIIAYIDQSRLQRLTELFKKAEQEGSPREFAALEPPWDGFRRDAIQAWETITVSRAERRRARGAGHAATIRQVAERDGEKVVYERKSVEALTEKDLDRVKDAERNHRVIESLRTWIKAGKPKGSAPLDHQGQPIRKVRLATNKKVDVEVRDGAADRGEMARVDVFRKANKKGKWEYFLVPVYPHEVATLDAPPNRAIVANKAESEWTVIDDGFTFLWSLYPLSWVRAVKPDGVVIEGYYRGTDRSTGAVAISPHHTKTEMTRGIGVKTLAEFRKFAIDRLGNLTEIQQEKRTWHGEVCI

SEQ ID NO: 5431 - protein, 1149 aa, unidentified
  REGION 1..1149: note = Description of Unknown: Cas Enzyme sequence
MEHPPVAEQTHQHARTFPLGQLTFGLDIGIASVGWAVLGENRIIDLGVRCFDKAETDKEGDPLNLARRTARLLRRRLRRRAWRLTKLARLLKREGLIADTNILKQPPAKGFKTPNPWQLRVDALDRRLDAEEWARVLYHLVKHRGFHWMSKAEEKKTDEDKEGGAVKKGLAGTKRLMQGKSYRTAAEMVIQEFPDAHRNKRGDYSKALSRLLLADEFATLFERQRALGNPQASLELENKILDRKTGLFWTQKPALSGEDLLKMLGKCTFEKSEYRAPKASFTVERHVWLTRLNNLRIVADGKLRPLSEGERAIALPLPYSQAGDFSYKQLRKALVKAGLPEDFRFAGLAYPSDRQKAEEKAKDPEDEKLVKLPGWQALSKTLKGAGLEDEWRQISVAALDGKPQLLDEIARVLSVCKEDGEVERELGKLDLPNKVKMVEALLTLRFDQFSNLSLKALYAILPHMEAGARYDETCEKAGYHHSQLFKAGEGEHKYLPPFYVGRDKDGRLKFNEELDIPRNPVVLRALNQARKVVNALIKTYGSPHAVHIELARDLSRPFDERRDIKKAQEEFRDRNEKDRAAFNAEYNTSGELKGRDFEKWQLYREQHGKCAYSLEPLDINRLFETGYAEIDHALPYSRSFDDSKNNRVLVLVAENRNKGNMTPFEYLGGKENSERWRQFVAFVDSNKSYRQAKRNRLLKKDFGEAEAKDFSDRNLYDTRYICRFFKNYVERYLKLHEDSEAKRCVVASGQLTAFLRARWGLMKVRSDSDRHHALDAAVVAACSHGMVKRLSDYSRRKELEKAREGLIDMETGEIANPAMLERLEQHFPAPWPHFRDELVARLSIDDRQLLRAEMERLGSYPPEALEELRPLFVSRAPQRRNSGAAHKETIYAQPERLKQTGSVTQKIAVADLKPGDVDKLIDPHRNEKLYAALREWASKREEREKCAREIEKSAKEAKHELSVEEKADIERLRALPRKPDKQGNPTGPLVRTVTMVIDKLSGIPIRHGLAKNDTMLRVDVFSKAGKFHLVPVYVHHSVAKELPGLAVVAHKDEKDWTIIDDSFQFHFSMYPNDLIRITQKQGVFMGYYAGCDRGSGNVSLWAHDRSHEVGKDGLIRGIGVKTALNVEKFNVDVLGNLYPAPPEQRRDLA

SEQ ID NO: 5432 - protein, 1100 aa, unidentified
  REGION 1..1100: note = Description of Unknown: Cas Enzyme sequence
MKLVLGLDIGITSVGWSIINQDDGSIVDCGVRLFEEGTAEENLKRRTKRSSRRLKRRLRNRLDDAKKLLIKNNLISENFEPLENPYAIREQGLSRKLSNEELATSILHLIKRRGSGLETVENDESKQKEAEKAKSVLSANERLIRQGLFPCQIQLKNATEHSKIRGEHNNFKTSHYLLELDKILENQDVSDVFKAEIRKILGRRRQYYEGPGSMVSPTPYGRFVLNEDGKIDVVDLIEKMRGRCSVYPNELRAPKLAPSVELFNFLNDLNNLTIIHFDGEEKITEEQKRSVIHEFIINGKHSITPLQLAKFLGTDLESIKGFRIDKKEAPILTKFEGYNKLIKAIGQEFNSLSWTKDFKTLDSIVDVLTKTKGIEERIEGISSLLKDQSNDSIRTLANIGGMTQYHSLSFKAIYEMLDELYITNDNQMQVLARKGLAKNRAEHLKGLKKIPFDDELILSPVAKKAQRESIKVVNAIRQKHGELDTIVIEMARDRNSSEEKTRINTEQKRFEIENKKVKDFLQGRKVNGKSMLKYRLYLQQDGKSFYSGKPIDLDVLLSDPTAYEIDHIIPISISFDDSLSNKVLVTRKENQIKGNRTPHAVFQAEGFGGWDFGTYYSFALTILKRNPREFSKKFYYLVFDKDISKFDVMKEFINRNLVDTRYSSRAVLNLLQDYFKVNQIPTKVASVRGSVTSAFRKRLDISKDREQDYYHHAVDATIVAMLSKKSNIYKVFSNTRLENELYAFNNFELTLESDYEFFDENLMRLMSRVQNIGKLEVNGDLHASYRLEPKLSHKVDRKPNRQISDETIYGTRQLDGTEVVIKKYKNIYDPKFMQLAEIIDGKSKSVTKEKLLIYRHDIKSYEKLVTIVEEYKKIIGPIEKENPFYWWKEVQQQGYITKYAKKNNGTPIIAIKYIDSVLGNHIDVSKNYKQAENLDKQKKVVLLQISPFRTDFYVTSTGQYRFVTLRYNDVKYFSSTKIYAIDREKYGDKLHEKGITSDDQFQFSLYRNDVFEVISENKGNIERSFWRMIATNADDINRLEVKPIDRHKHFDQTKNKEIMQKFVSINKSIKKIIKYNVDVLGNRYQVQNEDLTLEIDERRI

SEQ ID NO: 5433 - protein, 1461 aa, unidentified
  REGION 1..1461: note = Description of Unknown: Cas Enzyme sequence
MTKILGLDLGTNSIGWAIVDNELDGNKIKDKGVLIFSEGVKKEKGQEKSKAAERTGFRSARRIKFRRKIRKYQTLLVLAKYEMCPLNIDEVVEWRKSNFKKYPIKPDFLEWLRTDEDSQTNPYYFRDKASKEKVTKYELGRALYHIAQRRGFLSNRLDQSDDNLIKVKKDEIQELINVVTHNKIELINAVETIFETYEFKEKNKKDCTNATEEKLWSTRKYIINVIENKIKGKDYSQIENIKKEIDRYINKPENLGAVEGNISDLNKAIVEAKCKTLGQYFWFLYQKDRNDLKNKIRINYTSRKEHYIEEFEIICKAQGLEGINNSKKDPSERYSGIVKELYKAIFYQRPLKSQKGLIGKCSLEPTKPRCSVSRPEFELFRMYSFINTIKLKSPTDEKFKFLTPKEREQIVSIFYRKSKPTFTFEDIKTTLGKENYYNYKDKTTVSGCPTIASFLSVFGNDWDKIIFSYETNNGKGVTVKRTVDYNDIWHVLSTYSSDEKLIDFGSNKLKLSKQDAVRFSKIHLKKEFASLSLFAIKRILPYLEKGLLYSHAVFMANIDKLVKPERWKNQADRELIEEKIGEIIDKHQEENKVFFAVNSLLKNCFDKKNNYTYSKEAESSYRKNVEEFLKKEFGEKTWGNKSNKDELFAKAFEIFINHLKVRKHVVIKRIDEKIIQFLSDNDLLIPNCKETLYHPSDIEKFRSEKLKDKEGNVIKIDGKEAVGLGSPDVGSIKNPMAMRALYQLKKLINTLILEEQIDENTKINIELARQLNDANKRIAIEKWQNDRKELYEIYAEKIKELYPKENNGKTINNLTDTDIEKFAYVLEQREDGKIVSKEDVLKYTLWEEQNHICIYTGKTINLSSFLGASLKFDIEHTLPRSRSWDNSQMNKTLCDKKYNEQVKSERIPTELSDKDYSEILPRIKHWKAEYEKLHTEIEKLKRQSRNATDKEQKDKLIQKRHYLKMEHDYWKGKHDRFVMEEIKEGFKNSQAVDIGIISKFATAYLKSVFNKVYSVKGEMVAEYRKAWGVQITKKDKDGRDVKNRDNHIHHCIDAVTIACMNKSKYDKLAHAWGLEDKGDFENAKTELENEKPWITFTQDVRNFENEVIIVHQNRDVLPIQTKKQFRKRGEIQRDKNGKIIYQKGDTVRGSLHLDTFYGAVKQPELDSNGKFILDENNKIVLQKDKKTDEEIVFYVLRKELSKLKKSDVVNIVDKNIREIVEKAERNKLISFNNNGAKVNDTIWQNEEKQIPLKKVRIYTPSVKSPLKDFKKHASHFLSTKEYKQQFNVVNEENYCMAIYEGLDKNGKTKRDFALVNNINAAEYYRLSNKEHRIEHSLVPNPHDISGLQLKYILKKGMMVLMYDKSPDEIWELSDKQKLARLYEITQLDVEKYAEVKLLHHQEAREKKEITKFMGLKTGMKGGKNIDNYKQFPWIKIGYTTFDCLVVGIDFNITPTGKIEKV

SEQ ID NO: 5434 - protein, 1018 aa, unidentified
  REGION 1..1018: note = Description of Unknown: Cas Enzyme sequence
MHTKMRYRLGLDLGTNSLGWAVIRLDKSGNPVALVKTGVRIFSDGRNPKDGTSLAVARRQARQMRRRRDRTLRRKARLMDALVRLGFMPADKGQRRLLASLDPYELRKEGLDQPLDPHEFGRVLFHLNQRRGFKSNRKTDGRDSDAGALKQAIRGVREQLARENCRTVGEWLANRHALRQPVRARIRETRLLRPDGRPRVSRQYDLYIDRQMVEDEFDALWRAQGAFDPERFSELARCELKDILLFQRPLRPVLPGRCTLIPSEPRAPQALPSAQRIRILQEVNNLRIVEGLDERMLTLDQRNLVVQALERGNLTFTRIRRLLGLSAAVSFNLEDVKRDRLKGNEVSRILAQPEHFGDRWHQLAPLQQDEVVRRLLEEESEDALIRWLVVHTSVDAQTAQRIAVAPLPSGFASLSAAAMAAVLPQLQSGVISFAEAVARAGGAGALFRHHSSISHSQQTGEILESLPYYGEYLQRHVGFGTGIDSDPPEKRFGKIANPTVHIGLNQLRILVNSLIARYGHPSEVVVEVARELKQSQVLRREISERQAENQKQNERWRSDIRRVLGVEAKPADLRKMRLWYELNPADVANRRCPYTGEQISIQRLFSEEVEIEHILPFSRTLDDSLNNQTVALRRANRIKENMTPFEAFGGNPGGFDYESILERARLMPQEKAKRFAPVGLQRWLKEDADFLARALTDTAYVSRVAKEYLQLVCPHNRVRAIPGRLTALLRGKFGLNEVLSGTGRKNRDDHRHHAIDAVVIGVTDQGILQKFAQASHRARERHLDRLVESMPMPWPRFREQVDLSIRALLVSHRPDHNHEGRLHNETAYGLRDDGMVAHRVIEDGRRVVKLEKLSVIPIASPSAAHRHGVLSDGSPKPYKGYKGDSNHCIEVVRGHDGRWEGEVVSTFEANRVARQEGAERLRHAGLSASGRPLVMRLFINDFLQLKVDGAKRLFRVATIRSSGQISLAEHFESNVDARQRDRTSGFSYLSRSAGSLQKSGARAVNVSPIGMLSPRGFR

SEQ ID NO: 5435 - protein, 1173 aa, unidentified
  REGION 1..1173: note = Description of Unknown: Cas Enzyme sequence
MKKILGLDLGITSIGSALVDFDENKMENINILHSNIRIFNAPIKDKDKTSLQKIRGEIRRERNGFENYNTRRKKIIDFIIKKELIFIQDVKQVSVNLPKSKRKKLFANKVSKFLFETEKNSNDILSLRYKALYENLTNIEFARLLYSMNNHRGVSYEDSRSSKNISEEKLTKLKSKNINDYEDGSSDKLLYGLLNFKESFDTQKYKTVGEFLYLEHKDKFRNTQKKNSKDKKDKKSDFLFVIPRKNIVDELNFIFDTQISLGNNIIDEDFKNKYIEAFEWEEISPSYKDLVAPCLIKYEAKSSSRYKVEAQLYIYLEKLYNLSYKAKEDKHYVNLNIDELLVLINCLETKTITYKQIKDAMEKHLKKEKVLFKGISDYSKTFIDFKEFKEIVKALSLDLNILTLFKNSNDKNLYNNVIEILAYTPKALDKENKLKELGIENQEIHDALLEIKIKGNLSYCEEVLEQICNGMLSGLIPHYAKEIVENANPKKRINRTHYLPPVNETDLPIKNNHVVVRALSQMRLVINDTLKHYRKVYNNPNWFFDKVIIETGRDFLSEKQVKEHNAIVSENEKANKEAIVFCEKYGKLYPSKEEILKAKLYIQQKGLELYPKFFDSNVAQYSLIEAERLFEEGYCEIDHTLPISRSIDDSFNNKTLVLAKTNQDKDNKTPYEFLSKELFEIMEESLKSKIKVLGFKKVNNLLNKTFKELDGFSSRDLNDTRIITKYAGLYINNYLAFPNDENTKRRVFASNGRTTALLRKSWGIGSKNRNNHLHHGEDAILIALCDNALIKHISTYYGIQTQLENFNFNKESFNILFKNNTSIRDYIIKKLKEDNIDIENINNCNISKKDISSKIFRIIAEKNLPREDFLDNFRKAISDSIVTHKEKLKTNGQIHENTISKKNNKTKDDMVFVRGGTAVNGGFIRYDVFKNNKNKFEFVKITPKHCGLLLNELPKPKDLDSLFLFSIYPKTYLNLVYEENKISEETKGLFRKIDGSLYLDSVKNTENEIYKYKLKRLKLSYLLSNDLEPFSKDEIKKITPLLKFDDFEKKAVLKTSIDSIRETLKKIENYFIINYPDYKILFVFNKTSCKETYLIKENLLSENIILNQIEELDEIKTIVFNIEEEKLISPYFVLAPTKIKSIKKIKTDTFGNESIILQEKREPLLNHISKVKR

SEQ ID NO: 5436 - protein, 1037 aa, unidentified
  REGION 1..1037: note = Description of Unknown: Cas Enzyme sequence
  MOD_RES 774: note = Any amino acid
MRVLGLDGGIASIGWALLEIDDGGGSGSIVAAGTRMFDTPETDKERRPKNAIRGEKRGLRRVIRRRRQRMAAVRRLFFEHGMLATAGQDALKRPGLDPWELRVRGLDKRLTPEELAVALGNMARHRGFRSNAKGAPANSTEDGKVKKALEDTRDRLAKWRSVAEMLLKDEAFAGRLRNREGDYSRTVQRSDLEAETRLLFTRQRSLGNAAATVELMEAFQVIAFSQRPLQDSHDKVGDCPFEADEKRVAKHAYSFELFRFLARLASLTVVEGRIARRLTPHGDSPPDAPISAPLRRLSFKALRKRIALAPDARFDKVKPDEEARDVVARTGEAAAGSHALRSVIGEAHWAALVRTPQILDDVAAVLSFREDLGSIRIGLQGAGTDSLVADTIMADLEDGRGKLARFSGAGHISAKAARALIPHLARGMVYSEACAAAGYDHTAGSERRVFDTGCIGKEALAAIIAGQRISPDLVGSPVARKALLEAVKQVKAVVEEYGVPDAVHVELARDVGKSIKERREIEAGIDKRNKQKDRLRIEFAENVGRPPAGAEELLRYELWKEQNGRCLYTDALISPHQLIAADNSVQVDHILPWSRFGDDGYTNKALCIARANQEKRGRTPFEWFAADKAPVEWDTFVARVEAIKYMKGFKKRNYLLKDGGDEVANRFRDRNLVDTRWATRLLAEALRAMYRGDEGRRRVFTRPGAITDRLRRAWGLQWLKKDEKGQRLADDRHHALDAIVVAATTERMLQRLTQAFKESEAKGDHRDFRSFSEXWLGFRQQAMAAVDGVFVSRAERRRARGEAHAATIRQVVVDDDGVATVYERRKVADLKPTDLERIKDPERNAAVVANLRAWMDAGKPADQPPRSPKGDVIAKIRLKTNKKVDVEIRGGAADRGEMARVDVFRKTNGRGVPQYFLVPIYPHQIATMDAPPAAAIVAHKPENFWAPVENNEFLFSVFPHSLIAVTKPDGEVIKGYFKGVDRQGAQISLAEPSNITNVRAGIGSKTLLAFEKYSVDRLGRCFGVSGERRTWRGAVCT

SEQ ID NO: 5437 - protein, 1051 aa, unidentified
  REGION 1..1051: note = Description of Unknown: Cas Enzyme sequence
MNDNFNKLVLGLDPGITSLGWSLVDEQSDGSYKFINGGVRIFDTVIEAKNGDPLNKARREKRLARRQLRRYKQRLLKVENLFIKNGFIDKKIDSINSYDENGKINGRVQEILGNPFNLREQAISGSVTKSQFAYLILHLAKKRGYMQSVVDDDDAENVKHLNESTQRINENRKKLGKKDPTIGEVLNFIYAKPQEEGVKERVVGLTYFNNQVIDEFEKIVNTQKDKLNLDEEFIKELRRIIFNRNKPKAYSHLKSKCEINPSKKVGNKTHPVFQEFKIWSLINNLRYSNDAIKSYSVELNITQKKQIYDLLSVNKNVSFKKLKTALKFSDDYIFNYEESSNSEKNSGLDGNSIMVLFNTKTKSAFDIYSNLPLRGIKSKESFMEDISTIDIKENSQALQNRLINYWGISPEESTIIIKNSVKLNNTTCSYSIKTMSTLLEVLQRGYGLHESINIKYPLHFKVKEYEKSNFITPFPNLRNPIVQKSIGQVRKVINEIIKVYGPLDEIKIELPRELKMGVEKLKKYKYEQRKKETENNLAKKDLDKFILENNFKIEEKSYKKALLKTKLYRELGGTYEGAALLPYLRIKNNNLEKVYMSYKDVLINSEIEHIIPLSILNDDSLSNKTICPMDINKDKGDKSIFDYYNEKGFSDVYKKHLSETNIKYLDKGKFFKFYSSASKYQVKGFTNNNFSDTSYISKVIKEHLEKNGNKVFVSKGGHTSLLRKILFGNNFFVSDFNLDDDEKNRNDHRHHFIDALCVSIMEPKIIQKLHFIRNHDYKNSVESGKAAGFRKSFRSLINDDFKNSALNKFNNMNISIEEKLNPNGALNLETAYGLYKDPESGKLYFTIRSPIEELEKTSPEKVLNSELKQYAGTKLPSGFKLMTSNTVPKKFTKLVNYTANHMTRDYEKPEFERTYYLTGDNHHIEIWRNKLNGKIIERVVSLLEYHTYTNAKNDNHPIKQKYIDFEKNMAINGFEKVLDLYKKSTYKYNGKLYTLMGISSKDINLKLNNDARSLNMIAPSDRLRLRSLSDISKLQLVKIDLLGNIINIEGE

SEQ ID NO: 5438 - protein, 1026 aa, unidentified
  REGION 1..1026: note = Description of Unknown: Cas Enzyme sequence
SGEEWARVLYHLCKHRGFHWYSKAEQAKGEGESGASGGSVKQGLLQNAARMKDKNYRTAAEMVLAEFPNAQRNKQSHYDKALSRVLLDEELGKLFVAQREHGNPFARAELERHIRGPGDQRNGLFWKQEPALTGSRLLNMLGHCTFETQEYRAPKASFSAERHVWLTRLVNLRIVVDGIARPLNDEERQFALLLPYRQSRSATKFSYADLRKKLTGEFPRLEGFRFLGLPGARRKKSGEVSDPESEALIRIPAWQELRKTLEDAGLTTEWKQLASDALEGRSEILDGITYVLSVYKDDDEARAELTKLNLPHSEKMIEVLLSIRFDKFSNLSLKALRRIIPLMEQGLRYDEAVAQIPEYGHHSQIVRSPKKSHYLPSFYEYGSGSAKLKDDPSLPRNPVVLRALNQARKVVNAIIAEYGSPAEVHIEMARDLSRPLDERRDIERQQQEYRDRNDAARLRFTELFQRIPNGRDFEKWLLYGEQQGKCAYCLSPLANGSDASSIFTDNRTQVDHVLPYSRSFDDSRNNKVLVHTKCNQEKGNRTPYELLDGQSDSAQWHNFVAWVGGNKSYRLAKRNRLLRKNYGREEAQGFKDRNLNDTRYICKFFKQYVEDNLALSSESKRCVVLSGQLTALLRRRWGLTKSRDSSDRHHALDAAVVAACSHAMVKRMSDYARRKELEHIGQGFVDAETGEVVDVNALRRLEAHFPRPWDGFDDELCLRAGIDRSTGRVLEDTSVEALREGLRRFRDANDQPRYLDEDLKHVRPLFVSRAPQRRNSGAIHKDTIYSARATKELPNRVTQRISLERLTLKTFGGDTYDPEKCELFEPHRNERLYRALHARLRAHEGKADRAFAEPFHKPTNSGEQGPIVRSVQLVINKLSGMPLRGGIAMNDSMIRVDVFRQADKFHLVPIYARQRSQKGLPNRAIVAYKDEEEWTIVDDKNFLFSLYPCDLICVKVKNITHLGYFTGCNRSTGAINILVHDRDAAQGKNGQIQSIGVKTAIDVERLNVDILGRIYLARAGRRHGLA

SEQ ID NO: 5439 - protein, 1324 aa, unidentified
  REGION 1..1324: note = Description of Unknown: Cas Enzyme sequence
MKNNGNNIITGDYYLGLDIGTDSIGWAVTDTTENYNILKFRGNLMQGIRLFDAASDCKDRRSKRTDRRRKNRTKHRLALLEMLFTDEISRTDPLFFIRLKNSFLFPEDKDSKVSDCKYTLFNDQNFNDINYMKQYPTVYHLRNELVHSKEKHDARLVFLAIHHILKKRGHFLFDGTGDDNITVSAALDEFISFVESRYETSVVIPKEAEAVLCDFKSGITVKKKLLCGMITADTEENLDIRSLAEILSGGSTDISKLLKNETYFGTKVKLSDDLDEKYDELLEVLDDDTELIVQLKKLFDTLKLTSILGENEYICESKVNLFKKNKADLKKLKEFVCSEYPEKYKEIFVKKSAKLNNYSAYSGKDVKYKCSQGDFCAYLKKVLPAMKDNSDYSDMWQDITDGIFLMKLSSKENGLIPNQVHRRELKKILENASCYLDFLNCEDEYGTVADKILSIFDYKIPYYIGPLNTKSDKSWVVRSEEKIYPWNMNSVVNVDESALKFMENLIGRCEYTGDPVLPKDSLIYSEYMLLNELNPLKINGENISSDVKNRIVLDLFVNSTSKVTKKSIKKYLVNNGLAQEEDAVSGVDDVIKSKLKSYHDFSDILKKYKDTQMVEEIIKGILVYGEDKRLLRSWLKRNFSKLAADEVKYICRLKYRDWGRLSVHFLTGIRCPDENGEMLSVIEMLRKSNNNLMQLLSDNYDYSAKAEEYKNENYGGCYSLKEQLDMMYISPGTRRAVLQTLRITDEIVDIMKSAPEKIFIEVAREHQPDKGRTETRKNILLKMYEECGEKNSDLYERLLHTEDSKLRDNTLYLYFMQLGKCMYSGEPIDIDKLTDQSFYDIDHIYPRSRILDDSLDNKVLVKSILNREKGNIYPIKSEIRKQMTPFWAVLKKKKLISEKKYSRLVRHEQLDERELSAFVNRQLVETQQSTKAVASLFKNIYGDAGTKIVYSKAGNVSRFRQQFDIVKCRELNDLHHAKDAYLNIVVGNVYDTKFTEQFFKNILNENYSLNRVFDYNVKGAWKTESDSNSISSIASVKKNLAKNSVRFTRMVKEVKGQISKETILSAGSGQLPVKKNLDIQKYGGYDKITGSYFTLVEHTVKNKRIRSLEPVYVYLKDKFEKDAESYCINTLGLSEPEVIVNKIYIESVIEINGFRYNITGRSNDDIMLKHMYQLVLDNHWTRYIKEIYQYIEKCRELNTSLDPRLFKCSEKSIEINKENNTELYKVLSIKLSNNIYSNVLRIIHNTVNSDSSFSSLEIIDQCKVIIELLKAFSCDSQKSDLTLIGGASKSGTLKFNKKLTNFESVTLVHQSTTGLFEYKVDLLK

SEQ ID NO: 5440 - protein, 1333 aa, unidentified
  REGION 1..1333: note = Description of Unknown: Cas Enzyme sequence
MKTYTAGLDIGKASVGWAAIDQKNAQLIDFGVRLFNEAKEASEPRLKRSSRRSIRRKHWRKEQLLNAFDDFGLISKEEIEKYGKAEYLHYFSKKDGLCPPKDSTIYHLRQRAISEKVNIREILLCLYNILQARGHFLLETIDFNKDGITFDLFKERYYKFAESKNIDFVTDLKEFEDKVLHQLFYGLNNGLNEFKKEVKNGHFVLDDLSENKLQQLCFCIAGGVVNVKDLFDLDEDLKFKAEQMKEAEDLSDDQIELIELYDLCLISKVLNEGCNYPCDIDVKKADEYSVILNQKEKMSEKEFKEALAKAEYPSVVKNNKIVRTRSIKNVNHSYPNGLYVKEVSAILKNQQKYYKEITDEFVEVCCSITSARIPYYIGPLGKNAKNGWADLKGNFKYSYEYSLKNLDSINQFESIRRWKLNMVSHCTYLPEEIALPKGSFVGEIYSILNELNNLKAIDKDGNDYYLTKEDKINVFDNLFLKQTNVKLDDVKNILNLYSFKPRNSNLKYFNNKITLYHSLINILTEYKLESIKELFSNKEKIKKIEDIILNINLFSEEKSKLDFFMNDSSYNFEFDKAKKLSKLKTNSFYSFSYKFIMEQSLNKNGESMIDILFDDNTSEINNQQNIIYNAQDSNGNHIDFLSNKYEKIIKDNNNELTIDLLINNSKPLMPVSRAVIRSLNETIKVFNAMCKLWGVPERLIIENANGEDGIKDFTEQNGSSMKHFKSTSKLYEYLKKQLNENRNDEILNHSIESWEELETHYEENRNKIELYIRQDGIDLLTGQTIDITRLSNYEIDHILPRGFGDDSMDDKMLTLKEANALKADRLPLQYIESSEFMYRESMNPSKYEKIVNKLFDLKLISNKKYARLMLKDESEVELFINQNLVDTRYVISEFRSMLNAYIKVNNLNCKIVSLNGSFTSSFRNVFGIKKSRDLGSQHHALDAAVLCLTDNVLSQYYPNYDSRGNFDAYRNFINTMNDDSLESKERFKRVVQFAFRKAYNQEIYAGGIGESKLLLQIKNTTPLISWKIEKNYNGKFFNDTVDKPKTEDDKSVPTILGANNSKRSFNTIYPVAVDYYKYKHKHYAIHIPYMLVDDKGNINKNLYSKLVKEHYSASFLLDDDGNPNSKMFRFRAYKNDILYDTELNDPFVFNLGSIAKKLTAIKYLNVYSYNAIYSFANDIRRLIIDKFNIKTVKKDGIDFKELTDECKKKIVLFICNDMSSLTPYDDKKCNNIYDLTKNIKNIYDFSATLAYWIMIANISYAPPTLEKQNTPAANNEDISKNPDAEYVKLKYNILGLRFANNEKGTLIISGPNGYQNGYKRIKKEDFSWKISKY

SEQ ID NO: 5441 - protein, 1422 aa, unidentified
  REGION 1..1422: note = Description of Unknown: Cas Enzyme sequence
MTKILGLDLGTNSIGIAVRNTEKGKNLQEQLDYFSTVRFQEGVGKGKTGEFSFAAERTKKRSTRRLYQARKYRIWATLELLIKNNCCPLSLEDLEKWSKYDKNKGLKRQYPINAEKFEQWVRLDFDGDGVSDYSSPFQLRAELMERQFDFSKEIERFKLGRALYHIAQRRGFRSSKGETISEQEKEENTIVENEDLSVALKKSEEKKSGELIAYMQLHNLPTVGCAFARLEKEGVRIRNSKYQAVRSQYKEEIEAIFTFQKNLSRVDGFYKHLISEKKGEGSIFYKRPLRSQKGLVGKCLLEPGKSRCPISHPEFEKYRAWSFINNIQYKKQDEWCELTLEQKKTLYNEKFLRTKNYFEFEEIRKWIEKNITFHELKYDRDKQKRTINYKDNTNVSGCPITARLKNLLGENWENITIETCKERTNSKSGEVHSVTYSAEDIWHVCFSFDDVEYVENFAKNDCGFEAKQIKQMATLWGAILQGYSNLSLKAIKNINRFLEKGYIYTNAVLLAKLPDIFGSQWEQYSSVLEKSLDDILKENQYQRNVYSIVNTLISNYKSIDHENKFAYKDYTYKLQKNDFEGGAGLKGINEVTVEFFGEKTWKSKTTEEQTRIIESVSCLYQKFFESTQRDYYKIPKISDALADYVSTHYQFVSKKDLSKIYHPSMIEIYPKAKEQLLEDNRFMRVLGSPVIGALKNPMALRVLHALKKQINGMLLSGIIDEDTKIVVETARELNDANMRWAIAEYQKQRELENKEILEILKEFYKDKSIGDDDIDKARLLMEQPQENAKEDKDEKDFKYKNNVLKYKLWKEQGFRCMYTGKILKLSSLLNENEVDIEHTIPRSISFDNSLSNLTVCDAYFNRSIKKNLIPTQLANYQKEANGYSAIIDRLKPWIGKVEKLKDNVNYWKKQSKIAQAKERKDYCIRQRHLWQMELDYWQKKVNSFTTTEVTSGFRNSQLVDTRIITKYAYHFLRTVFNNVAVQKGAVTAEFRKILGFQGINEKKNRDKHSHHAIDAAMLTLIPFSAKREKMLDLHYRILEAQKLGGHYSSMVQELNKEIVSCGFGSINGIDSFIEENILVNHIQKNQVLTPAHRRMRIQGKVIWKKDEKGEVILDEYGKPIPKFLITGDSIRGQLHGDTFYGAIKQGKLKKNGALIRDKNGKVQTEEEIKYVVRRDLVYKKSSNDPGFSNWDELEKCIVNKNLIPMMKKQFNKEMSFKEACEQGIYMLDKQGNKVNKIRHIRCYTSIKNPLAIKKQTYLSKKEYKQNVYAEVGDLYVMCKYQNNELKNLYQVFNLFDIVQNRKINGDSIPNIIEKKEKIYNLKQVLKSGDMLLLYQKSIDELKEMDNQSLSQRLYVVERFETAGNLVVLKKHINAQIDKILGRGESVKDFKRTPERIRCGINTLNFLVKDSDFIFSTKGIEFY

SEQ ID NO: 5442 - protein, 1496 aa, unidentified
  REGION 1..1496: note = Description of Unknown: Cas Enzyme sequence
MKKILGLDLGTNSIGWAVINATTNDNGNEMLTGISHAGSRIIPMDTAQLGDFAKGNTVSATKERTAFRGTRRLRERHLLRRERLHRVLDVLGFLPPHYSNSLSRYGKFLNDIEVKLAWNKNQEGNYEFLFGDSYNEMLEDFKKAHPTLLENGKKIPYDWTIYYLRKKGLSQLLTKCELAWLLLNFNQKRGYYQLRGEEEEEKQNEKVEYLALKVVKVEATEDKKGEDVWYNVFLENGMVYRRTSKVFLDWEGKTKEFIVTTKLSSDGMPLVDKEGEIRRSFRAPQPDDWTLQKKKAEADIDNCGKTVGAYIYDALLANPNQKIKGKLVRVIERKYYKDELLQILAKQIELNPVLQDKGIYHKCIEELYSSNDSYRKNIENKDFSYLFVNDIIFYQRPLKSKKSLVDTCPYEEHIGIDTLTGKSRKYGVKCIAKSHPLFQEFRLWQFVQNLRFFEAETDQDVTSSFIKDENDMVSLFNWLNDKSSITQKVILSYTGFNLKKNEQQLYRWNYVEDKEYPCNETRGAMLSLLKKAEIDPSFLTKKIEQQLWHILYSVEDKRELEKALSSFATKHNLNTSFVDTFKKSKPYSKDYGSYSLKAINKLLPLMRTGEYWSEKSIDPDTARRIEHLITGEMDDSICNKVRQKAISLNDISSFKGLPLWLACYIVYNRHSEAKDITKWQSPADIDQFLKNFKQHSLRNPIVEQVITETLRVVRDIWKQEGRIDEIHVELGREMKNPADKRRKMTDQITQNEETNQRIRTLLTEFMNPDMHIENVRPYSSSQHELLKIYEDGVINSYSKLPEDIANIQKKFKESETSKRPTQSDIIRYKIWLEQGYRSPYTNQAIPLSKLFTAEYEIEHIIPQSRYFDDSLSNKVICEAAVNKLKDNMLGMEFIKKHPGEKIQIGTKTVTILSTAEYEQLVKDRFTQHSLKRKKLLMEEIPEDFIQRQLNDSRYISKFVTSLLSNIVREDGEDATVSKNVIVCSGGITDRLKQDWGIGDVWNSTILQRFQRLNNLTNSNEFISINSSGHEIPTVPFSLKKGFSKKRIDHRHHAMDAMVIACASRNIVNYLNNSSSLSTATTSRYDLQRLLCTKNFEGNSHNYQWLINKPWDTFTNDVKEQLQNIIVSYKQNIRIINKSPNKYQHINSNGKKEMVLQTKGEKWSIRKSMHKDTVFGDVNLRLIKAVGLKEAISKHDNIVNRDLRIKLKELISNGYDEKKIKQYFADESDTWQDVNFKKIEVYYFAHDTQNERYYATRKPIDTSFSEERIKGSVTDTGIQKIMLKHLEEKGNDPNIAFSPDGIDEMNANITHLNNGTTHKPIYKVRAYEKANKFAVGQKGNKYKKFVESAKGTVLFYAIYESEVLDKENGEIKIKRSFDSISLNTAIERLKKGLSPVPPNEDGINPKYVLSPNDMVYLPTQEEINAGKFNIRTDRLYKFINSSGPQSFFRLAPVALPIVDKVEYSKLNKEERSITGEMIKETCIPIKLDRLGNIIKIG

SEQ ID NO: 5443 - protein, 1208 aa, unidentified
  REGION 1..1208: note = Description of Unknown: Cas Enzyme sequence
MSNILGIDLGTNSIGWAIIQRTGNTTTLLDKGVHIFQEGVNRVKGNEEPSVKTRTEARASRRHYFRRRLRKIALISILVEQRWCPYISPEELMNWRKTKKFPLNRDFIDWLKTDDNLNDNPYHDRHRCLNNTLDLSSEKDRYSLGRALYHLNQRRGFLSNRKDQASEGENGKIKTGISELEAAMGDTGYSFLGDYFYYLYQKGDKIRNHYTSRNEHYIKEFNAICSKQKIDDSIQRRLFDAIFYQRPLKSQKGLVGKCPFERSKSRCAISHPAFEEFRMLCFVNNIRLALPGEKEMRPLTPDEKDSIIPLFFRKSRANFDFSDISKKLSGKKVTAVYSNKSSDTDVNTFRINYRESANVCGCPTSAQLASIFGNDWKRSLCEQYTLAAGKNEQQIVEDVWHSIQFFNDDDKLREWAKEKLQLSDEEANSFIGIHCPQGYAALSLCAIRKMLPWLRAGYRYDEAAMLANIDKVVSKKDWEDEKVRAEILNTVCNVVSNYSPNHEIKNDSKLRKIEEELCNIGIYDFDLKKLYHPSKIDVYPKATPITGGLCFLQSPRVDSIRNPMAMRSLFRLRSLINNLIAEKKIDNSTKINIELARNLNDYNSRRAIELMQRANEKKREGFKKAIAEYYYENGLSCEPTEEDILKYELWEEQKHICLYTGAQIPISGFLGANPRFDIEHTIPRSRGGDNSKVNKTLCDNRFNREVKKGKLPSELVNVDDIIARIDVTGWEDEIDKFRKEIYKATRLAKSAVDKDTKDKAIQRRHISRMQLNYLTDKLSRFKIKEVPEGFSNRQGVDIGIIGRYSRMYLQTVFDKVYTVKGETTAEFRKMWGLQDAYSKKERINHGHHCIDAITIACIGKKEYEEWAKYKNADESHRLFGTPKPIFPKPWSTFTEDVKGITDTLLVSHHTPCNMGKQTKKLLRKRGIIQRDNNRKPEYAQGDTARGSLHLQTYYGAIKANDDIRYVVRKELSSLSEKDIENIVDNSVRKIVSEAVNAKGVSVLQEQIWMNKEKHIPIKKVRLFAPTITNPLVLKNQRFKSNKEYKNGVYVANEANFAYGVFEGTTSSGKTKRSFKIINNLEAARRFNSGENNLFPQNDENGYSFIFALKTGTMVLFYEDSPEELFNATREELSKRLYKVFKFSANSIVHFVHHQEARPSGEIIFRKGVWKLNDEFRPIMAMSHNQINALIEGRDFNLSTSGKIVFLQR

SEQ ID NO: 5444 - protein, 1505 aa, unidentified
  REGION 1..1505: note = Description of Unknown: Cas Enzyme sequence
MKKILGLDLGTNSIGWSVVNKDEDDKLCGIEAAGSRIIPMSADILGEFDKGNSVSQTASRTDYRGARRLLERNILRRERLLRVLKLMDFLPEHFANYITKYGKFIDDSEPKLAWRRGADGKFEFVFKDSFNKMLVDFSKTQPQLVANGKKLPYDWTIYYLRKKALTQAITKEELAWILLQFNQKRGYYQLRGEEEEENSDKLVEFLVEKVVKVEATDEKKGDDVWYNVYLENGMIYRRSSRIPLDWEGKLKEFIVTTDLEKDGTPKKDKDGNIKRSFRAPKEDDWTLLKKKTEFDIDNSHKTIGCYIYDALLQNPEQKIIGKLVRTVERKYYKEELKQILTVQKGFIRELQDENLYKACVEELYPNNDAHRNDIAKPDFVSFFINDILFYQRPLKSKKSLISDCPYESHFDKMGNEHPIKCIAKSNPLFQEFRLWQFVQNLRIYQREVVENGRLQTDVDVTSDFLNKEDDYVALFDWLNDRASIKQDTLFNSYFKLKKGKGKDQYPYRWNYVEDKEYPCNETRSVVLNSLSKSGVSADFLIKEQEMLIWHILYSIEDKIEIGKALKKYAEKNNLSDLFVNEFVKVKPFKKDYGSYSEKAIKKLLPLMRMGKYWCADAIDIKTQERIDKIIIGEYDENIKDRVREKAFNLTEVTHFRGLPLWLACYIVYDRHSEAKEITKWEKPEDIDKYLKDFKQHSLRNPIVEQVITETLRTVRDIWKQEGNIDEIHIELGREMKNPADKRKQMTNNVLQNEITNLRIKAMLMEFQNPEIGIEGVRPYSPSQQDILRLYEENALDNLQKDDPEYEFVNKISKTAQPSKSDIVRYKLWLEQRYRSPYTGEMIPLAKLFTSAYEIEHVIPQSLYFDDSLSNKVICEAEVNKLKERQLGLEFIKKHAGEKVQISQGKIVEILSLEEYEKFVKEHYSNNRTKMKKLLMNEIPDGFIERQLNDSRYISKLVKGLLSNIVREKDSNGEYEQEAVSKNLISCNGSITDRLKKDWGMNDVWNAIVLPRFRRLNELTGKNVFTAISAEGHEIPSIPLEFQKGFSKKRIDHRHHAMDAITIACTTRDHVNLLNNEAAHSKKHDKSYRYDLQSKLRRKDEGGYYREFLKPWNSFTFDAKQALENIIVSFKQNLRVVNNSSNVYEHFENGKKVKIKQEGSNVAIRKSMHKDTVFGEVNLRFIKEVSLNEALKNPKAIVNKDFKHKVQELLAYGRDAKFIKKYVEENKEVWSDIDIKKVKVYYFTKETNERYFATRKPIDTSFNKKKIEESVTDTGIRKILLAHLETKGNNPELAFSPDGIDEMNQNIAALNDGKKHQPIFKVRVYEKAEKFAVGQSGNKSAKFVESAKGTNLFFAVFVTNAKDKNTGEIKLVRSYLTIPLNVMIDCQKKFGSKWQTNIESYLREREFVSVDAKLLFIFSPGDLVYLPKLNDNEAIDKSRVYKMVSGSGTDWYFNSVTFASSIVDKVEYGPLNKVARANSGEMIKETCVPIKVDRLGNIIEINGQKL

SEQ ID NO: 5445 - protein, 1427 aa, unidentified
  REGION 1..1427: note = Description of Unknown: Cas Enzyme sequence
MSKKILGLDLGTNSIGWAIVKENDATKQIVAAGSRIIPMDAKLMGDFESGNSISETGARTQARGIRRLYERHLLRRERLNRVLRILNYLPKHYTDQLNQYGQIPPSAEPKIAWNDQGQFVFEQAFQEMVLEFKQIHPDLFANGKVIPRDWTIYYLRKKALSQPISGQELAWILHQFNSKRGYNQSRNEIEDEKPTERKELCSLRVVRVSKTDEVSKGKTWYEIELENGWIYRRQSAYPIDWEGKARDFIVTTKLNEDGSDQLDKEGRVKRSLSAPGEDDWGLRKIKTEHDIQGSQKTLGAYIYDALLTNPNQKVLGQLVRTVDRKFYKQELYQILKKQKEFLPELTNKALYKEAVQALYLQNDAYRTSISSRDFTYLLVEDVLFYQRPLRSKKSLINECPHEYRIYTDENGVDHRQYLKCISKSHPLYEEFRVWQFVNNLRIYASEDELTQQELPIDRRALAEWLLTQKEVDQKKLLTCLYKKAIKGKSWNYVADKSYTMAPTHAVIQKAYGNPEQVADLPYEAIWHVMYSVSDKQQFEKAIQRYASKNGLGEKFVQVLCKQKSFSPEYGAYSEKATRKLLQLMRIYKDGEITFDPSTEQRIEHILTGEEDATISKQVRNKCANLKDKSAFQGLPVWLAEYVVYDVSKNDTKWSSPDDIDTYLQEFRLHSLNNPIVEQVVKETLRVVRDIWKEQGTIDEIHLEMGRDLKLPAQKRKQILQRNLENEKANEAARQKLMDEHILHPSLADIRKYILWQEQGMRSPYTGEPIPFSALYTEAYEIEHVIPQSRYFDDSMTNKVVCEAEVNRLKDRQLGHEFIVAHHGERVTLTGGKVVTIFNEGEYKSFVKETFKSNCSKQEKMLLDEIPDQFIARQLNDSRYISNLMRGLLSNIVREQDPATGLYEPEATSKNLIVSNGSVTDRLKKDWGINGVWDRIILPRFERLNQLLDTTQYTTLRNGHMEPCVPDEQRGSFQKKRIDHRHHAMDAIVIACATRSHVALLSNENATASKEQQRYDLNHKLREIDHVTANGHTVFGAFKQPWDTFLPDVEQVLGDIIVSFKQNLRVINKSNNRSLRYQDGKKVLVSQTKGDNWAVRKPMHKETVFGLVNLQTKRTVNLHSALQQIDRIVEPDLRKKLRQLVIEGKDEKQIKHYFESEKEIWSDINLQKIEVYAYTLEMGERYFASRSAIDVTFDEKTIGKVTDLSIQKILLAHLAANGNDPQQAFSADGIERMNANIQELNGGIPHKPIYKVRLCEKADKFAVGQTGAKSRKFVEAAKGTNLFFAIYVTLDKENKEVRSFVTVPLQIVIDSQKEGQKNWRAVLDRKIHEAALVKEDATLKYILSPGDLVYVPEGQETLDWYNRENIYKMVSGSGTDWYFVPVNVASTIVNKVEYGLLNKISRTSSGDVIKETCIPINVDRLGKIISVK

SEQ ID NO: 5446 - protein, 1495 aa, unidentified
  REGION 1..1495: note = Description of Unknown: Cas Enzyme sequence
MKKVLGLDLGTNSIGWAVVNASTDDNGKQQLSGISSAGSRIIPMDATQLGDFAKGNTVSATKVRTDFRGTRRLRERQKLRRERLHCVLDVLGFLPPHYSDCLTRYGKFADDREVRLAWEQGREGQYRFIFVDSYNEMLEDFKKVQPDLLAGGKRIPYDWTIYYLRKKGLSQLLTNRELAWLLLNFNQKRGYYQQRGEEEEERQDEIVEYLALKVTKVEATDDKKGDDIWYNVYLENGMIYHRSSKIPLDWEGKTKEFIVTTKLNPDGTPKIDKEGKICRSFRVPGPDDWTLQKKKAEADIDRSGKTVGAFIYDTLLINPEQKIKGKLVRVIERKYYKDELKCILKKQMELNPALRDHELYLKCIERLYPSNAAYRKSIEAKDFLYLFVDDILFYQRPLKSKKSLIDTCPYEELTGIDPETGTPRKYGVKCIAKSHPLFQEFRLWQFIQNMKFYERESDKDVTGSFIKDENEWVCLFDWLNDKSSISQKTILTYPGFKLKKKEQQLYRWNYVEDKEYPCNETRGTMLSLLEKAAVGADFLTRETEEKLWHILYSVEDKRELERSLSSFAEKNNLNDSFVEFFKKAKPYEKDYGSYSAKAIKKLLPLMRMGKYWSKEAIDPNTTMRIGHLLTGEMDEKIRDRVRQKAISLTDFDSFKGLPLWLACYVVYDRHSEAKETTKWEKPADIDLFLKNFKQHSLRNPIVEQVITETLRVVRDIWVQEGRIDEIHVELGREMKNPAEKRRKMTEQITQNENTNMRIRALLTEFMNPDMNIDNVRPFSASQQELLKIYEDCVMSQCDKLPDDIAKIQQKFKETDDNKRPNASDIIRYKVWLEQGYRSPYTNQAIPLSRLFTPEYEIEHVIPQSRYFDDSLSNKVICEAAVNKLKDNMLGMEFIKNHPGEKVQVGTRTVTILSESEYQQFVNDHFSKNNAKRRKLLMEDIPDDFIQRQLNDSRYISKVVKSLLSNIVREEGEEESMSKNVTVCTGSITDRLKQDWGLGDIWNSIILPRFQRLNNLKGSHDFTTVTSNGHEIPDVPFALKRGFSKKRIDHRHHAMDAIVIACASRNIVNYLNNSSALSDASTSRYDLQRLLCTKTFEDNPHNYRWVVNKPWDTFTQDVRKQLQEIIVSYKQNIRVINKTSNKYQHIGPDGRKVVVAQIKGDSWAIRKPMHKDTIHGDVNLRFVKTVGLAEALANPDVIVNKDFRIKIKELLSKGYDEKRIKKYVADEADTWQDVNVKKIEVYYYAHETRNERYYATRKPIDASFTEDIIKNSVTDTGIQKIMLRHLAEKDGKPDVAFSPDGIDEMNQNIIRLNNGIPHKPIFKVRVYEKATKFAVGQKGNKSKKFVEAAKGTLLYYAIYEHEVFDMASGEMKVKRSYDSIPLNVVINRLKKGLPPVPPDENGNNPKYVLSPNDVVYLPTKEEIASGKLEINKDRIYKFVSGTGARSYFRLSVVANPIFDEEWSKMNKEERAITGEMIKETCLPIKLDRLGNIIKIG

SEQ ID NO: 5447 - protein, 1372 aa, unidentified
  REGION 1..1372: note = Description of Unknown: Cas Enzyme sequence
MENKKIFMGIDEGTNSVGWAVTSDDYKVIKKNGKALWGAYLFDEAETQITRRTKRSSRRRIQRRKWRILLLQELFKNEIDKVDPNFFRKLESSFCKLEDKDSNSKYNLFTDLTYNDADYYKQYPTIYHLRDALIKEDRKFDIRLVYLALHHMIKYRGHFTFENESYNVSDSNFKEMLEQINNCINNDKEKFNVEIVNENQLYDILTSNKTRSDRKKCLCDYFNLDKKSSLNNIISLLCGLGVKPKDLFGDADIEVEGVSKIDFNSSKLDEELPKLESVVGDNIDLVYAAKNMYDSAVLKRLLGKATSISSAMIERYNKHSADLKELKAYVMDKHPEKYSKIFRDTSEANKNNYAHYVGSNMSSGKKESLKHANYDEFCKFLNSELPELKTESSEYTKRVLFDIDNKNYLPRLNTTDNGVFPYQLNLNEMVQILKNQAKYYPFLQENDKYGTVTEKIISLLKFRIPYYVGPLNPNSKFAWIQKKEKGKIYPWNFKDMVDIDNTAISFIEKLREKASHCTYLWDCETLPKNSMIFQRYDLYNYLNKICLNGEQISYNDKMDVIDNLFLKQKKVTRKQLCNFFRMKYGNDINITSTNNKELEEINSSLSSEIFFRDIYGDDFKEKFNTIEDIIKEISIFEDKTILYNRLINVYKLSDDKAKIIKGFNAKGFSSLSKELLVELKDKVQDEFGEIIEKNIIDILKETNLSFIEIIYSSKYTFESQIKQHNQIEDKIDYEYIDKLPTSPANKRGIWSTIKLVNEVEHIVGRPIDKFFLECTRHNEKKGERKDSRKKTLETKFESVKKTLNEIDSLSNEEYKELLKQLEGFESERFKQKKLFLYFSQLGKCMYSGETINLNKLFTNEYDIDHIVPRAFLKDDSIDNMVLVKRELNKSKSDIYPIPSSVISPEGKKLWKYLNDCDLISDNKLAKLQRTSELTDEEKASFINRQLVFTNQTVKIVADLLKIRNKNCEVVWSKAENVSSFREKFDIPKCREINDLHHAHDAYLNVVVGNTFNTKYGYKMNAARYKALKEADPEVKQSEKKKFSMNIDLIYKFPVYDMKSDYFAWDPNKTLNEVLKQLSHHDINVTYKPTTDTGAFYDETIYSPNNPKNKIESLIALKQKGMRSDVSKYGGHKSEKPSFFAIIAYTISNKTKHELFAIPIMARNLDERNLIKYIEETKNCQNVSIECNNIMKNTIIKMNNFDYLIRGFDERQIAVQTFWSYEQTKYLKYIVKLSDKKTLNSYDKDEYVIQRTNSEDTSNEKTIIISKEQNLKIYKQIIEKFSKEPFKSSKLNDLSKKLVEKEDSFAKLTLNDQVEILKNILKIQAANPSRGDLSLLGLGNDVGRIQSSALPKGTKIISRSITGYYEHILWESK

SEQ ID NO: 5448 - protein, 1312 aa, unidentified
  REGION 1..1312: note = Description of Unknown: Cas Enzyme sequence
MTRQSLRNKQIPYNIGGDNGEGSFGWAVLGNDYKLLKNGNQRNLWGYSIFDKAESAAKRRTYRSTRRRYAKRKQRVHLLQDMLYEMVAEKDKNFFKKLKYSYLVETDRLEYEYLSHDYNLFDEKDLNDSTFKKEFPTIYHLRDYLCETKDKIDPRFIYLALHHIVKYRGNFLYEGQNISSLVGKQESITELEELFENYTENYGYSLDSECAEEFLNVFINGKTYGKDRIKEAQNQTTNKESKELLKEIANALCGYKFKTKVLFDNETEIDKLSFKDSDYLEKKETLENDVGDEIEIIEVLEKLYNYIVLKDILGENNTSISKCMISKYNDHKKDLKLLKEISKYNEKVKLFLKKNGTYDKYIDNPKEVSLDDVYKELLLIIDETSGKNEKEIIARIKQEKFLLRQNSTDNGSIPYQLHLAELTKIIDNQKQYYSCLQANEDKIKLLVSFRTPYYVGPYDDNKDNNKFSWLIRKGDSKEAIRPWNFEELVDIDETAKKFIDKMRNHCTYLLGEETLPKNSLLLNEFNVYNELNKITLNGNTFDVKTKERIVNELFRVKPDVKEKDLRKWLIDNQYVNGDDFILKGFQKEDGFASNLKMEISFRNIYGDEFEENKDNIEKIIEYLTVYDNKNIVKRRIKNERLCDDEVKVERILKINISGYGRFSKKLINGLVSNNINGKQDTILGHMKNDLNSPNFMQVLNNHSYDYLEQIQDNNGFKDDEITSDMVSKLPCSPALKRGIWQSIRVIKDIVRYMGHDPENIYLEFAREEGRKERTKSRYKNLEKIYKNHFANDKKIIDELKKSEGTISEEKVILYFMQNGKCLYSGKSLDIDNLSLYQVDHILPQCYLKDDSLSNKALVISSENQRKKDSLLLDAGIIEKQTNWWKYLLSIGLIDQKKFKNLTRTQVNKEDKERFVAKELVETRQICVHVRNILKNYYKNTNIGIVHAPLSSEFRKKYELYKVRSLNNCHHAQDAYLACMLGMFIDKNIPYFSSQNSVKYKDIKDKIEERIRNSSNYSKSEKNTYSYILDIFDTSVEFNSESGDVSWSGKEHISYLKKAFDYKDYFFSYQSRKKDGMLYKATLYKAGSTDAKISIKNNMDVTKYGGYKELQTSFIICFEHTKNNKTIKEFEKIPTMYMNMDLVEYLEKQGFINPRIIKEINIGQTFVENGSLYSFVSNGECHTLQPIILSRNNNKVLYLIEKNKLDNLLESDIDNLLNELVINIGNRIPKLSNKIEEFKQCVNENVNQEKKIEIIKSLISPLCGGSRVSIEVNGKRITDYGRLIQKITADNIQLLYTSPSGLFSTLTKLGVGE

SEQ ID NO: 5449 - protein, 1128 aa, unidentified
  REGION 1..1128: note = Description of Unknown: Cas Enzyme sequence
MSYRIGLDIGIGSVGWAVIAGKGEDAFIADFGVRIFDSGENQKNRASNCQERRGFRGVRRLERRKFFRKVMLRNHFSYLHLLPPTFEDDLYACKDQDVYALKVKGLDEKLSVAELFKCLIHTCNHRGYRDFYEADDSDEDDEEGKNKTAVRAFDRLFSESGKRTISEFLISDYKAGNQIKYRNVSESGNEYLLIHRSLLEEEVRKILATQSQFYPEFTDRVIDRTVSIIFDQRDFEDGPGDPNDDARRYKGFIAEVGQCPFYKDEKRGFRPSIIADTYAVTNTLSQYHFVDLATGEEAFREDVNTGIVDYFLTNGNLTMTEVKRFLKANGIELLKSENSDDKALSKAVKFTSLAKKCIEEAGEKWEDYIAEEQFDVDHPSKLARISNVLSCYQTPRRRRDELKKLGFMSDALIRAFMGRKLSGTARTSDRYMCDAIAAFKEGEIYGNFQAMKNDEVQTAFTEKFEKLLPSHIDDPDVKKNAVVFKAINETRKIINAIIEKYGTPEKMIIEVADELGRSFDERSEIQRHQKDNEKVNDQIKEKIKELTGAKDISDVTADQMDKYKLYFQQEGKSIYSGKALGDLTEFLQDSGKKYEVDHIVPYSLILDNTLSNKALVYASENQEKRQRTPLMYLKGAERDEYLKFVHFMYTRDLKKTSKKNENLYPPVSRKKLEYLLLEDIYSFDAQEMLKQWKSRNINDTRYITKYIIGIINKYLKFERADEKNVFGINGTITSKFRRVWFVGTDWGKDDKDRSTYLNHALDAVVIANLEPAYIEIGSDAIKLQRLYRISKTADPKKSEYESYKDACISKMQHYYGFNPNYTQKLLSDVRKVPSLVPNLKEEVLVRFIDDDEEKFREQINAFYKGRVDTTKMHMPLVSHKQERKFKGAISDSNPVKIVMVDGVAHKVSRKKITEITKADVRKIYTKDTTLLSGLNAIFEGKGDKYSVEDYLKENELGRFITSKGQPVHHVSILDDKTISNFYKKQINDGNYSMLGGLKYYCVELYRNEKGELHMWGIRYVDIVRKNGKLLLKAESLPKDYAKHEMYLFTNDYLMVWNGKGEEKYKGFYTAVFNINQSMLYQKKNNEADTCSMSIGKKDSISKVEVSLLGELRGRVRCSEPLSLILANT

SEQ ID NO: 5450 - protein, 1328 aa, unidentified
  REGION 1..1328: note = Description of Unknown: Cas Enzyme sequence
LREQSILTMKKVLGLDLGTTSIGWAVVNQAECESEKSSIIATGVRVNPLSSDEIGNFEKGKAITTNADRALKRGARRNLQRYKLRRDNLISILKREKWIADDDVLSEGGYNSTHQTYALRAKSAKEEISLLEFARVLLMINKKRGYKSSRKAVGQEDGHLIDGMAVAKRLYDEGITPGQLCLTILEEGKKNIPDFYRSDLEGELDIIWEKQKAFHADILTDEFKEQISNKGKSTVNKMFYAKYGIASADNKGKDRKIQSYKWRGDALFRQLSKAELAYVISDVCGDIANSSGYLGAISDRSKELVFNKKTVGEYLYEHLVADKSYSAKNKVFYRQDYLDEFEKIWETQSKFHPELKPELKSEIRDVVIFYQRRLKSQKGLISFCEFENRCRVTPRSSILFQEFKIWQILNNLEISGPGIEGVRHLTIDEMNRLSEELSIKEKMPIADAFVILFGSKKGYEANYKTLEGNHTLNAFYKKYLEIVFASGHEEYEISKLSYAKAEEIIRSVFTALGFNLSILKPSQELFRLWHLLYSYEGDNSNTGDKSLVEKIGKICNMPDEYSRILSGIVFKDEYASLSNKAINRILPFLKEGNTYDLACLYAGYRHSRNSLTREEIDNKPLVDHLEVLGKNSLRNPVVEKILNQMVNVVNAVSESYGKPDEVHIEMARSLKQTAKQREAATQAIADNTKEAERITKILQEQFGLTYVRKTDIVRYRLYEELKENGYKTLYSNQYVPREALFSDKIDIEHIIPQALLFNDSYGNKTIEYRDVNLEKGRETARDYVLSKYGEQGYKDYVLRVEDLFKRGAISKTKRANLLMAKSEIPEDFVNRDLTCSQYIAKYAKEMLESYVRVVVPTSGSITERLRREWQLVDVMKEISLPKYRSVGKTRTDHDANGKEIERIEGWTKRNDHRHHAMDALTIAFTTPAHIQHLNTLSSRAIDDRVAILPAPMPLKELRAQFKDHIESTLVSIKAKNKVVTRNINRTKCQGGFKEAVTLTPRGPLHKEQVYGLRKQYETYFVTVGSKLTLEVAQNIASSSQRRLILERLAQFGNDPKKAFATKNLSEGFPEKVKCVRFKTVFSIRKNIDASLTVDKVMDARIRTILQNRLTQFNGDQAKAFSNLDENPIWLNEEKKIPIRSVTIAETFDLCALHDKRDKDGNLILDIDGNTIPVDFVNLRNNHHVAIYEDQDGNLQESVVSFFEALNRITNGQKAVDREYRKSEGWKFLFSMKINEMFVFPDTASGFYPEEIDLTDPKNYSRISPHLFRVQKLASTDYNFRHHLETTIENDKKLKDITWKRITSIKGLSGVVKVRINHIGQIVSIGEYD

SEQ ID NO: 5451 - protein, 1224 aa, unidentified
  REGION 1..1224: note = Description of Unknown: Cas Enzyme sequence
SGGLCSYEVLVFHCRKVLEINCRKMHVSTCFLHVSNNLEIQVNNVLIQDVLPILSRKDIGKKAKSEKLYLLFGIEKNKEVKCFIDLLCGCDSSSEKLFGYEKENSEPIKFSNISYEDSIPGIQEKISEDEYSLIEQLKIIYDYASVSMLLEDGKYEFLSQARVAMFDKHNKDLKKLKMLYKKYLPLSAYNHMFRSDGKGTYSAYVNSVLADGKKVRRNFEGRDYESIKATIVHDFDNYKEEQDVKLVFAELKEGTFLPKQITGANGIIPNQLHRKELKRILENAEGYLPFLKEKDESGLSVSQRIVALFSFQIPYYVGPTGLNSKNNWAVRKEEGPILPWNIWTKIDKKETSQKFILRMIRNCSYLNDEKVLPKSSLLYEEYCVLNEINCLKICGERVDAETKSRIFSDLFLVPNAKRIKRKAIVKYLIESGKLNAEDELTGIDETLNNYLSSYSKLYSVFGDRLKEDSVKSKAEEIIFYGTIYGDSKEMFKESIYKFVEDGTITQDNLKRILGYKFKDWGRLSKEMLLLTGCDKSTGEKISLIQALREYSLNFEELINSNDFSFKESLIEKQTKTLSTIFDFSYQDLDEFYLSAPVKRMVWQSISLIKEITEIVGNIPDKLFIETTRSDEEKGKRTISRSKQLLALYDSIKNVDIKMFGNDINVNIEKLTKELKDSDKDDFLKSKELFLYYMQLGKDLYTGEDIDLSELHTKYDIDHIYPRSKAGKDDSLLNNLVLVNKRANADIKKDFYPIPAKISANPKVRSLWSLLHSIKTDNGQRLLSDEKYGRLIRKDPLSDEELSHFIARQLVETGQATKKVGNIFQQIMPKAKIVFSKAGNVSDFRKNNNFLKSRLLNEFHHAKDAYLNIVVGNAYEVKFTQDPRKFIDKEFNRDREKNRYNLDNSKMFERLIERNGKTAWIPGKDGTILTVENVMNKNTPIISNMIYDQKGGFYKIQPVSHNNAKEDNYAPLKTGMSVERYGGYQSITPSYFVFIEYDVKKGKRKKAFESVPGMIASKIKEDDDLVKYFEQKYSNVRIVVNHIKKESLINYNGFYFYIAGLDSKKRVEFHNATPFCLNNKWSNYVHYIEKADEKGIIGKLEDENNNSFEGKQISKEKNISLFDEIIHKYTSSIFKKYPGCCAEKISSSKELFESLSLPKQTEILLKLFKISSFEKGIVDLSEFNEMPKEAGRIRMAVDASKANSLVLINQSISGLIEKKIDLLSC

SEQ ID NO: 5452 - protein, 1215 aa, unidentified
  REGION 1..1215: note = Description of Unknown: Cas Enzyme sequence
MKKRIIGIDTGTNSLGWAVVDKLDNGQYELVKKGSLIFQEGVKIEKGIESSKASERTGHRALRKQYFRRRLRKIEVLKVLIKYQLCPYLSDEQLHEWHVHKRYPMSDAFIEWQRTNENEQKNPYYYRYRALTQVLDLNSASDRFVLGRALYHLSQRRGFISNRLDSNENNEENGKVQKGISDLSKEIAESGCTYLGEYFYKLYQELGNKVRLRSRYTDREEHYIKEFDAICVQQQLGADLVKDLERALYFQRPLKSQKQGVGHCTFEPLRPRCAESHPAYEEFRMWSTINNIKVQGPTDEHLRHLRKEEIQKILPKFFRKSKPDFDFEDIAKELAGKNNYQYIKDESNKPYKFNYRMSQSISGCPTCAALREIWGDDFASSIAETYTNMQTRNGNMKTPEYAVDDVWNALLFMETKEKLEQFGINKLQLSGEQAKKFSNIRLSHAYSSISLCAIRKILPYLKRGLKYSNAVFMANVPTIVGKEIWQDDHDYIEQNLFAIIKSYEPGCGITLEDMLKDFLSNSYDLAPGAINKMYHPSMIDVYPDAKQTNGIYQLGSPRTNAIKNPMAMRSLHQLRKVINTLLKERVINQNTEVHIEYARELNDANKRAAIASWNKDREKKRKTYSEEIKKLYKAETHKDIEPTETDILKFELWEEQKHLCLYTGKTIGISDFLGPNLKFDIEHTIPRSAGGDSQMENMTLCDMTYNRQVKIGKLPSQLSNHDEIMTRLVQWQKKVYALTKDIDGIRTHSGMEKGVKDRLIQKRHKLKLERDYWRGKVQRFEMTEVPEGFSLRQGIGIGLISKYAGLYLKSLFHKQNDRSQTTVRVIKGLATSEFRKMWGIQDVYAKKCRDNHIHHCIDAIVIACIDPYSYNRLAHYYQALDNAKFGVGDKPVVVKPWPTFSEDMKALYDSVLVSHDTPDNMPKHTKRREVKTPTGVYSAQGDTARASLHNDTYYGAIERDGEIKYVVRKPLSSLKETDVENIVDDIVRQKVKDAIKVKGFKEAMSGDIFMNEEVGIKIKKVRCFCPAVANPLNIRQHRDISRKEYKQQYHVTTDSNYCMAIYEGVVKGKFKRSFEIVTMLDAASYYKKSADVSKYYPITPEEKNGLKLRCKITAGTQIILKQAEEEELDISDVNEIANRLYFVAIMSKDGRIVLRHSHEAREASLLVKEQSSTPYKIGEGYRPQIRMSLSNFHALIEGVDFVMNPLGEIKLIHHD

SEQ ID NO: 5453 - protein, 1069 aa, unidentified
  REGION 1..1069: note = Description of Unknown: Cas Enzyme sequence
MASAKIEKSKLGVHLDVGHDSIGWCVTRTCPGNEKFLAIPGTGVVIFPADDCLANKRRDFRRQRRHIRATRQRIARMKSLLLDKGVLTESELNVNLTAAPWKLAAQVLRGGNSLSWQELWCVLRWYAHNRGYDGNRLASAKNRSDVDNEDIKKNQASRDLMKKYGTESMAETMCKYMKVEPDGNVISSMTRFKGLGVSFDRSVVVKEVMTILERHIGILKGVDKSFINLLMMDPLAEPHNYLFQQPNLPFRIQNRYWGGVLFGQLSPRFDNRIIGHCPISGKKLPSKTAKEFLAFRWSMVLANIRVGLDNRALSVPELNKLDKLMNERGGFTKGDFKKAVAEATSEKMTNVDALMTSPDADKSLIKLPGLYSLTRVGLDKVLQPSEVRKYANMLFKGKRITIAKIAETLDEKSKKALTDSSNQPKRGKKKSASDFLGQELKAELQNGRAPYSREVMANAVKEVFSGKHPMEKGGSLYRNAVEEDALLEKKIDCETNNHLIRHRVKILLRLMKDIIHDYADNNPAQVGQITIEVARDLKDLSGMTQKQIVTDMLDRTRQHTNAAKMIAKHLGVDERMISPGLIRKVRIAEDMNWTCPYTGQKFDIQDIVSKGDGESGVVDKDHILPRSQRAADSLDSLVMTFTEVNRMKGARTGLQFVRECGGQRVLGRDNLVILDEAKYKSLVDDLKVFGHNDDRSRQKRRKQNLLRLKSDEAGMTDGMLTRTSHITKLASKALRGLFVNCGRMPEIVTIPGRVTANLRMQWNLLGVLAEIDNRVKDENGNLRLKQEIRGITHMHHAVDAITLGLAATLLPRDGTFWAMMCKRRVTEIEKSELLQTGVFVFSSQNEPRLIELPKFLQEEIATALSEQRVVVHQPQEKSGLKVLQNIWGVEGCENGIVNVRQRSRDEKTGKITIKREKIPMQKAFGLQPKKGVGKLYSLKGVLLPDVNYGVAVTDKPAFVRHQNVWNELGNLKQQNGGKMPMIIRRGGLIEVADGSFSGVWRVASVKDNTSGIALDIVRPYAVKVQNKVDFAKINVRLESLIKAGVKVLEVSYTGVSSCLTTSSTSRPMA

SEQ ID NO: 5454 - protein, 1299 aa, unidentified
  REGION 1..1299: note = Description of Unknown: Cas Enzyme sequence
SKGDTAKQQNDDEKSEKKKGPEPIEEAAPLSEELKKSEEKKSKEIKAYMEQHSLPTVGCAFAKLEKEGIRVRGSQYTAVRSQYLDEVNQIFYFQQDLNKYPDLRRRITSPRKDGTIFYKRPLRSQKGNVGFCVMEPHKRRCPTAHPDFEDFRAWSLLNNIKVRRSPEDPWQQLSLNQKQQLFDEKFMLSRSYFKFEDLRKHLEKTLGHPLHYGPIHDDRTINYPDRTSVSGCPVSYRLKKILGNNWRNALITTDTSRTDRKTGETHNITYNYEDLYHVASTYEDVDALKEFAQKALFSEEQTQNMVKLMDSITQGYAMLSLKAIRNINRFLHKGLIYTDAVLLAKIPEILGEQRWAECEENLLSKLDSLNQNVRKEKQQLNIVNDLISQYKSKTFDRQIAYKNTGYRLDDNDRADIEKCISSTLGQKRWRLLTDSEKNEFRAFVADRLQEFFASAKRDYFPLPKIGDAIKDLLAETVSDTQKTNWSLLYHPSEIEFYGAVTPQLYEVEETPMLLRLLDRPSLGSIKNPVALRTLNILRRQINAMLRKGMISDNTRIVVETARELNDANMRWAIKTYQSKHEDANKEIQKLLQDFKNPGEQASDTEVEKARLLLDQLGIPEKGTPQQYASAATHPKQDPPAKKKAQDKQDTIYEKYAQNEIDRYRLWKEQGCRCLYTGRVIPLSDLFDGNSTNIEHTIPRSLSFDDSLANRTVCDSHFNRFVKQNRFPSELENYDDILLRIAPWEKKVEHLREQVELWKEKSSQASTKEWKDHCIRQKHLWKMELDYWQTKVGTFHLKKDDYTPGFRNSQLVDTRIITKYAFHYLKSAFNHVEVQRGGTTAVFRKMLGVQSADEKKDRSRHSHHAIDAAMLTLVPPAPKRDKMLELWYQISETNNALQGGAANNNPQQQQTLSSKLNKLRSQLDGMVRECRVGSVDGLVSTIQENLLANRVTTDRALTPARRKVRRNGKIVPGRIVTGDSIRLSLHKDTYYGAIKYPKCDSDGLPLQQNGQWVYETNKEGKEKISMVLRTPLESVTDINDIVDPLVRKSVRSFLEKKGLLTEKKKGLVPKGSKVYLLDKHGNEVTHDKCGNPISPIRHVRCYAKAGRGVLQYDTVLHIKEQTYPSAKDYKRSYNAQNDGNYLCLLYEGLHNGTVNRKFRFISNFEIAQLGLKSPEALMHEPEYTTITEGNNKYKLSCILKKGTRVLLWEKSPDEVRDLDKPKLLKRLFEVYKFNKMGSDYIYLNHHSLSDNGEEKMTDWSTFNTTQKQDLIHLTAPNLNALIEHRDFEIDDVCNILFNND

SEQ ID NO: 5455 - protein, 1328 aa, unidentified
  REGION 1..1328: note = Description of Unknown: Cas Enzyme sequence
MKENGNDHKTGNYYLGLDVGSSSVGWAATDANYELLKFQGKAMWGARLFEEALDASGRRSARTARRRLERRKQRLLILSMLFSCDIMKVDPLFFQRLQESDLWVDDKKTGSRFSLFNDPAFSDKEYYKKYPTVFHLRKELQDSAAPHDIRLVYLALHHIMKSRGHFLYDTGDGNDEISVGSALQDLKDLLFNDFEVDFSPADTSAYLAALSRPDLGITAKKKLLRQIYGKATDTESINLLAISDMLSGAKVKFADLFQDESLKGAEPDSFSLKDDPEEQYDDLCAVLGERMSLLICLKTLFDAAKLAQILGGHGTISEAKVALYEKNRSDLRSLKQYIRTHAPDSYRKVFSEKKKDLNNYAAYSRYTVGKGEYTCSQEDFCKFLRGLKLPKPQEGDATMSRIFQEIDDNCFLTKLKGSDNGVIPYQLQRRELISILDNASTYLPFLTAKDSDGLTVKEKILRTFEFRIPYYVGPLKNGWAVRFADKEGEKITPWNFDQVIDMEASSLKFIENLIGLCSYTAEKVLPKDSLLYSEFCLRNEINSLRIDGRSLPVEQREIMIRELFYESRKRITKKALRSYLRSKGWIDSNAEISGIDDTVKSSLKSYHDIKPILDKTGDVTMAEDIIRAIVVFGEDKRMLRRWLQRNTAGLDETDFRYLSRLKYADWGRLSETFLTEICCMVNNEKRSVMDMLRCTDCNLMQILSSDYCFAAEAQKHRDTVLGNNRNLTQQLDSLYIAPAVRRSIRQTLRIVDEIVDIRKSVPEKIFVEMARDSSKELKGKRTESRKTQLLALYESCKEESSPLFERLQKEDDNSLRSDKLYLYYTQLGKCMYSGEPIDFASLTRGELYDIDHIFPQSRIKDNSLDNRVLVKNTLNREKSNIYPLSDEIRQRMAGYWALLKERKLISDKKFDRLVRAYPLTDKELSDFVARQLTETQQSTKALTAILQERYGKQTRVVFSKAGNVSDFRHDFGMIKCREVNDLHHAKDAYLNIVVGNVYCTRFTDRFFANIRNENYSLNKVFDFDTPGAWIKERTIITVKKVMAKNNAVVTRMPHEVKGQLYDLQIMPAGKGQLPKKAGLDVERYGGYNKLTGAYYFVAEYTEKKKRIRTIEPVLLIYKDIYEADPLRYCTEILHLTDPAIIFRRILVDALLELNGCRLIGPSGRTGNTYIYTHTYQLALSSEDELYIKEIAKYNERCIARKMELPITEHDNISAEKNLALLDTFKAKCAANVYCSCFGEFDKLAQEIAKGKDAFSQMSIWNQVKLLLEILKSFQCNKSYSNMKELGGAGTRGRVSANKNLSALSSAYLIHQSVTGLYEYRVNLLGEEL

SEQ ID NO: 5456 - protein, 1320 aa, unidentified
  REGION 1..1320: note = Description of Unknown: Cas Enzyme sequence
MKKVLGLDLGTSSIGWAIVNQAENQSEKSSIIRTGVRVNPLSSDEIGSFEKGKAITTNADRTLKRGARRNLQRYKLRRDNLLAILKRESWITDEDSLSECGYNSTHQTYALRAKAVSEEISLPEFARVLLMINKKRGYKSNRKAGGQEEGHLIDGMEVAKRLYNENITPGQMCFELLLDGKKNLPDFYRSDLAAELNRVWEKQKEYYPEILTSEFKDQISNKGRSSVNKIFFAKYGINSADNKGKERKLQSFKWRVEGLSEQLSKEVLAYVISDICGEITNSSGYLGEISDRSKKLVFSGKTVGEYLYENLVADKTFRAKNKVFYRQDYLDEFEKLWETQSRFHPELTPKLKSEIRDVVIFYQRRLKSQKGLISFCGFENRCRVTPRSSILFQEFKIWQILNNIEISGPGIDGVRHLTVDEMQCLAEELSIKEKMQIGDAFLTLFGTKKGYEANYKTLEGNHTINAFYKKYLEIVYASGHGEYDINKISYKEAEQIVGTVFEALGFNIAILHTGPELFNLWHLLYSYEDDSSATGDRSLVKKVGRICNMPDEYSRILTGIVFKDDYASLSNKAITRILPFLKDGNTYDIACLYAGYVHSKNSLTKEQIENKVLVDRLEVLPKNSLRNPVVEKILNQMVNVVNAVADEYGRPDEIHIEMSRSLKQNAKQREAATQAIADNTRETERITDILQKQFGLSYVRKTDVVRYRLYEELKDNGYKTLYSNTYVSREVLFSDEIDIEHIIPQALLFNDSYSNKTIEFKDTNREKDRDTASDYVAAKYGEQGYKDYVLRVEDLYKRGAISKTKRANLLMSKSEIPGDFVNRDLTCSQYIAKYAKEMLESYVKVVVPTSGAITERLRREWQLVDIMKEISLPKYRAAGKTFKTQDATGKETERIDDWTKRNDHRHHAMDALTIAFTTPSHIQCLNTLSSRNIDDHAVLLPAPMPLKELRVQFKENIETTLVSIKAKNKVTTRNINRTKCRNGYKETYALTPRGPLHKEQVYGLRRQYESYFVPVGAKLTVDIAQTIASQSERGIIMARLTEYGNDPKKAFSSKSNLEGFPDKVKCVRFKTVFSIRKNIDADLSIDKVMDSRVRDILKQRLAKYNGDKKKAFSNLDESPIWLNEEKRIKIKKVTIAESYDLCAIHDKRDKDGKLMLNSDGNTIPSDFVNLRNNHHIAIYEDDKGKLQESVVSFFEALNRITDGQDIVDSNYRKSEGWKFLFSMKINEMFVFPDESSGFNPEDVDLMESDNYRLISPHLFRVQKLSKGYYCFRHHLETTLVDDNKLKDITWKRITSINSLKGVVKVRINHIGQIVSVGEYD

SEQ ID NO: 5457 - protein, 1159 aa, unidentified
  REGION 1..1159: note = Description of Unknown: Cas Enzyme sequence
MATKNILGLDLGVGSIGWALIQTEDNQPKQILGMGSRIVPLTKDDSDQFTKGQAISKNADRTARRTARKGYDRYQMRRAKLTLFLREHAMLPERMDEYVIDLWKLRADAATPGCQLTLQQIGRVLYHLNQKRGYKHSKADESGDAKQTKYVAAVNQRYAELRERKQTIGQYFYEMLKASEVQAPNGGSYYTFRTKEQVFPRNAYIEEFDRIMAVQKGYYPEVLTDENIDYLRNHIIFYQRPLKSCKHLVSLCEFELRPYKNKQGKVVYSGPKCAPRTSPLAALCAIWETVNNISLSNRKNEHYVPTLAERQKIVEHLGTHEKLTATDLQKILGFTKADGWYAGKAVGKGIKGNATMLQLRAALDGQHDDLLRFELPMEDAGLVDITTGEVIMMVSPKVEEQPLFRLWHVVYSVSDHDELKKALEKQFGITDEAIVDRLFHIDFVKPGYANKSHKFIRKLLPYLMQGKMYSDACGQIGVNHSGYMTKQENAERPLLECLPLLQKNELRQPIVEKILNQMINIVNALHDEYGTIDEIRVELARELKQSRDERDEAYKAINKNERENAAYAELIKEMGVRPTRSRIQKYKMWLESEHCCFYCGKPLTAKEFLSGADAEVEHIIPKSILFDDSFSNKVCSCRACNAKKGNLTAIEFIESQGQGEVEAYVKRVDEAFKAHRISKTKRDHLLWHTADIPQDFIERQLRQSQYIARKAVELLQQGCRNVYATSGSVTDFLRHQWGYDEVLHTLNFPRYAKVAYTEMVPRNGGGEVERIKGWSKRIDHRHHAVDALTIALTRQAYIQRLNTLNTERDAMYGEVQESGAVFNEKRSLLEKWVSIQPHFAVSEVQEKVDGILVSFRAGKKVSTPAKRAIYRGGKKIIVQDGLLVPRGPLSEETVYGKVNGQYVVKYPLENITLKDIDSIVNPTIAAIVKARLEAFGGKAKDAFARPLYSDAAQTMEIRSVRCYTGLQDKSVAPVRFTADGTPIGYSKPGNNHHIAIYQDAAGKYHELVVSFLQAVERKRLGLPVVVADPAALWTSLMDKDLPETVLQSLPADGWQFVTSLQVNEMFILGMDEAEYEAAIEAKDYQALNKYLYRVQKLATKNYCFRYHTETSVDDKYDGTKNEMLSKQIGKVVIIQSLDAFWNQSPHKVKVNILGEISAI

SEQ ID NO: 5458 - protein, 1367 aa, unidentified
  REGION 1..1367: note = Description of Unknown: Cas Enzyme sequence
MKQKILGLDLGTNSIGISVRNTQKTGSVVNQLEYFSSFIFPSGVGTGKTGEFSYAAQRTAHRSTRRLYQARRYRIWSTLSVLIEHGFCPLTKEQLYAWRTYDKSKGLFRQYPINAKEFEQWIRLDFDNDGIPEYTSPYQLRAELMEHPFNFDNRIERYKLGRAIYHIAQRRGFKSSKGETLQEQETIAKGEDYDMSAELQKSEMKKSSELSEYMQSHNCPTVGCAFYHMEQAGIRVRHHEQMQAVRSMYEDEIRQIFTYQKGLQMDGNFYRQLMSHKKGEGCIFYKRPLRSQKGTVGKCTLEKNKSRCPISRPEFEQFRAWTLINNLRYKTKEDSGKAERELPLELRQKLYEEKFIRVSSIKVEDILKWLKREDASICELNYDGKTSVMGSPVCAKLKDLLGEDWMHTELEGYNYEELWHVCYEADEAENVKDFALTHLHADDETVNKLIKLWGAITTDYASLSLKAIRNILRMLQAGYIYSQAVVLAKLPDMFGNQWENVKDTILGEWPLLCANMERNRQVNKITNNLIATYKVLEPEDQFAFRNTAYVLDDTDRKQIKQVIIDTLSYQYWHQLSLNDQSKLMNSVEEAYQSFFHSSSRDYLPILHLDNALLDLIRNNFMDYLLPQYKTKVERDADILYHPSVVSIYAPQRETQIEAEGMMRSVKLLGSPATNIFRNPVVMRVLYQLRDTLNDLIKKGVIDESDTSIVIETARELNDANVRSAIAKIQRDREKENAKYRDELQQYYPSRNISDADIEKIRLWHEQGEICLYTGRTIQISDLLNNDIYEIEHTIPRSISFDDSLANKTICEAHYNRYTKRNLFPSQLPQEDYQAILSRVAPWMKEIERIKASITTCRNKAKGAATKEAKDSAIRDKNVLEERLHYLQNKVSRFQIKRDEWKDAFRSNQLNDTRVITKYAFHFLKSVFGEVSVQRGDMTANFRKALGIQSLEEKKDRSKHSHHAIDATMLTLIPSNTKRDKLLELFYQKEELKRRLETDPNVAEDLSKLEHEYSSLLASCDICGVEQLPDFILHNILIHHRSKDQTLTPSHRRLRVRGKVLTKHGKELWKTGDSLRGSLHMDTWYGAIAPAVRDEEGRMMRDENGNIMVDIDDIKYVVRLPLVYKKGQTDSGFKDWDEIEKVIVDKDLFKILKSQHGDLPFAEACEKGLYMLDSHGNRINRLRHIRCYVPSVKNPIPVKHQTYPSNKDYKQYYWAKVGDLCYLCKYQSEDGKSAFQTFSLYDISKNRECGAGALPPSIPSKTGETMNLIYALRPGMNVLLFNESKDELVGMSNDFLSSRLYVIRGFENPSRINIVHHLSAKADGELGKGESISDMNNLPEKIRCGVSTIRFLVEGIDFELTATGIEFI

SEQ ID NO: 5459 - protein, 1356 aa, unidentified
  REGION 1..1356: note = Description of Unknown: Cas Enzyme sequence
MNREYYLGLDMGTSSVGWAVTDENYNLLRAKGKDLWGIREFDEAVTAAGRRSKRVARRRRQRECARNGLVKLYFADEIEKIDPLFFVRLENSKYHKADKDDRLCSKFSIFDDANFKDSDYYKKYPTIYHLRKAMLYGEEDAFDIRLVYLAVSNLFKRRGHFLLNGVDGELTSAELESVFERMTFLLADNFEVQLLSGKVDDLIKILGSKDNSRSEKLDLLKELFNVQKNEKRTIAFLKVLCGLKVDVNVLFEADCEEKCSIEFSSYSYTDSVPTIQAAIGDDNYEVVELMKLLYDYAALSGILGECDYLSEARVATYEKHAEDLKILKSVYKKHLDKAAYDKMFRSDKEGTYSAYVNSLNSNDSLASEKKYRRNMKGRSAESLYDTIKKDLKAFEEDDTVSYILDEIEKGIFLPKQLTGANGVIPNQIHRKELAKILQNAERFHPFLLEEDEYGNTVSDRIVKLFAFQIPYYVGPVGEGSKTGWAKRKSDGPVLPWNISERIDLEATSEEFINRLIKSCTYLNDEKVLPKSSLLYESFCVLNEINNLCINGDRIPTDLKQGIYNTLFKRGKKVTRSSIVKYLMAHNALTNESELTGIDVSINNALSSYGKMYAIFGDCLDEEKYRAVAEDIIYWGTIYGDSKEMFSAKIDTYVKQGILSETEKKRVLGYKFKDWGRLSRNFLEMQGCDYSSGEVISLIGAMWDNSLNMMELINSNGFSFKEILEEKRNESVKSLSDFTVEDLDEYYFSAPVKRMIWQTFLIIRELETVLGQLPKKVFVKMTRSDEEKGDKGRKESRGKQLLELYKSIPNTEKHNWKEELKEADESGQLRSKKLFLYYSQMGRDMYTGKEIDIEELFTTKYDIDHVYPRHFVKDDSIINNLVLVNKADNEHVKKDFYPIPKQIADNPMVKELWETLHVKKLISDEKYHRLVNRNPFSEDQLAGFIARQLVETSQGTKGISDLIKALMPSTEVVYSKASLVSEFRRDNDLPKTRILNEFHHANDAYLNIVVGNVYYTKFTQNPLNFIQKEYARDIKKNNYHLSRMFDWNVERNGYIAWVASTKNNEGTIAKVRSVLAKNTPLMTRLSYEKHGAIANETLYSAKKAKEDNYFPLKTSDLKMSDVTKYGGYTSATIAYYFIVEHTKSNKKVISIEGVPIYKKYEIETNQDGLKAYAENELGLIEARILVRKLKIQSLIKVNDYYMYISGKTGNRLIMRNAVNLCLDNSWRSYIRKLENVNDNMILHDTITKERNVALFEVMIEKHTRALFTNRPNPIGEKLIDAKDDFAQLSVQEQCFVLNQILQLTSVGVATADLTLIGGASMAGKMLISKNIDLDKDFAIVNQSVTGLYEKTIHICDL

SEQ ID NO: 5460 - protein, 1096 aa, unidentified
  REGION 1..1096: note = Description of Unknown: Cas Enzyme sequence
VGTVFYKRPLKSQRSNVGHCKLEPDRRRCPQSHPEFEMFNAWTLINNIRIRESEADEWKEIPIGTKRELFDAKFMRLRDSFDFGEICDWLKKKNGAGVVYSKKAGTINFDDRKTVLCCPVCARLKRMLGDDWQTWKFESTVCRAVYRKDGTATEHTVSYNYEDLWHICFSSDESDDVLAFAREKLNWTEEKAMELVRMWFGMRDGYANLSLKAIRKINLFLREGVIYPYAVLMAKVPDIVGLDVFDCRREEIFNALKSVYDDIRQTRLLFEIVNVLISDYKSLDVKEQFAFRNTGYRLDDDDMRDVRLCCERVIGENTWLSKYSGAEREAIVASVAGYYQKFFESGKRDYYRIPRAEIQFEEWLKNEFPERSRSVRLYHPSMIDVYAPAKDLKSSGAGSNVRQLGSPSIDSIRNPMVMRVMYTMRKELNGLLLQGVIDEHTSVMVEMARELNDANMRWAIEMYQRKRENENKEYRGKLEEIYPGRNITEEDVKRYRFWEEQNGICLYTKERISAARLLDGASYDIEHTLPRSRSFDDSQVNQTLCSSYYNRQKKCNRMPCELENYDEILESIRPWIDKVEKVKDELKFWKLKSRKASDKGYKDKCIRQRHLLELELAYWQGKVSRFTMTDIPQGFRNSQLNDTRIISKYLYHYLRTVFEHVEVINGQETAALRKMLGAQSVYETKDRSKHSHHAVDASILTAVTVAAQRNRMLELHYRIEEEEKLGHDVSHLRYKLQKEKMNCGISNVSAINRTIERGILVNHVSKDQTLTPSRRRVRIADGSGSGKRVVVSSDCIRGSLHESSYYGAIKQAVRKADGGLLRENDGKIVIGEQVYYVIRRELRYKVSSVDKGFKDWEELKSSMVDKSLFDKMVGQFPAGTSLKDACQQGIYVFDRKGNKVNRIRHVRCYTSNRNPVVVKNQQYKSDHPWKQKVYAASGDIYAASLYQSGDGLKREYRIWTKFQICKNRQNGLGYVPDAILSHDGKRLSFVRSLFVGQSVLLYEQRPEELYGLDVESLSKRLYVIRGFESSGAVVLQHHNCSKDDKVLGKGESIKDFSRIPEKIRCGLKSLKFLVKGFDFDISSSKFRTEPVVFRHD

SEQ ID NO: 5461 - protein, 1416 aa, unidentified
  REGION 1..1416: note = Description of Unknown: Cas Enzyme sequence
MAKIVGFDLGTNSIGVSVRNTSLGDELHDQLEYYSVDIFDSGVGKSKSGEYSYAAERSKGIRQRRLYDVRRRRRWETLKYLIQADCCPLSMVELEEWRSYDKSKGLNRRYPIDNELFMRWIRLDFDNDGVTDCSPYELRSMLVNRQFDFSIPVERYRFGRAIFHICQHRGFKSSKGETLAEKDITDDVDLSDELKLSEQKKSGELTAYMNEHGCKTVGEALYQINHSGIRIRASIYQVIRSQLKDEITTIFNFQDGLDINSELYLHLTSEQKHVGSIFYKNPLRSQKGLIGHCTLEPQKPRCPISHPEYEKYRALNFIANIRTRQSEGDEWKPLDCEMKHEVYHSCFISKVGTDFPFKRIREFIEKKLGQHLSYEGNKKGTINFKDTLNVSGCPVTARSIQLLGEDWQTISIQGNKERNSQSKVNPVRHNVTYNAEDIWHYCFTADEMEDVECFAKSCLHWDDAKAKQLVKLWSNIKQGYGMLSRKAMFNINRMLSLGFDNTDAILLAKIPDLVGVKAWENNEDNVRDILTKYTGSIKQEHARERMICTIVNSLIANYKSLPEQHIFAYKDVSYKLQQSDLIDVDNAIVDYWGAHTWEQLSADEQEPIIDEVRRRYQDFFATSKRDFCKAKRLSDYFADFLNTNILGFDDSKLRKLYHPSMSEFPSANQGCREKSEWRLGSPKLGGIRNPVALRTLHTLRRKVNAMLDAHIIDPDTTRVVIETTRGINDANMRWAIEQYQKKREEQHREIERIITELALGREVNETDIEKGIYYMEQKQFEGTVSGETEYAPGRTFAKDIKKYALWKEQGCMCLYTGKVISLADLFSDNKMDFEHTLPLSQSFDDSQANLTICDSHYNRAIKRNKMPSQLPNYSEDAVIDGILYTAILPRLEAWEKRVEKIKENVDFWRAQAKKAQEKSRKDQCIRQRHLWQMELDYWSDKLYRFKTKEIPQGFRNRQLADTGIISRYAVQYLKTIFDKVEVQKGEVTATFRKILGIQSTEEKKDRSLHSHHAIDATVLTLIPVAAKRERMMKLYYEKEEAMSNNEKAAIQRRLDAELESQNIGSSFTQIGHIITENILINHIAKDKSLIPSSKKVRSRGKEVQYLQADGTLKGRVKRGDAIRGNLHKDTFYGAITQNKQNVPFEEITVSDISFVCRRKLEYANDGFKTWDDVEKVIVDKSLFQKMKAQFPEGTSFKDASAQGIYAISNDGKTHGCPIRHIRCYASTSNPIRLKKNTYSSQKPYKNYSYVASGDLVYLCCYENDTKREFVPLSLYEVTQLKKSTGESIPKEYLSKKGVAMKLRYCIKAGSMILLYNNNPEELKEMSPDMLMKRLYVVQGFEGDSRITLKHHLCALSDNDVPNEFKKGANPKKVGIDSIPKIRCVASSIKFLLKGDKPNDGDFWTEIIGSETRISFK

SEQ ID NO: 5462 - protein, 1157 aa, unidentified
  REGION 1..1157: note = Description of Unknown: Cas Enzyme sequence
NARASRRHYFRRRLRKIELLKVLIENRFCPALPMEALVQWKEHKVYPKDRDFLEWQRTDDNVGSNPYVDRHRALNEKLDFSKQEDRYCFGRAMYHLVQRRGFLSNRKDASDDESGKVKSGISDLSSAMRTAGCQYLGDYFYQLYLSKGKIRTHYTSRTEHYKTEFYKICQVQEISEQLVVQLEKAIFYQRPLKSQKGTIGKCTFEKNKPRCPISHPRFEEFRMWQFINSIKLVGPDDSDPRMLNIEEVESIIPLFLRKSKAQFSFEDIAKKLAGKVKFGSFSDPVSLPFRFNYRSNMTVCGCPVLTRIISCLGEECGYFNWDNDLASIYAKSEGKTVDQVVNDVWHVLFSYTDDSLLKQWLITNLQLADEKAEEVAVKFRLPSGYASISLKAISKILPFLKKGIMYDRAVFLAGIDNAFCSTRAKDSVFMTTVRDCVCKILTAGDDLLRTSTNSYYSVINRVLTNNFKAEHPQRIYHPSMIETYPKVNTESNNYRLGSPRVSSVRNPMAMRALFRLRALINELLKKQEIDKDTVINIEFARGLNNSNVRKAIESVQRSQAALRQKYREEISSLYEEASHLPISPTEEDILKYQLWEEQKHICLYTGNEIGITEFLGPNSKYDIEHTVPRSRYGDNSMMNKTLCLNKFNREIKRARLPQELNNHADVLARIEALGWNKKIEDLRFQIDCRRKDSRAASTKEAKDRAIQRMHELRIQLDYWKGKVSRFSMTEVPVGFSNRQGVDIGIIGKYAKMYLQTIFPNIFVVKGLTTADFRKAWGLQEEYEKKSRDNHSHHYIDAVTIACIGKEEYEKWKQYSEKAESYLWGEGKKPQLEKPWETFTEDVKSLCDNILVSHHSPDNMGKKSRKRIRNRGKLVFGPDGQPLYQTGDTARGSLNKATFYGAIEKDGEIRFVVRKSLDQLKESDVKNIVDKVVRNKVTEAVEEKGFKAAIAGPIWMNEEKKIPILKVRVFTPGVTSPAVLKKHRDLSDKEYKRSYYVVNEENYCMAVYGAGTKQSSFLLLSNLDAARLNNQGAKNLVPAQDKNGVSLSYVLKPGSLVLFYENDPDEWLNCTKLELSKRLYKVTGLSYTTVQQKYKYGMVTFKHHLEARANSDIQPKKGLWRNEEDYRPIIVMNHSQLRCLVENKDFTISIDGKIDFVK

SEQ ID NO: 5463 - protein, 1096 aa, unidentified
  REGION 1..1096: note = Description of Unknown: Cas Enzyme sequence
MAYLLVEDLLFYQRPLKSKKSLISNCPYEHYEYVDKQTGEVKIQHIKVIAKSNPYFQEFRIWQFIQNLRVFERNGLNEIDVTSQYLPTEYDYVRLFQFLNDKKDISQDALMKDFFGLKKPKGKDAKYPLRWNYVEDKSYPCNETRYIVLNTLKKADIPNSHVDDKNKEYRLWHLLYSVEDRNELIGALKGYATSNNLPESFVEEFKKIPSFKKEYGSYSEKAVKKLLSVMRMGSLWSEEAIPQSVHRIFNGKIDENIKSRMSKQGFNPQSVAHCKGLPEWLACYVVYGRHSEAQDVTRWETPADLKAYIHNFKQYSLRNPIVEQCVLETLRTVYDIWKECGHIDEIHLELGRSMKSTADQRKRMTERNTENENTNLRIKQLLIELKNDSSIQDVRPYSPIQQDILRIYEEGALQELKKEDKDYDEIFKISHLASPTQSELIKYKLWLEQKYRSPYTGKAISLSKLFTPAYQIEHVIPQGRFFDDSISNKVICEAEVNQRKTNMLGYEFIKKCGGEIIHCSSIGDVKVFDEQEYKAFISDHYASNRTKAQKLMMDDIPEEFIQRQMNDSRYISKVIKGLLSNVVREQDEVDAISRNVIPCTGGITDRLKKDWGLNDVWNRIVSPRFERMNTLTDSDAFGHWEDKDGKKVFQTTMPLELQKGFSKKRIDHRHHAMDALVIALASRNIISYLNNESARDTQRREDLRQQLCDKNRIIRKPWPSFTQDAYSALQDLIVSFKHYVRVINKASNYYEHYNEEGKKVLVAQKSDDQWAVRKPMHKETVFGLVNLKRTKEIALNKAVEQVYNIVDKALKKKIQCLMAEGLDKKKIIAYFKNADNMFNGKSIAKVEVYYFTNDTTEPMVATRKALDDSFDAKRIKSITDTGIQKILLAYLESKGNDPKLAFSPEGIMEMNEHIDMYNGGKKHQPIVKVRVSEPQGEKYTVGGGGNKKRKFVEAQSGTNLYFAIYQDSNGKRAFRTIPLNQISERLKMGWSPVPEMNEDGMALKFYLSPNDLVYVPSEDELNCFEVNIAKDRIYKMVSSSGPQAFFIKGTVASVIVNKQEFSPLNKMEKTIDGIMIKAVCWKLEVDRLGNITKIIR

SEQ ID NO: 5464 - protein, 1216 aa, unidentified
  REGION 1..1216: note = Description of Unknown: Cas Enzyme sequence
MEKILGLDLGTNSIGWAIVEKDENITKLYDEGVCIFQEGVAREKDVEKPAVQERTKARASRRHYFRRRLRKISMLRVLIANGFCPYLPEEALLLWKEKKCYPMDDMFLSWQRTDDNLNDNPYFDRYRALTEKLDFTKQDDRYCFGRAMYHLVQRRGFLSNRKDNSLDSETGKVKSGISSLSKEMASAGCKYLGEYFYKLYQSKSKIRTHYTARIEHYKTEFEEICRIQGVSDELKSQLEKAIFFQRPLKSQKGLVGKCTFETNKPRCPLSHPRFEEFRMWSFINSIKMRGPRDESFRILNTEEVSQILPLFFRGRKVQFEFEDIEKKIAGKGNYGFIDDKREVPYRFNYREKVSVSACPVITGLLALLGGSKDYNRWDKSLASLYLRANNKNLEQIINDIWHALYSFTDDKMLSDWIVTNLQATREDADTLVMKTKIPAGYASLSLKAIRKILPFLKRGYRYDWAVMLAGVSNAFSIEKRHDSELMRNAHERIVEVMDGIAAGTYCIDAKKGKYILLQNVLKKDFGAEHAERMYHPSMIEAYPKVQPDGHGKYRLGSPRISSIKNPMAMRSLFRLRALINELLDKDEIDQNTKINIEFARGLNNANMRKAIESYQRNLERLHKKYYDEIKVYFDSIGQDVEPTEDDILKYQLWEEQHHKCLYTGNEISIREFIGSDTKYDIEHTVPRSRGGDNSAMNKTLCLNSFNRDIKRNKLPSELSEHSAVLAIIEALGWNKTISDFQFLIECRRKDSKSAETKAAKDSAIQRMNELKLQLDYWRGKVERFSMTEVPSGFSNRQGVDIGIIGRYARMYLQTIFPKLYVVKGLTTADFRKAWGLQDEYEKKSRDSHVHHCIDAITIACIGKKEYDYWKQYAEQVEYYTYGEGSRPNFPKPWPTFTEDVKDVSNKLLVSHNAPNNMGKRSKKRMRIRGKLQYGTDGQKLFITGDTARGSLNKDTFYGAIERNGEIKYVIRKSLDLSSLNPLKETDVEKIVDDSVRTRIKSVISEKGFKRAMTETIWMNEKKGIPIKKVRVFSPSVTSPIKLKKHRDLSSKVYKRDYCVVTDGNYCMAVYGNGSNRPSFKLYSNLTAARIFNTKGSHQVPLSDENDMPLSFILKQGMMVLFYDKSPEEIYQCTNVELSQRLYKVTELCSDGRIVFRFHSEARPKKDLQLTGGWKNSGEYFPLIRVSQSKLMCLVEGLDFHLSVDGKIEFIHRPVVL

SEQ ID NO: 5465 - protein, 1020 aa, unidentified
  REGION 1..1020: note = Description of Unknown: Cas Enzyme sequence
MAFITLGLDLGIASIGWTVISECSGNMKLEAWGSRIFEPGMDDDIPAGKGVSRCATRRQKRALRIQYKRRRERKDNLVCILKGNGMLPDPLLPAFFVDTDQNLLNSLPETERHQYAHVLPYLLRKKALDYPLSKEEFGRAIYHLAQRRGYLSNRKQELKDSDSGVVKNGIKSLRDEMGKTGMRTLGEYFSSLNPEKARIRTRYTDRAMFEEEFRKICFAQRSIVSEELEEQLHHAIFFQRKLKSNKGLIGKCRVYPDEPRCSMSREEAQLFRIYTTISNLRVQKGSFIRSLTEDERIASVALLNGFSDCLTRRGTITLSALGKKIKLGKGEKFTLGDDTKEIYGNELHAALYQVFGEKAAEMSQEQRNKFFNDINSIEKDFALKTRLESYWGLSPLQLEMATKIMLPDTYCSFSLKALQELLPDLEANIPLNTILKASYPQTHDKTFDALPVFDSDECSIELRNPVVHRVMTELRTVVNAIIARYGKPDVIRIELARDLKSTNKERERMTIQLHQKEKERALIADKIAKEAGIERPSRNDILKVMLAEECGYECPYTGKHFTMNQLLHGKDIHIEHIIPYSRSFDDSFRNKTLCDASANSKKNNNTPYEAFGGKEYDDMLQRVSHFSGPYAEYKLDLFKQKEVNSEEFLSRNLNDTRYASKIAMQYLALLYGGIVDKTGKQRIFATSGGTTALVRRAWGGNYLLGEGEKVRSDHRHHAIDALTIALTTPDVVKKIASLSPEMRKKFHQEGVPLIDSELYEQARTMLDQAAVSHHVINKIRGAFHKETIYGKNFGNGVRHVRMKLADLSPDDIKNIVDSAIKKAILAKLGRISEEQVTKEDIKLFKDETNFPVLTDRKGNTVNTIKLVRVAKTFHTRSIGDGDSIREVANGANHVLAVFAELNDKGEETGWTGEIVSLLDARLRLQKGLPIFEKERPGLKFKFTLRKGDIVSWSKNGQKMLCIIRGVALPQFQMTLINEARMKKELSQAKVWFQPTLSAAFQGNMKKYRMNIFGELRDAND

SEQ ID NO: 5466 - protein, 1021 aa, unidentified
  REGION 1..1021: note = Description of Unknown: Cas Enzyme sequence
MANFEKYYLGLDLGTNSVGWALTDENYNVLKKNGKALWGVRLFENAKTKQDRRMHRTARRLIQRRAMRIDLLQELFAQAICEKDAGFFQRLNESRYYPEDKTIQQKYSLFCDKDYNDKDFHKTYPTIYHLRKALMDGTKQFDVRLVYLAIHHIMKHRGHFLFENFEVNQEGISGLDETYDAFCATCGEHLDISIPADKKSALKEILTDKKLGVSAKSKQLQEIWNVAKDKKATALAKLVSGGTAALDGLFADETFKDSDNNKICFANANYEEKESAIETELGESFDVIATAKALYDWSLLADLMGEHKSLSEAKIALYDKHQYDLKILKRLLKQDQKLYDDLFKVSGKDNYSAYVGLCMQGHKKIAIDKKCSAEDFYKFVGKTIDKLPDSKDRQYIKEEIATGTLLPKAVTKINGVIPYQLHRHELEKILANAAKYLPFLNNKDKYGTVADKILCMFKFRIPYYVGPLNEHSPYAWVVKKDRTGRILPWNFDEKIDTDATGKTFITRMTNKCTYLVGKDVLPKYSLLYSEYTVLNELNNLRIGRANEKPSIELKEKIFNELFLTHAKVTAKKLTAFLIREGIAKEDAEQLSGIDGDFKSSMKPWIDMNHILKGAFSIETAERIITDITLFGADRKVLSDRLKRNYAELTQEQIKLLSKLPYHKWGRLSRELLAEIVPLKGKDYTELVDKSTGETMNIITALRKTNYNLMQLLSSEFGYMAAISAKNGCINNGEKLTYEALEELTLSPSVKRPLWQTLKIIRELCKITGNNPERIFIEMARGEDKVKKRTKSRRERLIELYKACREDGKKWAEELQNLTDEQLRSDKLFLYYTQMGKSMYTGKTIDIRQLFDANVYDIDHIYPYSVSGDDCLDNKVLVEREKNSEKSDKYPLSDECRTKMKAFWQTLLDKELISKEKFRRLTRNTPLTNDEKASFVGRQLVETRQSTKLAAQILEEMMPETKIIYSKAGNVSDFRHYADIIKVRELNDYHHAKDAYLNIVVGNSFYTKFTADPRNFFKQKDT

SEQ ID NO: 5467 - protein, 1080 aa, unidentified
  REGION 1..1080: note = Description of Unknown: Cas Enzyme sequence
MKKRILGLDTGTNSLGWAVVDRNDNGIYQLVKKGSLTFQEGVKIEKGIESSKAAEKTGHRASRKQYFRRRLRKIEVLKVLVKYGWCPYISPEALHLWHTKKQYPKTDEFMLWQRTNDNLNQNPYYYRHVCLHEELDLTNPQEAYILGRALYHLAQRRGFMSNRLEQNDEDESGVVKSGISDLTKEMEAAGLDYLGDYFYQLYREEGNKVRIRSHYTDREEHYKKEFYAICAKQKLSEEQFVELEKALYFQRPLKSQRQGVGKCTFEKGKQRCADSHPDFEKFRMLSFINNVKVIGPHDVEPRKLNDVELQKINHLFYRKSKPNFDFEEIAKAIAGKNNYQYIKDKDDKAYKFNYRMSQGVPVCSTIAQLKSLFGDDYATEIASVYTGNHSSTQEVVNTVWNALYSFADKEHLFIWAKDKLQLNDENAEIFSRIKLTHSFSSLSLCAVRKILPWLEKGQIYSHAVLMAKVPDIVGMKVWEQNKDTITHELLFLINNFNFKDENMQETLDFCIKDYLRNNFDLKPGVAEKIYHPSMIETYPDAKKNAQGVYQLGSPQTNAVRNPMAMRSLHELRKVVNQLLRDGTIDQNTEVHVEYARELNDANKRWAIGEWNKEREKKRKQYVEDIKRLYKEQTGKEIEPIEDDIKKFELWEEQNHICLYTGEQIGIVDFIGANPKYDIEHTVPRSVGGDTTMENITLCSSRFNREVKKAKLPMQLSNHGAIMERLECLKEQIEKLRKLSDGIHTHSSMDKDKKDKLIRKRHQLKLQLDYLQGKYNRFLMEKAPEGFALRQGAGIGLVGKYAGLYLKSLFHRPEDRSRSNVRTIKSTTTAEYRKMWGLQEDYEKKSRDNHIHHCIDAITIACIQPGEYNATAQYYQQLEEYERTKANKPSFRKPWPTFTEDIKALAQEILVVHDYNDNMPKHARKYVQTAQGKKLAQGDCARGSLHNDTYYGAIEKDGKICYVVRKAINSFASEKDIENIVDEMVKAKVKEYVAMHGFKEAIAGDIYMNFEKGVKIKKVRCFANSVKQPLNIRQQRDASRKEYKRQYHVSNDSNYCMAIYEGSGNGKAKREYELVKNIEAV

SEQ ID NO: 5468 - protein, 956 aa, unidentified
  REGION 1..956: note = Description of Unknown: Cas Enzyme sequence
GSDEDGKLLEAVKENEQLCSENGYRTVGEMLFKDPKFKDTKRNKSNDYKNTVSRDSVEKEAKLIFESQRKYDKEFASVEIEKRYTDILLSQRSFADGPGSGPYSGNQVERMRGKCTFEAGEPRAAKASYSFQIFSLWQEINHLRIIQNGSTIRLNDAQRHEIFNLAHQKDGITYGNIRKALNLSDEESFVGLSYGKKGKSEVESKKKIKALSFYHLLRKNLNKISKDYISYFDTEKLDAIGEALSKNLSDDDIKEELIKANVPEEAIDVIIEMPDQSKFGHISVKACRKIIPFLESGLTYDKACSEAGYNFKNDEKAPKFTLPPVVDDDSITSPVVKRAISQTIKVINAIIREYDRSPVYINLELAREMALVKKERDEIHKAQLENADANEKAMDELKTQLGEYFAGRAPSGLDLVKFKLWKQQDGVCPYSQQRIEISRLLELGYVDVDHIVPYSKCFDDRMANKVLVFTSENRQKGNRLPLEYMSGEKRDRFEIWVNSQDSIPVSKKNRLLMEHISDEKEWKERNLVDTQFTSAFLNKYISENLAFDEFETGKKRHVTCVNGSVTAFIRKRWGINKVRANGDLHHAMDATVIACITQGLIQKVTNYSKYHECRESTECEAVDLETGEIIKEIKGFPEPWNGFRNELEIRLNDNPEKMHKMLYEWDPDNYRNVDIEQVKPVFVSRMCNHKVSGPAHKETAKSGILAEDNLTVSKVDIKKLKLDKDGEIVGYYNPDSDRLLYEALKEQLHKYNGKAESAFAETFYKPKSNGEKGPVVNKVKIVESASSGVKIQGGTAIADNDSMVRCDVFYVEGDGYYFVPIYVADTVSKQLPNRAPTRSFDEKGNKIWKLMDDKYFVFSVRKNDLLKITSSQKFDLINNLKESTLPEVLSFSAASGVFLYYDGLDISTSTFAGITHDNTYRKRGMGKTLLKIEKYEVDVLGNIRKVEKEKRQTFKH

SEQ ID NO: 5469 - protein, 1382 aa, unidentified
  REGION 1..1382: note = Description of Unknown: Cas Enzyme sequence
MKKVLGLDLGTSSIGWALVNEAENKEERSSIVKLGVRVNPLTVDEQSNFEKGKSITTTADRTLKRSMRRNLQRYKLRRENLIDILKNYGLINGETILSENGNRSTFETYRLRAKAATEEINLAEFARVLLMINGKRGYKSSRKAKNQDEGQLIDGMAVAKKLYDDNLTPGQFVLQLLQQGKNYVPDFYRSDLLSEFDKVWTMQKQYYPEIFTDEFRKEIEGKGQRVTSAAFWKKFGFNTAENKGTREGRKNQAYEWRSMAIDTQLQKEEAAYVIADINNNLNSSSGYLGSISDRSKELYFNKQTVGQYLMSQLEDNPHARIKNQVFYRQDYLDEFDTVWEMQSIFHKELTPELKHELRDVIIFYQRRLKSQKGLVSFCEFENRKIEVSIDGIKKIKTVGFKVCPKSSPLFQEFKIWQILNNIEVFDKNSKSRRLLDQEEKDLLFYELNLKNKLTKADVLKLLFSNTKDFDLNYKEIEGNRTQASLFDAYSRIIELSGHGEFDFSKMGASQIYSTVKSIFVGLHYNTDILSFNSELVGNEFEKQAAYQFWHLLYSFEGDDSKTGNEKLINRIIELYGFDRDYAGILANVSFQQDYGSLSSKAIRKILPYLKSGNDFSEACIYAGYRHSKNSLTREELDNKILKNRLEILPKNSLRNPVVEKIINQMINVVNSVVDTYGKPDEIRIELARELKKSAKEREDLSNAINSSTIEHEKYRAILQSEFGISHVSRNDIIRYKLYLELESRGFKTLYTNTYIAQEKLFSKEFDIEHIIPQSRLFDDSFSNKTIESRAANIEKGNDTAYEYVLAKYGQDGIIEYLDRVEDLFKAGKISKGKFNKLKMIGKDIPDDFIARDLRDSQYIAKKAKTILEDIVKEVISTSGSITDRLRADWQLIDVMQELNWNKYDLLGMTEIIENRDGHKIRRIIDWTKRNDHRHHAMDALTIAFTKRSFIQYLNNLNARSDKAGGIYGIEQKELYRDENGKLRFKPPIPLNDFRAESKKHLENILISIKAKNKVVTTNINTTDKKNGVNKKKQLTPRGQLHLETVYGSINQYVSKEEKVGSAFNEEKIATVAKKSYREALLNRYYEFDGNPKIAFTGKNSLDKNPIYLNDLQTLQVPEKVKTVQTQTIFTIRKDITPDLKVEKVIDAKIREILQLRLNEFGGDSKKAFSNLAENPIWLNQVKGISVKRVTITGISNAVALHDKKDKEGRLMLNEKGMPQAVDFVNTGNNHHVAIYKDEKGNLQENVVSFFEASSRVNLGLSIIDKEYRKAEGWTFLFSIKQNEYFVFPDEKTSFNPAEIDLLDENNYYLISPNLFRVQKISSKNYVFNHHLQTTAVDGELLKSKKSLSGVTYHFIQTPSKLEKIVKVRVNHIGFIIEVGEYI

SEQ ID NO: 5470 - protein, 1540 aa, unidentified
  REGION 1..1540: note = Description of Unknown: Cas Enzyme sequence
MTKILGLDLGTNSIGWAIVDDTQNEILGIGSRIFPEGVKSETIGKGDKEESKNASRRNSRQARRQLYRKRLRKIKLLRTLIDLKMCPLTHSELDVWSKWDKTKGKAGRKAPNSKTYEEWHKQNPYYLRNKALNEDLTNFEMGRVLYHLIQRRGFLSNRKGKDDGAIFKGKVGMIGITETQKQIDGKTLGSFLSSIYPKEREPFKLITDENGNELRVRARYTLRDMYVEEFEQIWNRQAEVLGLNDKNALKKKMQFLKGSLSCNRNKKKIEKIQNKYGVENVKIEELIDGSSKKTLYKITKSANVPLKIFLGGEIHHDEEGNVKHKSQDSVLFWQRPLRSQKGLLAKCRFEPDYKDKISGKYLQKGKTPCHLSHPVYEEFRALQFINNIEYGRKQKLDENQRLQVLELMNSKDSNFNFSEIPKKLKMQYEKWNYGDEQKVPGNYTTKNLSELFSKEIYEAKKDEIWHCFLFYEDNDNLIEKLKNDFGLEETKIEKVEKINLKEGYSNVSLKAIKNILPYLKSGLQMSDATILGGVRNAFGKHWEYFADSYKQLEKEILKINWNKTNKEGESIEKIKKYLADPDNNFGFLKDDKNFIKLYHHSQEIEEKQLQEKLDAVENLRNPIVQQGLNETRRLVNQLIKEYGKFDRIQVELGRDVKNSKKGRQEQTRRIYDNTAKNDEARKLLTDYGLKHDRNNIQKVLLYKEMQDKGVVTVCPYTNKSINISDVLGNENKIQIEHIIPKSVSLDDGFANKTLCDARFNGLKGNLTPYQFYLKNGDSKLWGGAATWEDIEQRAYRILPYPKAKRFTSKINIDDADVKSNFIERQLNDMRYISKKTKEIISQVCKDVRVLPGGLTAELRHLWGLNSILQPVMNIEIDVEHLEKDKQYPHYVVMDENNNPISSTAIYNKKPTVEINETTITGKVEKGIFKTNEKYVKLVAETPELLNGDYWLNLKLSEPKQIIRIFKERPETDENTIVLRGKIEKEKFKNDGVGLVNAKGFDYGIYWAKFSVINKKFELPKKDDQPKKTGKQVLLFGEVKAGIFKSYVYECEAHKEDGKYWLLIDIDIDNASFERAINERPTVSDSKIIIEGSVNDEGIFVSEIDVDHQFKTNENQGKYWVVFNMPNELNTFSAIQKPKPILADKQTLIEGNVWVDKYTGEIKFDPKKNRDDHRHHAIDALVISLSKQSYFQQLSIYNAQREAKRKGLTFDREQLNFQEPWSSFYNDAKKEAEKILVSHKQNRKVLTEVRKKITKNGKKFISVGNAVRGQLHKENVYGKRQAPFETTDGFHIRKKVVDLKDNQLDKIVDLEIRKIIVNAHKEETKIKKQIDALEKQKKNVRTDEEENELNSQIVVLKNDIYLLYTLKNKNGEPVPIKKVRIREEMSNAQQVKEINQFVNPRNNHHVLIYKNGKGELDKDVVSFWVAVERMKQNVELVQLPKDGVKIIETFQENDMFLLFLDEFVDINSLSQKEIFNHLFKVQKIAGADYFMEICFRRHTDSKISTEADYVYIKGFGDGKTGWHRFNPIKVNLTETGKIEKM

SEQ ID NO: 5471 - protein, 1539 aa, unidentified
  REGION 1..1539: note = Description of Unknown: Cas Enzyme sequence
MTKILGLDLGTNSIGWAIIDDTQNEIIGIGSRIFPEGVKAETIGKGDKEESKNASRRNSRQARRQLYRKRLRKIKLLRTLIDLKMCPLTHLELDEWSKWDKTKGKTGRKAPSSKIYEEWLKQNPYYLRNKALNEDLSNFEMGRVLYHLIQRRGFLSNRKGKDDGAIFKGKVGMIGITETQKQIDGKTLGCFLSSIYPKEGEPFKFITDENGHELRVRARYTLRDMYVEEFEQIWNRQSEVLGLSDKNAFKKKIQFLNGSLSSNRNKKIIEKIQNKYGVENVKIEELIDRSSNKTLYKITKSANVPLKIFLGGEIHHDEDGNVKHKSQDSVLFWQRPLRSQKSLLAKCRFEPDYKNKEGKFLQRGKTPCHLSHPIYEEFRAYQFINNIEYGRKQKLDENQRLQVLELINSKDSNFSFSEIPKKLKMQYEKWNYGDEQKVPGNYTTKQLNSLFSSEICEAKKEDIWHCFHFFEDNDNLIEKLKKDYNLAEKDVDKVENINLKEGYSNVSLKAIKNILPYLKRGLQMSDATILGGVRNAFGKHWEYFADSHEQLEKEILRINWDKTNREGDSIEKIKKYLADPNNNFGFVKDDKNFIKLYHHSQEIEVKKLKEKLDAIENLRNPIVQQGLNETRRLVNQLITEYGKFDRIQVELGRNIKNSKKGRQEQTRRIYENTAKNDEARKLLTDYGLKHDRNNIQKVLLYKEMQEKGVTTVCPYTNKSINISDVLGNENKIQIEHIIPKSVSLDDGFANKTLCDAKFNGLKGNLTPYQFYLKNGDPKLWGGATTWEDIEQRAYRILPYAKAKRFTSKIKIDDADVKSSFIERQLNDMRYISKKTKEIISQVCEDVRVLPGGLTAELRHLWGLNSILQPVMNIEINVENLEKDKQYPHYVVMDENNNLISSTAIYNKKPTVENNETTITGKVEKGIFKTTEKYVKLVVKTPDLLNGDYWLNLKLSERKQTIRIFKERPEADENTIVLRGKIEKEKFRNDGIGLVNAKGFDNGIYWAKFSVINKKFELPKKDDQPKKTGKQLLLFGEVKEGIFKSYVYQCEANKEDGKYWLLIDIDTDNVPFERAINERPIVSDSSIIIEGSVNDEGVFVSEIDVDHQFKINEKQGKYWVVFEILNELTEFNSIERPKPVLADKQTLIEGNIWVDKYTGEIKFDPKKNRDDHRHHAIDALVIALSKQSYFQQMSIYNAQRDAKRKGLTFIKEQLNFPEPWDSFHNDAKKEAEKILVSHKQNRKVLTEVRKKITKNGKKFTSVGNAVRGQLHKENVYGKRQAPFETTDGYHIRKKVVDLKDNQLDKIVDLEIRKIIVNARKEEAKIKKQIEILEKQKKKVRPDEEENDLNIQINILKNDIYLLYTLKNKNGEPVPIKKVRIREEMSNAQQVKEINQFVNPRNNHHVLIYKNEKGELDKDVVSFWTAVERMKQNIELVQLPKDGMEIIETFQENDMFLLFLDEFESIISLSQNEIFNHLFKVQKIAGADYFMEICFRRHIDSKISTEADYVYIKGFGDGKTGWHKFNPIKVRISETGKIQKV

SEQ ID NO: 5472 - protein, 1466 aa, unidentified
  REGION 1..1466: note = Description of Unknown: Cas Enzyme sequence
MTKILGLDLGTNSIGWAIVEKENDEFSLIDKGARIFSEGVKSEKGVESSRAAERTGFRSARKIKFRRKLRKYETLKVLAENKMCPLTIEDVEQWRKSGFKDYPLNDEFLKWLRTDDDKNINPYLFRDKASKGEANLYELGRALYHIAQRRGFLSNRLDQSPEGIFEEHCPKIEDAIEDVLTIEELKNEISDYFESTDIIDNAEKSGFKKDLDEGEKKLKSLLLALEKIIKDNEKDFEKVKEEIILRLNRKDDLGVVKKKIHEISQFMADGNFKTLGQYFYNLYNKEVEIKNTNTQEIEKFNRAKIRNQYTAREEHYLAEFEVICKAQNIEGVIGKERLPEKRFTGLAKNLYKAIFFQRPLKSQKGLIGKCSFEKSKSRCAVSHPDYEEYRMWAYINTIKIKTPEDETLRFLTAEERQKIVPKFYRKKDNFNFEDLAKELIIKGTTFDFYKSFNAKSAHYLFNYKPKDSVSGCVVSASLKNIFGENWKTKTFSYQTKNGKGEIVNRNVDYKDLWHLLSVSTSDIYLQEYAKENLGLDEKQAKSFSKIKLKKDFASLSLNAINKILPYLKEGLLYSHAVFMANIENIVDEEIWNNLAQRKYIQNNIAKIIETNTYDNGLLEIVNGLIKDCKIDDAYYSKEAETTYKNDLQKRLISFYKFHKIEENKEQILNELFPVLIEQLKKHEFIKVKRLDEKVLEFLDGKNEDGEVFCSNEKRLNKLYHPSDIEVFKKKIIKDEFGNEKVVLGSPLTSSIKNPMAMRALHQLRKVLNALILEGEIDPKTRIHIEMARELNDGNKRKGIQDFQNENKKARANYREEIKKLYFEETKKEIEPTEDDILRYQLWIEQDKMEIYEEGKSIGISQIIGNNPDYDIEHTVPRSRSQDNSLMNKTLCSQRFNRAVKKNQMPVELSNHKEILLRVDHWRKEADKLTREIDDIVKSTKGATIKEAKDKKIRKRHFLTLKRDYIKGKYDRFIWEEPKVGFKNSQIPDIGIITKYSQAYLKSYFNRVESVKGGMVAEFRKIWGIHESYQENGKKYYEIKDRSKHTHHTIDAITMACMTKDKYDILASAWTLEDQDRVSEARKKLADSKPWKTFTEDLKQIEEEILISHYTPDNVKKQSKKIVRIRGKKQYVAEVENDLNGKTIPKKDATGKIIYKLNEKGERIPRVQQGDTIRGSLHQDSIYGKIRNPFDFEDIRCVIRKDLESIKVTDIENIVDEAVKEKIKVAKENKVLVFSANAQQKNKLNGTVWMNEEKGIPINKVRLYASVKNPLEIKEHAALSKSRHEHKQKVYAVNDENFAMAIYEGIDRKGNIKRSFESVNYMDAGAYYKLSNKMNNDDSLVPMIHLKTQLPLKYEVKKGDLVLFYNENKAELNEIGINDLGKRLYKVIGFEGDGRIQFRHHKTAMQQSSSNKEELTIVKFMADNQLKNSQVDFESPVPWLRLRVSNCNFLLNKKEFEINSIGKISIF

SEQ ID NO: 5473 - protein, 923 aa, unidentified
  REGION 1..923: note = Description of Unknown: Cas Enzyme sequence
MSKILGLDLGTNSIGWALIDDVENKILGVGSRIFPMGVENLGDGDGEISKNAGRTGARGVRRQFFRRRLRKKVLLKALSEHNMCPMNDSDFENWKKTKQFPSDKLATWFALNPYELRNKALVDKLTLEEIGRIFYHLIQRRGFLSNSRKGGSDDGAIFKGNPKEGKIGITETQESIQDKTLGSYLFEIYPKENQPFQDGLERIRNRYTTRKMYVDEFELIWNKQSQFHTTLNEDLKTLFGGRKLDGYKEDGILFHQRPLRSQKHLVGNCSFESSKTKCPISAIPFEQFRIWQWVNTVEYNGKKISQEEKEIIVELLFSVEKPDFKRIRKAIGKESAEFKFNYKDDDKIVGSYTISNLSNKKFFGKKWFEFTDKEQEDIWHVLYFFDSKSNLRDYAVKKWNFTLEQADAISKFNVKDGYSSLSRKAISNILPFLKLGFAYDVAVVLGGIKNVFGTDWEKLSEEKRNYLVDNIEGIVRSKTKGGFIDVVKDILRNDYNISDNQLRKLYHHSATIDVTELLDKLPLGKDADKEIQAIRNPIVITALFELRKLVNELIDEHGKLDEIKVEMARDLKISKSQRNKIRRDQKRLERENDRVKERLVENAIRITHDNMLLYKLWEECKKTCPYTGKPISVTQLFSGEVQIEHIHPWSRSLNDSFSNKTLCYADENRKKGNKTPYEFYGSDETNWSAIKERALKLFSDTKEYPNAYQKFKRFVQHKFDDDFSTRQLNDTRYISKEAKNYLSKICNKVIVSPGQATSNLRQKWGMNNILNDENEKTRDDHRHHAVDALVMACTKVSYVQELTKWNRYNRNSELKNFPLPWESFRRDAEVAVEKILISHKKVSNDITVRTHVTEKNGTKYRNVGVAARGQLHKETVFGKRNFNGEEAFHVRKSIDSLETAKQIEKVVDETIKQLILKRVNELG

SEQ ID NO: 5474 - protein, 1080 aa, unidentified
  REGION 1..1080: note = Description of Unknown: Cas Enzyme sequence
MFRFSFDLGTNSIGWAVYELDAQTGKPKELTRLGVRIFSEGRDPQNKESNAKGRREPRSHRRQHDRRLKRRGRLLADLEANGLMPPAGPERDALFLENPYELRARAAHEPATMHQLGRAIWHISKHRGFQSNRRADKDADESGKIATGSRALQAMLDDPNHPTYGAFLWSRLENAEGARIRLQGSGAKASYDFYPTRTVLQAEFDKIWQVQEQHHQELTEGLRQRIRDTVFHQRPLKPVVPGRCTFFPDETRLAKWHPLAQEFLILSELANLRIVDEAGECGLDLTSRNLIARTLLDGQSITWAGLRRTLNLGSGADFNLEEGGLKKLAHNEIAARMIGSKKKPGPMAEQWHGFDDDRKVALLERIDQIDDPDALIDALQGDFGFSPETAKALEQIRLPDGHLRFCKKATRAIVAEMRQDNITYDEAVNCAPDLGGIGLNHSDFRPDVGLDMLPPYNRLEVLQRMIGNGTGNPDDPDERRYGKITNPTVHIALGQFRRVMNQLIQHYGKPAEVVLETARDLRKSTDELKNINSEIKKNEARNDRWRQELEEAGLLLPGQRVGDHFLRMRLWEEMGRTATDRCCPYTGHQISLTQLHSDAVEIEHILPQADTFDNSPANKTVAFREANRRKGNLSPAAAALRYPEYFDQEAMIARTRHLPNNKNWRFRPDAMEKWEAQKSFEDRQLHATGYIAKVTRAYAEALFPKRDADGVRRNHVWVLTGKMTALLRQRWALNLGDHNRKDRNDHRHHAIDAAVIGVIDRAMIKQLQDLARRHGEEAVTRFLPAPPEPFDGFRDAVHTAIQDVRVSHRAQHGSANPADPSQTSGRLHEDTVYGEIRDVPENQAERTIGKRVVRKPVAGLTAKEIGQVRDVKLRNELLDFTRAARDKALSESERKKKLTEVLADWVKKTGHHRLRLIKPQATARPVCNKLGVPYKWLVPGEIAFLDIVEGQDGAWHHHSTDIWAANSGEGETWQDVLPDAKFIMRLHKNDTLQLFDWDDQNNCIVDGSNRIMQVFGLEPSANRVRQAGINEAGVLQQRHADRDDPFRWDFANIGKLMRRRARRVRIDELGRVHTIPHGKL

SEQ ID NO: 5475 - protein, 1112 aa, unidentified
  REGION 1..1112: note = Description of Unknown: Cas Enzyme sequence
MKRILGLDLGTNSIGWALTQQNFGKKKGEINGLGSRIIPMSQDILGKFDAGQSHSQTSERTGYRGVRRLIQRNLLRRERLHRVLNILDFLPQHYKNSIDFEKHFGQFKENTEEKLNYCKNEYGKYDFIFMDSFNEMVEEFEINNQSTKIPLDWTIYYLRKKALSKKITKEELAWIILNFNQKRGYYQLRGEDEETDNNKLEEFYNLKIKDVQATEDKNNKDVWYNVVLENDWIYKRQSKEPLDNWIGKNKEFIITTTINKDGIKKRSFRAPKEDDWNLLKKKTEQSIENSKKTVGQYIYETLLENPIQKIRGKLVKTIERKFYQEELTAILKEQKKHHLELQNKDLFKKCIEELYPRNEAHQNNIKDKGFSHLFITDIIFYQRPLKSKKSTISNCSYETRTYKKKSEVIENGNEITKEILVSEPLKSISKSNPIYQEFRLWQFLKNVKIYQKENIQNDKTELDVDVTKEFLKTEEDYVNLFEFLNSRKEVEQKNIIQYFISNKLIAKVDKDNYRWNYVEDKKYPCNETKAQFLSRLSMVEDINPTSFLTAEIEQKLWHIIYSVKDKKEFEQALRTFAKKHNLNINSFSDSFKKFPPFKNEYGAYSEKAIKKLLPVMRRGKYWEENAIPIEVKERVAQIIERLEFIDFDKVKIDENVTDDDIPKQLLKSFIEFKDKNPLQGLNTYQACYAVYNRHSETSNITYWKTPKDITEFLEDFKQHSLRNPIVEQVVTETLRVVKDIWEYYGQGAQNFFDEIHVELGREMKNPADRRKAMSDRIRVNQNTNERIKFLLQELKDEGIKDIKPFSPSHQEILKLYEEGVYQNSIEIVEEIEKIRKNTSPTKAEMTKYRLWLGQGYISPYTGQPIPLSKLFTTDYQIEHIIPQSRYFDDSLSNKIICESEVNQLKDNQTAYEFIKNNSETIVDLGHGKKVKLFKLEDYENHCNGYFKNNRGKLKKLLSEEIPDGFINRQLNDSRFISKLIKGLLSNIVREENEQEATSKNLIPVTGSITSKLKNDWGLNDKWNELIAPRFERLNEMTNSNNFGFWDNKIDAFRTQVPDEISKGFSKKRIDHRHHALDALVVACTQRKHTQYLNSLNSEKKNFGLRDALLIKN

SEQ ID NO: 5476 - protein, 1400 aa, unidentified
  REGION 1..1400: note = Description of Unknown: Cas Enzyme sequence
MKKILGLDLGTTSIGWALVNEAENDNEISEIIKLGVRVNPLTVDEKTDFEKGRPLSTNADRTLKRGARRNLQRYKQRRENLIEILIQNNFIQKDTPLTEIGKDTTFLTLKLRAQSVSQKINLEDLARVFLTINKKRGYKSSRKSTNEEDGQAIDGMDVAKTLYETSQTPGQYVLQLLKDKRKYIPDFYRSDLQAEFDKIWNTQKKFYPVILTVELYKALQGKNKGATWAICQEPFNIVGAKLEGKASEQKLQRYQLRSDGLVNQLDLEHLAITLQEINNSLNQSSGYLGDISDRSKELYFNKETVGENLYNQLLKNPHTSLKNQVFYRQDYLDEFEKIWETQSKFHSELTEDLKTEIRDVIIFYQRKLKSQKGLLSFCQFESWEQSYTEKETGKSKKRIVGNRVISKSSLLYQEFKIWQNLNNLEFKNKAKGELIEIVKLDDDVRKSIFNELNLRGDLKSTSVLKLLSKFLDIGKTSEWKCNFEKIEGNRTNESLYNIYQKIAEYEGYGFDWSKKTASEITDELKTIFTEIGIDNSILDFDVEKEGVDFDKQYSYQLWHLLYSAEDDVKISEDDKLIYGNSNVALKKKLHIKYGFKPEYAALLVNISLQNDYGNLSSKAIRKIFPYLESGSIYSKACDLAGYNHSNSLTKEELENRELKPKLELLKKNSLRNPVVEKILNQMVNVINQIIDTYGKPDEIRIELARELKKNAKERGEMTRGIAEATKRNLDIKKTITKTFGIPSPTKNDVIRYRLWLELETRGHKSLFTNAYIPQEKLFSKEIDIEHIIPKALLFDDSFSNKTLAYRNVNLKKANRTAYDFILSDYQSDLENYKERVESLYNNGKGVISKAKRNKLLLLSQSNLPDGFIDRDLRNSQYIAKKAKELLFEVFNGVISTSGSVTSKLREDWDLINVMKELNMPKYKALGLTETEVRKNNKKVEVIKDWSKRNDHRHHAMDALTVAFTTHNHIQYLNNLNARRDESLEIHKVISNIQNKITHRNEEGKRKFIKPIPNFRKQAKTHIEQILVSFKNKNKVVTNNINKSKLKGKDNYNTKLQLTPRGQLHKETVYGKSKQPLEKPTKLNKRFTKEQAKFIINVPQRNIVLNHLKKYDNNNVIAFDTKTLKKDPLLYNNESLKEVFCFEEIYTIRKDINPNNFKDIKTINKVVDLKIRQILIDRLAEHNGKPKEAFSDLYKNPIWLNKTKGISIKRVTITGVSNAEPLHYKKDHLGIEILNDNGNSEPVDFVSTGNNHHVAIYKDKDDKLQERVVSFYEAVIRVNQDLPVIDKTYNQDIGWQFLFTMKQNEMFVFPSEDFNPSEIDLMNENNFNFISPHLFRVQKISTKNYVFNHHLETQAVGGDTFKNKKELSEITYRFYQSEKYLEGAVKVRQDHLGSIVQIGEY

SEQ ID NO: 5477 - protein, 1362 aa, unidentified
  REGION 1..1362: note = Description of Unknown: Cas Enzyme sequence
VKKILGLDLGTTSIGWALVNESETKDENSEIIKLGVRVNPLTTDEQTDFEKGRPLSINADRTLKRGARRNLQRYKQRRKNLVEILSKIGFISNDTLFTEIGKNTTHQTLALRAKSVKEQVEKEEFARVLLTINKKRGYKSSRKAKNEEEGSLIDGMSVAKELYDSNLTVGQYVFQLLENGGKYIPDFYRSDLQNEFDQVWEFQKQFYSKILTNELYKELQGKGKKQTWAICKGPFNIVGEKRTTKGADLKKENYKWRARGLSEQLNLEQLAVVLQEINNNLNNSSGYLGAISDRSKELYFNKETVGENLYKQIQNNLHTSLKNQVFYRQDYLDEFEQIWETQTKYYSELTTKLKEEIRDIVIFYQRKLKSQKHLISNCEFEKHHKAIPKSSPLFQEFKIWQNLNNLEFKHKETKEKQKLDDDSRNLLFEELNLRGNLKASAILKLLKLDAKKWLLNFKEIEGNRTNEALYKIYQKIADFEGYGFDWSKKTTSEIKEELNAIFPEIGISNEILNFNSELSGNDFDKQEGYRLWHLLYSAEDDKTLKQNLHKKYGFKPEYTSMLTNVSLQQDYGSLSAKAIKKIMPFLNSGNNYSEACALAKYNHSHSLTKEELETRPLKNKLELLQKNSLRNPVVEKILNQMVNVINQVIETYGKPDEVRIELARDLKKSAKERAETAKYINTATNKNIEFKKIITKTFGIPNPTKNDLIKYKLYEELKDRGYKTLFTNQYIKKEDLFSKNIDIEHIIPKAKLFDDSFSNKTLAFKKVNLAKADRTALDFIESDYNADLENYKQRVEELYNKGKGVISKGKYKKLLMAEKDLPDGFIERDLRNSQYIAKKAKQLLQEAIRTVNTTTGTITSKLREDWDLINIMKELNLPKYKALGLTEIQERKDNKKIEIIKDWTKRNDHRHHAMDALTVAFTTYNHVQYLNNLNASRDSENSKLYGIRTKITKIYEYKNGNKKRKFIPPMSNFREEAKKEIESILISFKAKNKVVTRNINKTKLKGKDRYNTKIQLTPRGQLHKETIYGKMKEIVVKEEKVGGKFDELKINQITKQNYREALLKRLVENENNPKKAFTGKNALSKNPIYINESKTKEVPEIVKIQFFKDNYTIRKDINSDQFKDFKSLQKIIDIGARRVLESRLAEFDNDTKKAFSDLDKNPIWLNKEKGISLKRVTISGVKNAEALHAKKDQLGNVILDENEKEQAVDFVNTGNNHHVAIYKDDKGKLQEKVVSFYEAVANINTGFPIIDKEYNKNKGWQFLFTMKQNETFVFPSEDFNPNEIDLLDEKNTSLISKNLFRVQKISSLLSGIWFRHHLETTVDKHNTLKGRTYKVIQSLSKLKGMVKVRINHLGKIVQVGEY

SEQ ID NO: 5478 - protein, 1402 aa, unidentified
  REGION 1..1402: note = Description of Unknown: Cas Enzyme sequence
MKKVLGLDLGTTSIGWAYVWEAENENEKSSIQKLGVRVVPLSTDEENDFKKGKSISINADRTLKRGARRNLDRYQLRRKELLKILREHKVTPINYIYSEEHKNTFYSYEVRAKAVKEKISKEDFARVLLMINKKRGYKSSRKAQSDDEGVAINGMDVAKYLYNNNLTPGQYVYNLLKKDKKIIPEFYRSDLERELDTIWNFQKEFYPNILSQKLKNEIKGKNKGATWTILKDPFNIKGIKLLGKQKEQKIEKFRLRAIALTEKIDLEHLAIVLQEINNQINHSSGYLGAISDRSKALYFNKQTVGEYLYKQLKKNSHAQLKNQVFYRQDYLDEFEAIWEKQKEYYPELTPELKREIRDIVIFYQRRLKSQKHLISECEFEKHHKAIPKSSPLFQEFKIWQIINNLELKHIPSRTVYKNDSIDIETKELLFNELNIKEKLSAKEVLKILVDKPKEYEINYKEGLEGNHTNAAFYKAYENILKIEGEAYDFSKLSADKINDIVVSKFADIGISQDVLVFNSEIEGNNYDKQPMLQMWHLLYSFEGDNSRTGDEKLIKALYEKFGFREGYAKMMAKVKLQNNYGNLSTKAIRKILPYLKQGNKYDVACHYAGYNHSSSLTKEEQEKRTLKDTLALLPKNSLRNPVVEKILNQLVNVVNAIIQDENLGKPDEIRVELARELKKSAKEREEMTKHINSATKRHEEIKKILQTDFSITKVTRNDIVRYKLWEELESNGYKTLYTDTYIQREKIFSKEFDIEHIIPKALIFDDSFSNKTLSARKINIDKSNETAYDFLKHYLDDEKFEKYLGRVEKLYKDKKISKAKYNKLLMKASEISDGFIDRDLRNSQYIAKKATQMLKEIVRDVNTTSGSITDRLRSDWQLVNVMKELNLPKYEKLGLVESIQGKNGQPEKRIIDWTKRNDHRHHAMDALTVAFTKPVYIQYLNNLHARRDENNKKHKVIQNIESKYLKRNRNGKLLFNPPIPIKEFREEAKNHLESILISFKAKNKVVTRNKNRIKVDGGFIEKTEFTPRGQLHKETVYGKIKVNKSKEEKVGGKFDLEKIKQVAKKQYRDALRARLIAFEGNPKKAFTGKNALSKNPILLDNAKTIKLPESVKLVYKETIYTIRKKLSPNLFKDSKKNDIFYKKIYDNNFIIDKKIRNVLKIRYDKIKKEVEEYNKTVEKKKQKKILETVFSNLDDNPIWLNKEKGISIKRVSITGVNNVETLHYKKDHNGKYILDKKGNKQAVDFVSTGNNHHVAIYRDAKGDLQDEVVSFYDAVARVKLKLPIIWKEHPEHPDWKFQFTMKQNEYFVFPTDDFNPLDTDLLNPNNTSLISPHLFRVQKFSKLNYGNSSVRDYVFRHHLETVINNSKQTKEYTYKNIKSLPRLEGIIKVRINHLGQIIHIGE

SEQ ID NO: 5479 - protein, 1878 aa, unidentified
  REGION 1..1878: note = Description of Unknown: Cas Enzyme sequence
MKKVLGLDLGTNSIGWALVEINHEKQIVKIIGLGSRIIPMNTAEISNFENKGTIKSAASQRTEKRGTRRLNERFVLRRDRLHLILDLLNVLPEHYKIEIDFEKNGKKSGKFKKNKEPKIAYVQQKDNPKKYDFLFKESYNEMLNDFDVNHKVPYDWTLYYLRKKAIDGGKLSLNEFAWVLLSYNQKRGYEKTEIINKSINENELIEEFDLKVKKVSEKKQDKNGKSYYEIQLEGCDNFIYKEYVEEQMTFADDLKEVTKKTIQDKEWNEKEIFFTITDIYSLTIKNVEYKKEDGKHKFTIKYNNGWKEIKNPKNYTFKYKDIKGKKYDYIVETTYFKNGEIKLEKKKERKLREPDFSDNSSDWTLLKKRTEKEALEYNSKNNYVDTETDKVKNLISPKIYETLKKDARNGTQTKIIGGMFQVVDRKFYREELNTIIRNQKNYYSKLEDQQLIKKCINLLYQNNNNHRQMLENKKSIEYLLTEDILLYQRPLKSKKSEIGNCKYERRIRVDKETGEIINKPIKVISASHPLFQEFRIWDKIHNLKLIQIEIKINDNIETNIDVTKQYFKTPKDYQDLFEYFNNRKTVNQKQFLEYCRKKFKINKKNVKWNFPEDEKLKGNETRISFITRFKRRNFDYKDFLTQEKEIALWHYLYSINYKERTAENNKSLRNFFAKYFGDLKIPKETIEKLVDDFESYPKIDSKYCAYSAKALKKLLPFLRTKKNSFKGQFDISQYETDLKAIEYDKKNIPQYIEKLNLTGKEKEEQKQNIHFALWQYSINKRIKKILNKLGKINFNEDEVDYSEVVTNESTDNDLAFPKGLFNTFKKFKTVEDFTNLDLTKASYLVYGRHSELAEAKYWKSPNQIREELHQELKHNSLNNPIAEKILLEMMQVIAEIWETFGEKENDTDYKKLFDEIHIEVGRELKKTAKAKEKIFNNQKENRKQNKRLRQILQEFLSKKKYKANPQNPDHFNRLKIAEEGASIRKNVDKDFFKDKTYTKKEIEEILKKETITKQDFDKYKLWIEQGYKSPYTNQIIKLSDLFDGNKYNIDHIFPQALISNDSLSNKVVCETEVNKDKSSLTGRAFIMATNKKEIYCQAHKSKIKIVDDDTYVKTVKNQFSGNKKEILLSKTIPSKFINSQLNTSQYIARKAMELLSHIVREKGEVEYRSKNVLPVTGIITNKLKETWKLNQVWKQLVAPRFIRMNELTQSSLFGSEQIAKNGEKYFDCNIDNTIKEKMDGYNIKRIDHRHHALDALIIALCTKEHINYLNNIASKTKLNNIGKQKQLEKYRLTLKRKIKFSEPDKKDPKEKNWHFMLPGEKRKDNADNSTRNTVVEMKYQYKQDTSFNKDYKKTILTALQNTLVTFKQNKRVINKTVNTYSKWDKEKNKVISAIQEPNLIKNISKSKNKYNWAIRRSLGEETFYEKVFLGETENKQLYKIIDKLFKRQDIIINEELKNEISELKKEFSTFEEFKNNVKNKYSNKKIELKVEKIVVRKELDKTFSLEKIKTITDTSIQEILKKHLRQFDTIKLPFEQTMQFYDALLEKDEFEAIVKDEENDFNNIDEFIDYLKINKFKFNKTDYSKLNVFIEKVTSENLRDKADGKNIKITERPEIAFTSEAIDKMNEPENLKKLNNNKNHAPIKKVRISKGFGKQRALSEDKESVKSKQYVVNDAGSNLYLGVYEREYINKNGEKISERKFQDIGLIELIEILKQDSSKRLNPLPDKIYDKEGNKYYWKFTLSPLDLVYVPTENEIENPNLFNINNLTYEQMQRIYKLVKYSGNTVDFIHYPIASVIFDVDKKKEVNQIFFKELEKKSNNMFKLQSPKDKKMTYILNEIGKTSRQNKTQNTIDEKTQIKKVCWKLEINRTGKIINIIS

SEQ ID NO: 5480 - protein, 1166 aa, unidentified
  REGION 1..1166: note = Description of Unknown: Cas Enzyme sequence
  MOD_RES 424: note = Any amino acid
  MOD_RES 432: note = Any amino acid
  MOD_RES 451..452: note = Any amino acid
  MOD_RES 472: note = Any amino acid
  MOD_RES 503: note = Any amino acid
MPKYYRYNLGIDLGIASIGTALVLTDEAGNPTKPLDLGVRTFAVTEGAARRREKRLERKHIRRRRQRIAKLKLFLQQHGLLPTDTDQLASLIRKNPYLLRAQGTSAAYPSLFDLGRSLLHMAKFRGAGFLTQSEENPDVEIDEEKEKKKDRQKTASVYRRLEVIIKNSKKTLSHFFTQRLEEKRPVRRRQHNVKTLAVDYAVPRFLVKDEFRKIWAEQSQHHKNLTPELEQAIYNLIFADHPHAPYATGYCTLIVGQKRLPRMHRLAEQRRIYEQLANVRFVTPKGEYALSREMRDHLAQLAFGEGTNLTTAAIKKYIAQTAGQTVVRVNLGDDDKTIRGFCQIRAFADIPTWQTLSQQERDNIIDFIANPSVKPEEENSVLLPEDEMIAEVCKRLGLAVAGNEKAVSTAIARLTPDRSKLGIXATQRILEXLIEGQQVETADPITGEVTXXWRPHTHRTAADACGFEAEEXALSKKYGTFSQLPYYGEVLRQDVTPIHPWHXKQAAQEEAAHGRIPNPVVHTALNQLRKGVNEIVSLYGKPQRIHIELARELGMSAPKREELTRELQKRERENVTIDEALAKLGLSPTRTNRTKYRLWEEQGKRSLFSYTEIKQSDIAACEIEHLIPQSHGGSDSYMNLALVHSNENFAKGNSFPYQFIQKTAPDAWQHIAKVIADKSYPKAKAWRFSADACNRFEEQGDENATDSRLSNTSYMARIAARYLRMLCADVVAVKGGTTAKLRHLWGLDGIEYELLGLPIRKHQYDPVTGEVQLNNFGYPVRNPLWVAKPRIDHRHHAVDALVAACTTRSMVSRMVRDEKTTWRKKDGGPDFPSPFGSDTGWFRQQMLEALKKVVVSPKKEHGKAGELHEDTKCRILQQDTRNGSDKMLIRYRRAMDKLKDKKSVAGILPGATIPNDLPAVQTAHAQCKAIIYAIESRYIAASDNLEARRQQAIKEGGRLRNLTPQAREATIVAEAITMAQQAGAIGATYPALKYKTLVAVNEALQFGFEPKNNYCMDFYETPNGKVGWECITRIDANTPAFVPEWKSNGGRFIWNLCIDDVIEVELTPELKANIKAPCPVGNCYMVVQKMSGGRLQCNLLNDARPLDGKISTVKSGTAAIEEYKRWKSGELGLDKWCLLKARKVDISPFGKILHKHKKLWHGKKTQ

SEQ ID NO: 5481 - protein, 1114 aa, unidentified
  REGION 1..1114: note = Description of Unknown: Cas Enzyme sequence
  MOD_RES 40: note = Any amino acid
MADRETACVTNFVLIPIKTLISLSSFTMNIKDKNLHRTEXHLHVSFDVGHSSIGWAVLQTGEPLEIKGCGSVVFRTDDCLSSSRRVYRRQRRHIRSTRQRIARIKILLKHLGLMTEADLDKPGCAWPWKLAAQVLQGDELLTWPELWDVLRWYAHNRGYDGNRRWSAAETEAQTEDSEKEVKAHSLMDKYGTKSMAETFCAICGINPLDKKKSANMSGDKRPKGQNAAFPREIVECEVRQILQKHFGTLKNVDANLERVLLGRDSNDKLAWQAISCPELKLPKRYEGGLLFGQLVPRFDNRIISTCPISGQKVPSRNCPEFLNFRWAMQLANIRVGKKADRELRRLSGAECVSLNNQMHERGYLTPGQLKEAVRSVTGCERDNLETMLMHPDSKEALIVDPVQKLISSDDLHPFWMLLTERLQKRLRGKWHRGKHVSLAQIRTQLKPLGDITAFDAELQRQIDTQNTKTKKKDKPITLDELLKKTFPSRPLKMDGRAAYARHLMQRAYEDVLAGKPHPKEEGGCLFITEEIREAQINRAIADQTNNHLVRHRLVILERLLKDIVKEYADGNKTRIGNITIEVNRDLREMSGKTAKEKAQDMGLRIANHHAVATKLEKAFAEEGIRQPITAGLIRKARIAEDLGWKCPYTGQTYEPKNLITRLVDKDHIVPRSERASDSLDSLVITFSAINKWKGKRTAWQFVTEEQGKPIPDMPQLSIMSLSRYKQFVDGLETYKGHDDDKRRKKKRKELMMLLKYEEKEFTPRDLTQTSQLVRLGAQVLKRTFADCKEKPMVTSLPGSVTGAVRKAWKVLGCLSLANPQVLDENKTVKCKTDIRNITHLHHALDACVLALSAHFIPNNGRIWELIVKRNLNDSEKRELEALGVFGFNAENRFEMRDLDNRLKDQIRDRLAEKRVVQHIPARMDGLRVEQNTWGVVAKHEDGTAIIRQRIRQPNGTRPEKVTEEKTGKLLGLNPINGNGKLAKNKGALVIPDNYGVALDPQPTVIPFHKVWTRLQELKKANGNKMPRILRNGQLIRIVRGSRAGIWKVLSTKDTKAYGIALDLALPDRVKLDRGNAPIKTLIQDGLEILDCSFVGIDSSKITITEAKKRPRKPK

SEQ ID NO: 5482 - protein, 1527 aa, unidentified
  REGION 1..1527: note = Description of Unknown: Cas Enzyme sequence
MKKILGLDLGTNSVGWALVENNFEEKTGNIIGIGSRIIPIDQGSLGEFDRGNSVSQTADRTGFRGVRRLRERYLLRRERLHSVLNILGFLPVHYSQHIDFEKHFGQFLDEAEPKLAYKPNPESGKSDFIFKSSFEEMLADFAKHQPQMLTKKNGEPALIPYDWTIYYLRKKALTQRIEKEELAWLLLHFNQKRGYYQLRGEEEEENDNKLVEFHSLKVVGVVDSGDKKSKDEIWYNVILENGWIYRRTSNVPLDWTGKIKEFIVTTDLNEDGTIKKDKYGKEKRSFRSPKDDDWTLVKKKTEFEIDKSGKTVGAYIYDTLLQNPNQKIKGKLVRTIERKFYKEELQIILEKQKIFHPELLDKQLYTACLEELYKSNENYRSSVAQMDFTYLFLNDIIFYQRPLKSKKSLISNCRYETLSYKDKEGNIISVPLKCIAKSHPLYQEFRLWQFLQNLKIYQRGKEVEGKLQFDVDVTSDFLKTEEDWISLYEWLNDRKEIDQKVFLKYPAFNLKKNAEQYRWNYVEEKIYPANETRAQILTRLSKVANVPLGFLTKEIEEHLWHILYSVEDKKEIEKALKTFACKHQLGEDFVDHFIKFPPFKKDYGAYSAKAIKKLLTVMRRGKYWKQEAISQETTAHINAINERLESVAFDRKKIEEITDDEIPKQVLKSFIDCESPYKGLNTYQACYAVYGRHSEEGEVIRWESNTDIENFLKEFKQHSLRNPIVEQVITETLRVVNDIWKQYGKGEKNFFDEIHIELGREMKNTAEQRKKMTEQVSENENTNLRIKALLAEMKNDDSIENVRPHSPSQQEILKIYEEGALNSPIEIPEDILKISKNAQPTSSELTRYKLWLQQKYRSPYTGSPIPLTKLFTTAYEIEHIIPQSRYFDDSMSNKVICESEVNKDKDNDTAYEYIRNNQGKIIELSYGKTVKLFTVESYEDFVKNNFGKNKGKMKRLLMDDIPESFVQRQLNDTRYISKYIKNLLSNIVREDGEQETTSKNVAASNGAITSILKQEWGLNDIWNDIISPRFERLNILTHSNHFGEWTNKDGKQVFQTQMPLDLQKGFSKKRIDHRHHALDALVIACATRNHINYLNNVSANSGKRYDLRSTLCFKHKTDINGNYKWMFYKPWETFTQDAKNKLLTTLISFKQNLRIINKTTNWYQKWQQDENGQLKKVFTKQEKGENWAIRKPMHKDTVAGLVNLRFKKTVSLSVALDQWEMIVDKPLKKQIKTLIKEGYDKKQLLKFFKTNENTFNGSNIAKVEIYYWATDNVASRTTLNETYSSSAIKSITDTGIQKILLKHLEKYNEEKDGKIIEHPELAFSPDGIDRLNENITDLNDGKFHQPIFKVRTYEPRGNKFSIGYIGNKKDKYVEAAKGTNLFFAIYQDKTGKRSYESIPLNIVIERQKQGLQSVPETNEKEEQLLSYLSPNDLVYVPTEEEIENHQSIDFKNLTKEQVKNIYKMVSSSSTDCFFVRNDIAATIWNKIEFSALNKMEKSIDGIMIKKVCWKLETDRLGRIIKVNGSHI

SEQ ID NO: 5483 - protein, 1432 aa, unidentified
  REGION 1..1432: note = Description of Unknown: Cas Enzyme sequence
MKTILGLDLGTNSIGWALVNEAENDEEKSSIIKLGVRVNPLTVDELQNFERGKSITTNADRTLKRSMRRNLQRYKLRRNTLIEVLKEHSLITDGTLRSEQGNKTTFETYRLRAKAAVEEISLEEFARVLLMINKKRGYKSSRKTKGEEDGVLIDGMDIAKRLYDEQLTPGQLCLQLLESGKKALPDFYRSDLQDEFDRIWNHQKVFNIESYCDAAKEEIKGKNKSQTWAILQKYFIWEEKETIWNEEEAKTKELKKERRLAGIKRNTKGNEQKLENYRWRVQALSEQLNPEMAAIVLQEINGQISASSGYLGAISDRSKELYFNRQTVGQYQMAILTKNPNASLRNMVFYRQDYLDEFNRIWEKQAEFHRELTVELKKEIRDIIIFYQRRLKSQKGLINFCEFERHEVTIEKEGKKRAKVVGCKVIPRSHPLFQEFKIWQTLNDIEVFAGDKKNIRKNPSKKSNLFNDMEDALSIKGSRYLYQEEKEILAKELSVRENMKKVEVLKLLFSNPQELDMNFKQIDGNHTGFSLFSSFSRMIERYGYEPIDFKKSADEIKKQLEAIFSDLGWSTGLLSIDLGQDNKELEKQPYFRLWHLLYSFEGDNTPTGNGKLIERLMELCGTEKEYATVLANVSFQDDYGSLSAKAIKKILPYLKEGNQYDVACEYAGYRHSKSSLTKEEIDNKKLKDKLDILSKNSLRNPVVEKILNQMVNVINAIIDDYGKPDEIRVELARELKKNAKEREELTKSIAQNTREHEEIRKLLQSEFGMINVSRNDIIRYKLYEELKDNGYRTLYSNQYIPKEKIFSKEIDIEHIIPQSRLFDDSLSNKTLEYKAVNIEKGNKTAYDFVKEKYGDDGLLQYLNRCEALFKEKRTKLNKLKIEEKDIPEGFIDRDLRNTQYIAKKALSMLNEICRRVVATTGSITDELREDWQLVDLMKEMNLPKYETLGLVETFEDKDGRRIKRIKDWTKRNDHRHHAMDALTVAFTKDVFIQYFNNKNASMPGAKEQTNITGIKSKYFESGKAISPIPLAQFRAEAKRHLEGVLVSIKAKNKIITTNVNYTKKVNGENKKLQQTPRGQLHLETVYGSHRKYATKMEKVNASFDIAKISTVSKLAYRNALLKRIKIFDNDPEKAFAGKNTLEKNPVYLNENHTKMVPEKVQIVDFETIYTIRKPIEPNLSIDKVIDAKIRRILEERLKKYGGDAKKAFVNLDENPIWMNEAKGISIKRVSIRGISNAQSLHEKKDKDGNLALDTDGKKVPVDFVNTGNNHHVAIYRKPVLSKTGQTVFDEEGNPKYELDEVVVSFFDAVTRANLGQPIIDKDYKRSEGWKFLFSMKQNEYFVFPNEKAGFNPKEEDLLNPENYAMISPNLFRVQKFSYKNYVFRHHLETSIKDTSAALKGITWTDFRSSKELDKIVKVRVNHIGQIVSVGEY

SEQ ID NO: 5484 - protein, 1240 aa, unidentified
  REGION 1..1240: note = Description of Unknown: Cas Enzyme sequence
MKKILGLDLGVTSIGWALIEVDDKEKNIINMGSRIIPLSTDDKDEFTKGNAISKNQKRTIKRTQRKGYDRYQQRRQLLVEVLRKNNMLPDEKLIKLPKIELWELRAKAAEQEVSLQEIGRILLHLNQKRGYKSSRSDANLNKKDTDYVSAVKSRHDKLKESKMTIGQHFYHELQNDDCYRIKQQVYPREAYMEEFDKICQIQQKTHPSILTKEFIDKLKNEIIYYQRKLKSQKGLVSVCDFEGFYTKVSANGKEKEIFVGPKVAPKSSPIFQICKIWETINTITLKNKNGGELTISAEKKNVLFEHLDNNEKLTYSDLFKILELKKEDGWYGNKQLSKGLQGNLTKVQIMKCFPDKETFSKQFPLKLEVKKNEKSTYLVDRKSGEIVAENKEKYILPCVEKEPFYQLWHIIYSIAEKEECTQTLIKKFNLAPDIAKKLATIDFTKQAFGNKSVKAMRKILPYLMEGYVYSDACSFAGYNHSNSLTKDENLKRALIEILPNLPKNSLRQPIVEKILNQMINVYNAISVAYGKPDEVRIELARELKQSKEERNETFTNISKREKENKIIADRLENEYGLRATRNNIIKWRLYQEIDGDNNKTNAICIYCGQPISFISAIKGDEVDIEHIIPKSLLFDDSQSNKTLTHRKCNADKKDRTAYDFMKSKSDDEFQTYLERIDTLYKNGIIRKAKRDKLLMSVDKIPQDFIDRQLRESQYITRKAREILMQVCTNVWATSGSVTEYLRRVWGWDDVLMNLQLPKYRDMDLTEWVEFEKNDQLHKKEVIKGWTKRDDHRHHAIDALTIACTQQGFVQRINTLSSKITRDEMYKAVQEAKIDNQEKKNLLEQYIFIQRPFTTNEIEEKASQVLISFKAGKKVATKGQRKIKKNGKKQVVQTGIIIPRGQLSEENVYGKIASMEYTKPIKYLFEYPNLIFKPYIKKLVEERLNMFNNDTKKALASLKKEPIYLNEDKTKVLEHGTCFKEEFVIKYPIEAIKAKDVKEIVDHGIRKIIETHLAKFSNEKDAFKDLEKNPVWFNKEKQIPIRSVRCFTGLSSVEPIKKDENGKEIAFVKPGNNHHIAFYLDDQGKRQQHLCTFWNAVDRKKYGLPVIINNTSEVWNQLLQNPEAYPESFADKLPKDGWQFLFSLQQNEMFILGMEPDVLQEVILKKNNRILSDHLYRCQKLSVIGNSINIWLRHHLETSLVDDTNAKKSLRFYNFQSIDAFFNQNPVKIRINNLGQIINHP

SEQ ID NO: 5485 - protein, 1190 aa, unidentified
  REGION 1..1190: note = Description of Unknown: Cas Enzyme sequence
MKLLGLDIGSNSVGSAWIDTEAKTIKMGVSVFPAGVEQQTDKRGAPKNQARRSQRQQRRSIERRAKLKRWLRQYLIKKSWIPTEKNKLQEWQNLNPWILRKDALHRELNKLEFGKILLHLAQRRGAWWFDEEPEEAEKSKKKKKGPAEIPGTVEYTKGIMNQKGAETFGELIAIEYENRKTITANNKIRNTRIRNRANAFGEKESEFVADRHMILAEFLKIWEAQKGFGGQLAKQLTDDCKKEIYNPKKTGSWRCQGVLFSQRKAYWNLGTLGRCDLEPTDMKCPKADMYAQEFLVLTSVNNIRITPPLQASRKLTEEEREKVINAVRKQQTATESTIRRALGIDKGKNKTLYTLNTEGDKFTVNGDWFYSQIACGVFGEDTWLSFDNGKKDSFNRAILKFDPKDETDENKLKKGCKDWWKIDDRQTENFLAAWKTRPKKESRVNLSRQAIINLLPYLREGWSVTEARDMYAEDASNDADDLTRRRYSTREIVINKRIRHFQDKHPNLLPPVTEGISNPVVRKSIHEVKKHLMEYIRQFDNRPDRVVIELAREARQTEKVISKRIQKNKAIDALKKEIIETHKLDAPGITSTQGERAIQRVRLCRQQREMCAYSGGTITDATAADGSGLEVDHIVPRSRGGDNSMSNLVLCYATANQGKGHRTPIDWLNEEEFGRLELRFKHLKGDKKDKSAITKDNVDMMDNAKWKNLHRKTPKEGFTEEQLRSTAYAATQTTDWINKVLYGSEDRSKRYVFASNGNYTGILRRDWGLFFGEDGERSEKGRKMRGDHRNHAVDAAIIAMTLSCLPKIKQSFVDFEEQKENKNVKPQWKTIEEPWEGFSEQIAEEYKKLKVSHKAYNKQIAGYLHKDTIYGPAVVCEKDKKGDVKVDQDGKPKLKKGLYIKSIPTIGIKQNHLRMPNSWDKLKEEYRNATTKSERKNIRKRMLALEDVPPGKSGVIRDIELRDKIRDWLKEHNFSDMQKAKEYIKENGLIINGTPVRKVRVLWKLKEVKEIPRKRFDFQTGKIVKDDNYKSFRVYQTQNNHHIEIREKENKKGEVKWSGEVITNFDAARRARAEKKPIVDRSENKNGKFVMSLARGEMVYMKHPETQKPNYFVVFKIDSNTTIHFTPHTDANPASNKKKGVRLREDIKKPGNKTGGLKPSDIQYLGVEPNKYAQKVCISPLGEEKVLKRD

SEQ ID NO: 5486 - protein, 1424 aa, unidentified
  REGION 1..1424: note = Description of Unknown: Cas Enzyme sequence
MGNILGIDLGTNSTGLSVRNTDKGRDLKDQLDFYTSIIFKSGIGNGKKGEFSYAAERTKKRSPRRLYQARKYRIWETLKVLIEFGFCPLSKDELEKWSRYDKKKGLKRQYPIDNVKFEQWVRLDFDGNGIADYSSPYQLRAELMHRQFDFSTEIDRFKLGRALYHIAQRRGFKSSKGETIKEHEKKETDDNIESDIDVADEKKISEEKKAKSLVEYMREYNHPTVGSAFAQLEKSGIRIRNSVYQAVRSQYKEEIQKIFEYQKELDSNSDFYKRIISERKGEGSIFYKRPLRSQKGLVGKCTLECDKARCPVSHPEYEKFRAWCFINNIQYRKSADEKLQELSLEQKNKLYNKVFLQTRTNFKFQKIREWLENDIKDSTHYYKLEYLPAKEERTINYKDNTNVSGCPISGRLRNILGDNWEYISIQSQKNRTNKRTGEIHRIAYTANDIWHICFSFDDDEYVTEFAKKDLHFDEEKTKQLVRLWGAIPQGYSMLSLKAIHNINRFLQKGLIYSDSVLLAKLPEIFNNKWDENESSVIESINKIIKQNRNDKFIFGIVNELIANFKSLDSPKFAFKDTEYKLVDDDLNDIKKITIGNVGERSWEKKTTEERQEIILTVEKLYQQFFASSERDYYKLPKLSEALSKYLQNHYAFLSEKDLKKIYHPSMIEFYAPAKEYKIDDDREIKLLGSPVIGALKNPMAMRVLYILRKQINQLLIDGIIEEDTRIVVEMARELNDANMRWAIEAYQREREKENKEFERAIKDYFPNRAISDEDIDKVRLLVDQRDIQENGELKDEIFDANKKKHKSIEKVETYKKDITKYRLWLEQGCRCIYTGKIINITTLFDDNEVDFEHTIPRSISFDNSLSNLTVCDAHFNRTIKKNQIPSQLANYDDILLRIQPWIDKVETMKDNIEFWKKQSQRAQDKARKDYCIQQRHLWEIDLDYWQKKVHSFTLTEVTSGFRSSQLNDTRIITKYAYHYLRSLFNRVDVQNGQYTSDFRKMLGVQNIDEKKNRDKHSHHAIDATMLTLIPVAAKRDKMLEIFYRIQEEKRLNRDISELQCELNKYISECNFGNVSQIGDFIEQNILVNHLSNDQTLTPGKKKMRKRGKEIFVRDINGNIKNKWVTGDCIRGQLHGETFYGAIKQAQKNERGEIIRDENGKIQIGEQILYVVRRDLKYKKNEKDSGFRTWEEIEKVIVDKSMLELIKKQFPDGTSFKDACEQGIYMLDKNKNKVNKIRHIRCKTTIKNPLKIKKQTYSSSKSYKQFYYAEMGDLYVMCKYENQSKTVKEFRIWSLFDICENRKYGLKDIPNEIFSKEGEKLISSQQLKTGDMILIYNENKTELKELDQTTLTERLYVICGFENDGNRIILRKSINAQQEKDLGKGESIKDFNIMPNKIRCGINTLKYIVQSIDFEIYLNHIKFLF

SEQ ID NO: 5487 - protein, 1161 aa, unidentified
  REGION 1..1161: note = Description of Unknown: Cas Enzyme sequence
MSNKKSRIYIEQVQTLHDRLHGRDYSIGLDLGVGSIGLAVIAEEITDDGLVPNEVVFTTSRIFSSSEGAADRRLKRLQRNAIRHKANRMAYLWKLLASLEMMLPYQEKETPDPAVLRFSETCRRADPYRIRYRGLHEKLSLEELGYALYHISNHRGSSSIRTFLDEETTADDKKAQEQLRKTETIAKEKHLSTFIEILVEFNKEKPIGCRNRDKRKNENVPLPTRDVINNEVKQLLGTQAGFYPDILTENNQQKILSAIMYENLKIVPEAGNCPYFPHEQKLPKCHFLNEERRLWEALNNARVKEPFAEDEQFTFDDRHLLFQTLREGKTLTVPLVRKLLPKYLNATITLQGRDAKKQEIKGFRFRTLEEKPFWKRFTEDQQDQFLSIWVNTPDDEQLKSKLESSLFGLSQEEADDALSSIQLIGDYAPIGKTAMMLILKHIEDGMSYTEAIDQCVEDEELQDLRPRTIFDELPYYGEVLSGSTQACIGKAWHSAYKEKVGLASFHKPNTAKEEEKYGRIANPVVHQTLNELRKLMNEVIEIFGKKPSEIVVELAREIKVGAEERDRMSKVQQNREKASEDIYQKYCVPNNLPRKSIQTFRLLDQQGWQCPYCLETINMDDVLNHRVDIDHILPRADTADDSENNKVVAHKHCNLEKGKRTPFDAYSSKPIWSKILNYLDTTEGMYFKKRKFELTDEQYKQRLDSQGFLSRFATDNSYASKIAREYLSCLFKSPYAVRTLKGGETAMLRRSWHIQEIASELASFHYDQEPDLPTDKKDRTDNRHHSLDAIVAGYSTRSYIKKINTMSAQGKCAEEIKENLPIPVQGYHEGLKRDEQIELFKKDIKGFIELQGFVSYKVDNDYNGQLLKDTRYSIVAVNGDDLICLVRKKVKDIKVSNGSADEIKDGMKGKFSFNKGKFAVATTEIVALQKQNDDLFERYLLKLEEAKSFLENKNMELKSIGKKTLRVDAQSISKKALEMCGGSFNLLSNNTRKKVFVVKEPVNGKGGVAFDTGSNLCIDFYHDKSGKLRGEVIRKVNALDTHYVPQYKKNGYVLFERLYQGDVVEIDKETSDLQSRMGISTKSLCGNAADNRVLMKVVTFTETTKDNIQIYLSNLTKSKNGQDTSFYVSNMGDRNPRKITLSSAGLKKFISPILKNISVGG

SEQ ID NO: 5488 - protein, 1694 aa, unidentified
  REGION 1..1694: note = Description of Unknown: Cas Enzyme sequence
MKKILGLDIGTTSIGWAIVEASDEKKANEINGKVAESNINNDRIGIHKDKDGNNAIGVRIISQDTTRFDQGKTLNDSKGSTLTPTAQRRKYRGARRMRNRYKLRRGKLSLLLDFLGMTPDKSFFTNEKGKRGENNDIGKAIYELRDKAIREKISLNEWGRIIMHLNQWRGYSSDRFKSVEKEDSDKGITSQVVAIEKSEDYSTIRREKKKEIPITYNTFIVSFENGDKIVEVRNKEHNESDYKLNDLYTYSFNDSEEIQGLKQVTKKKLNTESWAYKKKQINDSISQWCNLQDSTVGSYFYHNFYKENNVERIRNYTILRDWYEDEFDKIFNCQFENHKVHFQKYNIEEIIKVAFKDYHPILSDIQKKENFKEQLRFLIKDKIIFYQRPWQQAKNKGECPFEFVPDVKKEKDGSYIPNIHGKRGVDKNGNEIFLKGRTVIPRSHPLYQDYRMWQKINNLRIYLHTPSDKIDLFDDPEKFKEIIGKSIEETKELLYQSLQNCKSKAWKSFCADKLDLENYLFDNEEQARVSKKPLFEYTDKSTGEVSRCYFSVNFRKRKKDGTYTDLPLDGNKTKTSIRNILSDKNDAWFDEIHSSNITNLQLLWEIIYDITNSDINKVKEIIQRHFKFDNEAIYLQLANLKFDDQGMGNLSAKAIRQLLPLMSDAQNMTDKTRKRVESLISLNNSTEEQDKDGDEKLECLKDFVSDKKARKRLSSFKSLKDFKYLNYWEAAAIVYGSHSSKHIQTQKEILSVKQHSMNNPIVERIVNETISLVNEIHKVYGFDEVRIELCRELKASMDERQQMWESMNNNQARNEWAKRMLRELKSDNSSLDTETSTKSNLEKIRIIEDVVKQLNPTEYKEKQKEYKLDEPSKAEVKKYLMWLEQNFRCPYTDQPIPLTDVFARNKLVQIEHIIPKERYYSDAYSNKVITWQEVNQAKANNGNRTAYEFIVSKRVENFVKVGDRNLPLVSAEGWKEHVEKMFPKGAKRTNLLRKEIPEDPINRTLNETQYINKKLKEKLAELKGEQKVHITSGSITDILRDKWHLNKIFKEQLRNRFENFNIGENKERQNLVYWTNQFNPKTNKYENIEVFEGFTKRIDHRHHAMDAIIIACTKQNHIQYINSLNAINSVDQENEDSKKDKYEWIKKDVCIGNSSKNFITPWKEDKFITDIADSLNNIIISHKNTRLLISPSKHRVDKNINPNKIASIRGELHKETNYAKRNYFIEESRIPINKLVPQILKDKMDNQNQTMVHFKTFEEIIKETILKIKYQDVLIPLFIKYDREILSKGLCSEISKSILKKIDENKLLINSKTNEPLEWLSTYSNRDKSSRPLGLSMNLNDAKEVKNIADPRIKRLAEYRLKYVIEKKTDIDKLDISTPDKQKLKREIDAIPLYSNAIYEVRLRGNDFHERQKMNLSAYQWVELKNLKNTDVENIEYANKETTITLKNKLKELNLDELRQSYFTNPLFLSKKPIIVKKTRQMSFFQDLYEITNGRYVYSRDVYMTLFFRESDKMNLDVDRKIKFLKFIDAANLISHEKPSKISISKLYKLENRIDDLEYDLLFTLAKNDMVYLPEKCLSNDELLNIDWNNKNDIIQKLYVVKDMEASNEKIVFQHINKADAIKISEADAKSLFKNPDIKEQIEEIKYGTVPMLQRCIKVFTNKLGNKIVPYWEFPNGCWDKKRAVELGLIMPEK

SEQ ID NO: 5489 - protein, 1513 aa, unidentified
  REGION 1..1513: note = Description of Unknown: Cas Enzyme sequence
MKNILGLDLGTNSIGWAVVGSVTDAAEKEILAGIKGCGSRIIPMDASQLSDFAKGNAVSQTAGRRSMRASRRMNERFILRRERLHRVLNLMGFLPEHYAASLDRYGKFIDADDHKIAWRANSDGRQEFVYLQAFNEMYEEFKVHNPEFLKNGGKIPYDWTIYYLRKKALYSPITKEELSWILLNANQKRGYNQLMGMDEQEQEDKSKLVEYLSATVVEVTDSGDKKGKSTWWNCKLDNGMVYKRPSEIKPDWEGKTKEFIITTDLDKDGKPKLNKYGEIQRSFRMPGENDWTLIKTRTEDQVNKSGEYVGEYIFNALLKEPTQKIRGKLVRTIDREFYRAELKAILGKQAGFIKELTDRDLYRQCIEELYPSNDGYRNSIASRDFIYLLADDIILYQRPLKTKKSLIDNCPYESHSYIDKETGEVKTAPVKCIAKSQPLYQEFRLWQFVQNLRIYNNFTERDETSYFIPTEAERVTIFKCLNDISNTEEETFLKEFFGIKKPKGKDSKLPYVWNYVEGKDYPCNETRGPILSRLKKSGIPSSFLTRDIENELWLILYSSESRKELEEALGKFAEKHGLEGTFVENFKKFPAFEKDYGAYSAKAIKKLLPLMRMGEFWSEAAISDDVKANIENIINGNVSASIPQKVRDQLSSYKSISDFKGLPLYLACYVVYGRHSEASDSQLWTSPEDIDAYLNNFKQHSLHNPIVEQVVTETLRTVRDIWRCFGKIDEIHIEMGRDLKSPADKRRQYQMRALENENTNMRIRALLMEFTNPDFKIDYVRPYSPSQQDLLRIYEETVLNSGEELPDYVVDVLRNLGNGKTEQPTHAEILKYKLWLDQKYRSPYTGQPIPLAKLFTPAYEIEHVIPQARYFDDSYNNKVICESEVNKLKSNMLGHEFIDKHGGEAVSLNMGGTVRILTKDKYEDFVKKIYGNERMRIKFKNLMLDDIPEDFINRQLNDSRYISRLMLGLLSNIVRKEGETEATSRNVIATNGSITDRLKVDWGIKDIWNKILLPRFRRMNEITGTNEYTTINKNGHEIPNVPDDMSKGFIIKRIDHRHHAMDAIVIACASRNIVNYLNNSSACKGAKISRYDLQRLLCDKVLQGDGSYRWVIKTPWTGFQNDVYNALNNIIVSFKQNLRVINKTTNYYQHYEDGKKIIAKQMKGDNWAVRKSLHTAIFYREVNLRMIRQKNLKSAIEHLDDIVNRDLKEKLKEFLREEISLAKIKDYFEQEKDTWSDVNLKKIDVYYFTQEDKNPKTGLPKHRFFSTRKPIDMSYTEEKIKTHITDTAIQKIMLAHLAENGNDPNVAFSPDGIERMNDNIVRLNGRRMHQPIFKVPYYEKGHKFSVGYVGAKAKQFVEADIILFYAIYEREAKDKETGEIKKVRSFADIPLNVAIDREKQGLAPAPENENGMKPIMVLSPGDLVYVPTEEEIKDGKLGPSLDKNRIYKMVSSGQGKCYFIPQSVASVIKDKVEFESGNKSQKTIDGKTSIKEVCYPVKVDRLGHIISINGDMI

SEQ ID NO: 5490 - protein, 1494 aa, unidentified
  REGION 1..1494: note = Description of Unknown: Cas Enzyme sequence
MKNIIGLDLGTNSIGWAWIQHEEKEKSATNDKFLIPTGRIIKTGCRIIPMDAEMIGNFDKGNSISQTSQRTKARIARRLKTRFKSRRERLNRLLRLTGFLPEHYAAQLDGYGKISDHQEPRIPWLTTTEGQCQFLFKPAYKEMLELFRQKHPEIKSVPYDWTIYYLRRKALTEKITGEELAWILHSFNHKRGYNQIRDEVEETDNNKTVEYFKTKVKEISSTGETSKGKNIYKVTFENGVEHLVTAKERPQWEGTVREIVVTTLLNAQKDGSPKVTTRMPKDDDWQLIKTRTQDLIKKENLTVGEFIFKALLDDPSQKIIGELVRTIDRNFYIDELQKILRHQEKSHPELTDRTLYKQCVEALYPSNEAHRRNVEAWSMSHFIVKDILFYQRPLKSKKSLIAECPLESRTFQDEQGNLHRTGIKCIPRSHPAYQEFRLWQFLANLRIVQRQSHEDGHQLTDIDRSTEILNEEALVKLFNHLRNVKEINQKNLLKLLGLKEEDYRWNYVEDKTYPMGETRYQLISRLKKAGLSNEVPDDKMEEALWHLLYSISDYAELQRALSTFARKRGWDAEAFRKAFEKCPPFKKDYGAYSLKAIRKLLPLMRRGSHWHETAISPDVYRRIEHFVSGEEDTAISLHVRQIVAEEGLQNISQFSGLAPWLAAYVAYGRHSETTDAQKWETPEELAEYISKFRQHSLRNPVVEQVALETMRIVHDLWQEMGSIDEIHVEIGRDMKQTAAERKKAHDRNLQNEAINLRIKALLTEFMNPEMEIKDVRPYSPRQQTLLHIYEEGAFEKARHDNDAELEEMNNIIDKFRQTDSQKRPTRAEIHRYRLWLDQKYVSPYTKRPIPLAELFTTAYEVEHIIPRARYFDDSYNNKVICEAEINKLKDKMLGFEFIKKHGGGTVNCQGREVRILTPDEYTCLVEEHFCRNPRKKKNLLSEEIPAQFTARQLNDSRYIARFVVGILSNIVREKDAKGRLEPESTSKNVIVCTGKVTDWLKRDWGLQDVWNHIIYSRFERLNDKVKSKRFGQWENKKGKRVFQINMPLELQAGFSRKRIDHRHHAMDAIVIACASRPIINYLNNCSSGEKEHYGLRENLCTGKSRFIKKPWSTFTQDTEEALRDIVVSIKKNLRVITKSTNFYQRYDPKTGKKIFVRQTRGDHFAIRKSLHKDTVYGEVNLQKTGEVKLKEAIKQPGRIVDKTLRQKIRELKRLPNYSDTLIEKFFLQNADPIWKNYDFKKIKVRQFSKDKEATRQVATRKPLDQNFNQKNIADITDTGIQKILFRHLEKYAGKSEEAFSPDGLKALNENIRELNDGKPHHPIKKVRVAEKLGLKFPIGTRGNRKMKFVVADKDTNLFFAVYQREDGKRSYATIPLKEAIERAKQNLPPTPETDEAGRRLQFILSPNDLVYLPTKEELNDEVREEHIDVNRIYKMVSATKERCYFIPHHIAGIIAPGEEYNAKNKIEISDDGLSIKEHCILLKTDRLGRYKLKK

SEQ ID NO: 5491 - protein, 1009 aa, unidentified
  REGION 1..1009: note = Description of Unknown: Cas Enzyme sequence
MSDKTPYRLGLTLGRKALGWCVLDLDGAGRPTGIRDLGVRVFSPNQAAGRDASTGEPLGKRRREARKVRRRYRRVRQRKAQLMVALIEAGLMPEDRSARETLVALDAYELRKRALTEPLSPFAVGRAIWHLNRRRGVCFDRRADRDGTETEAAIERLRQAMDKAGAATLGAFLAGLHAHNQANRQGDTVSVRFRVPPGSTATVPEWMPSRAMIADELKAIWQAQAAHRPELFTEAAFAAVASAVLDQRPLQPSTPGPCCLNPDEPRAPRAMPGIERLELLSALANLELDYPGIGTRPLTQAQRDRLSDVIEDRRGLVRFGIMRKALEVPDAVRFVSERQGGRGIEPMRLSVGLAAILGAAWRAMPLDERNALAAMVIEAETMPDLDDALAHAYGWMTAAQREGIAGLTVPRGHSRFGLTAAMALIPILEGENIALDRAVEQLAAGKEGNALAEDRCERLPHYREVAALRVDLGSGERRDRVADPSLHIGLNQMRRVVNALIDRHGPPARIVVELDKALKQSRVAAAIQRRAVKRSDALEAAHRAWLDAKGIATSWENRLKLRLFEELPENGKECVYTGRPLDREALFFGGVVIDRVLPWHLTLDDSLANKVLCCASVVDRKRDRLAVDAFGGPDAAEFHAVTERAERLLPGKAWRFRPDAMARLEKSGPALGRHLADRQPMARTVRRYLEAVCPYPRVSASPGRLRRWLKHRWGIAALPGREGWGLREKAVDAAIAAALDTGLLQALADGLPDGPVPQPFAGFTERLGTRIADCLVSHRPDREPNGALHRETAFGPVDAEIDGKPFNLVLRRPVGALTPRDLARVRDLALREALTDLAGREGWPLADSVTLPELGATVSRVRVLETGEAVTVRHGPDGRFAKAFQPHGNHAVDILEEPDGRWRGKAVTLFEAAGGASGDGGRWVMRLHKGDTVRMEPPGEMASCWIVRKLDPNNNRIGFVPQDAAGPFAPSDYRHLTYSRMQAYHVRRAEISVLGEMRPGTGKKPAPAA

SEQ ID NO: 5492 - protein, 1064 aa, unidentified
  REGION 1..1064: note = Description of Unknown: Cas Enzyme sequence
MTFTNNPAEPLRYSLGIDAGCASIGWCAVEIDDEDQPVGIHSTGIRRFEAGVEGDITRGRDESKSQQRREARGPRRNTWRRQWRMRKVFRILQQAQLLPPSETDHHDDRHQLLLALDRRLVEDLNLILDHSSAQVVPYTLRAHALDIQLPPYALGRAFYHLAQRRGFLSNLKASRGKDDERGKVKTGISELAKAIDQANARTLGEYFASIDFKEQRIRQRWTSRQMYRDEFEAIWLAQAADHPQMTDGLREQLEAAIFDQRPLKSQKGLVGRCALEPYKRRAPTACLPYQHFRVLQQLNDLKVVCPDGEIRGLKEEELQKLLAEVTEKGDLTWAAVKKLLDMKKSKTYERHYEFNFEEDGDKKMLGNRTASKFSAALGEQWQALGEATQTTLVDSVLTFEDEQPLLEHLQQHWKFTKPQAQAVAELSLEAGYGNISRRAINKLRPLMEAGVPFSAARKEAYPESFESNKPIDYLSPFHEVVPNVRNPTLTRVMAELRKIVNALIKLHGKPVFVRIELARDLKRSRKDRKQLTEQRDQNTKSREKAKEKLIKKEFGEKYATPHNILKIRLADECNWKCPFTGKGIEMGTLIGDNSQFDVEHIIPYSRSLDNSFANKTLCYSDENRHVKKNGTPFEVYSSSKEWEEMLERVRHFQGKTAKRKLQFFQTEKLPDSELFAARQLSDTRYLSRSAADYLATLYGGRTDEKGKLRVQASPGRLTAILRRAWDLNRLGIGDPDDPNQKDRADHRHHAIDAFVVAVTNPGTVKAANDAAARAEDYYSRELLSDMPLPWDGFSWKELGDKLDEIIVSSRVNRKLNGKLHQDTILSKPYTIPDPKNSKQTKTVHHVRKPLASMSRGEVKAIVDPAIKEAVLEKLAKIGGDPSKAFADPNNHPYLTAKDGRLIPIHSARIRKADKTIEVGQGSRLRHVCPGDNHHMEIMAVFVKEGNHQKWEGHIVSQFEATRRHRMQEPIVQKNHGAGREFVFSLTNGEHVVVPGDEEGTEKILRVAVISGQKVEFVEHCDARPITIRKKAPGARIYFSVNSLRKAGGRKVSVTPLGRIHPAND

SEQ ID NO: 5493 - protein, 995 aa, unidentified
  REGION 1..995: note = Description of Unknown: Cas Enzyme sequence
MSKVLGLDIGANSIGWALIDDEENDIIGAGVRVFKEGVNLKGVKEESKNVERRAARLARRQHKRRSQRRNRLVALLKTLEMFPENNEDISDYYAQDPYELRKKGLYEKLTMYEFGRVLLHICRRRGFKSSRKTDISEEGKIFEGKDGIVGINQTRDSIREGGFKTIGEYLASLDPHVIRRRNRFTLRDMYEEEFNLMWEKQQSFYPLQLSNEFKEAIAEVILSQRKLKSQKALVGNCGLEPNKKTAPKSSPAFQYFRILEQLSRILISIPHTGRYNDPLNEEERRMLIDKLSVTEKLKFSDMRKMLNLPGESDINIEEEGGRLLGNTTYARLIKVFGKKRWAGFSEEEKEQIWHTFHFADNHEWLKEYALKKWSITPDEIKELGKVALEKEYARFSKKSLKKIIPQLEEGLTLDKAKIEAGYTPEYEIEKSLSAYLPLPENIRNPIVQQALYELRHVVNAVIRTYGKPDIARVELAREMKKPKQKREKMRSELRKRQMKFEEIKSILKERLGFIDPKRDEIHKYMLWEECRETCPYTGRKISLSALYGGDFEVEHIIPYKRSLDDSLFNKTVCLREENQIKGDRTPYEAYSGDRQKYEEIILRVQKTSMPRGKKNLFAIKELKDDFAHRQLSDTAYISRETRKYLGSTIKKVQAVKGGSTAKLRYYWGLNSILGVRDIKMRDDHRHHAVDALVIANTTYAFVNTLSRYHSMDVEPHESRFPLPWEQFRNDAESVVRNIFVSHRLGKKATGQLHEETYYGKIRNTDGEPYFVVRKKLGTLTAKQIANIVDPVVKTQVFERLEEKGIDIESSNKIPADAFVETLYMPDRKTPIKSVRVKVPSTTMIQLYKDKELYVDPGSNHHIVIFENEEGKRDGIVVSLFEAAQRLRRNEPVIQKTWKPEWHFVMSLSIDELILLDVDEKNIDWGDTGLALRYSKALYRVQKMDVNKIITLRHHLVARLKDDEGKEFGREHRIPSTLRGLKVKIDHIGRLRRAYD

SEQ ID NO: 5494 - protein, 1461 aa, unidentified
  REGION 1..1461: note = Description of Unknown: Cas Enzyme sequence
MKRLGIDIGSSSLGWLINEDGKIIKKGVITFDTGMKKGQSGGYVSPTSERRGARLKRNLIRARKYRKWALLEVLINEFCPSDKQEFEIWSKYKKGQTRKFPENKQFLQWLACDFTYLEGGKKYKNPYELRVCALDNKVSKHEFGRALYHLVQRRGYKDIGETDTETKKQIKRRGESGFQQALEKYKVLSKALKYDFLDKSERARNQYPYRDEYRNELELICQAQGYDISKDEKGYYNNNFVAKLWRAIIWQRPLRSQKGNIGKCTLEPNKLRCPISHPVFEIFRAWSFINTIKYYDENDEKLPLSSEYRKLLFDWFLNKDKSFKFEEIRRFLDRKFGKFKKYNYPLDKNQKNDLGKYTDGVYDTSVSGMPICKGLIDVLGEQALQALNEIGFFNNGNAPKIIEHYSVYDLWHILFAFDEKTATEKNFLEKFVVKKLKINDEQKREKFIKLNKSMTAGYADLSLKAMCKIIPFLKEGYLYNEAVVLAKIPELFGENWEEAKEKVMNVIKEANKLYEWNKTVNEIANNLIDKYKSDPYFAIRDCQYELDENDINEVHAACEGKFGKESWKKQKDKNEIIDAVTEKYQEFFKDEKRAYRALQTLTEIFDEILKEKKINIDSKQLYHHSNLENKYLEKYKVDAETEKRILPKAKNKFGFDVDILPQAIIDSIKNPMFNKSMSILRRLINELIKNNEIDKETEIVIELARELNDNNKRIAIERYQNERKNNRAKYREFLEEFSRKEQRNLNIEESIPAFELWTEQTFEETTDEQGNKNTNQNRHEILRVKEAIKRYELWTEQKGQCLYTGKMIGISKLFSSEIQIMHTIPRWILPDNTMANMSVGYQFYNNDLQKEKLPTQCANFYEDADGWGTRIEPRLENWRKIRDNFKKQYEDRLKAKGNEDENTKNKRIQDKHYYKLHYEYWNDKLERFEATEVKDSWARRQLVDTQMVSKYAREFLKTYFMKVSVQKGSITSDFRKIFGFQDEDEIKSRNMHTHHAIDALVLTLIPNNSSHRERILKEYYKAIEENRKADIEALKNSELVQGINVQKLITEIENSTLIFNYEKDKTLKQTNKIVRKREKKQYLKDKKGKFVLDEKGNKILLKAKGDTVRSALFAQTYLGKIKDVERFDDGQPKREKGDWKYKQGKDEFVYVVRKPIKDVLSNINDIIDPKIRELIRKQNNKAVIKDFQGNVIRHVRIKVKAGKEVKERINYRSKHEYKNKFYSESGSIPYAVFLQKSNNNGVERKMIPMASFEIAKVYKKADAFDIDKYIQEYYPSYKEQEWNKQLLKTGQKVFVLKNDKEIENIENVEFQKNRMYVITQFKYDGSKIMLKYHLEAKSTSDIDEQIKSIKNKLLKINEQELGIPLIAENENITDVVERKKDYKKRNENFTQRLKIIEKNSDDKTAKRLKEKIEQYKTESSSIIIEGKTPILGLSKNNWNFLFEGVDFEMKLDGTIIFKNPM

SEQ ID NO: 5495 - protein, 949 aa, unidentified
  REGION 1..949: note = Description of Unknown: Cas Enzyme sequence
  MOD_RES 352: note = Any amino acid
RAKGLDHALTPAEFARALFHINQRRGFKSNRKTDKKDNDSGALKAAIKQLHAAIDPQGRDGKPRTVGEWLYQRHKQQQTVRARFRQERVLGEEGRTRIEKSYDLYIDRAAIEAEFDTLWAKQAELDPAQFNETARKELKDCLLHQRPLKPVKPGRCTLISDEPRAPLALPSQQRFRIYQEVNHLRILGEHLQEQSLTLDQRDKLVAELDCKSKLSFTQIRKLLRLPGTTQFNLEDAKRQEIKGNTTGAILSRKDLFGQAWEQFDGTRQDAIVMQLLTEENEARLVQWLQDQTGVDEARAEALANVSLPEGYGSLSARALARILPELRREVITYDKAVQAAGFAHHSDLGFEXEHGSDEVERVGERVIQSTGEIKQVHAFKQLPYYGRALQRHVAFPKDNPRNDEERYGKIANPTVHIGLNQVRAVVNALIKRYGRPSEVVVEVARELKQNKEQRERVQQTQASNQRRNERLRKEAAAVLQCAEERVRRSDIEKLVLWEELSPNAADRHCPYSGVQIGKEMLLGDRVEIEHILPFSQTLDDSLNNKTVAMREANRIKGNRTPWQARADFAAQGWDYEGILSRAEQMPKAKRYRFGEDGLQKWLREDQNFLARALNDTKYLSRVAREYLSLICPQGTRVIPGQMTAMLRAKFGLNDILGLDGEKNRNDHRHHAVDACVIGVTDQGMLQKFAQASADARRKQLDRLVETMPLPWPTYREHVARAVHAIWVSHKPDHNYQAELFDQTIYNAQGFSKIAAKVRSVIPFHARSGSLSEQRHKHRPYKGLLSNSNYCIEIVHASNAWEGEVIPTYKAYEFVRAFKNNNPGCSEKEAFNALRSITSSLTGKSLVMRLSIDDTIRVEIDKTTETLQVLKINSSGSITFIRANETNIPNRYTAKLAAKKLAAEGKEFDEDALNDNFFQRAISASSLRELKARQVTISPIGELRDPGFKE

SEQ ID NO: 5496 - protein, 1439 aa, unidentified
  REGION 1..1439: note = Description of Unknown: Cas Enzyme sequence
MGKDYFLGLDIGSTSVGWAVVDNDYKVVRKSGKALWGVRLFDEAQTAEDRRKFRTARRRGDRRKVRLGLLREFFEEAIGKVDPWFFMRLKESKFHHRKLKNDGTSDKSDPIQDVPWIIFDTWEAEKAFHTTYPTIYHLRKDLMSSTEAKDPRYVYLAIHHILKHRGNFLREGTFKEAQAFGPVWQTLCEAIEAEFEVQIASKEDETKISDCLKRDEKKEARSKSLLSLLTFEASEGAEDALASDKKFQDAFAGLLCGRKVDLVSIFGKEILSEEEEGEKKGYKITFEDDFDAKADEHLRALGDDNNDILLKFKAVYDWSVLAKTLGKHNFLSEAKVEVYENHQTDLKRLKKVLKAYGPKVARAMLAQDAKDKEANYCTYVGRCHVNRQDVILKKHSTQEKFYESLKKVLKKIETEKAGVCFAKEASEILTEIDLGKFLPKQVNKDNGVIPHQIHLMELERILENAGTYLPFLSEKDDVGLSVADKIKKLLTFRIPYYVGPLNPTLADPKTGNRIFNYAESLNDKHKQEGDDGFSWIAKKKPDVPVLPWNFEDVVNEEECANRFMRRLTSKCTYLTAEDVLPKNSPTYQEFMVLNAINNLSIHGSRDSFTPELKQKLFHALFREKSGKVSKKKIAEFLRCDFAGKIEAENIGGIDDKVEATLSTYHAMKKIFGNAMPSLEEQEEAIRLLAILGQAPKMLKTRMAVLFSHADEKQLKALCAIPAGGWGRLSMKFLKGIVGWDKESAGECFSLLELMWQRNKNMMELLHGSNFLNVINTENNKQPGHDRLTYDAVDSLYVSPAVKRPIWQTLTIIKELQQILADKKGEGEEKFTFKKVFIEVARDIDEKNEKKKPKSRKDKLVELYKKCKEEEREGLLSSLDNKADEDLRQDRLYLYYTQLGRCMYTGRHIDIESLNNFNVYDIDHIYPQSKVKDDSLSNRVLVCREHNARKEDKYPLPPEIRDNMADFWQLLRAKDLISKPKFERLKRQTDFTADEEANFVARQLVEVRQSTKAVAEILKRAMSKTEIVYSKAGNVSDFRQLVSGNDADLGGHLEFVKLRDLNNYHHAKDAYLNVVVGNVYHEKFTADPRVFFATMKDKEGYSMKPKSIFGADLEQGKDDNKRLIWTCGREGTIQTVAVQIAKNNIFVTRMVTETKAGFYDQMPVKKKDSLIPLKSNDPRLQDTTRYGGYNKDSGAYWILVEHTVKGKGKKAKEERVRSLEYVPVRYAKSVETDDTFLQQYCREELGLENPDIRLDKIRAKSVIKINGFPFCVTGRSGDGLIFHHCVELCLAPDEVKCLKAVLKFVERRKEAKRNKRELGYRVEYDGFTEADTLHLYRSFLKKFESGIYKKSNTLKGWAKTLNSGVNHFDALSIEERCDVLAEVLFFFQCNRVYSDISKIGGQSTTGNIKISRTVSNLDSAILIHQSPTGFYTQYVDLLTV

SEQ ID NO: 5497 - protein, 1063 aa, unidentified
  REGION 1..1063: note = Description of Unknown: Cas Enzyme sequence
MREEINYRLGLDIGITSVGWSVINLDKRRIEDLGVRIFNAAENPKDGASLALPRRLARGRRRLLRRKAYRINRVKSMLINNNFLSKKELDNLFNNKEIIDVWEARVKALDELISGQEFAKILINLAKRRGFKSNRKNEAKEKETGQILSNIIKNKQRLEELNYRTVGELIYKEAQNSNDPYKAYRNKEGQYDMCVSRDMIREEVHAIFEAQRSFNNPFATDEIEDEYLKIFDSQRPFSKLEELEKMVGYCTFEKKKHKRAPKHSISAEEFTLYDNINRLSIICNGNKRNLSTNERELIVNEAFKKKELKYSALRKLLLLNDEELFSPLTYSIDKDISKTENTRFVSLAGYHEIRKAIEHGVNKEYWKTLSKDRNKLNDIAYVLTLAKTDDEIKKHLLKRGIEEEAIEALLDISFSKFNNLSIVALERILPFVKEGYQYSEACEKAGYNFKAIYEGVKTKKLPVIEIDEIVNPVVVRALAQTRKVINAVIERYGSPVGINIELARDLAKNFKDRKIIEKEQKENRVNREKIREELKSLFGKEPTSMEVLKYRLWEQQRGECAYSQQGIPIDKLFEPGLCEIDHIIPFSRSFDDSLSNKVLVLGKENQRKGNRTPYEYFGADEDRWHNFEVWVKGNKLGYKKKNSLLKKKFSPEEVNEWKARNLNDTRYITKFIANFINNRLEFKSSDKAQKVITVNGRATAYLRAKWGLNKVREDGDKHHALDATVVAVVTQSLIQRISKFSKANELKYITSNHELVDIETGEIVNLEEYKEIRKDLLPRPWRGFSEELKLRLSEDPHEELKKSPFESYDKDFIENTVRPIFISRVPFRKINGKLFKETVYSKTAFKENGYITKKKLTELTKKDLSNFYNYACDKKLYDAITARMEQFDYNAKKAFAEEFRKPTKGGSLGPMVKSIKVITKVPFNNGIELNEGLVAKEGMVRIDIYEKDNKYFAVPVYRYQLANGIIPKKAALAAKSEELWPEMTDEYKFKFSVYKNDLIKIEYNKKQGFFGYFDCFDRSTASMTIENHDNSNRFRGVGIKSDVKKFEKYEVDVLGRYYKVKRG

SEQ ID NO: 5498 - protein, 1328 aa, unidentified
  REGION 1..1328: note = Description of Unknown: Cas Enzyme sequence
MGKKIYNIGLDIGQTSVGWAVVDDNGHLMRHKGKNMWGVRLFDKGQTAATRRMYRSTRRRLARRKERINKLQEIFAEEINKNDKNFFIRLKESFLYTEDNSLLSTSILFDDKNYLDKDYYDTYPTIYHLRKDLMNATEKRDIRLVYLALHHILKYRGHFLYGKTDFSQMSVNIQTDLEFLFSKLFNDEYNITTIDFDKLKDILSSADKASIKQDKLQALMISKDKDINNKIKEIIKAILGYKFNLSKLFVLEEMDDINKKISFKEGINEEEIESILGEEIEVFHALKSIYSWVTLEELLGEVKSENPMDKTISNVMIRKYNNHKKELQMLKKLVKDICPQEYNNLFRNEGKDPNYTKYIKKTKDCSLEQFNKYIIRILNKYPKAKEHQYYSKIYEKLKSNQLLAKLNTIDNAVIPYQLHKIEMERIIDAQGKYYPFLLKNKTLLVKILVSKLPYYVGPLNSHSEFAWIEKKYPNQSHQAIYPWNYQDVIDIDKTAEKFILRMTNKCTYLKEEDVLPKYSLIYSEFVLLNELNKVRINGKLMDKNIKKQLIKDVFQIKKTVKTEDIIQWVRLNPHGFITHPSDEILVEGTQKENEFAASLFSYNSFKKLFGKIDNSNIKMIEEIIKWVTIFEDKEILQRKIRRKYNLKKEEIEKILMFNYSGWARLSKKLIDEIRTYKDPKFYGYTILDIMRETNYNFMQIINDQKFDFQDVIKRANPVLNREKVTYEDIKELQGSPAIKRGIWETVKIIKEIVYVMKCEPQNIFMEFARSDEVSKRTISRAKKMKNLYDVIKKDVDSYNYEKTYNELYECIKNNNKLDNKALYLYFTQNGKCMYTGESLNIEELSLYQIDHIIPRSYIKDDSLDNLVLVTTKANQLKKDNLILDREIRKNQKDYWDNLYKYGLISKKKYNNLNRSVIPDQEIIKFINRQLVETRQISKYVAELLSEVYTDTKIISIKAKLISNYREQYNLYKNRDINDYHHAHDAFLTSVIGNFILKKYPNFEDEINIKKYIKTFKEKNMHQDHKNKYGFILTAMNKDHQEYKFEWIKDKEISQVKKVLSYKDCFITRKVEEQTGAFYDETRYDKNNSKAKIPLKKGLDPKKYGGYSSLKHAYYVAIEYVKGKRKVRKIVGIPRHEVKNIKKEGLEPYLIKVEKISKKDTLKILKKKIKKYQLINFQGHMVYLVSDKEQRNAVQLIVDDKYQELLYKISKNTILTDSEKIDQYNGLMITFFDDFIEKLKKHYPLYNNIMKDLQESKSDFMDFEFDKKVNFIKQLLLITCAKPTVGKFKDFKTNLKTEEAGRMKKTWNLDKMIFIDQSITGLFERRYHL

SEQ ID NO: 5499 - protein, 1375 aa, unidentified
  REGION 1..1375: note = Description of Unknown: Cas Enzyme sequence
MEKSYSIGLDIGTNSVGWSVITDDYKVPAKKMKVLGNTDKKYIKKNLLGALLFDSGETAEATRLKRTTRRRYTRRKNRLRYLQEIFGKEMAKVDESFFQRLEESFLTDDDKTFDSHPIFGNKAEEDAYHQEFPTIYHLRKHLADSPEKADLRLVYLALAHMIKFRGHFLIEGQLDAENTDVQKLFNDFVETYDKIADESHLSEVEVDASSILTNKISKSRRLENLIKQYPTEKKNTLFGNLVALALGLQPNFKTNFKLSEDAKLQFSKDTYDEDLEELLGKIGDDYADLFTAAKNLYDAILLSGILTVDDNSTKAPLSASMIKRYEEHHEDLEKLKTFIKVNNSDKYHEIFKDKSKNGYAGYIENGVKQDIFYKHLKSIISEKNGGQYFLDKIEREDFLRKQRTFDNGSIPHQIHLQEMRAILRRQGEYYPFLKENQAKIEKILTFRIPYYVGPLARKNSRFAWAKYHSDEPITPWNFDEVVDKEKSAEKFITRMTLNDLYLPEEKVLPKHSHVYETFAVYNELTKIKYVNEQGKSFFFDANMKQEIFDHVFKENRKVTKAKLLSYLNNEFEEFRINDLIGLDKDSKSFNASLGTYHDLKKILDKSFLDDKTNEQIIEDIVLTLTLFEDRDMIHERLQKYSDIFTSQQLKKLERRHYTGWGRLSYKLINGIRNKENNKTILDFLIDDGHANRNFMQLINDDSLSFKTIIQEAQVIGDVDDIEAVVHDLPGSPAIKKGILQSVKIVDELVKVMGHNPQNIVIEMARENQITGYGRNKSNQRLKRLQDSLKEFGSDILSKKKPSYVDSKVENSHLQNDRLFLYYIQNGKDMYTGEELDIDHLSDYDIDHIIPQAFIKDNSIDNRVLTSSAKNRGKSDDVPSIEIVRNRKSYWYKLYKSGLISKRKFDNLTKAERGGLTEADKAGFIKRQLVETRQITKHVAQILDARFNTKRDENDKVIRDVKVITLKSSLVSQFRKEFKFYKVREINDYHHAHDAYLNAVVGTALLKKYPKLAPEFVYGEYKKYDVRKLVAKSSDNHSELGKATAKYFFYSNLMNFFKTEVKYADGRVFERPDIETNADGEVVWNKQRDFDIVRKVLSYPQVNIVKKVEEQTVGQNGGLFDNNILAKPEKDDKKKLFPIKNSLSTTSYGGYARATIAYSILIVSESRERKELKLLGLPLLDKVKYEKNPTAYLNGIGIVNIKNIFKLSKYCLLEFKEKSITYHRYMVSNQELKRANQLSLTCKETELIYTYIKSGEDNIQLDGNEKVILSLWNKMIAFMEQTKLIDKKLFVSLKELKDEVNLINILDIASKSIDFTKISAGQKKIVLNDSLSLPIKRWQFKSDEKMLKQLNDATLIHQSVTGLYETRIDLSKLGEE

SEQ ID NO: 5500 - protein, 1386 aa, unidentified
  REGION 1..1386: note = Description of Unknown: Cas Enzyme sequence
  MOD_RES 287: note = Any amino acid
MKKQNNYYIGLDLGTNSVGWAVTNEKYELLHLKRKPAIGVNTFEKAKTAEQRRNYRSTRRRLARRKQRVLLLQTFFAEEVAKKDPTFFLRLNNSPYFKEDKHHSLQDTKFSLFNDKDFTDKDFHKKYKTIYHLQNDIISQPDKKFDIRLVYLAVHHLIKYRGNFIKQDENINVAEFTNSLVTDAFQELAHYFEDTDLIAAQNFFVNENVRKYEAIVSDKTNGGLKRATDKIFEQFEIKDKTLKTLLSLALGKVTRLNQIFSDEIVDDEQGKITIDFKSISYEEKYNXIKTVIGEVNIVLIDELKRLYDYFVISRLMDGKTLVAEAMVEKYEKHRSDLALLKKIFREHASKEDYRKVFTTLYTTDDKGKKKVITDVNYPRYIGKKSPYVIVKKGDYADFKKFLNKMFKDLGLLSLNDVIKVQEGLDDETFLPLINSKDNATIPYQFNEYQLRLILENQSKYYKFLNEKVDESSLTTLEKIMSIISFKIPYYIGPLVAEDNHPFAWVKRKSFEKVTPWNFSDVIDEATSASRFIERMTNKCTYIPTEDVLPREAILYQEYLALDVLNNLKINGEAIDNYAKQTLLTALYSNKTPLTKKRIATILAKNKNDVVAVSGIDDDVKLAFTSLHKFKAILGENQDLTIEDMEKIIFYRTIFTEQKMFNKKVDELLGHRLSEELCKKIKQLKFKEWSRFSNAFLTGFSKTLNKPVLFDEKTGEVISIIDIMRNNVLSLQQVIHHEKYGVLEALNKYNESMKTNENAFEDVYNLYLSPSVKRPVIKAIHLVDEIIKANDNKLPKKIFLEVTRHDDFARKGTKTISRKKQLDDLYKIAVKESKDLKDLMDELNKKTDADLRSRKLYLYFLQHGKCLYTGNPIALENLVMGDYDIEHIIPQSLITDDSLNNICLVESNINKAKGDVYPLPRTIVNVEKMKPFWERLMKRGFMSESKYQRLIRMSELTEEERFSFINRQLVETSQANKAVAKILEDRYGKGSVVYSKAQRVSDFRHKFKLLKQRDLNKAHHAHDAYLNIVVGNYNDAQTRLAYINKQTGKNFKFNPATAFEEKSFLDVWDKKSNLATIKAVLSRKNILFTQGTYISKGEFYDQQLSPAGEGKLTPVKESGPLSDTTKYGGYSSLNISHFALVEIPKKRGSERRLIQVTRLHFAKIASGKMTLEEYLITYVGLENPKVIIDVIPLNSLIKRGKTIRSISGFDSGNTLIAHNHQEPFFSKDIEDSYYYLNRYLREIELREKEDTELLTSNEPYTIIIGNRNEKEKVQKIVISKESNEKTYLELAMHFAKDIYEHIFRGVNDTLLSNLDNFKTKSIYEQANIIKQLVMLLQTGALPASINLTSVGLNKSINRNRNINLIEKGDKLLIQSITGLYDKEICLA

SEQ ID NO: 5501 - protein, 1506 aa, unidentified
  REGION 1..1506: note = Description of Unknown: Cas Enzyme sequence
MKRILGLDVGTNSVGWAVVNQSKDGEYGTIEKLGSRIIPMDQGVMDQFAQGQTESTTAERTRYRGVRRLRERSLLRRERLHRVLHVLGFLPAHYDESIGWNRNDNKTYGKFLPGTEVKLAWAATDEGHRFLFYDSYLEMLEDLKVHQPSLSKTSETPIPLDWTIYYLRKKALTQPITKEELAWILLQFNQKRGYYQLRGEEEVVDDSKKEEYYALKVVKVELDTENRSKNDWYNIHLENGWIYRRSSNVSLDNWVGLTKEFIVTTRLDAEGNEKLNADGEVQRSFKNPSEDDWGLIKKKTESDLLKSGKTVGAYIYDSLLTQPNQKIIGGLIRTIERKLYREELEAILTTQYQYNNDLQSDELFQKACFELYPKNENHRKNLLTKDFKHLFIEDILFYQRPLKTKKSLIANCPYEYRVFIKEGKKEIAPIKCIAKSNPYFQEIRLWQFIDNLRILEREVEVDGSIAYDVDVTANFFKNETDWVNLFIWLNDKKSVKQDELLGQFLGLKKDKGKKEHNYRWNYVEDRDYPCNETRALLLKALSYCEAEDRLDDFSFTYSLWHLLYSVEDKIELKSGLEKFALRHQLPQLFVEQLLNTPPFEKEYGSYSEKAIKRLLPLMRRGKYWDIDTIDNKTKQRIQRIIDGEVDDSISIRAREKLEGYRTLEQFTALPLWLAGYVVYSRHAESGDVTKWDSPEALAHYIQVEFKQYSLRNPIVEQIVLETLRVVKDLWSLYGDFSEIHLELGRDIKNSASVRNRISTRQQENENTRQRILNLLMNLKKEARYAELNPYSPSQQEKMRIVEEGVLNAQSQLPKDIEKIATSAKPSSKEMQKYLLWLDQKYCSPYTGKPISLARLFTSDYQIEHVIPQKRYFDDSFSNKVICEAEVNSLKGALLAHEFIQKEGGSTITVGTTTVEILKSQEYVALINRTYGVKNKLKAKKLLATDLDEVIDGFSTRQLNDTRYINRVMMRLLSGVVRDKDEAESTSRNVIPCAGRVTSVLKHHWGLNDSWDKLIQPRFERLNKMTNSSDFGVWVASNRFQIRVPFDLQKDFSKKRIDHRHHALDALVIACTTRNHVNFISNSYSRDVKDRKGFRYDLRALLCEKEYNKGSSDNYSYQFKKPWNTFTEDAYVALREIVVSHKQNTRVLTKANNKTEYINSLGKKALQPQTKGDHWAIRKPLHQETIFGRTTLREVKTVSLKNALENNWKALVSKLLKQSIEDLIFQYGGKYDAKVIFKYFKDREYQFNGEDIRRVEVYEYNNNYAATRKAIDDTLTLKQIDRITDVSIQNILKNHLEKYEGNLKEAFNPEGLADMNKNIKALNGGKNHCPIYRVRLYEDMGAKFALGTTHNNPDKFAIAAKGTNLYFGVYEDEEGKRSFDSIPLHVVIERLKNKQSPVPPTYKNNQLKFYLSPNDLVYVPTEEEQKNSELVDITNLSIEQKERVYKVVSFTGYQCFCLLNSVAQSIVDKKEYSALNKMERAIDGTMIKQVCWKLKVNRLGKIEKICK

SEQ ID NO: 5502 - protein, 1810 aa, unidentified
  REGION 1..1810: note = Description of Unknown: Cas Enzyme sequence
MKKILGLDLGTNSIGWALVEIDHEKRIVKIIGLGSRILPMDAGEIKNFESGSTKTKSSAAQRTEYRGKRRLIERQLLRRDRLHLVLDLLDALPTHYKLEIDFTNEKGKKSGKFKTNKEPKLAYLPKQKGKKAEFLFMESYQEMLNDINNDKVQNIKGRKIPYDWTLYYLRQKALSEKISLEELAWVLLSYNQKRGYEEIEIEDKSTKDSEIVEELDLRVLEVFEKQKDGKKYFEIHLDGNDKFTYNEYSEIQMTFKDDLKEVVKISKVDDEGNIDKSKTEYKITDIYSLEIDKFNYERIDAKNKYTLTYQNGWTETKTTTNNYYFKYQNALKRPYDYVVETIYDNNGNIKTQQGKERTLREPDFGDNSSDWTLLKKRTEKEALDFNSKNNFYHENGDVKKFISPKIYSILKEDALQGTQTKIIGGMFQVVDRDFYREELNQIIDTQRNIHTNLKDKEIFEKCVKKLYPKNKNHQKSLIENQYAIRHLLVEDILLYQRPLKSKKSEIANCKYEIQYWKNIKDKNGNPLEEVDIETGEVRIKKEPIYNKVVSTSHPYFQEFRIWDKLHNLKLIQLEEEVDGKILTNQDITKNIFKSSKEYQELFDELNNRKSLNQEQFLTYCKKKFKINYNSKESNFVWNFPEDEELKGNETRVSFATRFKRCGFSNYKDFLSLKKEFELWHYLYSVSYKERIANNKKSITTFFNNYFKDFEIDKEVKEKIINDFSNYPKFASNYCAYSEKALKKFIPIISLGERDKEYDWTNKKWYTNWQATLEERKLEILNRLKNIDFNADEPDYSEVKLTNVDFSKGELPFPKGLFNVFKDFTHTKDFNRLDLTKASYLIYGRHSELAFAKCWQSPEQIREELHQELKQHSLNNPVAEKVLLEMMQIVADIWEYYGDSKKDFFSRIHVEVGRKLKQSAKEKEAETNRISKNRNQNKRLRQILEDFLDNQSYNAKPNNSDHFERLKIAEEGAEHRSNNDKEFYEKDEKLKAKNITKKDIDEILKKTHITQQDFEKYKLWIEQGYRSPYSGRMIKLTDLFDGTKYNIDHVFPQASITNNSLSNKVVCELEINKEKSDQTGRDFINNPKKRTISCEAHKTIDNPDGNVDILNDENYVSLVKRLFSGTKRYILLSKEIPKGFISSQLNTSRHIARKAIELLSHIVREPGEVEFRSKNVLPVTGAVTSELKQAWKLNEVWTELVAPRYIRLNELTKSNIFGKWQKSKNGQEYFDCNLDDTIRNKNEDYDIKRIDHRHHALDALIVALCTEEHVNYINNINANAKSSDYGKQKQIEKYRQTLKRKIKFTKKDDTSNENDWYYMLPGEKRMDNAENSNRSSVIDMSYNFKDYDTFHRNYKKMILTALQQTIVTFKQNLRVINNRVNYYQAEPNTKKRVEQEPKTQKDINNSSNKYNWGIRRSLSKETFYGKRILNDKEIRVERELLNTTFTKAKINKITDKGVQQILLNHISQFDTIKLPFEEAIIYYEALLEKEEFDTIINNNEKNINSPNDLFQYLREHNFKYDKSDYTNLNIFINKVPNINFRNQNLNNGSVTEHPEIAFTPEAIEKMNEPEEIKRLNNGKNHKPIKKVQTFQDIGKERPLSENQLSVKSKQYVVTAAGSNLYLGFYERTYLDKNNNKITDRKFQDIGLIDLIELLKQETSKRFNPLPNRIFDNKMNEYNWKFTLSPLDLVYVPTKEEIDCPESVDIENMTKEQIERIYKYVDGSKDYANFIPYSASTPIWRFHGKKIKKQIYDELKDKNKISISEEELIQNEFGLGSQQDKNQNMIDGVTQIKKICWKLEVNRLGQIKKVLR

SEQ ID NO: 5503 - protein, 1071 aa, unidentified
  REGION 1..1071: note = Description of Unknown: Cas Enzyme sequence
MKKYVLGLDIGITSVGYGIIDIESGEVIDCGVRLFKEGTAENNLTRRTRRGSRRLNRRSNQRLLDLIDLLIEEKIIINDKDIDFSINPYEVRVKGLNNKLNNYELAVALYNLVKRRGSSLETVEDNETSDEKSSKAALAENDKLLKKGKYVCEVQLDKLNNNNKIRGLSNNFRTKDYVKEAKQILSNQSVSEEFKKEVIKLIKRRRQYYEGPGSQKSPTIYGRWIDFDQEKPIDLIEKMRGKCSIYKDEPRAPKSSFTACLFNLLNDLNNLTINQNEKITTEEKEKVIEIIKTKGSITPKQLAKLLEVDIDNISGFRINTKEEPLLTTFDGYKAIKKVLDESELYLNTNLVDDITEILCRTKGLEERKELISKLSDKFTTEEIEGLATLTKITGYHSLSLKAMKEINKEMLSSDLNQMQIITLKYKKDDNISKYKGRVNIQADDESILSPVVKRAQREAIKVINRLRQIHGEFDSIVIETTRDKNSSEEKSRIKQMQDRFKTQNDEAEKLLEEAGYSIKLNGKLREKLRLYKEQDAKTAYELRPIDLHLLISDHTAYEVDHIIPISISLDDSFSNKVLVTRYENQVKGNLTPIEAFNQGKFSQSKEVFIANTLTLRKNHGKLYEKKKGYLLYDKDITKFDNMKEFINRNLVDTSYANRVVLNTLQDYFKANNINTKIHTVRGSATYMFRKRINIEKDRDSEETGYAHHAIDALIVASLKKMPRLNFILSKYKNENIIDEETGEIINIMEYKDYFDQKYINFVNKLASLEKDVVKFSHKVDTKPNRKIADETIYSTRNIDGVEKTIKKYKDIYAKNETKIANDILKNNYEKYLMYRNDPLTFEKLVEITNYYKNLYKNDSKIFNATKNEFKVNPFFLYLEENEKKITKYSKKNNGPEINQIKYIEDNLGNHIDITHKYDTNNKKVVLLQISPYRTDFYYSKKEGYKFVTVRYSNVRYHSKEQIYKIDKDWYENEKNNKKIDETFDFCFSMHRDELIKIVKNDENENDVPIVKFTATNDDKTNQIEVKPTNYYEKKQLRLTIGKRIKLLEKYATDVCGNLYKVNNQELKLEFK

SEQ ID NO: 5504 - protein, 1420 aa, unidentified
  REGION 1..1420: note = Description of Unknown: Cas Enzyme sequence
LLLLLQFKYNDMKKIIGLDLGTTSIGWAVVNEAENDSEKSSIVRLGVRVNPLTVDEKNNFEKGRPITTNSDRTQKRSMRRNLHRYKMRRDNLIEVLKREGFITDQTILAEHGNNTTFETYRLRAKAVSEEVSLEQFARILLMINKKRGYKSSRKAKNEEEGSLIDGMSIAKELYEKDMTPGQYSLSLLESGKKTLPDYYRSDLQSEFDKIWSVQKTYYPNQLSDELKDSLIGKNSRQTWAIIADKTVWPQEVKQWNETLAKTEHFVREYKLKGIKREGKRDEQKLENYKWRVSALKNKLEPEQLAIVFQEINTQINSSSGYLGAISDRSKELYFNKQTVGQYFMQLLDEDPNTSLTNRVFYRQDYMDEFETIWEKQSEFHPELTQNLKREIRDIIIFYQRRLKSQKGLISYCELESWEIDVVRNGKVEKKTIGQRVIPRSSPLFQEFKIWQMLNDVEVFVKDARTKKRRQVKNPSLFEESNPSEILQIHGRRRLTEDEMILVASELSIRSEMKKEDVLKLLFDDWRSLDLNFKKLDGNKTGNALFEAYSKIIEMSGHFIDWKQSADDIIADAKKVFDALGWNSNILSFDSSKDLQSQDYYMLWHILYSYESDNSNTGNESLINKLVSFCGFEKEYAVVLSNVSFLDDYGSLSAKAIGKILPHLKDGNDYYLACELAGYKHSKSSITKEENEARILKDSLDLLPKNSLRNPVVEKILNQMVNVVNALMDEYGRPDEFRVELARELKKNQREREEMTRAINESTRVNKEIREVLMMEFGLPNVTRNDIVRYKLYQELKENGYHTLYSNTYISKEKLFSKDFDIEHIIPRSRLFDDSYSNKTLELRSINEEKGNQTAYDFVLSKYGETGLEEYINRCQALFPKDSAKLKKLLMQEADIPEGFVERDLRNTQYIAKKALSMLKNVCRNVVATTGSITDELRSDWQLIDVMKELNWDKYEEQGLVDYYKDKDGRSIGRIKDWSKRNDHRHHAMDALTVSFTNPALIQYYNNMNASSDKTGAIYQIKNKYFKEGRAISPIPLNEFRAEAKRHLENILVSIKAKNKVVTKNINVTKTGKGGTNKKIQLTPRGQLHNDTIYGSHKRVFYVEEKVGSSFDKEKISRVSNAKYRHALMERLEANAMNPKKAFTGANALSKKPIWIDQERGLQLPERVKVRNEEVVYTTRKLVDENLNVGKVIDPKVRAILENRLKEYGTAKKAFSNLDENPIYLNKEKGITIKRVTISGINNAYALREKDGKNGEKAPKDFVSTSNNHHVALFKRAIIDKDGVEGYEFCEVVVPFIEAVARVNFGDPIINFDYGKNEGWEFMFTMKQNEYFVFPNAKTGFDPHAIDLLDPKNYALISPNLFRVQKFSTKYYVFRHHLETSVKDVEELRDITWKRIQSLDSRLLGMVKVRIDHIGRIVSVG

SEQ ID NO: 5505 - protein, 1351 aa, unidentified
  REGION 1..1351: note = Description of Unknown: Cas Enzyme sequence
VAKQDYYLGLDLGTSSVGWAVTDEKYKLQRFNKKDMWGSRIFDEAQTASVRRVNRSSRRRNQRQKKRIEILQELFADEMQKIDPTFFLRLKESKFHFSDKKVPEKYILFNDKKFSDKDYYKLYPTIYHLRSDLINDEGKKDLRLVYLGLHHILKYRGHFLFEGQDFTINEAFESIFSKLSNYLSEKFQFNIPLEIYKDIKNIILDKNLTLRDKVQNLAVACDTNNPQYKNILSVMIGGKRKLSVLFNNPEYDNAEKRDIDFRVSSFNEEREVYEQILNEDILLLDYLKSVYDWMILSEILKSNTYFSEAQVDVYQQHSEDLKDLKYLIKNYGKKGDMKECFNDPKVERNYVSYIKSTLANGRHKAKKICNQEETNKFFMEKVKNFQVSDKDKEIYLRIISRLEEKIALPKLRNTDNSVIPYQIHKQELDKILYNASKHYDFLNRVDETGFSISEKIKKTMTFKIPYYIGPLNTFHSEYNGGHGNAWMVKKLNIPITPWNFESVVDEEKSSERFIRRMTNKCTYIFGADVIPEQSLLYEKFKVLNELNNLKLNGKPITVELKHKIFIELFQNYKKVTQKILCSYLKKIGYFYGENIVISGIDGDFKSSLNSYLFFKEMLGENINFEPYNSMVEKIIFWKSIFYSGGKLVRKKIKENYGEYFNDRQISDISNINFKGWGRFSTELLTGISGISYETGEQFTSIIDALEKTNDNLMELLSSKYTFKEGIEKYNDVEETFDKISYENIMKDVYLSPAVKRTVWQAITICEEIKKIRKAPPKRIFIEMTRNPDSKKERKDSRRDDLIKLYKACKDDVSKFIKELESYEDRNLRAKALYLYYTQKGKCMYTGESIDLSFILNKKDSVASLYDIDHIYPRSITKDDSLDNLVLVKKNINIELSDTYPLDISIQNKMFSFWKELKEQGFISSNKFYRLIRKDALTIEELAGFINRQLVETSQAAKTTADILKKLYPSTEIIYTKAKVVNDFRQKFDLLKCRELNNFHHAHDAYLNIIAGNSYHTKFTTNPYNYIKTQKDKGRQRFYNLEKFFEKRVGKGGYIAWDKEVHLPFVIKTLERPTVNVVRMPITQKGELFDATLERKTNEQKLLAPIKGSDERYKDFSKYGGYKKLKGAYFFAVEHTVKNKRIRTLEQLYLIYIDKVNTIKDLERYCIDILGLIDPKIIHSKIKFGSKLFWDGFPLYIQSRSGNSIWFSVAKEIVLDKKSTEIYRKLVKEARGMEGKKEVKILIPDVELVSLYDEYLKLLKEGEYKERPNNPKKIIEEGRERFIHLTSKEKISVLLEIHKVFGRESLSGVNLKLIGGKSKSAVATKGKDFSKSNVIIINESPTGLYKNYKVLN

SEQ ID NO: 5506 - protein, 1363 aa, unidentified
  REGION 1..1363: note = Description of Unknown: Cas Enzyme sequence
  MOD_RES 37: note = Any amino acid
MSKEKKAYYLGLDIGTDSVGYAVTNESYDLMKFRGEXVWGTTTFEGASTAEVRRMSRGARRRNERRKQRTQLLAEIFAPEICAIDPNFFIRRKESALFAEDSRHGVKIFDGGMSDKEYHKRYPTIHHLIFDLMNTEEPRDIRLVFMACSWLLENRGHFLFDSSMEKMQDFAVAYKEFEGHLFQEYSCGLPWSEDISADIIAEIMQSEAGVTRKQNMFTEKVFGGKKPAKKADEEFPLSRDAIVKLLSGGKAAPKDIFPNETYADVESVSLGMDQDNFERILEELGEDAALLNIMRSMYDCALLRAILKGFDSISEAKIAVYEQHANDLKWLKYFIRKYKKSEYGKVFRKAEAENYVAYSYNTKNCKDEDVKKLKQKADKEVFSKFLRKIVENIQVEESDEEKYNDMLERLDSFTFLPKQKDSDNRVIPQQLYRRELAEILKHAKAYLPMLEEKNEDGISNEEKILSIFDFKIPYFVGPLNPKSPFAWLERKAGKIYPWNFEKMVDFDKSEQQFIRRMTNTCTYLPGEDVLPACSLLYSRFAVLNELNNLKINQNSIPVEVKQEIYNNLIKPAQGKISRKKIENYLESRGYINPGDEISGIDITMTSSLKSYQSFERLISSGILTEEQAEDIINHAAYSEDKNRMARWLELNFPSLSENDRKYILRLKLKGFGRLSKKFLTEIMGCEKVGTGEASSIIEALWETNENLMQLLSEKYRFKEQIEAFTSEYYSNPENKKTLSERLSDMYISNAVKRPILRALDISSDVVKAMGCAPQKIFVEMARGGTPEQKGKRSVSRQNQIIDLYKKIKGEEVARLKNELEAMGEKADNRLQSDRLFLYYMQLGKCMYTGEPIKLSELSSKIYDIDHIYPQSKVKDDSILNNKVLVLSTANYSKKDIYPIEEAIRVKMSGFWEHLKNNSLITAEKFRRLTRSSGFSEDELRGFINRQLVETRQSTKAVAQLLKEKYPESELVYVKAGMVSDFRNEFDMLKCRSLNDLHHAKDAYLNILVGNVYHEIFTKRWFDVKSKYSVSIKAVFGNVQEPRGKLVWRGEEDIAKAKKTMAKNAAHLTRYSFCKGSGQNGGLFDQQPIKAKAGLVPKKKGLPSEKYGGYDNPTASFYLLVSYAIGKKKDIIFAPIELRFRDRVLNDREYAVEYLTEVISEINGGKKVTDVNILLNGRIIKINTVLSLDGMLVIMRGKSSKGKNIIVSANLPLKMSLDDERYIKRLEAFSEKKNKNSKIVLNEEYDHISKEENLKIFRILKEKLKNSVFAKCPGNIYDSLEKGEKSFASLDTEEQVSCLVNIVAWFNGAPTCDLLSIGGKKGAGGKIINSRLSGLKKRYNDIRIVDMSSSGLFVSRSENLLNLL

SEQ ID NO: 5507 - protein, 1110 aa, unidentified
  REGION 1..1110: note = Description of Unknown: Cas Enzyme sequence
  MOD_RES 116: note = Any amino acid
  MOD_RES 125: note = Any amino acid
MWKVLGLDVGIASVGWCIIDTEHNRVVDMGVRLFDSADVSNNVARREARSSRRVIRRKKYRLKSIGELLRENGFDKQTDNHYNPYELRVRGLREQLSEEELYVALYHLAKRRGVSXLDDIEDEDXKVNEYLEINRDLLKTKHPCEIQLERLEKYGKVRGIVEIENLEGENESLINVFTTESYKNEALDILNQQRKYYSQINDKFIEEYINILTRKRDYYVGPGDELNRTNYGIYKTDGRIIDSIFEELIGRCNIYHDEQRAPGASYTAQEFNLLNDLNNLIVAGRKLTEEEKREIIEEILNTRVKSFTSARVLKTIKKVAKLEDESEIKGYRIDKKEKPEFHTFEAERKLRLYLEDTSIDYSKFDINQKDKLAEILSLSMDYKTLNEKCKKEFPKFSQDDIKLLYDFLQSNKKLYSLNKWHSFSLKLMREMREELYSSSKNQMNYLTDKGLIKDIQDSFEGYKYIPADFLNDKIYNPVVRRSVNQAIKIINAILKKYGDLEAIIIEMPRETNEQEKKQKITEMQRNNEKEKNEALNRIRNEYPVTEDQLYRQPGILKKIRLWYQQDGNCIYTGKVISVQDLINNPDKFEIDHIIPKSVSLDDGLNNEVLVYAYANQIKGKRTPFNAFSFSNVIKYEDIKLRALNLFKKNKINKTKYELLTFEEDINKYEVRERFINRNLVDTRYASRVILNGLQQYMSARDKDTKIHVVRGKFTHQIRKKWGLEKDRDESFAHHGIDAAIIAASYMLGQSDETIRNPFLQSIGKYNKEFWKVKDNKEFDKEVYSLPWEGFIRDLNEAEKNIKYSHKIDTKVNRKISDATIYSTREVNGEDFVVKKYKDIYNDSTAKLVISKINDDLKKFDNPSDSMILMRKHDPQTFEIILKIMKEYEGEKPNPFEAYRRENGYIRKYSKKGNGPIIKDIKYLEDRLGQSILISKTKALSTSKKVVLLQLESFRTDVYYSNEKKEYRNVDIKYRDLKFERGVYLLDLDRYFKKKEELGIGQDFNFIFSLHKNDLVGIRSAKSKDILNLYRFVSSRSDNPNKIKLKPINCSKFSKENPLIIGDKKYSSIEITINKSIYEFNKYHTDILGRLYVNKGEKLKLDFKVDNINDM

SEQ ID NO: 5508 - protein, 1115 aa, unidentified
  REGION 1..1115: note = Description of Unknown: Cas Enzyme sequence
MGNKILGLDIGIASVGWSLVEDEKKIIDLGVRTFEKAEVPKTGAPLNLIRRTSRLSRRRIYRRALRLKKLLEFLTKINLITYPQEILLNADNENPWLLRTKALTEVLSKNQLARVIYHICKHRGFYWVSTADREGGDSEQGKIKKSLSANEKLMKEKNYLTVGQMIYSEYPTCQRNKLGDYAKSLPRVLLGQEMQLIFEKQKELGSDLITDELVRAVLGKGDKKSGFLWYQKPALQGDALLNMVGRCRFESDEKRAPVACFLSERHVALTKLLNMRFINNLGDELSLSNEDIKELLPVLYSLKSDIKYSSIRASLKKLRRLPSDSELTIKGLKYTDKKDPESKVCIKLTAWQSIRSALEKNKLNDEWDDISSRALSGDYQRYDNIAYAFTVYKEDDDISQYLLSHGEKAEVIKALLVLSFKEFSSLSVKALSKIVPFMEQGLRYDLACEKAGYKHYLLSQDQKNKSKYLPPLYKGRTKTGTLILNDEIDDIPRNPVVLRAINQTRKVINAVVKKYGSPSSVHVELARDISKSAEKRREIQKFQEENRNRKEELKNKFLEMFSVSELNGRNLEKYRLYIEQDAKSLYSGKPIDINRLLEEGYVEVDHALPYSRSFDDSQNNKVLVFTNENRDKGNKTPREYFMSEQADWEEFVQRISSSKKISNAKKNRILKTNFDDNNSDFKDRNLNDTRYLSKFVKNYVDTYLKLDNENSKEKCVAVSGSITSILRAHWGLIKERSESDRHHAMDATVIACCTRSMIQRISTWSSVRECEFEQIKNPNAPTLDDNSKKPYKFPTPWDNFRTELLTRLKEDDKEKLKSTLSLLGTYDQTELDNVKPLFVSRLCQKPKTGALHDATVRRQTEQLAKEELAVSKIHLNNPKEAGRLVKVVDKAKNVREFNKKLLVDYDRNSNLYSVLEKRLAQNDWDPKKAFNAANPVLMPNKDGVESGPIVNSVRIVETQTGLRVRGGIAANGDMIRVDVYKKDKKYFIVPVYSWQLKDNLLPKKAAVANKPENEWVEIDDSYSFEFSLRRNELIKVITNKDLVYFGYFSGFDRSTASISVSVHDRNNEFQIGGKNPKNGEFRGLGVKAAKLFEKYQVDILGNYYKAPKEVRNELA

SEQ ID NO: 5509 - protein, 1389 aa, unidentified
  REGION 1..1389: note = Description of Unknown: Cas Enzyme sequence
MKKTYLGLDIGTNSVGWALTNENYELIHLRGKSAWGVHMFDEANTAKERRNYRSTRRRKARIKRRINLLQDLFAAEMAKVDPLFFTRLNNSTFFSEDKDKALLGKKDSLFSDKNFTDKDFYKNEKTKTIYHLQKLLIDDKNTKYDLRFIYLAIHHLIKYRGHFHFEGQNINIDEFGKNQIKEGFEIINDYLSMNNLTTFVFSADKIIGFEKIVENERGINNTKKALKDLFNTKEKIVVNILDFIANGKVKLKKIFDNLELQEEENFEIDFSVEDFETQYVEAEAIIGEEHIVLIDAVKQLNDYLVVARLMNGEKFVAHAMVKKYNKHKEDLRKLKKIIKENCSQEQYDTFFKAADQENNYPAYIGMTKIRGARHKIKKLEKPSEINKFFRNINEIIKNIHSDSANNIREEIEKGIFLPRITSVENSQIPHQFNAYQLEIILNNSAKHYPFLNKKEEGLTLKEKIIKLLTFRVPYYVGPLSDKHQIDSKKGGFSWIVRKSNKEVLPWNLDKVIDLEKTAEQFILKMTNKCSYLIGEDVLPKQSLLYEEYNLLNHFNVIRINGERLSKVEKEALIENIAKKRVNVTYQTIAKYFDNRLKKDVTITGIDEEMKLSLSSFHKFNKIFPGRINNEPQNAKLMRNLEKIVFLGTIYSSQVDFTNRLKSDKEFNKFFSTEEISKMANLRFKGWGSFSRLLLTGFDELSKSNDKVITYQDEKTGNELSIIEIMREEPLNFNEVLFHEKYQFSKLISEFNHEGDSELSVDELIDNYYVSPAVRRSIRRTLKIVDEVIATNNGIIPDKIFVEVTREDEKTRKGKGRTDSRLEKMRNIYKKAIKDAEEFRVLLDEISKDDKNDDYLRPKKMYLYYLQNGKCAYTGEPLNLKDASIDHIIPRSLVKDDSFDNLVLVKDTVTNQRKTDEYPLNFDIIQKQKPLWLKLKRNGLMSNVKYEKLTRTRELTAEDFEGFVNRQLVITNQANKAIAEILKTKYGVSTIVYSKASNVTDFRQKFNLIKGREINNAHHAHDAYLNIVVGNYFNTRFGARYYYRDDKKFKWNPKTVFNFNVGGCWDKDKDLGTVKKMLNRRDILFTRMPIIETGQFYNQKASKAGDNLIPIKEKGPLSDTTKYGGYSDKKTAYFAIIEHTAGNKRERIFIPIPVIINQKIIQKQTTLVEYLKTQLKLVEPNIIYSPIPINTIVKRGQSLQFISGVQGSGATHLIVRNMIEPYFDDLTFEYLCLINKYFERKAAAKVTNEDEQLSRENIEKIQVIFSFNEKEKTRKNDRLRYITRDKNEKAFECLIKQIEKPIYEKSFGSRREKILENMEKFYDLKLVRQVEIIRAFHEFLKTGVPAIKIKLEELGVKSGTLTMSYKLEDMTIVKQSITGLYQKEIHIKEV

SEQ ID NO: 5510 - protein, 1411 aa, unidentified
  REGION 1..1411: note = Description of Unknown: Cas Enzyme sequence
VNKKEYAIGLDLGTNSVGWAVVDRDYNLLKYKGQHMWGTRIFEEGKSAAATRVLRSARRRNERRKERIRLLQMLFGDTVLEKDDGFFIRLEESFLHHKSIDKVHGRDHKFNLFIGTDVGKTDKEYYKKYPTIYHLRADLASNVEKKDPRLIYLAMHHILKYRGNFLFEGKDVQTGASMQEGLQDLFEMIDSKLDASDSDITIYDKSKFDEIQNILVDNSIPKFIPKRFSLEGKEIKTKEACIVELFANAYVDDKAKQAKVNKFSKALANALTGRRFILQDIIFDEVDKESNPKIEINFSKLDDDKREAILLAVGDNSSIVEGLELIYYAYLFNDILGGEKSISKAMVRIYEKHKEDLKILKKLFKKDGLSKEDKKNGKFNLIFNKKNIVNYVSYIKSTSIGKKSQKATRDEFYGFLKPLVEELDDSPEKQYVLDEIEKDTFLPKINDVRNAAIPYQFHEDELKRIIENQKGYYPELAKNAEKILSILSFKRPYSVGVLYSSKGKSRFSWAEDIIRERVYPWNFNDLVDVDKMSENFISRMTNYCNYFEEEQVLPLCSIIYQTYITLNELNKIRINRFPIDCDTKKKVFDELFCKKKSVSKNDLQIFLSNNEEVYKGVNIESIEGLSDDNKFNGKMSTLADFRRILGDSFSKEDLNKYEDAVRIITLFNDEKIKIKQLQRVCGFDKAIAQKLAKLNYQKWGRFSKKFLNGIRSKHGKTVIEELYSGRLNSSYKNECPNLNQLIYDEGLGFKEQVLKEKDKIERFNYEEHVKDLYCSPAVKRQIWQALLIIEEIVQIMGDDPIGIFIESTRKPEAPKKSQSRVERLKQLYSSIKEENDYLIKSAEEKLMQLQLDKNERLDNEKLYLYLLQLGRCMYSGEALDLDNLNAYEIDHIVPRSYIKDDSFENRVLVKKIENQNRSNTLGIAIDIITKQKSFWKFLYNKKFIGGRKYNNLLKTEYTEDDLAGFIARQLVETNQTTKAVKELLEQRFVSEKTDVQPIKAQLVSELRYQQTDKGNLEFIKLRNLNYMHHAKDAYLTATIGLFTKYTFPSWGRDERMAMAGIRLKEIEKEIRLGNYKNEKEFNRLINKRYSLIVDMMVHGKGDDFIEIEEGELINERFNNLLKTMSFNDCKLTKKLEFKASSNFYDQTIYPSREGLIPKKYLKDDNGINKPLAPELYGGFSGEQAEFMVVVRYDDVKKGEVKEKYSFEKIPVLIAYQEKLQPGRLKEHLEEICGLHNPKVVKKANKGQLIKMEGHYVTIASDKEVTNAVQLVLPAKYNKLLKTAEKISGNYDFEENVDVKTKMEVLANEIIPEMCRKIRGLYPLFKSIVEKVEIYFNEGYRDLSLNEKLEYINKLLVITMPNATRVDMPKKFGGGGSGWGRLQRRVDVYKIEEWVYQSCTGLYYSIEKGLNG

SEQ ID NO: 5511 - protein, 1086 aa, unidentified
  REGION 1..1086: note = Description of Unknown: Cas Enzyme sequence
MSYSVGLDIGITSVGYAVLELDHSDEPKRIIKFGSRIFDVAENSKDGSSLAKPRRDARGARRRLRRHKHRLDRIKNLIVNENILTQSQLDCLYDGQLRDIYEIRFIALDESLSDEEFARVLIHIAQRRGFKSNRKSDANEKEAGKLLKAVKENEELLESKDYRTIGEMLYKDIKFSENKRNKSESYSNTFSRDLVLDEVQKIFAKQRNLDMSFASEEIEEKYTEILMSQRAFDEGPGGKSPYGGNQIEKMIGKCTFEKENGELRAPKSSYSFELFSLLQNVNNLRIVTYQNSRSLTNDERKLLIDLSHKVASLNYSRIRQELNLTEEERFGSINYGKKTIYEVEKKTKFEHLKSYHKIRIAFDKISKGYIKTCDKQRLNDIGYVLSVYKTDKNIKECLSERGATSEEIEAVLSLSGFSKFGHLSIKACNKLIPYLEEGKRYDEACTLAGYDFKRHKVFEKQKYLPIVIDEFDNITSPVVRRAVSQTIKVFNAIIREQGCSPTFVNIELSREMSKNYKEREKIKKEMNENKVVNDRIKERIEKEFNKINPTGMDFVKLKLWEEQGGICPYSLESIKVERLFEVGYVDVDHIMPYSISFDDGYKNKVLVKTRENRQKGNRLPLQYLEGKKKEDFIVWVTNNVRNYQKRQILLKENFTDSDLNGFKERNLQDTKYISKVMYNLINDYLEFAPTVTNKKKRVTAVNGVVTSYARKRWGIQKIREDGDLHHAVDAVVVACVTDGMINKISKYSKYQEIEYMQHDNGSEIINLRTGEVIDRFPLPWKDFRKELDIRLCNNPKQMLKEVPLSNYEGVNLDEINPCFVSRRPRRKVTGAAHKETIKSSKFVDEGYVILKRPLSDLKFDKNGELKNYYNPSSDTRLYNALKEQLEMFGGDAKMAFAKPFYKPTKSGKQGPLVKKVKLLEKSNLNVSVHKGNGVAENDRMVRVDVFFVEDEGYYFVPIYVPDTLKETLPNKACVANKPKDYWVEMSDENFIFSLYPNELLKVTGRRDMKLSLINSKSSLPKQLIVSEIMLYYSGLDSSTGAITAINHDNTYKIRSIGKTVKSIEKYHVDMLGNYYKVGKEKRQYFK

SEQ ID NO: 5512 - protein, 1036 aa, unidentified
  REGION 1..1036: note = Description of Unknown: Cas Enzyme sequence
MGDIKRFWLGLDLGTNSVGWSLICLDAQGNPCGVEALGVRVFEAGVEGDITQGKDASRAAERREKRAARRMLARRACRTRRVFHLLQQAGLLPAEPAETSDQRDQIIKALDAELRMEWVRAEDHVGQHLMPYRLRAQAVKGPMVAHALGRALYHLAQRRGFKSNRKTDRKDKESGVVKEGINKLSQDMEAAGCQYLGEYFATLNPDETRIRQRWTARAMYEKEFDRIMEVQKAAMSDVLTDKCIMQLKKAIFRQRPLKPQSHLIGECELEPGKKRAPMALPIAQRFRLLAAVNNLAVFESDGTCRALTPEEHKQLIEALEQKGDLKFDAVRKLLGFTKARGENQGHMFNLERGGEKRLCGNRTVAELRKVFGERWNAMDDMTQERIVYEVLSIQKDETLVKRAATWELDKAQIELLRQVYLEDSYAAFSCKALHRLVEQMADGTPLATAKKKLYGQTKEAEAQDQLPPVNQTIKSLRNPAVMRSLSELRKVVNGVIRQYGKPEMIRVELARDLKRGRQEREAIWKKNRDRETERKQAKEEIIKVSNGYTPSREDIEKYLLAKECNWLCPYTGRPISSPDALFDGQSEFDVEHIIPFSLSLDNSFANKTLCWADFNRHHKKNRSPMEAFDPESQEWDDVINRVRGFQGDARFIKLKRFQMTPEQVQEFYSDFTARHLADTRYASKLAREYLGVLYGGDVDAAGKQRVQVSSGSVTAFLRNEWELNGLLHAGTIKSRDDHRHHAVDATVIALTTPLVVAALSKAASRGGEIGRRFVPMLSPWAEMKNDLRDILSRVLVSHRMDHRIAGPLHAETNYSRAIMAMSPDGKKEHRHRRKSLDALSSNEIENIVDKHVREAVVAMLDGGDPKRVFVGITSPRRAGLPVSSGKVPTLKTRDGRQIPIRKVRVRVEENPFPVGTGSRTRHVTSGKDTVHHVELIEEQTKRGTRWIIEAVSRLEAHQRVARKEPVICQERQEGQSFVMAIHKGDCIEMEGEDGKREVYVVKSFQLPTIFAKLNPRWISVSLVMPRHKTMFPGGGS

SEQ ID NO: 5513 - protein, 1401 aa, unidentified
  REGION 1..1401: note = Description of Unknown: Cas Enzyme sequence
MKRILGLDLGTNSIGWALVENDFDTKQGKILGLGSRIIPMNQDILGNFDIGNSVSQTAERTGFRGTRRLRERHLLRRERLHRTLNVLGFLPEHYANQIDFEKRLGQFLDETEPKLAWNNKKFIFKKSFEEMIVDFGKNGQKIKIPYDWTIYYLRKKALSQKIEKEELAWILLNFNQKRGYYQLRGEEEEENLNKLVEFHSLKIVDVEADEKPNSKGEVWYSLHLENGWIYRRSSKTPLFDWKDKLRDFIVTTDLNDDGTVKMDKEGAEKRSFRAPSEDDWTLLKKKTEADIDKSQKTVGTYIYETLLKNPTQKIRGKLVRTIERKFYKDELITILKKQIELQPELFSEDLYNDCIRELYRSNEEHQLVLSKRDFVHLFVNDIIFYQRPLRSQKSTIADCPLESRALKNKNKEPLLDADGKQVFKIFKTVPKSNPLYQEFRLWQWIFNLKIHKKDDDTDVTNNYLKNTEDYENLFDFLDSRKEIEQKALLKYFKLAEKSYRWNFVEDKKYPCNETKTMISTRLEKVENVPVDFLTLEIEQKLWHIIYSVTDKNEFEKALKTFANKHNLDEVSFVENFKKFPPFKNEYGSFSEKAIKKLLPLMRLGKYWNWEVIDSKTKNRIEKILTGEYDETIKNRVREKAINLTSENNFQGLQLWLAQYIVYGRHSEANITGNWKTVADLEKYLEEFKQHSLRNPIVEQVITETLRVVRDIWKKYGDFSEIHIELGREMKNTAEERKRLTNIVTENENTNLRIKALIIELKDCADVENVRPYSPIQQEILKIYEEYSVNNIEEDDAEKEFIQKISKTAQPSKSELQRYKLWLEQKYRSPYTGQIIPLGKLFTAEYEIEHIVPQSRYFDDSLSNKVICEAAVNKLKDKQFGLEFIKNHYGQIVDLGFGKSVKILEETAYLDFVKEHYSKNYKKRTNLLLEDIPEKMIERQMNDTRYISKFISQLLSNIVRADKDDDGVNSKNVLPGNGKITTALKQDWGLNDVWNDLILPRFERMNMLTNSNAFTAWNEQYQKFLPTVPLELSKGFQKKRIDHRHHAMDALAIACATRDHINLLNNQSAKSDISRYDLQYKLRNKEKNEIIGKDVFIEFKKPWDGFTVDARNELEKIVISFKQNLRVINKTTNKYQTYENGKKELKSQTKGDSWAIRKPLHKDTVFAKISLRNIKKVRFNEALKDWKMIVDKKLKQEIKQLTVMYGGEFKIDAINKYFKNQKYLFNEVDISKVDVYYFETENAAVRKSLDISFTAKTIEESVTDSGIQKILLNHLSVKEKKPELAFSPEGIEEMNKNIVQLNDGKFHQPIYKVRVYEPIGNKFQVGTTGNKKDKYVEAAKGTNLFFAIYADENGNRSYETIPLNIVIERLKQGLKEVPEKNEKGHNLLFHLSPNDLVYIPTE

SEQ ID NO: 5514 - protein, 1387 aa, unidentified
  REGION 1..1387: note = Description of Unknown: Cas Enzyme sequence
VNPLTVDEQQNFEKGKSITTNADRTLKRSMRRNLQRYKLRRENLIEILKENGFISDETILSENGNYTTFETYRLRAKAATEEISLEEFARVLLMINKKRGYKSSRKAKGQDEGQLIDGMEIAKKLYDENLTPGQFCLQLLQAGKKYLPDFYRSDLQAEFDKIFDKQLTLHPDYLSVELKEELRGKKRDAVWAICAKVFKEKGIEIVGIKRQGNAAEQKIENYVWRVKGLKEKLDLEQLVIVLQQINIQINSSSGYLGAISDRSKELYFNKQTVGQYQMAVLAENPNASLRNMVFYRQDYLDEFNTIWETQAKFRRGELNSPFTEELKNEIRDVIIFYQRRLKSQKGLISFCEFESRKIEVEIDGKNKIKTVGSRVIPRSSPLFQEFIIWQRLNDIEVFPANEKKKKYKPNAKRLNQEQKESLFNELSIKEKMTKNQILTLLDLQEFDMNFNSIDGNRTQAELFKKYQEIIELSEKEVDIKDPADKIIDAITKLFSELNYNTDILHFNADVENLDDEALYNLWHLLYSFEGDKSNTGNENLINKLMSEYGFDKSAASILAKVTFQDDYGSLSAKAIRKILPRMKQGEDYTTACAYLYGKHSKNSLTTEELEKKSYKNRLDVIPKNSLRNPVVEKILNQMINVVNAIIADPQLGKPDEIRIELARELKKSADERILLTDSVNTNTDETKDIKEILKNEFGIDNPSRNDIIRYKLYKELLINNAAHTPYSNTYISPAELFSKKFDIEHIIPQSRLFDDSFSNKTLELRSINIEKGNKTAFDYVKEKYGEQGLQDYINRVIVIYGTKTTKRVNKRTKKIETETKTFDSLKKEHIRSLRKQEQKSKWENLSETEQNLTIIEKYYSGKLGKLTMSEKDLPEGFINRDLANTQYITREAKKMLGDLVKFVVSSTGSITERLREDWQLVDVMKEINLPKYEQLGLVENEERIDYETGEVRYVKKIKDWTKRNDHRHHAMDALTVAFTKRQFIQYLNNLNARRTDENMTISNTEKEEQDNFAITTEDVVLKTRDVLGIETNYLYRDKRNKLRFNPPMPLNEFRAEAKKHLENTLISIKAKNKVVTQNINTTKKSSGINNKIQQTPRGQLHNETIYGSYQKPVVKINKKTRQKQVIFETNYTIRKEIVGSNPTSKQFVPDENGLKKVIDIGVRKVLQNRLNEFNGDAKKAFSNLDENPIWLNKEKGISIKRVTISGINNAESLHDKRDKDGNLILDKDGKKQPVDFVNTGNNHHVAVYQDAEGNLQENVVSFFEAVTHKNLGQPIIDKEYKAGEGWQFLFSMKQNEYFVFPNVKTGFNPKEIDLLNPENYASISQNLFRVQKIATKDYFFRHHLETNVENNNSLKGITWIRTGLNGIENIVKVRLNHLGQIVSVGEY

SEQ ID NO: 5515 - protein, 1139 aa, unidentified
  REGION 1..1139: note = Description of Unknown: Cas Enzyme sequence
MKYNLGLDLGVQSIGWAIIPVDENNGPAMRLGVRCFDTVIDNVKDWQEGTLGKDGKPKAQTNNRKRSDARGVRKNQWRRKRRTLKLFNLLRNHGLLPMGKGINDDPLDRQELINHLDKELARKLSLNDDRVSAHLLPYKLRAMALDQQLEPFAFGRALLHLSQRRGFLSNKKTPPKDDEDEKGLKKDISDLRGKIAECGYRTLGEYFASLDPEEKRIRQRWTGRDMFKDEFKAICDSQDKYYHDLLNKKVVIDSWKNKPGAWKYDIKEGKRKKIFSNEHFRAKEMTLQKAIERTLFFQRPLKSQKHLIGKCQLERGKRRAQLASLEAQRFRYWQKILDLKYKDVDGFMVPLSIEQQDILAKEFENNDHLTYAQIRSLLGFKQPRQSKEEKERHKKAGIQPVYAINFEIDDENEKLKGNVTSERIRKIIPERWNAMPDEEKEQLVSEILQFEDENALARRLEKVFKFDSSKASELAMVQLERGYASLSKQAIGKILPVMKAKRIRFATARKDVYGEQFDEERKDVKPDLPPVLNVVKDLKNPVVTRALTELRKVVNAIIRKYGKPDMICVELSRDMKRSRPDREKLAEEMKQQEKRRAAVVEIIREYRKDKNYEPKKNEILKVLLAEECNWECPYTGTDKDKHWGKITLDSLLGSEPQFDIEHILPLSRSLDNSFVNKTLCRIYANRHEKKNQTPWEDYGHDEQRWHEIMERVERFQGPLAKIKHRRFEMKKIPDGFTNRHLNDTRHISRLAGEYLALLYGGRSDAEGTQRIQVSSGGVTKYLRDEWGLNAILDDGGDEKNRNDHRHHAVDAGIIAVSAPKIVKMLSDAAERGWLEGRQRFGKGGIEEPFPDFYKKMEAAVNKINISFRANRKVSGGFHEETNYSKPQIVVEGKGKKAKQVEYRHVRKPIASMSKNEVHDIVDEKVRNLVLETLKSLGTDDPRKLTENDLPYLRSKDGKRMTPIRKARIRKSDSTRTMGLAKTKKGGNPEIHGRTGRERHVVTGNNHHMEIFAHLDDQDNEVKLDWKVVNLFDSVQRIKQKQPVISRFPDGEQTRLKFSLAKGEYVLATPPGEDDVLLKVCKISEGDLSLCLHTDARPEKDRAKTGDFQKYRIASIKKLEQFKLRKVTVDVLGNIHPAND

SEQ ID NO: 5516 - protein, 982 aa, unidentified
  REGION 1..982: note = Description of Unknown: Cas Enzyme sequence
MGKIVLGLDLGITSIGWALIKVDEKIEDNKIIDSGVRIFTIAEHPKDGKSLALPRREARSARRTTKRKAQRLRAIKRLLVKNKLLTNDALENLFIGNKGQKDVWTLRRDALYRELNNKELSRIMIHLAKHRGYFSNRKSEEPSDSEGKAVLGGIGKNKEILQSKNFLTVGEYISTKQKKRNGKDKEGKLNYDNSIERYMLADEIRTIFEKQKEFGSKLVNNKILDSYLDIAFEQRPLKSVAHMVANCPFEAEEKRASKSTYRYEYFRALQKLKNIRLVAQDGEIVLTKEQIEQIIHNAKSKSTPRTYKQVRKLLTLDDAIEFKGLTYYDHKTGEAKDPEKEKLVDFSAFHKIKKAVIEVDNLYWDELQNDYDTLDAIAKILTTEKNDTFSIKQLKSIIDNEKVCEALVAVSFSKFGHLSTKAIQKIIPELEKGLDYDKACGEAGYDFKAVFKGDKSIFLPPLSRQENIEMTNPVVKRALAQMRLVYNALARKYGEIDAVHVEFTRDIKNSHDDRRKIEKAQGEFRDTKEKAREQAIDKLGKEPNAKELLKFRLWEEQNGHCIYSGDYINPHMLVDPYATEVDHILPYSRSLDDSLNNKVLCFTKENQDKGNKIPNEYMSKEKFDEFEIRVNANKNLKQAKKSRLLKTNFDESSEIAFRERNKNDTSYISKFVKNYIEAHIKFRDSKQKRHVYTMNGMLTSQLRFKWGVGDKNRENHLHHAEDAIILAFSTQSMVQELSTVSARKETEGFKYKKKEEKSKVLRFVAPMDDFHKKVQESLANIFVSHMPRRKVGGAAHKETIYSKKTLSVKKADGKVESLKGNSINNNVELKQGIALNDSMPRVDLFQNKKTKKYYLVPIYISDFVKDKLPNRAIVAGNKPWIEMDDDYEFIFSFYKRDMIEIQTKKTATKESVQILGYYDSTHSGTANLTIKSHDGNNEYSFGSQNLVYIKKYQVDALGSYVEVKSEKRLGTIKEGRAKKQNR

SEQ ID NO: 5517 - protein, 938 aa, unidentified
  REGION 1..938: note = Description of Unknown: Cas Enzyme sequence
MNLRKAENYRIGLDIGTASVGWAVVDENGEPYSFKGKTTWGSRLFAPAETAAKTRAHRSLRRRYDRRRQRLNLLQELFAEEMSQVDSEFFIRMKQSRLLPKDRSPKYQQDYLFPLFNDCSFSEREYYEKFPTIYHLRSYLAKSEEKADIRLIYLALHHIIKYRGNFLRQGELLTAKDSSTKDAVAELINSLEEYYELHDYSANFNGADIVTVLEDSALRAAEKAEQLAKLLHSGSDKEGKDFARLIARALVGYKVEFSNMLDGVEKDADTSFRLSEDKADSFHEKCGDDRSFALFEAIQSLYRAYVLSTILAVCSDGTLSDAMMRRYDNHKKDLRVLKRLINRYCPEKYDYFFRGEKDSFGNYKLENAKGYTAYVTGRNKITHEQLLNEVMKLFKDIDEINDDKEYLAIKHRLNKQDGNFLQKIRIRDNGAIPYQLHLEELQAIIQRQGKHYPFLLDDYRGQIKIESLLTFRIPYYVGPLNSQNNPEGARQFAWSVRYPEKKGISIRPWNFEEIIDKDKSAEEFIRRMTGTCTYLFGQDVLPRHSLLYEEFTVLNELNGVRWNKDGENFHRFDVADRLDLVRDLFQKRKKVSVKAVQSWLLKRGFSNNTVKGTQGETAFESKLESYNDFCRILGVERIDGDDYEMVENIILWVTLFEDKSILVSRVKSIYGHRLDDKQIIDIEKLRYSGWGRLSKDLLCNLKAETDNGPMSLMDILREGNPNEIPIGSAMTMQEILTDRKFEFPELIEQFNIEHSKNEAIDLADLPGSPAVKRSISQATKIVEEIIGIAGRPPERICVEVTRSDDLRNRGKRTTRRYQRLKIALEKLVEENPSFYREVLKQLSGREKDVAKNRFMLYFAQGGKCLYSRKALKIDELSSYEVDHIIPQSYIKDDSLDNLALVLKGENQHKGDSLLLDRAIVGKQFDWWQQLRGAGLMSD

SEQ ID NO: 5518 - protein, 1559 aa, unidentified
  REGION 1..1559: note = Description of Unknown: Cas Enzyme sequence
  MOD_RES 654: note = Any amino acid
MKKILGLDLGTNSIGWALVNVDKNGNPYGIEGLGSRIIPMDQATLSDFEKGNTKSQTAERTMFRGARRLRERKHLRRERLHRILNELNFLPIHYRSCIDFVHRLGKFKANNEPKIAWRSNDQDKMEFIFQNSFLEMMTDFTKYQPELVKAGKRIPYDWTIYFLRKKALSQRIEKEELAWLLLNFNQKRGYYQLRGEDEVDTTRTAKTRKYFDRKIIKSIIDTGEEYKGLKVLIVELDNGNQGKIFKQEVPDWVGQEKNIIAIVDLDKDGKDRFDKGVLSQRFSIPSDSEWETEWKLIKLKTEEDLEASHKTVGTYIYDSLLKNPNQKIKGKLVRTIERKYYRDELRAILNKQREFHPELNDKKLYQHCIFSLYPQNEAFRNSIANKDFTYLFLEDIIFYQRPLKSKKSTINNCAYEVRRYMDKETKELKVVPLKCIAKSHPIFQEFRLWQFISNLRIYKKDITDIDVTNDFFRTQEDYANIFEWLNNRNEIDQKAFLKYPAFGLKKDVVNYRWNYVEDKSYPCNKTRSAILSKLDKHEQEFLTKELELKIWQLLYSVNSKEEIDKALNVNSPEINNKVSIDHSGILHELKSSSLSNISIERLKAINFEEKDYGSYSYKAIMKLLVLMRQGKYFDNTSIPDATKARINSIYDRLXESISFDLEKINSISDDDIPRQILKSFIKLNRIYGGFNTYQACYAVYGRHSEAKEITKWEKPEDIDHYLAKFKQHSLRNPIVEQIITETLRVVRDIWKQHAYKTFNHDDQGNNCESVSDLAEIHIELGRDMKNNKSERVRISRINSENENTNLRIRKLLIELNDPEFGVENVRPHSPSQQEILRIYEDGVLNSGVEIPEYVDDIIKKFKESDIKKQPSKSEVLRYKLWLEQKYRSPYTNEVIPLGKLFTNNYQIEHIIPQSRYFDDSFSNKVICEAEVNQLKDNELGCEFIKNNGGRIVELNFGKTVRILDFEEYEQFVQQNYAGNRPKMRNLLMTEIPNDFIDRQLNDSRYISKVVKGLLSNIVREDSEEESTSKNLISCSGGVTARLKMDWGLNDVWNKLIYPRFERLNELTNSNQFGFWDKKDGKNVFQIQVPMDIQKGFNKKRIDHRHHALDALVIACATRSHINYLNNESAKSNSKESRYDLRKKLRRLEVIQKEYTINGRKEIRNIEVAKEFYKPWNSFTQDAQSALENIVVSFKQNLRVINKTTNYFLRFNKEGKKVFETQTSGCNWAIRKSLHKDTVFGLVNLKRTKTVSLANAILDYEKIVNRKLLAKIKGLISIGYDNKKILKYFTDDKEIWDEIISSGIEVFYFTDNLEKQVATRKPLDTSFTDTKIINSITDTGIHKILLAHLSENEGNPKIAFSPEGIEEMNRNICELNGGKFHHPIYKVRVYEPLGNKFKVGEVGNRSSKYVEAAKGTNLFFGIYVNSQGKRSYETIPLNVAIERQKQGLSPVPDTNDLGESLLFWLSPNDLVYLPTSDEVESGILNSKFGNDRIYKMVSCTGNVGDFIPGHIANPIIQTLELGSNNKAQRAWTGEMIKEICIPIKVDRMGNIVEIFDTNKN

SEQ ID NO: 5519 - protein, 1063 aa, unidentified
  REGION 1..1063: note = Description of Unknown: Cas Enzyme sequence
MGIHVGLDIGIASCGWAVLDPEAEEIRGLGVRTFPKAENPKNGASLALPRRLARSSRRRLKRQRIRMENFRQLLVESGIVAKDRLATAFVPLQGEATPYQLRAEGLDRMLTDREWARVLSQLCKRRGYRSMKLVSGSSGTDDDDGVVKAAIAENAATMAEHGYRTVGEMLWLDGRFSESRRNKGDYKGVVSRDQVLDEIHQLFEAQRLHSNVHATPEIEAEYVRILQWQAPILEGDALRTKVGLCSIDRTNRRIPLACPTFERFRVVDKLHNIRYTLNGSGSRINLSLEQRDAVVGKAFGKTAKLTYADVRKQCALPEDARFVGVRYGRDDGDLSPEAKEKLPLPRSWHEMRKAVSDCPAGTWERLSADIDLMDAIAETLTYFKLEDSVHRELLTLGLDEGVAEALGQLRFSGNGHLSRQTIRAILPLMEQGLPYSEACAASGFHHSQRAESEKHAKLPPIPTEDMRNPVVIRALTQTRKVLNSIVDTYGPIEQLHIEFGREVARSAEDRKKIEKRQKDSRAVNESILEDLRGIGVANPRPLDIVKYKLWKEQSGRCMYSGTYIDRERMLSGEPGVTEVDHILPHSRSFDDGYMNKVLVTTSENRQKRERTPHEYLGGNVQLWHEFEERVQSMHLPRAKRERLLRTDFDERASEEFRDRNLHDTQYIARFFKGFVEEQLQFAGDSNVPVVTVNGRATAFLRTAWQLQKVRAEGDLHHALDAAVIAATTRSMVQQVSRFFSIRPLRNPQGLYVDAITGEIVEAKHVPEPWEGFADSLKVLLSARFGTDPFGEIAACALTPMPILVSRMPNRTVRGEIHKETVRRIEGESEKGLTKTSKRVRLEDLTPRLLEQMVGRSQDHELYKALSERLAAFDGNAARAFAEPFSKPTRAGHEAPRVRAIRVYDSPSSGGVEVRGGLADNGEMVRTDVFERDGKYYLVPVYLKDTVAESLPNRAIVGGKPESEWPQLDDSYNFAFSLCLNDPIRLVRRSGGTESALGGYFKGTNRRTASITIEAHDSSWKRESQGVAQNVVAFEKYEIDPLGRSVHKVGRETRRGFPDSGDKQ

SEQ ID NO: 5520 - protein, 931 aa, unidentified
  REGION 1..931: note = Description of Unknown: Cas Enzyme sequence
MSKVLGLDLGTNSIGWAIVEDGGNEQKLIDRGVYIFSEGVKIDKGVESSKAAERTGFRLARRQKFRRRLRKYETLKVLIENNMCPLAIEELEKWAKYKKGVKREYPKSIEFLDWLKTDEELNKNPYYFRAMAVKNKLPLVDVGRALYHIAQRRGYKSNRLESTKEKDDGKVANSIGEINKNRGTLTLGEYFYELYKKGEKIRSAYASREQHYLSEFKKICDVQEFDLELTKKLEKAIFYQRPLKSQKGLVGKCVFEKSKPRCPISHPLFEEFRALQFINSIKLVNENRFLTYEEKSVIKPLFFRKSKPNFNFEDIRKKLSSKNNEIKFNYTDWTLVSGCPTISQLIDVFGEEWKNLKVEYIREKDNKKSIIDYETIWHVLFNFDSAEKIKEFGLKRLILNEEQAIKFSKIKLKQGYGSLSLCAIRKILPYLEEGLLYSHSAYFANLNKVLDEKNMINISAIKEDIKNQINIYRDAKKIEYLINSYVYKYRENHYSLNVKPEEYRDKIEKELGGDFKNWNDSDKSIFLNEYLFLLEKHIKKNDFIKIKRLDEKIIELLKNKYDIPEQNLTKLFHPSDMDIYPDAKPFPDGKKYLGSPRTQSVRNPMAMKTLHQLRYLINTLIKEDKIFSNDAINIELARELNDANMRAAIKRYQNELEKNKKEYAQKIRDTIDIEPAETDILKYQFWEEQKHMCLYTGKEINITDFLSDNPLYDIEHTIPRSLSFDDSQINLTLCDNDFNRNTKKNMIPQMLPKIEDILVRIDHWKKDYEELDKQISKAKNSSKNASTKEEKDKAIQWKHYLTLKRNYLRDKYERFTMKDVPSGFTNRQLRDTAVITRYARAYLKTVFDDVNSIKGSMTAQFRKIWGVQNEYEIKSRNKHSHHTVDAIVLASITRPKYNLLSTFYNDTERGLRPTFKKPWVTFVEDIKKIRG

SEQ ID NO: 5521 - protein, 1172 aa, unidentified
  REGION 1..1172: note = Description of Unknown: Cas Enzyme sequence
VEGNTRNLTFGFDIGIASVGWAVLAPDHIVALGVRAFDKAETAKEGESLNVARRNARLMRRRLHRRAWRQTKVARLLKREGLIADAQFFHNQLHAPTSPWQLRVEGLDRLLTPEEWARVIYHLCKHRGFHWISRAEEKKAGEDTKGEGGKVKQGLAATGRMMQEKDYRTAAEMVLSEFPDAQRNKQGSYDKALSRVLLAQELETLFQRQRELGNPHTREAFQAAILGNGDRKSGLFWSQKPALSGENLLKMLGRCTFEKSEYRAPKASFTAERHVWLTRLNNLRIVVDGVTRPLNENERRIALPLPYNQAGDLTHKQLRAALIKAGATDNNFHFAKFPYAQSADGKVKDPESAVLVKLPAWQELRKTLKDKGLETEWQSISGAALAGNPELLDRIAWVLSVYKDDSEVELELGKLGLPGGKPMIDALEEVRFDKFSNLSLKALRKIVPHMESGMRYDEACEAAGYHHSQLFKTGEGEERYLPPFYSGRDKNGRMLFNDDMDIPRNPVVLRALNQARKVINALIREYGSPASVHIEMARDLSRPLDERRDIEKEQKEYRERNEKDKARFTEEFGQPPKGQEFEKWRLYREQQGKSVYPTMTDEEGICAYSLTPIDLNRLLEPGYVEIDHALPYSRSFDDSKNNKVLVLAKENRNKGNATPYEYLDGANGSERWQRFVAYVEGNKAYRLAKRTRLLRKNFGSEEAKDFRERNLNDTRYISKFLKNYVERYLKLEEGSESKRCVVLSGQLTAFLRARWGLMKIRADSDRHHALDAAVVAACSHGMVKRLSDYARRKELEAVREGFVDLETGEIVNPAMYQQLQEHFPDPWPHFRHELKIRLGLDEDIKDDSNKLKAAVESLGTYPDEELNAIKPIFVSRAPQRRNGGAAHKDTIYAQPVQMKAGGQVIQHINLEALTLNHFGYLEDYFLEKKRLAGTGTVTKKEATDLHKKFADPDSNVWESGQKWRQCLLADPLRNKEFYEALYDQLAQHGGNGKKTFANGFYKPIRRQNAATSPPVRKVAVIDKLSGIPVRGGIAKNDSMLRVDVFTKGGKFHLVPVYVHHRVKGLPSRAIVAFKDESDWTQIDDSFDFCFSLHPNDLVRVTLKKESHLGYYASCNRSTGAVNLWSHDRNKDIGKDGLIESIGVKTAVTLEKFHVDVLGNLYPAPPEKRRDLA

SEQ ID NO: 5522 - protein, 1016 aa, unidentified
  REGION 1..1016: note = Description of Unknown: Cas Enzyme sequence
VPIGSLSAGSKHVLNTILSDGRNPKDGASLAVNRRMARAMRRRRDRLLKRKNRMMALLIQHGFFAADPEVRKALERINPYELRAKGLDTQLSPVEFARGLFHINQRRGFQSNRKTDKKDNDSGALKTAISALRQQLDLEGSDGKARTVGELLWRRMQAGTGVRARYREMRVEKDDGKTRIDKTYDLYVDRAMVETEFDALWEKQASFNPQQFNETARLALKDCLLYQRPLKPVKPGRCTLLPEQERAPLALPSQQRFRIYQEVNHLRILGTDLQDSALTLAQRNAVVDVLERHGKRSFTQIKTLLKLPGATQFNLEDAKRQELKGNATSALLGKKDFFGAAWFDLDPERQDAIVMRLLTEESEAALIAWLQADFDLDERRAETIVNASLAEGYGSLSAQALARILPQLKGDVITYDKAVQAAGFEHHSHISHAATTGEILPALPYYGEYLQRHVGFGTGNPEDPAEKRFGKIANPTVHIGLNQVRTVVNALIRRYGHPSEVIVEVARELKQNQEQRKEQQQQQAQNQKRNERLRADAAGILRIAAERVRHADIQKLILWEELSRDPAERRCPYSGVQISAAMVLSDEVEIEHILPFSQTLDDSLNNKTVATRRANRVKGNRTPFDARADFEREGWSYDAIVARAELMPRNKRYRFGVDGYQKWLREDKDFLARALNDTRHLSRVAREYLSLICPQATRVIPGQMTAMLRGRFGLNDILGLDGEKNRNDHRHHAVDACVIGVTDQGLLQRFAQASASARERQLNRLVDDMPLPWSSYREHVARAIHNIWVSHKPDHDHQDEMFDQTIYNAHGFSRSAAKTRSVIPFHARVGSAATQRHTDKNGQPKPYKGLLSNSNYCIEIVRFEATWEGEVIPTYYAYAFVGNYKKRNPGCSEAEATRSLRSPVKSLSGNPLVMRLGIDDTIRAEVDGSLETLKVLKINSSGSVTFVRVNETNIPARYTAKLAAQKLANESKPHDEAALNDNFFQKAVSAGSLRAMKARRITISPIGELRDPGFME

SEQ ID NO: 5523 - protein, 993 aa, unidentified
  REGION 1..993: note = Description of Unknown: Cas Enzyme sequence
MKGRTLGLDIGSKSIGWALIETGDCDRIVAMGVRVFPEGVDRDTKGMEKSRNASRREARSARRTHQRRTDRKRRLVKILRSVGLLPRVQNDLALLLQTNPYGLRRRGLDDKLTPHEFGRVLYHLSQRRGFKSNRKSGKAKEDGPVIKGANTLQAEIDAAGCRTLGEYFAGLNPEEQRIRGRYTYRSMYQKEFALLWTTQAQYYPHILTEGLRQQVCDQIVFFQRPLKPTDDLIGDCELEPGQKRCPRGDWYALRFRVLQDVNNLTIQNPNGSERKLTTEERGKLLAELSRKSEVSFSDMRSMFGLLETQRFNLEQDGKKAKLKGNPFAAGMRNKKALGQKRWDQMTEGEKITLNEWLVELEDDELAARLKAHYELDDEQVEAILKISLPQGYMSFSRMAIMKLIPVMEEGKLTSEAKKQVYGDGLPADTTPSADKLGLPPDIRNPIVQKAIYEIRKVVNAIVREYGKPVRIKIEMARDVQGSKRQRDELEQKRAENEKRNEDARKRLIEDIGILDPTRDDVIKYKLWEECNRVCPYTGRAIDQSDLFGLEPTYQIEHILPYDRSLDDSYMNLTLCEVHENIQVKKNQTPYEAYGHDPQRFEQILHRVNASRMPYPKRRRFWQQEIDLDRQIERELNDTRYICAEVVRYLKQLGVPVQGTRGKITAELRHQWGLDGIFSELEVRRDDDHRRHAVDALIVAVTNNDHLRRLAVSKYATSGVRFKTPWATFRDEARDVLKGIKVSHRVRRKISGPLHEETNYGPTGLKDEDGQDVFVYRKRLDELTIPMVDAIVDNIVRDIVQHRLAEKDVDLRATNRSIPKEVWKDPLYMRRTKSDKQIPIKKVRIRDVMNNAIPLCDKTGRPYRAVKSGSNHHIEIFEHIDKKGQTRRDGHVITTFEAVQRRLRGEFVVKRDYHDGKKFVCSAAINEAFMLRLDDGREELFRVQKISSNQQVFFRHHTFSGDLQKSKGISKKPNTLIGRKVSVDPLGRIWTARD

SEQ ID NO: 5524 - protein, 1024 aa, unidentified
  REGION 1..1024: note = Description of Unknown: Cas Enzyme sequence
MKKNFVLGLDLGVNSLGWAMIEMEGDKPKSIINTGVRLFEAGLEDLELDGKGKSRNAARREARLRRRQTERKTRRLQKLLNFLIKNKFFDSEIILAPEKRHFFFEELDSNLKNPYELRKKALDDKLELRELGRIFYHLAQHRGFKSNKKTDKVKEKETSEMKLEIEGLRKEINDSGSRTLGEYFFKLTSEGNKIRGRHTDRRMYEEEFHKIVESQKKVHLNLFSDTFVNELYKMVFHQRGLKSQKHLIGKCSLEQGEKRAPVALLNAQRFRYLQKLNDLIIIDKKTGEVSNFSQEERQLLLDELENRKELTFAQIRKMFKHLKHSEFNLERGGEKKIPGNRTNAQLLEVFGNKWNEFDENKKNEVIESMRCIVKDDALERKGLKYGLSPEKAKEFSQVALEDGYISFSKKAIQKLYPLLLVGKQLSSTIKDIYPERFEKKVEPLTTLPPLNSDLLEEIRNPIVERSLGELRKVINAIIDKYGKPDSIKIELARELKQSKKQREEITKRNRENERERDAAKKVLVEECHLQNPSNEQIVKYLLLKECNYQCPYTGKIINMNDLFGEHPLFDIEHIIPYDRSLDDSFMNKTLCYAEENRNVKKNQTPYEAYQGNEKWEEMLQRVSKFQGRGAQEKLKRFKTTPEELEEIINEFSTRHLNDTRYASVYAKRYIGLLYGGVNEDGIDNTHKRRVEASSGKVTAHLRRALGLNTILSSGDFKSRDDHRHHAVDAIAIALTTANTIKELSNSAKRSDGKKLFAKYEVPWEIFRQEAEDKINDINISRRISKRIRGSLHNESLYAKPRRDQEGKTYIHFKTSIESLTEKEIDNILDERVKKIIKDELNKRDKSPKEAFKDKSNHPCIETKDGKKIPIHNVKVKRMFATYFEMGSEISKRYVQSSENHHIEIFEDLNTGKWDGKVISMYEAYRRKSNKENIINKKHGDNKKFIFSLHCGDIIELNEDNIKYLFEVRVIAGNNKQIRFSKIEDARLLKNIPATGNTALPDSLRQRGCRKLIVSPIGELQYSND

SEQ ID NO: 5525 - protein, 1130 aa, unidentified
  REGION 1..1130: note = Description of Unknown: Cas Enzyme sequence
MYQVANDTTSTSNFLTLGLDIGIASVGWAVLSKTRMVDIGVRCFDKAETAKEGESLNLARRQARLLRRRLYRRSWRLTKLGRMLKQEGLIDNAAFFKQQPSASISTWQLRAEGLERLLSAQEWARVIYHLCKHRGFHWASKAQEVQAEGDAKGEGGRVKKGLADTAEKMAAKEYRSAAEMVLAEFPHAQRNKRGEYDKALSRVLLDQEFALLFEEQRRLGSPYASAEFEQRVRGNGDRKSGLFWNQKPALAGDDLLKMLGHCTFEKSEFRAPKASFTAERHVWLTRLNNLRVVVDGASRPLSQQERTVALLLPYQTEQFKYKTLKTALVKAGHIPDSARFGGLAYPSEAQKEAGKTKDPEDQLVVKLPAWHDLRKALSKAGLQDAWQQISVAALDGQPGWLDSIGWVLSVYKDDAEVERELAALELPQAQAVLPVLLGLRFDKFHALSLKALRQIVPHMERGLRYDEAVAQIPAYGHHSQRVVLGTGTRRYLPSFYKDERSKQGSMVFRDDIDVPRNPVVLRALNQARKVVNAIIKKHGSLSAVHIEMARDLSRPLDERREVKKLQEEFKDRNDKARESFEADHGYRPKGIVFEKWMLYREQHGKCAYSMEGLDIDRVLNDANYAQIDHALPYSRSYDDSKNNKVLVLTRENQNKGNRTAYEYLTSFAGGEDGDRWRNYAAWVNSNKSYRMAKRNRLLRKNYGPDEASGFKDRNLNDTRYICKFFKNYVEEHLQLAPRADGNANKRCVVVNGQLTAFLRARWGLSKVRSESDRHHALDAAVVAACSHGMVKALADYARNKEVAYLREGFPDPETGEIINPEAHARGVHHFPEPWAHFRHELQVRLYSDDLQALREDLQRLGTYSEQDLLGVRTLFVSRAPQRRNDGAVHKETIYAQPEALRKQGGVVQKVPLTSLSLKDLDNLADPHRNAKLYTALRARLEAHGGKADKAFGPDQPFYKPDKNGNPTGPIVRTIKLVIDKLSGIPIRGGVAKNDTMLRVDVFTKAGKFHLVPVYVHHRVTGLPDRAIVAFKDEVEWTQVDDSFKFLFSIHPNDLIRIGLKAKEPMIGYFASCHRGTGAFNVWSHDRNTSVGKSGSVEGIGIKTALSLEKLNIDVLGNVYPARPEQRHGLA

SEQ ID NO: 5526 - protein, 1017 aa, unidentified
  REGION 1..1017: note = Description of Unknown: Cas Enzyme sequence
MAALRYRLALDLGSTSLGWAMIRLNPENEPCAVIKAGVRIFSDGRNPKDGSSLAVTRREARAMRRRRDRLLKRKARMTQSLIDHGFFPAEDGQRKALVTLNPYALRAKGLDEALTPAEFARALFHINQRRGFKSNRKTDKKDNDSGALKQAIGKLRQAMVDENCRTVGEWLHKRDLAGQTVRARYRQTKVAKDDGKTKVDKSYDLYIDRGMIEAEFDALWAKQSSLNPVQFNDRARDELRYCLLFQRPLKPVKPGRCTLMPEEERAPLALPSVQRFRIYQEVNNLRILREGLKEEMLTLAQRDALVAALEMHNKRTFTQIKALLGLGGAVQFNFEDPKRQELKGNTTSAILSKDALFGKTWLAFDEAKQDAIVLQLVKEENEAKLVRWLQEETGVDEAHAEAIANVGLPDGYGSLCSKALTLILPELRRDVVTYDKAVLAAGFDHHSDISPAATGEILPELPYYGIPMQRHAGFGSGKPEDSDEKRYGKIANPTVHIGLNQVRLVVNALIKRYGHPSEVIVELARDLKQSKEQRDDDNKRQAENQRRNARLRADIAATLNISQERVRTADIQKMILWEELSTNVADRRCPYSGIQISATMLLSDQVEIEHILPFSETLDDSLNNKTVSMRQANRIKGNRTPWQARDDFAAQGWRYEDIIERAKLIPHKAKRDRFAEDGLQRWLKEDKSFLARALNDTRHLSKVAREYLSLICPQNTRVVPGRMTAMLRAKFGLNDVLGLNGEKNRNDHRHHAVDACVIAVTDQGLLQRFARASATARERQLNRLVDDMPLPWSSYREHVQRAVGNIWVSHKPDHGHEGAMHNDTAYGLLGNGRVSVHKMVDGKRERMEDNLKVIEFSDANATARHGTLPNGEPRPYKGYKGDSNYCIEIVFNDKGKWEGEVISTFDAYQLVRKHGLARLRHPKTSVSGKQLVMRLILDDIVRLDDNGKLRTMRVATLSGNGQIFMSDLQEANVDARNRDKADPFAYLSKTAGSLQKAHGRRVTISPIGELHDPGFKG

SEQ ID NO: 5527 - protein, 1058 aa, unidentified
  REGION 1..1058: note = Description of Unknown: Cas Enzyme sequence
MPKPDSYTLGLDIGMASVGAALLADDHIIALFVRTFDKAETAKEGESLNKIRRDARLTRRRIRRRAHRLLRLRRLFKRICLLPTNLGNATLSADNLSPWQLRSEGLDRRLDPQEWAAVLYHLVKHRGFLSNRKSEAKTDAKAGEMLGGVSANQQLLTEGGYRTVGEMAWKDDRFHAAKRNKGGDYSHTFARADLVNELRSLFACQRERGNPHANPEFETATRELLMARRPTLSGDNLLKMVGKCTFEPTEYRAPKASHTAERFVWLTKLNNLRISGIGVARPLTDGERQALIHLPFSQSKLTYKQVRTKLALGEADRFVGLDYRSSKDPELAALFEAKAFHLLRRVYESAGLHQAWLRDSHDRQRLDLLAHALTVFKDDSEARQWLMIQGVESEIIEALLEESFDKFIRLSLKALHKILPHMEAGLRYDEAIQAAGYTHHSQIHTATKTLYIPTISKEDIANPVVSRALNQARKLVNAIVREYGSPMAVHIELARDLNKPYDERRRIEKDQKTYKETKDKDIVDFKERFEFTPKGLDLVKWRLYREQDAQCAYSQTGFDLNRLFETGYAEIDHALPQSRSFDNGMNNKVLVHSKHNRDKGNRTPYEYLGGDHNSPEWQHFVAWVEGNKKYRLAKRQRLLRKDFGKEEAGKFRERNLTDTRYASKKFKQLVETHLQLAEESDSKRCVVLSGQLTAYLRACWGLIKIREDGDLHHALDAAVVAACSHGMVKRLSDYSQRKELEQVRGNFIDYETGEELDLAALQRVEAHFPQPWLGFRDELKARLLPDPAAALPKLAGVAPVRVSRAPTRRGLGAAHQETIRSAKCLEDGTSSVKTPLTSLKLKDLPRIVGYNDPRNRTLMDAIEQRLREHGDNGAKAFKEPLRRPAAPGKEDQAPIVRSVNLKDTQKSGLLVRDGIANNGSMLRVDIFTKGGKFFAVPLYVADTVKAELPNRAVVANKPESEWPTMDNSYAFLFSLHPNDWIKVTLKDQPLKEGYFSGLDRSTGAISIWAHDRNSSVGKDGLMRGIGIKTALSLEKCHVDILGSLHRVHQETHQPLRHK

SEQ ID NO: 5528 - protein, 1460 aa, unidentified
  REGION 1..1460: note = Description of Unknown: Cas Enzyme sequence
MSKILGLDLGTNSIGWALVSTDENGKPCKIEGMGSRIIPMGTDKQDYEKGVGITKNATRREKRTARKGNKRYKIRRNKLLFILNELNMLPDLFVFKVLPEDIQFSRDNLGIPIPQKLQELELCRIEKRRSYDEFGKRKDRQYFEVRKIKQEPLALLGCNLRVKALECPVELNEFGKILYQFNQLRGYSGGNNEDSKKKKNDDDEKDVKKKYEVLVQKVEILEVKQSADTYTVRGGKNKGEKLYYFEVKIILDGEEIEGLTELQNLKDKEGQEEELEIRITRKKDEEVTYKFALPQKSNWRKSMELSEKKLKEENLFISQLRLLDLQQNKWAKIRNRVFLRNRYKEEFDKIWKTQEKQYPILKDCPKEILEKIANYIFPGNSESQHLLRKTALEKGLKYIIKEQVIYYQRPIKPQTELIGNCRFEKEEKVIPTSHPYFQEFRCWKQINNLFVTSKTLVGNKYRYQNRYLTTEEKKVIYEKLQTQKEVGFATVVEILNMDKSKGKLDKEQKDYFLNGLNVKAKLKGCDTLLSFKKELGDSFNNFISKDGNLVEQLWTVLFEVKNHDGSEYDVESKRVSSIIEVLENYTDEETAKELSLRLAQKIKFPRKYASLSEKAIRNILPLMLPNPQSIPSSVQQRFKTIQSLIETGEIVDDLNSDLEDYVIDFVKNNPNVLQDGGIMESFAISLVYGKHTSETIKPQIKNYHDIKYVERNLRNPVVEQLANETMQVVKAIWKQYNFNSEELEIRVELARDLKNSAAEREKIWNGQRKNKIINDKAKEKLQENGIAITDENILKYRLYEQQKFMSPYTKKKIIPFSKLFDDKEYDIDHIIPKSRYYDDSFSNKVICEKYINEEKSNRTAWEYISQQNSKYKNENGGLEIVSINEFLSHVNDNYFGKKKKNLLTEKIPSNPVERQLKDTQYISVAIKKELAKIVGSDNVKTSTGEVTDFLRSRWGLRKLFMELTECRFKQMELWDLDENGNPKTKWVNRYVDKNNKNHYEIKNWSKRYDHRHHSIDAIVVALTTQSHIQRLNNLNKYYQDELEARKIDFGIKVKEGESILDGFFNLEAERRDEILGQIESSRYFEKPFENLVEQVRGQLETMIVSHKPKDKLGIKTDDFDKNTPNKVLKKQVKVRAGLHQETYYGKINGRDTKRVEISLLSITRNKSTKQYEIIDLIDKVLEKEIVQHRDLYNSMKEAFTGEGLKAFNDKRVGKGKHPVYKVKVWYNKEEKKESTLQRLYDFNDKQCVITGDNYLFLVMEKNGKRIFDIASLYDSVSIATDSLKDGIIDFKKQVVEDFRVKHKDKPEKVLFTLQQNELVYLPNNFEEREFLLGMSIDEFRDWINIKANKKAFSNRVYKVVMFTGSDCKFIPHNYSNVISVPKEFNKEQKEELKKKYEEKKGIPKNELNFVEFGSYRDCSPYETGELFVKSLVNKKQKQRPLKIQDSCIKIKIDWLGNISI

SEQ ID NO: 5529 - protein, 1140 aa, unidentified
  REGION 1..1140: note = Description of Unknown: Cas Enzyme sequence
MNVGKNEALDKPEDLIFGLDIGIASVGWAVLNSTRIVDLGVRCFDKAETAKKGESLNLARRTARLLRRRIYRRAWRLTKLARLLQKEGLVDSASYFKQQPGFTDSAWQLRVAGLDRLLTPTEWARVIYHLCKHRGFHWVSKAEEVSAEADAKSESGKVKKGLAQTQTLMQTKGYRSAAEMVLAEFPEAQRNKRGDYSKALSRRLLNQEFEKLFEAQRRLGNTHANTDFELLIRGNGDCKSGLFWKQKPALAGNDLLKMLGKCTFEKTEYRAPKASFTAEKHVWLTRLNNLRVIVDGVSRPLNETERQAALLLPYQSAEKFTYKTLRNALTRSGLLPVTFRFGGLSYPSDRQKEEDKAKNPEDQILVKLTAWHELRLALNKAGLADVWQQISVTALDGYPETLDQIAWVLSVYKDDDEVCTELAKITLPQANKTIAVLLGIRFDMFHALSLKALHKIVPHMERGLRYDEAVALIPEYGHHSQRVVLGAGELKYLPPFYAGRDKHGTMIFREDLDVPRNPVVLRALNQTRKVVNALIKTYGSPMAVHIEMARDLSRPLMGHWNNNGKYIEGRKDIKNKQDEYRDRNEKAREDFEKDFGYRPKAAVFEKWMLYREQQGKCAYALEALDIDRVLDDPNYAQVDHALPYSRSFDDSNNNKVLVLSRENQNKGNRTAFEYLTSFTDGEEGNRWRNFVAWVNGNKTYRAAKRNRLLRKNYGADEAAGFRDRNLNDTRYICRFFKNYVEEHLQLSPNASGNTNKRCVVVNGQLTSFLRARWGLTKVREESDRHHALDAAVVAACSHGMVKALADYARNKEIALLREGIPDPETGEIINPTAHERLTFHFPEPWAHFRHELEARRKTDDITALREQMTQLGTYTEQDLQQLRTLFVSRAPQRRNGGAVHKDTIYAQSESRQATGSVVQKVPLASLSIKDLDNLADPHRNAKLYAAIRERLEAFGGKADKAFGPDKPFYKPGKDGQADGPMVRTVKLVIDKLSGIPIRGGVAKNDSMIRVDVFTKTGKFYLVPVYVHHRVTGLPNRAIIAFKDETEWTLVDDSFAFLFSIYPNDLVRVSLKKESRIGYYASCNRSTGAIDLWAHDRANSTGKDGLMQSIGVKTSLSIEKFNVDLLGHIYPTAPETRRGLA

SEQ ID NO: 5530 - protein, 1053 aa, unidentified
  REGION 1..1053: note = Description of Unknown: Cas Enzyme sequence
  MOD_RES 275: note = Any amino acid
MLLIEMAQHGMCPLSETEIKQWKKDRTFPDSPELREWFKDNPYELRKRALDKPVSLMELGRIFYHMAQRRGFKSNRKQAGNEDGKVKTAISTLQQEIDKSGHRTLGEHFASINPHEQRIRDNYTDRKMYIDEFNEIWKEQVKYHKELTDDLKVKLGISDDEKELGILFFYRPLRSQKYLIGKCSFEPKKPKCPVSAIPFEEYRTYQYAHSIECNGRKLTKEERQKVVDKLMSVEKTTFKVIRNTLKIEEGSYNYSDDDKVVGCYTISKLSKLFGXKWDAFSDQEKEDIWHTIFSCTDADWLANYAKDKWGFDAKQLKTLAGIHFKQDYASLSRKAINNILPFLEDYPYHVAVVFGGIKNAFGNEWNKLNDEQKDFLHSNVPEIVRSGIKGGFMDDLKKILQNKFGFTEKQLAKLYHHSAEVTEQKVQEKLPMGEQANKEIQNMRNPIVMQTMFELRKLVNALIDEHGSFDKIKVEMARDLKNSTKRREEIRFENKRNETNRDRVKKELDKLSQPHTHDNILIYTLWEECQKQCPYTGKQISVKQLFSGEVQIEHIIPWSRSLDDSYMNKTLCFADENRKKGDKTPYEFYGDDEKKWNEVKERALKLFHTSKDYPKRYQKFKRFANEKEPDLNSFIQRQLNDTRYISKEAKNILGKVCKDVQVAPGQMTAHLRHHWGLNKIINTEGDTKTRADHRHHAIDALVMACHERNHLNQISKWNRYEKDIRQESIDRPWDGFWEDAKTAVDKILVAHKGSHRTITTRNYKSKKNGEVHINKGVSARGQLHADTVYGKRKDKTGNESFHVRKALGTLTAAEIPKIVDDQIRWLAEQRLRENGIMINEKNGKAMAANNDVQKAFAEPLQLPNRNGDPIPVQKVRLLNNIGNAEQLKDGINQFVNPKNNHHVLIYKDEDGNLHEQVVSFWTAVERKKQGQPVFQLPPPKGGKPTPKEIVTTLQINDTFLLGLDEEDIDLENPKKQLLSEHLYRVQKLTAGTYVFTHHLVTNINVDRYKFNSEIEQYPKVIRKSSSTFDGIKVRVTRTGKIEEVKKIHLKITA

SEQ ID NO: 5531 - protein, 1294 aa, unidentified
  REGION 1..1294: note = Description of Unknown: Cas Enzyme sequence
  MOD_RES 592: note = Any amino acid
MKCVRLKKIKLKKWTKWDKSENSSARIFPSTPVFIEWLKMNPYDLRAKALKSNITLEEFGRIMYHLIQRRGFLSGRKGKEEGKIFDGKDNMVGIDATRKEIQGKTLGNYLHTILPEENKPYKETDDASRARARYTLRDMYVAEFNQIWDKQAVQLGLKDKMVEQKKVRTIKGGIKNNRNKKKIDLLTAEYGTENIKIEKTENNHTEEHKITTTKQVLFKELLAGVITEDEGDIKFDSNESVLFYQRPLRSQKGLLGKCSLEGRKFYDKNKKGENKWRTVGPTPCPISHPDFEMKRAYELINNITYGTNERLNETQRQIVLDLINATDRSFDFKKVKTKLNLANEIFEYDDKYPVPGNYTIKHLKPLFTQEAWNKEYTIKVIEEKPGGGKEEVTRTEYGYERIWHYFHYYEDADKLLRKLRKDYGENGTVVKNGLIEKGIEDKILGKEKDGIRKGGIKLKEDYSNISLKATRNILPYLNKKDPWGEYYQNHEAVLLGGVRNAFGKRWEYFKDSWEEIEKEVMKINRQKSNKEGEAIEKIKTYLANNDFGFEKNDRAFQKLYHHSQETEKRKLLGKLPEVENLRNPIVQQGLHXMRRLVNTLIEEQHGPFDRINVELGRDLKNGKKKRVELTDRIAENRKKNDKARAKLTEHGLRHSRENIQKYLLYKEIEDKGTGAIQCPYTGQTINISDVLGNEGKIQIEHIIPKSVSLDDSFANKTLCDAKFNGLKGELSPYQFYQNNSDEKIWGAKSWDDVKQRAFKLLPYRKAKRFTAETDFKLNSFLERQKNDMRYMSKKAKELLSNICEDVRALPGGLTAELRHLWGVNNVLQPVYNVNFPKAEIEGDKVYPYYLIVDEHNKQVEFKRIYNSKPNLKENQTTLAGKIEKREFSSTEKYVSYKAQVADENMEGKYWKVMNLSEPKKMVEVFLPMPETDEDTVVLKGKIEKGNFSNDSLYKKVDAKGIENGFYWAKLPIKNKKLIKPEKGKQPEKKGKKLLLYGVVQDGVFNSYIYQCTTTEDDGKYWLLLDLDFTNASFEIAINKCPEYNKEKQLAIQGAVNDDGIFSSDIDYQHQFSTDEKQGKYWAVFDIVGNGQHYERIVNEETKIEKGQKRIEGNIWVDKKTGEIKYDPKKNREDQRHHAIDAMVIALSEQSYFQRLSTYYGNREEKKRVNQFDKEQLIFPEPWNNFHQSVKEAAEKILVSYKQDNKVLTEVRKKITKNGKTITARGMAVRGQLHDKTFYGKNRHCNENEYVQRVTLSKLKFKRTKGKAVYLDDIVDDGVKKVLFNQIRKSLSDQD

SEQ ID NO: 5532 - protein, 1220 aa, unidentified
  REGION 1..1220: note = Description of Unknown: Cas Enzyme sequence
MSKILGLDLGTNSIGWAVVDDSQNKILGTGVRIFPMGVVEKDLGTKKEQSKNATRRDARQIRRQYFRKKLRKAKLLEVLIDHEMCPLEKDKLKKWTKWDKSENSSARIFPSTPVFIEWLKMNPYDLRAKALKSNITLEEFGRIMYHLIQRRGFLSGRKGKEEGKIFDGKDNMVGIDATRKEIQGKTLGNYLHTILPEENKPYKETDDASRARARYTLRDMYVAEFNQIWDKQAVQLGLKDKMVEQKKVRTIKGGIKNNRNKKKIDLLTAEYGTENIKIEKTENNHTEEHKITTTKQVLFKELLAGVITEDEGDIKFDSNESVLFYQRPLRSQKGLLGKCSLEGRKFYDKNKKGENKWRTVGPTPCPISHPDFEMKRAYELINNITYGTNERLNETQRQIVLDLINATDRSFDFKKVKTKLNLANEIFEYDDKYPVPGNYTIKHLKPLFTQEAWNKEYTIKVIEEKPGGGKEEVTRTEYGYERIWHYFHYYEDADKLLRKLRKDYGENGTVVKNGLIEKGIEDKILGKEKDGIRKGGIKLKEDYSNISLKATRNILPYLNKKDPWGEYYQNHEAVLLGGVRNAFGKRWEYFKDSWEEIEKEVMKINRQKSNKEGEAIEKIKTYLANNDFGFEKNDRAFQKLYHHSQETEKRKLLGKLPEVENLRNPIVQQGLHEMRRLVNTLIEEQHGPFDRINVELGRDLKNGKKKRVELTDRIAENRKKNDKARAKLTEHGLRHSRENIQKYLLYKEIEDKGTGAIQCPYTGQTINISDVLGNEGKIQIEHIIPKSVSLDDSFANKTLCDAKFNGLKGELSPYQFYQNNSDEKIWGAKSWDDVKQRAFKLLPYRKAKRFTAETDFKLNSFLERQKNDMRYMSKKAKELLSNICEDVRALPGGLTAELRHLWGVNNVLQPVYNVNFPKAEIEGDKVYPYYLIVDEHNKQVEFKRIYNSKPNLKENQTTLAGKIEKREFSSTEKYVSYKAQVADENMEGKYWKVMNLSEPKKMVEVFLPMPETDEDTVVLKGKIEKGNFSNDSLYKKVDAKGIENGFYWAKLPIKNKKLIKPEKGKQPEKKGKKLLLYGVVQDGVFNSYIYQCTTTEDDGKYWLLLDLDFTNASFEIAINKCPEYNKEKQLAIQGAVNDDGIFSSDIDYQHQFSTDEKQGKYWAVFDIVGNGQHYERIVNEETKIEKGQKRIEGNIWVDKKTGEIKYDPKKNREDQRHHAI

SEQ ID NO: 5533 - protein, 1303 aa, unidentified
  REGION 1..1303: note = Description of Unknown: Cas Enzyme sequence
  MOD_RES 383: note = Any amino acid
  MOD_RES 989: note = Any amino acid
CLLILNSQPIHIIMSKILGLDLGTNSIGWAVVDTDKENNLIENKGVVIFSEGVKNEKGTEKSRAAERTGYRSARRIKFRRKIRKYQTLLVLAKNGMCTLTVDEVKDWRNSINPETSKKAPFRQYPQNEEFLQWLRTDEESNINPYYYRDKASREKIGKLELGRAFYHMAQRRGFLSNRLDQSDKGAIEKLQPELDGIINDAENLVELSAHLEDYLIQLDIDRPSKDLNEGEKKIKTLFNAFKKNIKGKTDTETTKDELLERLYKKDNLGKVKQGISDLDEAIEKSKCKTLGQYFWKIYQQDRGLKENKIRTKYTGREEHYLTEFEVICKAQQLGGIDDSKKDPSLRYKGIVSDLYKAIFYQRPLKSQKGLVGKCSLEPTKARXPVSRPEYEEYRMYAFINNIKIKTADDENRRPLTEKERLSIIPKFQRKSKPTFEFIDIKKQLGEENEYNYRDNATVSGCPIIASLISVFGKDWRTTIYQAYRDKDIRSRKTKEFIRHKTEDEVIADIWHVLNTYTSNEKLEEFSTQKLGLDKLLAEKFGKINLKKDYASLSLNAINKILPYLKSGLLYSHAVFMANMANVVNPKRWANKADKELIESEIKQLIDNHQVENKIQFTINSLLKNCKDTDNNFHYSKEAEDGFREDLNNSFENEFGKRTWNERADKDDIFSTAFEEFKKHLKAGTFCTIKRIDEKVIDFLSDHDLLKNANKLYHPSDIEKFKRATIKDKDGNEYQGLGSPITGSIKNPMAMRTLHQLRKLVNTLITDGVIDERTKINIELARELNDANKRKAIEKWQKDREELHKIYADKIQELYKGDINPTDTDIEKFQMALEQREDKVIVGKDEILKYQLWGEQKHICLYTGKTIGLADFLGENPNYDIEHTLPREDSQDNSQMNKTLCELSFNRNIKKKRIPFELSNHADILPRIEHWKKRYEELDKEIERLKRATKGGTMEKEQKDRIIQKRHYLQMDYRYWKGKHDRFIMEEIKXGFKNSQIVDTGIITKYATAYMKSVFNKVYSVKGEMVDQYRKAWGLHNQVLDKNGKHVLNIHGLPVYEKKDRSNHIHHCVDAVTIACMDKKKYDKLAHAWGLEDKGDYQKARKELEDMKPWKDFTTDVKKLQNEVMVVHHTKDNLPKQSKKKLRKRGEIQYSKKGEPIYQQGDTARGSLHQDTFYGTIETNGELKHVVRKELTKLKESDVKNIVDNNIKAIVEQAKKDKKISFSNTGAKLSDEQIWQNEAKQIPLKKVRVFTPAMKNPLQDFKKHAKPFLSKKDYKQQYNVANDENYCMAIYEGKDKNGKLKRAS

SEQ ID NO: 5534 - protein, 1132 aa, unidentified
  REGION 1..1132: note = Description of Unknown: Cas Enzyme sequence
MKQPYRLSLDIGTNSIGWCVLDLKKDSDGVASSEDNLVPCKIRKMGVRLFTEPRNPKDGTTLAARRRDKRSQRRNLFRFKQRQQRLLKVLRKHGLLPVDDTLAQELKDLNPYYLRVRALDYPLSDFELGRAIYNLSIRRGFKSNRKSANEDGSSQLKKAIQNLRDTLSNSKARTVGEFLYNRMLEGKSVKFSYLIDDKTESHEIKNFFIDRTLMESEFDLIWERQREIASLDLNDAMKEDIKRCIFEQRPLKSQKETIGRCSFETHDENGFKIPFGERPIRASKGLISFEIYRLLQTLISLKYTVSEEEGAEKALNSFQIMRVVQQAFKKPTKKVSFATLREILKLESENIFNFEIGQLKQQLGSSKTITKSKKTELDFVPTLAIVSKYEEFKDFLNLERVVELDCFLEFIALGEDDDKLLERLQTQFALSDNRVEAFLDKVLPELDKALGTQYASLSLKALNKINKYVVEHLNQSDNPLKFNEYIQAVYPKRLEGREIHEELPYYGDLDMSCLTKSPKGYVPPKGSDADFYISNPTVHVALNELRKVVNTLIDKYGQRPHSIHLELARDLKNSKKQKDKINQTNKYNEELRKEFEERCLPLGANKDNRDDLIKYKLWKEMDVDGGRKCLYSDKCIQITELFTKNIEIEHIKPYSKSLDDGISNKVLVFHSENRFKKNQTPYQAFVQDEGKWSAIQERARDLFYIRNRRKYENVISQNEPQADAFLERHLNDTRYISRVAREYLTCIVDKPSRVVVLNGGLTSMFNKAYSLYGLLDPNSPEEKNRDDNRHHALDAFAIGVISRSLINKIHRISGGNENILNFSSAILGMKSSVELSRILEDLPIQLDKIVISCKPNRSFAGELHEETIYGAIEPSEWYKYWDEEHKPDWVNKLDTYQNYYLPTKKLSVKEFAKIEEFKSIVDKGLRTTLQKVCGLIQDKIQAKLPKEQVLSVFEYYEANYASLPKRIKIFNSLSPLKLLVKKDPSGRVTQAFKYGNNAFCLIYKDIKSKVKLKVIQRAEAYLSYREYGENYITRLAEKYLPDGLAYHDVIFPKDTLLAILRQPIEGYHSSQVYLQVESFTYRSSRDSYAIMFNESLSPIIIQNSKPFGKGELSPSGFKDYQVHRIDISPMGV

SEQ ID NO: 5535 - protein, 1235 aa, unidentified
  REGION 1..1235: note = Description of Unknown: Cas Enzyme sequence
MKELHSASLKRSIQYRIGIDVGLHSIGCAAIEVDGKGKPISILNMESIIHDGGIDPTANKTAGTRKAVSGAARRMRRLYRNRQRRLSDLDRTLEGLGWPVGNLDEMTDPWLPWNARAELTRTVINDQDRLHELLSISLRHMARHRGWRNPYRSIESLIQQSEPSTEFSTLTESVAKKLNRNPDELRQLTVAEIVRSARDSGITERVEEGENRKTGEIIRTVFVDVSTTLRGPGKVGKDGNRRSGLLASGVHQSDNVRELRKIWQHQKLPDGLFDLLVRKVFQAKSPKGSAKERVARDDLDPTQKRAEKASLAFQRFRIVSILANLRIQEPDSKRLLTPSERRLALDYLWQPVDEDGRPIQDASWSDVAALFGVNRHMLEGWARETIDGERPSARPPVCVTHARILASGVKELISEWSIADDEYREALIEILGNGSGSGAPHDMINRAEEFIAGLPETVLAKFDGIRLPEGRAAYSVKTLLKLTDRMLATEDDLHAARKFIFGVSDDWRPVPEPIGAPVGNPAVDRVLKAVNRYLLACERQWGVPESVNVEHTRDGLISEKRAREMDRDMNARFLRNREIEGEIASYLNANSEVVRSGGDDSFDENPDTPVTGQAIGRSKRDIDRLRAFTRQNGKCLYCGDPLPFPVFALDHIVPRAGGGATNSQVNLAAVCRVCNQSKTNLPFAVWAASGARPAVSLEAVMETVDGFQFFGVESRDRQYQSRFKREVKARLKRTDNDEEIDSRSIESVGWMANELHRRISEHFAKRNEGTERVTKVNVYRGWITAEARKAAGIDNDDKRIMLIGGIPGKNRLDRRHHAIDAATIAMIRQGAAQSLTVQEQVRRGIVAAGSSEQSERQEVWDLAHVLAVRDNKRRTNLIDPGSEMHWKDYKGGNAKLFDAWKEDMKSLADLIQKHLAADEVPVFEFLRLKPGSSSVHEDKIRKITKVRLGDALPVELIDHSATPQQWIALTRQPDFDHQQGLPADPSRRIRIKNQWYEADDRIEFFPTGAGCVAVRGGYAELGSSFHHARIYRCTKWLKSGATRTFYAMMRVYQIDVMPFRNTKEDLFTVDLPPQCMSRRAAEGRLREALDAGDAEYIGWIVQGDELLLDVSSQTSGAIGTFLNQFPDTTHWVVQGLADLSKIALRPRYLSGEGAVVEGASVSDQETRVVIPASSDEILNGHGIRPSVDVLFGKCQPVVIRRDILGRIRTRSDGHLPSSWSATPMKTNTVGDGIAG

SEQ ID NO: 5536 - protein, 1417 aa, unidentified
  REGION 1..1417: note = Description of Unknown: Cas Enzyme sequence
MEKILGLDLGTNSIGWAIREVNPELENQIIDKGVLTFDKGVAEDKSGEHPMVQKRTESRGKRRNYQAEKYRKWELLECLIHNQMCPLSIEELNEWRYYTKRLGRKYPKNEKFIQWLRFDFDGDGKPDFERLGFSKHESYYLFRALIVDESKVDIFRKEPSIIGRVLYQLVQRRGYNDGQNIDEAEKDELSKTIMKGGGEAGAVGVNEILPYLEKHKTLGAALYYLQKEQKTRIRKRYNLRSHFQNEIKEICRIQKLDHLYKAFWGAIIWQRPLRGQKGLVGVCTFEQNKRRCPISHPFYEEYRTWVFINNLKIKPIVKNGKEINSMPLNDALHQVVYPQFIKAGSDFKLSSIIAKLKEKGFEISAKFPEDTKVLSLSFIYQIGKIFGKEWQEKVGWTDSLEGKSKVVPYDIEDLWHLHFTKKDNKESGESSNDFLHRFGLEKLELDEEKAIAFSKIRLQQGYATLSLNAIKKILPYLQQGFLYSEAVYLANLPKILGITTVDNTTIEHFAEEVKRIHKQNSIDKKTIQVVNELINDQLNSDSRFGMDPAYELDKSDFDDIDAKFQEVFGKYSWQNLEADSKNAALKLVSEKYLSFLRKRIHTKNVFEKTERLHAKIFNWLKETYDVPDENIKHLWHPSEQESYLPAIVENGKAYLRTPEPISKGFKNPMALKTLHKLKRLVNYLIKVGKIDEDTRVAIEIARELNDANKRKAIERWQREREKHNADYKKMIDELNEKTNSTFNSSDKSLIDKIRLWEEQNRLCIYTGKTISLSDLLSGNKYDFEHSIPASMSFDNELKNLTVADSFYNREIKKKRLPSECPNYNDEFVFDGKTYPPILSTLQNIFGRMVENEVDIKGKIIIKQSFEKIEQLEKQYLEWKAKTSDDKQIKDNIIIKRHLIKMELDYWRYKLNTFTTTEYKASWRNSQLRDTQTITKYALPFLKTVFHKVEVQKGTITADFRRIYQIQQPLEKKERTKHSHHAIDAAVLTLIPPAAKRDKILLRYNESKETKQAYHAKPDHWSSFHQQYIQAIEKDILINYLPDHRTLTPTFKKVRKRGQVQYVKEKLPNGKWQFKHDINGKKIPLIAKGDSIRGQLHKESFFGAIKMPIYELKNGKYIPKSDGKGNFLFQENEKRNDSIFFVEREINLSNFTKLEDLEIVIDPNLRVYLQNLIKERISSGKSFKAAISEPFWAFGKKFDKNGNPISPIRHLRVKAKGSGAYINNPAEIRIRKNYESLKPYKNMYYAINGEIPFCALYELDGMNKVERELVSYPILEIAHNFKFNGPTGIVEAYQKKGTKLILPLKAILRPGQKVIFYKESVAELLDLSNNNSYSELSKRMYTINNFDGDRIVFIHHLCSLPQESITTEMENRGFKKGASFLDYDHPFQKLRLSKNALNMAIEDKDFTLLLDGSISWKF

SEQ ID NO: 5537 - protein, 1125 aa, unidentified
  REGION 1..1125: note = Description of Unknown: Cas Enzyme sequence
MGDNQQTGKSPVSNEGPFTFGLDIGIASVGWSVISERRIIDLGVRAFDKAETADKGESLNLQRRKARLLRRRLWRRAWRLTKLGRLLKRHGVLNSVDALKTQPNFTDSTWALRVAGLDRQLTPMEWARVIYHLCKHRGFHWISRAEERKADEDTKGESGRVKAGLAHTKKLMTEKGYRTAAEMVLAEFPDAQRNKRGDYGKALSRVLLDAELASLFASQREHGNPYATPALEEALRGRNGSRSGLLWSQKPALAGKDLLKMLGHCTFEKGEYRAPKASFTAERHVWLTRLNNLRVIVDGVSRGLNDDERRFSLPLPYQSGEKFTYKTLRKALVQAGKLGESFRFGGLAYPSGKQKEEEKAKDPEDQPLVKLPAWHELRLAFNKSGLKSEWDQISTAAIEGRPEQLDGIAWVLSVYKDDKEVEAELEKLGLPGDSRVIETLLGIRFDKFHALSLKALRQIVPLMEQGHRYDEAVAKIPDYGHHSQRFVAGAGSLRFLPPFYDGRDKDGRMKFRDDIDIPRNPVVLRALNQARKVVNALIKEYGAPWSVHIEMARDLSRPMDERRDIEKLQKEYREKNEKAREQFTADFNRRPSGVEFEKWLLYREQHGKCGYSLEPLDLHRVIDDPSYVQVDHALPYSRSYDDSKNNKVLALTKVNQDKGNRTPYEFLDGASESERWRNFVSWVEGNKSYRQAKRSRLLRKNYGAEEASSFKDRNLNDTRYICKFFKNYVEQYLQLADGSDNKRCVVLNGQLTSFLRARWGLIKTRDESDRHHALDATVVAACSHAMVKRLADYARKKELENLREGFPDPETGEINSPSAHQRLTEHFPDPWSHFRHELTLRLKTDDVAALREEAGRLGSYSPQALECIRPLFVSRAPQRRNGGAAHKETIYAQPQRLLKQGGVTQKVALSSLTLKDLNNLADPHRNEKLYSAIRTRLEAHAGKADKAFPADNPLRKPDKQGNSTGPVVRTVTLVIDKLSGLAIRGGIAKNDSMLRVDFFLSSRKFHVVPVYVHHKVAGLPNRAIVAYKDESEWTEVQESDFLFSAYPNDLLRVTLKKDSVLGYYAGCDRSTGAISLWVHDRNQAVGKDGLVRGIGVKTCISLEKLHVDTLGRAYPAPAEKRSGLA

SEQ ID NO: 5538 - protein, 1378 aa, unidentified
  REGION 1..1378: note = Description of Unknown: Cas Enzyme sequence
MKTILGLDLGTTSIGWAFVKEGDNQNSTIEKIGVRVNPLTTDEQTDFEKGKSISSNADRTLKRGARRNLDRYKQRRNNLVSVLKEHNIISDKSHLAEATKESTHSTYLIRSKAASEKIEKEDFARVLLMINKKRGYKSSRKAKNEDEGLVIDGMAIAKTLYEQNLTPGEYSLQILKSGKKYIPDYYRSDLKAEFEKVWESQKRFYPEILTDEFKNELNEKGQKATVAIFIARHKIYTAENRTGTRDEKKLKLYQWRSNALKEKLKIEEVASVISEINNNIHSSSGYLGSISDRSKELYFKKETIGQYLYHQLKNNLHFRTKGQVFYRQDYLDEFETIWETQAKFHTELTPELKIEIRDIIIFYQRRLKSQKGLISICEFESKQVQVTNDGKMKTKTIGYRVIPKSSPLFQEFKIWQNLNSLEAQNKKTNQIVEFSHEQELKEKLFEELNIKGNLSKEQILTKIGFKPSEWELNYSVVEGNRTNHAFYEIFEKIFLFEGNEEIDFADMPAIEIRSIVADLFNALNIDTKILQFDAELEGKSFEKQSSYQLWHLLYAYEGDNSNTGNDKLIEQLQKKFGFKKEHAQLLSNVAVSEDYGSLSAKAIRKIFPYIKENKYNTACALAGYNHSSSKTKEENDTRLLKEKLEILPKNSLRNPIVEKILNQMINVVNAIIADPAFGKPDEIRIELARELKKNAKERAEMTKNINGAKLLHENIIKLLQNEFGIKNPSRNDIIRYKLYDELKGNGYKSLYSDTYIPREKLFSKEFDIEHIIPQSRLFDDSFSNKTIAPRQENINKKDETAYDFVTNSLGKEALDNYVARVEMMFKLKEGNISKAKFKKLMMKGTEIGKGFIERDLRDSQYIAKKAKELLEEVCRYVTTTTGSITDRLRNDWDLINVMQELNFDKYKKTGLTEIIEKKDGNTKERIIDWTKRNDHRHHAMDALTVAFTKRSHIQYLNNLNARSDKASSIYGIEQKETFIQVDDTGNKKRKFKPPLKNFREEAKAHLENVLVSYKAKNKVVTKNKNKIKVKGGEKVKIELTPRGQLHKETVYGKLKLYSSKEEKISVKFDEATILKVAKYREREALLQRLREYGNDPKLAFTGKNSPAKNPIYLDPQKTMQLPDKVKLVELEDDYTIRKEIDPDLKIDKVIDIGIKRILQKRLEEYKGDRKEAFSNLEKNPIWLNKEKGIAIKRVKISGVKNAEALHYKKDHIGNVILDPKGNNVPSSFVSTGNNHHVAIYQDENGDFQEKVVSMYEAVERVNQQLPAIDKTFNQYLGWKFLFTMKQNEYFVFPTQGFDPKEIDLLNPENNKNISKNLFRVQKIATKNYMFRHHLETNVEDKKELKNITFIHIQSCSLLKNILKVRINHIGQIVKVGEY

SEQ ID NO: 5539 - protein, 1224 aa, unidentified
  REGION 1..1224: note = Description of Unknown: Cas Enzyme sequence
MKKILGLDLGVASIGWAYIHEADKENEKSEIVDLGVRIIPIDSDNKTKFEKGQASTVNQDRTSKRGARRNLDRYQLRRKSLVNVLKQLNMLPDENLIKLKVIELYALRDKALKQELSLTEIGRILLHLNQKRGYKSSRKEDAKTENTDKKSKESEYLGGINSRSAELKEKGITVGQKLYFDFLENFNYNQQQIVSLSIKNKIYPREDYITEFNAVWEFQSKFHPNVLTENNKIKIRDGIIYMQRPLKSQKGLISICEFEGRKVRVNKEGKEQEKFIGPRVAARSNPLAQLSKIWESINTLTLDSKDSQTKRIPSIEEKQKLFELLNNSEKIGIKDIRKILGDNSLRSNQQVEKAGLRGNETRVRIIAALEKNNIDKQVIDKLTQLDISTINKAINQNIHESVNGYQSKSKNKKFELDAYSVIDKQSGEIIELKEITTDIDKQPLYIVWHLLHSIDDKTELKNAILKHKSLAHIGITEEIALALTTVVFKNDDYANKSTKAIRKILPFLMNGYVYSEACALAGYNHSDSLTKVDNLKRVLLEQLPQLKRGELRQPVVEKILNQLINIVNAILKEPSMGKPDEIRIELARELQQSADERSDSYSYNNKRSAENDEIAKEIEKYKLKPTGHRIKKWRVWHETKGFSLYTGKTIGLSEFLNADGVDIEHIVPQSLLFDNSLSNWTICERAENINKGALTAYDWMKGKGDAALKEYINHVNYYYEQFISKDNKEKAIYRVGISKRKRDYLLMPFEKIPSDFINRQLNETRYITRKATEILHQVCHQVKVTSGGVTDYLRHHWGYDNILHDLNFERYKQAELTYINEDKKERIKDWSKRMDHRHHAIDALVVACTKQSIIHRLNNLNQKKEKFENIKDVENKGLKKLVQDYKLFDTNTLSNKIANTLISFKAGKRVVSRRKNKYSNGKLQQRLEPRGSLHEESVYGLIKRIAEKPLKINSKIKLEDIENVVSTKHKALLKERLAQFDNNPALAFDKLNKNPIWINEEHKKALTEVKVYEYTTAIKYKLNESFKEKDAEYIIDKAIREIVKQRFKEKGNNALKDLTNEPLLFNDKPINTVRCYAEVSAYEILKYDKEKNKAISVVKPGNNHHVTICSDENGKQYELETVTFWEAVARAKQGIPIYSKPINDNHILVTTLQENEIIEKVSNENNKQYFRLRKMSNQEYYFLNIYTTSVDYSMTAKKLSNCLYSTPNNFSYKKIKINILGKIV

SEQ ID NO: 5540 - protein, 914 aa, unidentified
  REGION 1..914: note = Description of Unknown: Cas Enzyme sequence
MKKILGLDLGTNSIGWALVNEAESGEEKSSIVRLGVRVIGYDNFVSTKTGKESKEPEKDFAGGKGISPNAGRTMKRTMRRNLQRYKLRRENLIEILKEYGFISDENILSENGSRTTFETYRLRAKAATEEISLEQLARVLLMINKKRGYRSSRKVKNEDDGQLIDGMEIAQKLYDENLTPGQFCLRLLENGQKTLPDFYHSDLLAEFDKIWAEQKEFYPDILTDKLKENLCGKNGKQTWAICATPFQIVGIKRDVKGEELKKENFVWRVKALSEKMDLESLAVILQEVNAQINNSGGYLGKISDRSKELFFNRQTVGQYQMAVLDKNPNASLKNMVFYRQDYLDEFNTIWETQAKFHKELNDKLKREIRDVVIFYQRKLKSQKGTIVFCEFESRKTEVEVEGKKKIRTVGSRVVPRSSPLFQEFKIWQNLNNIELTDKDSGEMRALTPEEKDTLFQRLQVTEKLRDKEVLSILFDKSAKKYALNYEKLDGNKTRAAIFNVLGDSGLLSFDSNKELDEQPLYKLWHLLYSYEDDNSVTGINRLVNNLKLTFGLSEETAKKLANISFQDDYGSLSAKAIRKILPFLKEGHKYDAACGYAGYRHSASSLTKEEIENKVLKDKLENLPKNYLRNPVVEKILNQMVNVTNGVIDAYGKPDEVRIELARELKKNAKEREQMTTAISESTKKNEEIVKTLQREFGITNPRRKDIIRYKLYMELAANGYKTLYSDTYIAREELFSKNFDVEHIIPQARLFDDSFANKTLEKRDVNIKKGNSTAYDFVKNEYGEDKAKEYLIKIEKLLKDEKISRTKHKHLTWSEKDIPEDFIDRDIRDTQYIAKYAKTMLCDIVKEVVSTTGSITDRLRDDWQLVDVMKELNWDKYKSLGLTEEFTNEDAAESVRLKIGQSEMTIATTQWTL

SEQ ID NO: 5541 - protein, 1091 aa, unidentified
  REGION 1..1091: note = Description of Unknown: Cas Enzyme sequence
MWRLSLDLGTNSIGWTALGLTHILVSNTVKPQVRNIIDMGVRIFPDGREAKTGTPLNEARRNARQMRRQRDRKIRSKRAMLNFLVSNKLMPKEREEQQAIARLDPYALRAAAFERKLEPFELGRIMMQFSMRRGFKSGRKEQAENAAEREGMLGGIESLKTKLQGLTLGQWLCKRRDEKKPVRFIAQIEKTKVIYDFYPSREMYETEFAAIREKQEKHFKKINWERLHWLIFFQRPLKRPERGRCQFYTDEDRGYRAFPSAHRFRILQEINNLRYYNEENREELIPAELKLKLFEALDSQKSLKFNRIRKLLGENYDGSFNLEDSKRSELKGNETSVEFRKPELFGPAWDKLEIQKQDEIIEKLMIEDDEKVIRDFLSPFGLTEEQIQKISGYNLPVGTTMLSSRFMIDCSAIMLKDWLPYSEAVKQMGLHHSKKEKQDIQRSLPYYGKILVGQVSGAKGESYKGGEEEKFGRIANPTVHIALNQLRKLVNALIRRYGNPSQIIMEVNRELKLSKTKKDEIFREQAKNQKDNERIEKELSDLGLIKISSEDKKKFKLWEELAVEGIARLCPYCGKTISAKQLISGNVEIEHILPYSRTLLNSRDNLTVAHRDCNQKKKNLSPFEAFGKSPKGFDWNRIMELAAKLPFSKRRKFFPDAMDRFHEEEGGFLDRQITDTAYLSKAGKEYLSVICNGNAIWVTPGRLTSLLRGFWGFNTLLNRGHDTWYKNRNDHRHHALDALVIGLCDRGLLAEAAKLNSGRGYREIDAPPCPIERRDIEERLKSIIVSYKQDHGKEGKLYAETAMAKHSYLEQINPDDLKENEINRIVPKAIQNDIAALVQKEGFRKAKTLIKGKYKYLRVFRDKWVTRAPLESLSERDIPNIADPILRKQIQKYVESHPIKAGQKLQDVLNKFSEKNGIYSIRYFPKDQVPVLIESCENKAYMPGDYYRVDVWKIPQAKGKYKFEGVFISRPEAMRQKLHGDDPASLRKPHPSAKLIMSLCKNDVVKLTNETEQECCRIAGFSTTNNCIDIRPIYASDTIAAWKKDTNINLTSDFWPSDSGSQNFKSINLLFSKYEIKLVKITVDGKPIYRS

SEQ ID NO: 5542 - protein, 1082 aa, unidentified
  REGION 1..1082: note = Description of Unknown: Cas Enzyme sequence
MWRLALDLGTNSIGWTAFRLKNAKKPQIQNIIDMGVRIFPDGREAKTGTPLNEARRNARQMRRQRDRKIRRKRAMLNFLVNNKLMPKEHEEQQDVARLDPYTLRATALERKLKPFELGRIMMQFSVRRGFKSGRKEQAENTAEREGMLGGIESLKTELQGLTLGQWLCKRREAGDPVRFKAQMERTKIIYDFYPSREMYETEFAAIREKQEKHFKEINWDRLYWLIFFQRPLKRPERGRCQFYTDEERGYKAFPSAHRFRILQDINNLKYYNEENREEPIPSELKLTLFEALNSQKSLSFDRIRKLLGEDYIGSFNLEDNKHDKLKGNETSVDFRKPELFGLAWDELEIQKQDEIIEKLMIEDDENIIRDFLKPFGLTEEQIQKISGYNLPVGTTMLSSRFMIDCSAIMLKDWILYSEAVKQMGLHHSKKEKQEIQRSLPYYGKILVGQVSGAKGESYNGDEEEQFGCIANPTVHIALNQLRKLVNALIRRYGNPSQIIMEVTRELKLSKTKKDELNREQTKNQKANERIRKELTDLGLLQISSEDIKKYKLWEELAVEGIARLCPYCGKTISAKQLISANVEIEHILPYSRTLLNSRDNLTVAHRDCNQKKKNLSPFEAFGNSPKGFDWNRIMELAAKLPFNKRRKFFPDAMDRFHEEEGGFLDRQMTDTAYLSKASKEYLSVVCNSNAIWVTPGRLTSLLRGFWGFNTLLNRGHDTWFKNRNDHRHHALDSLVIGLCDRGLLAEAAKLNSGRGYREIDAPPCPIKRNDVEERLKSIIVSYKQDHGKEGKLYAETALAKHSYLEQINPDDLKENEINRIVPETIQNDITALVKKEGFRKAKTAIQGKYKYLRVFRDKWVTRTPIESLSDRDIPNIADPLIRKQIQKYIESHPLKAGQKLQDVLTMFGNKKKIHSVRYFPKDQVPVKIDSCDNKAYMPGDFYRVDIWKIPQPKGKYKFEGVFISRPEAVRKDVLLKRHEHYAAKLIMRLCKNDIIVLSNETEREFCRIAGFSTTKNCIDIRPIYASDTIAVWKKSTNINLTSAFWPSDIEGNYYKSINVLFNEYEIKLVKITVDGRVIYRSI

SEQ ID NO: 5543 - protein, 1086 aa, unidentified
  REGION 1..1086: note = Description of Unknown: Cas Enzyme sequence
MFRLSLDLGTNSIGWTVLRLKNHKKPQVQNIIDMGVRIFPDGREAKTGTPLNEARRNARQMRRQRDRKIRRKRAMLNFLVNNNLMPKEREEQQAVAQLDPYALRATALERKLEPFELGRIMMQFSMRRGFKSGRKEQAENSAEQEGMLGGIESLKTELQGLTLGQWLCKRQEAGDPVRFVAQIEKTKVIYNFYPSREMYETEFAAIREKQEKHFKEINWDRLHWLIFFQRPLKRPERGRCQFYTDEDRGYRAFPSAHRFRILQEINNLRYYNEENREEPIPFELKQKLFEALNSQKSLSFDRIRKLLGENYTGSFNLEDNKRDKLKGNETSVDFRKPELFGPAWDELEIQKQDEIIEKLMIEDDEEVIRDFLKPFGLTEEQIQKISGYNLPIGTTMLSSRFMIDCSAIMLKEWLPYSEAVKQMGLHHSNKEKQKIQYSLPYYGKILVGQVSGAKRESYNGGEEEKFGRIANPTVHIALNQLRKLVNALIRRYGNPSQIILEVNRELKLSRFRKDEINKEQAKNQKDNERIRKELTDLGLLQISSEDIKKFKLWEELATEGIARLCPYCGKTVSAKQLISGNVEIEHILPYSRTLLNSRDNLTVAHRDCNQKKKNLSPFEAFGNSPKGFDWNRIMELAAKLPFSKRRKFFPDAMDRFHEEEGGFLDRQITDTAYLSKAGKEYLSVICNSNAIWVTPGRLTSLLRRFWGFNTLLNRGHDTWYKNRNDHRHHALDALVIGLCDRGLLAEAAKLNSNRGYGEIDAPLCPIEKRDIEERLKSIIVSYKQDHGKEGKLYAETAMAKHSYLEQINTDDLKENEINRIVPKAIQNDIADLVQKEGFRKAKTAIQGKYKYLRVFRDKWVTRTPLESLSDRDIPNIADLILREQIQKYVESYPIKAEQKLQDILNKFRDKTGINSIRYFPKDQVPVLIESCDNKAYMPGDYYRVDVWKIPQAKGKYKFEGVFISRPEAMRQKLHGEDMSSLRKPHPAAKWIMSLCKNDVVKLSNETTQEFCRIAGFSTTRNCIDIRPIYASDTIATWKKNTNINLASAFWPSDIDGNYFKSINILFNEYEIKLVKITVDGRTIYRS

SEQ ID NO: 5544 - protein, 1081 aa, unidentified
  REGION 1..1081: note = Description of Unknown: Cas Enzyme sequence
MFRLSLDLGTNSIGWTALGLTNTAKPQVQNIIDMGVRIFTDGREAKTGTPLNEARRNARQMRRQRDRKIRRKRAMLNFLVNNKLMPKEREEQQVIARLDPYDLRAAALERKLKPFELGRIMMQFSMRRGFKSGRKDQAENAAEREGMLGGIESLKTALQELTLGQWLCKRREAGDPVRFIAQTEKTKIIYDFYPSREMYETEFAAIRKKQEKHFKEINWDRLHWLIFFQRPLKRPERGRCQFYTDEDRGYRAFPSAHRFRILQEINNLRYYNEENREEVISSELKQKLFEALNSQKSLSFDRIRKLLGEDYTGSFNLEDNKRDKLKGNETSVDFRKPELFGSTWDELPFQKQDEIIEKLMIEDDEKEIHDFLKPFGLTEEQIQKISGYNLPVGTTMLSSRFMIDCSAIMLKEWLPYSEAVKQMGLHHSKKGEQNIQHSLPYYGKILAGQVSGAKGESYNGNEEEKFGRIANPTVHIALNQMRKLVNALIRRYGNPSQIIMEVNRELKLSKTKKDEIFREQTKNQKDNERIRKELTDLGLLQISSEDIKKFKLWEELATEGIARLCPYCGKTISAKQLISGNIEIEHILPYSRTLLNSRDNLTVAHRDCNQKKKNLSPFEAFGSSPKGFDWNRIMELAAKLPFSKRRKFFPDAMDRFHEEEGGFLDRQITDTAYLSKAGKEYLSVICNSNAIWVTPGRLTSLLRGFWGFNTLLNRGHDTWFKNRNDHRHHALDSLVIGLCDRGLLAEAARLNSNRGYREIDAPPCPIERRDIEERLKSIIVSYKQDHGKEGKLYAETALAKHSYLEQINPDDLKENEIYRIVPKAIQNDIAALVQKEGFRKAKASVQGKYKYLRVFRDKWVTRAPLESLSERDIPNIADPLLRKQIQKYVESHPIKAGQKLQDVLNKFSNKTGIYSIRYFPKDQKPDTIRSCNNKAYMPGDYYRVDVWKIPQAKGKYKFEGVFISRPEAVQKDVLLERHKHSAAKLIMRLCKNDIIVLSNETEKEFCRIAGFSTTNNGIDIRPVYASDTIAAWKKDTNINLTSAFWPSDIERQNFKSINALFNEYEIKLVKITVDGRAIYRS

SEQ ID NO: 5545 - protein, 998 aa, unidentified
  REGION 1..998: note = Description of Unknown: Cas Enzyme sequence
MHGLFLKLVEANLLPAPPNLNNGPIAPMIDQTIKELDVALIKADENADSSKLPYYLRAKALDYPLKPFELGRALYHLAQRRGFKSNKRADAKTDSEERGKVKEGIRREAERMQAQGARTRGEMLSKEDPETERIRARSNFRDWIEHEFNTIWEKQRDFHPGLLTDELRSEIHKRIFDQLPLKPMDHLVGYCSLEPGRWIKVKRYKRRDGRPLDKPRLVSVFKAPRRLALADPLAQQIRLLQRLNDLKIKYADRTTGVLTPEQRTWLLEQLQNGDVSLKDIRKQLGLKKQDSLNFESGFKSMVGNRTAGKMKEILGKTWDSYTELHKSKLVYQILKSQNISDLKSELEAADWRLEPDIAARLADVDLEDGYLAFSRTACEKLLPGLEAGRSLNSIREEIYGASKPQRAVNELPRVAEAFPDLRNPVVRRVLTELRKVVKAIIRRWGMPLSFTLELARELKKTREARKAVTDKIEKRTKERERARKELIDGNFVTIPKDRDIDKYLLWKECGARCPYTGKSIGGDLFSAQSTWDIEHIIPKSRSLDDSFANKTLCCSEFNRIYKHSKLPTELGTEKMKEIISRVQKWPDSQMKTEKLERFLQTEIDDDFSSVQLNDTAYATRLACKYLAMLYGGAFGSEGRRILTTKGHVTAELRGSWGLNKLLGGFKKNRGDHRHHAIDAVVVALTTSDALKLLTDAWKKYENMHYSRFPQIPPPLDNLFETAAQALDNLVISRQLKGKLSGRLHEETNYGLLNDEVKTIRAAVGPAAEPAARLLTIGNLKHDFEIDGVGIIDPVIKNRILIQLDFLGESDPKKAFKDPKNLPYLETKEFKRIPIRKVKLAFKQKTEDVGEKYRIRHVIPGSNHHMAIFESIDQKGETKWDFEIVTLLEAARRHAKREPIVNRNKDGFRFLMTLRAGDTVRYIENGKMVYGHVETITSGIYITARGISKPFGRIGITMQYETLGQKSESYTCPRINAWCKKKLEKVQIDPIGEIRISRD

SEQ ID NO: 5546 - protein, 1042 aa, unidentified
  REGION 1..1042: note = Description of Unknown: Cas Enzyme sequence
AKTGTPLNEARRNARQMRRQRDRKIRRKRAMLNFLDNNRLMPEEREEQQAIARLDPYALRAAALERKLKPFELGRIMMQFSMRRGFKSTRKDQAENTAEQEGMLGGIESLKTELQGLTLGQWLCKRREAGDPVRFIAQIEKTKVIYDFYPSREMYETEFAAIREKQEKHFKEINWDRLHWLIFFQRPLKRPERGRCQFYTDEDRGYRAFPSAHRFRILQEINNLKYYNEENREETIPSELKLKLFDALNSQKSLSFDRIRKLLGEDYTGSFNLEDNKRDKLKGNETSVDFHKPELFGPAWDELEIQKQDEIIEKLMIEDDEKVIRDFLSPFGLTEKQIQKISGYNLPVGTTMLSSRFMIECSKVMLKDWLPYSEAVKQMGLHHSNKEKQKIQHSLPYYGRILVGQVNGAKGESYKGNEEEKFGRIANPTVHIALNQLRKLVNALVRRYGNPSQIIMEVNRELKLSKTKKDEIFREQTKNQKDNERIKKELTDLGVVKIDSEYIKKYKLWEELATEGIARLCPYCGKTISAKQLISGNVEIEHILPYSRTLLNSRDNLTVAHRVCNQAKKNKSPFEAFGNSPKGFDWNRIMELAAKLPFSKRRKFFPDAMDRFHEEEGGFLDRQITDTAYLSKAGKEYLSVICNGNAIWVTPGRLTSLLRGFWGFNTLLNRGHDTWFKNRNDHRHHALDALVIGLCDRSLLAEAAKLNSNRGYREIDAPPCPIERRDIEEQLKSIIVSYKQDHGKEGKLYAETALAKHSYLEQINPDDLKENEIYRIVPKAIQDDIAVLVQKDGFRKAKTSIQGKYKYLRVFRDKWVTRAPLESLSERDIPNIADPLLRKQIQKYAESHPIKAGQKLQDVLNKFSNKTGIYSIRYFPKDQVPVSIESCDNKAYMPGDYYRVDVWKIPQAKGKCKFEGVFISRPEAMRQKLHGDDPASLRKPHPAAKWIMSLCKNDVVKLTNETEQEFCRIAGFSTTNNCIDIRPIYASDTIAAWKKDTNINLTSAFWPSDSGSQNFKSINLLFSKYEIKLVKITVDGRTIYRF

SEQ ID NO: 5547 - protein, 929 aa, unidentified
  REGION 1..929: note = Description of Unknown: Cas Enzyme sequence
  MOD_RES 270: note = Any amino acid
  MOD_RES 440: note = Any amino acid
  MOD_RES 445: note = Any amino acid
TSLRNMVFYRQDYLDEFEILWSKQAEYHRELTETLKKEIRDVVIFFQRQLKSQRSLISFCEFENRKIEKEVDGKKKIIIIGNRVIPRSSPLFQEFKIWQIINNIKITDKNSGEITLFDKEEKEKLFAELQTIESLSTKKALEVLFEKRAKNYLLTNYKEEKIEGNRTKAKIYEILNQTLTDEELNELWHLLYSWERENSDLAKKLEEKYAYSSDIAKKLSNIAFLDDYGNLSAKAIKKILPHLKDGKQYDKACELAGYTFSKMSLTKEQXENKILKDKLEILPRNSLRNPVVEKILNQMVNVINSIINTYGKPDEIRIELARELKKNAKEREKITDGIADATKENERIKKLLQFAPFNIANPSKNDVVRYKLYEELASNSYSTLYSNTYIPQEKLFTKDFDIEHIIPQSRLFDDSFSNKTLEKRQENIDKGNSTAYDWMXKKGEXKLADYETKIKELFNQERISRSKYNKLKMSEKYIPDNFIDRDIRDTQYIAKKAREMLQELVKTVIPTTGSVTSRLREDWQLVNIMQELNLPKYEKLGLVEEIENDDGQKIKRIKEWTKRNDHRHHAMDALTVAFTRYAHIQFFNHINSHYDSTSEIYGIKQKYFTNNNRALPPIPLKDFRAEAKKQLENILVSIKAKNKVVTQNINKANSQKTLTPRGQLHNETIYGNIKQPLVKIDKKTGKKKVEFESLYTIRKEISPDLNVDKVVDLRVRKILKERLAEYGNDPKKAFTNLEENPIWFNKEKGIAIKRVAISGVAKAIAIHGNKDFISPNNNHHIAIYKDEKGKLQESVVSFFEAVQRANKNLPIIDKELNKDKGWQFLFTMKQNEYFVFPNKETGFDPQKIDLLDEKNYALISPNLFRVQKIASRNYMFRHHLETKVSFETKEMEKQLRGIAWELYQSTEKLKDLVKIRVNHIGKIIQIGEY

SEQ ID NO: 5548 - protein, 1092 aa, unidentified
  REGION 1..1092: note = Description of Unknown: Cas Enzyme sequence
MWRLALDLGTNSIGWTALGLAYAKVSNDIKPQVQNIIDMGVRIFPDGREPQKGTPLNEARRNARQMRRQRDRKIRRKRAMLNFLVNNGLMPKEREEQQDVARLDPYALRAAALERKLEPFELGRIMMQFSVRRGFKSGRKEQAEESEEKKGMLGGIESLKPELQNQKLTLGQWLCKRREAGGSVRFIAQTEKTKIIYAFYPSREMYETEFAAIREKQKKHFKEINWERLHCLIFFQRPLRRPERGRCQFYTDEDRGYKAFSSAHRFRILQEINNLRYYNEENREEVIPSELKLKLFEALNTQKSLTFNKIRKLLGANYTGSFNLEDSKRSELKGNETSVDFRKPELFGPAWDELEIQKQDEIIEKLMIEDDEKVIRDCLKPFGLTEKQIQKISGYNLPVGTTMLSSRFMIDCSAIMLKDWLPYSEAVKQMGLHHSKKEKQDIQHALPYYGKILVGQVSGAKGESYNGNEEEQYGRIANPTVHIALNQLRKLVNALIRRYGNPNQIIMEVNRELKLSRFRKDEINKEQAKNQKDNERIRKELTDLGLLQISSEDIKKFKLWEELASEGMPRRCPYCGKTISAKQLISGNVEIEHILPYSRTLLNSRDNLTVAHRVCNQAKKNLSPFEAFGNSPKGFDWNRIMELAAELPFRKRRKFFPDAMEHFREEEDDKKGGFLQRQLTDTSYLSEAAKNYLSSICDDDSIWVTPGRLTSLLRGFWGFNTLLNRGHDTWYKNRNDHRHHALDSLVIGLCDRGLLAEAAKLNSGRGYREIDAPPCPIERRDIEERLKSIIISYKQDHGKEGKLYAETAMAKHSYLEQINPDDLKENEICRIVPKTIQNDIAALVQKEGFRKAKIAIQGKYKYLRVFRDKWVTRAQLESLSERDIPNIADPLLRKQIQKYVESHPVKAGQKLQDVLKKFSEKNRIYSIRYFPKDQVPVLIESCDNKAYMPGDYYRVDVWKIPQAKGKYKFEGVFISRLEAMRQKLHGEDTASLQKPHPAAKLIMSLCKNDVIKLSNETEQEFCRIAGFATTRNKIDIRPLYASDTIAAWKKDTNINLTSAFWPSDIEGQYFKSINVLFTEYEIKLVKITVDGR

SEQ ID NO: 5549 - protein, 957 aa, unidentified
  REGION 1..957: note = Description of Unknown: Cas Enzyme sequence
QAEESEEKKGMLGGIKHLEPELQKQKLTLGQWLCKRREAGGSVRFKAQIEKTKVIYDFYPSREMYEAEFIAIREKQEKHFKEINWERLHLLIFFQRPLKRPERGRCQFYTDEDRGYKAFPSAHRFRILQEINNLRYYNEENREEAIPSELKLKLFEALNTQKSITFNKIRKLLGEKYDGSFNLEDSKRSELKGNETSVDFRKPELFGPAWDELEIQKQDEIIEKLMIEDDENIIRDFLTPFGLTEEQIQKISGYELPVGTTKLSSRFMIDCSAVMLKDWLPYSEAVKQMGLHHSKKENQNLQHSLPYYGKILVGQVSGAKGESYKGNDEEKFGRIANNPTVHIALNQLRKLVNALIRRYGKPSQIILEVNRELKLSKFRKDEINKEQAKNQKDNERIRKELTDLGLLQIRSEDIKKYKLWEELAVEGIARLCPYCGKTISAKQLISGNVEIEHILPYSRTLLNSRDNLTVAHRECNQAKKNKSPFEAFGNSPKGFDWNRIMELAARLSAKKRRKFSSDAMDRFHEEKSEEEGGFLHRQLNDTAYLSIASKEYLSVICNCKSIWVTPGRLTSLLRGFWGFNTLLNRGHDTWYKNRNDHRHHALDSLVIGLCDRGLLAEAAKLNSGRGYREIDAPPCPIKRNDIEERLKAIIVSYKQDHGKEGKLYAETAMAKHSYLEQINPDDLKENEIHRVVPKTIQNDIAALVQKEGFRKAKTSIQRKYKYIRVFRDKWVTRAPLESLSERDIPNIADPLLQKQIQKYIESHPVKAGQKLQDVLNKFSNKNGIYSIRYFPKDQVPVKIESCNNKAYMPGDYYRVDVWKIPQAKGKYKFEGVFISRPEAMRQKLHGDDPASLQKPHPAAKLILSLCKNDVVKLSHETEQEFCRIAGFSATQNKVDIRPLYAGDTIAAWKKDTNINLTSAFWPSDIEGHYFKSINVLFNEYEIKLVKITVDGRTIYRS

SEQ ID NO: 5550 - protein, 946 aa, unidentified
  REGION 1..946: note = Description of Unknown: Cas Enzyme sequence
MWRLALDLGTNSIGWTALRLKNPKKPQIQNIIDMGVRIFPDGREAKTGTPLNEARRNARQMRRQRDRKIRRKRAMLKFLVNNRLMPKEREERQDIARLDPYALRAVAMERKLKPFELGRIMMQFSIRRGFKSGRKEQAENAAEREGMLGGIESLKPELQKQKLTLGQWLCKRRKEGGSVRFKAQIEKTKIIYDFYPSREMYEAEFTAIREKQEKYFKEINWERLHWLIFFQRPLKRPERGRCQFYTEEERGYKALPSAHRFRILQDINNLKYYNEENREEPIPSELKLTLFEALNSQKSLSFDRIRKLLGEDYIGSFNLEDNKRDKLKGNETSVDFRKPELFGPAWDELEIQKQDEIIEKLMIEDDEKVIRDFLTPFGLTEEQIKEISGKNLPVGTTMLSSRFMIDCSAIMLKDWLPYSEAVKQMGLHHSKKDKKDLQHSLPYYGKILVGQVSGAKGESYKGGEEEQFGRIANPTVHIALNQLRKLVNALIRRYDNPSQIIMEVTRELKLSKARKDEFFRDQTKNQKDNERIRKELTDLGLLKISSEDIKKYKLWEELAVEGIARLCPYCGKTISAKQLISGNIEIEHILPYSRTLLNSRDNLTVAHRECNQAKKNLSPFEAFGNSPKGFDWNRIMELAAKLPFRKRRRFFPDAMDHFREDDDDTKGGFLQRQLTDTSYLSVAAGNYLSSICDNNSIWVTPGRLTSLLRGFWGFNTLLNRGHDTWYKNRNDHRHHALDALVIGLCDRGLLAEAAKLNSGRGYREIDAPPCPIKRSDIEKRLKSIIVSYKQDHGKEGKLYAETAMAKHSYLEQINPDDLNENEIHRIVPKTIQNDIATLVKKEGFRKAKTAIQGKYKYLRVFRDRWVTRAPLESLSERDIPNIADPLLRKQIQKYIESHPLKTGQKLQDVLAVFGDKKNIYSVRYFPKDQVPVLIESCDNKAYMPGD

SEQ ID NO: 5551 - protein, 1381 aa, unidentified
  REGION 1..1381: note = Description of Unknown: Cas Enzyme sequence
VKKILGIDLGTKSIGWALVNEAENNDEKSSIIRLGVRVISYDNFVSTDTRKESKEPEKDFAGGKGISPNAGRTLKRCMRRNLQRYKLRRENLIEILTEHAFISDESILSENGNHTTFETCRLRAKAATEEISLEQFARVLLMINKKRGYKSSRKAKNQDDGQIIDGMEVAQKLYNEELTPGQLCLQLLEKGQKTLPDFYRSDLQSEFDRIWTKQKDFYPEILTNELKGDLVGKNKKQTWAVFAKPFQLVGIKRETKYEDQKKENYAWRVNALSVKMGPEELAIILQEINAQISNSSGYLGKISDRSKELFFYKQTVGQYQMAVLDKNPNASLKNMVFYRQDYLDEFNKIWDVQSKFHKELDETLKQEIRDVVIFYQRKLKSQNGLIGFCEFESRKKEFEVDGKKKVKIIGSRVIPRSSPLFQEFKIWQILNNIELTNKNTGEINLLSPEQKVSLFQKLQNVERLSDKEALNVLFDKSAKNYKLNYEKIEGNKTRSAISNILGDSDLLSFDFEKEQDSQPLYKLWHLLYSYEDDNSASGNDRLIEILGQTFKLSTEIAKKLANISFQDDYGSLSAKAIRKILPFLKEGHQYDVACEYAGYKHSASSLTKEEIEHKTLKNKLEILPKNALRNPVVEKILNQMANVTNAIIETYGKPDEIRIELARELKKSAKEREQMTLAISENTKDREEIVKKLKNEFGLHNPSGKDIIRYKLYRELAANGYKTLYSDTYIAQEELFSKNFDIEHIIPQARLFDDSFANKTLEKRDVNIKKGSTTAYDFVRNEYGEDKAKEYLLKVEKLMKDKKISKTKYKHLIWSEKDIPDSFIDRDIRETQYIAKYAKSMLNDLVKYVVSTTGSITDRLREDWQLIDVMKELNWDKYQNLGLTEEYTNEEGHKIRKIKDWTKRNDHRHHAMDALTVAFSKRSIIQYLNNLSARITRKCGCGYEKYGLNTEEYTDWTCPECGKRYFTRKDTNIIYAIERNELYRNDKGKLIFKPPFALNEFRAEAKKQLENTLISIKARNKVVTQNINTSRKKSGTNKKIQQTPRGQLHNETIYGSQKIYVANEEAVNAKFDETKISTVSRPVYREALLKRLRENGNDPKKAFTGKNSLAKNPIYLDGTHTKQVPEKVKTVSLETIYTIRKEISPDMKLDKVIDEKIKLILKKRLEEFNGDAKKAFTNLDEKPIWQNEEKGIAIKCVTIKGISNAEPLHTKKDKDGNDIPDKNGNKQPIDFISTANNHHVAIYRDSDGNLKEKMVSFLEAVRRANAGLPIIDRGYKQSEGWTFLFTMKQNEYFVFPNEQTGFNPKEIDLMNPEIYHLISPNLFRVQKIATKDYCFRHHLETSVANDLKDITFKRLASLSFTENVVKVRINHIGQIIHVGEY

SEQ ID NO: 5552 - protein, 1281 aa, unidentified
  REGION 1..1281: note = Description of Unknown: Cas Enzyme sequence
  MOD_RES 1257: note = Any amino acid
NFQHFLFKKKLYICKTIVFQTKTIMKKVLGLDLGTNSIGWALVNEAEHNEERSSIIRLGVRVNPLTVDELTNFEKGKSITTNAERTLKRSMRRNLQRYKLRRESLIEILKEHGFISSETILSESGNRTTFETYRLRAKSATEKVSLEQFARILLMINKKRGYKSNRKAKGQDEGTLIDGMDVAKKLYNENLTPGQFCLQLLESGKKHFPDFYRSDLQAEFDRIWTKQREFYAGILTDELKENLREKNEKATWAICEKPFGIVGVKREAKGEALKKENFMWRVKALSEKMDLENLAIVLQKVNSQINNSSGYLGAISDRSKELFFSKQTVGQYQMEILDRNPNASLKNMVFYRQDYLDEFDTVWSKQAEYHKELTAELKNEIRDIVIFYQRRLKSQKGLISFCEFESRKIEVEIDGNKKTKTVGSRVIPRSSPMFNEFRIWQALNNIIVLDKTTGELLELSQEDKEQLAQHLQTVESATPKELLSVLFGKQAKDFEITNYKEKIDGNKTLAKLYKVLQEIPDEQLLLEFWHLLYSYEGETADLAKKLTEKYNYETEVAKQLANITFQDDYGSLSAKAIRKILPYLKDGNKYDVACEYAGYRHSKSSLTKDEIENKVLKDRLEILPKNSLRNPVVEKIINQMINVVNGVVDAYGKPDEIRIELARELKKSAKEREELTKSITNITKLHDEYRKILSQPPFNLSYISRNDIIRYKLYVELKDNGYKTLYSDTYISPATLFSGDFDVEHIIPQSRLFDDSFSNKTLELRSINLEKGNRTAYDFVREKYGENGLSDYLNRIEILSDKKTKFRKLKMSEKDIPDGFINRDLGNTQYITKYAKTMLGDLVKRVVSTTGSITDALREGWQLVDVMKELNWDKYDKLGLTYYEENRDGRKLKRIKDWSKRNDHRHHAMDALTVAFTKDAFIQLFNNMNASLKPNSNEFALKNLYIENGKIKPPMPLDEFRAEAKKHLGNTLISIKAKNKVTTQNINITKAKDKANKKTQQTPRGQLHNETVYGKIKQPVVKIDKRTGKKNVGFETIYTIRKEISPDLKIDKVIDVGVKTILENRLNEFGGDAKKAFSNLEEKPILNKNGKSLKRVTISGISNAESLHEKRDKDGNFILDKDGNKQPIDFVSTSNNHHVAIYRDEKGNLQESVVSFFEAVARANMGLPIIDKAYKQSEGWQFLFSMKQNEYFVFPNEKTGFNPKDIDLLNSENYGVISPNLFRVQKIATKDYNFRHHLETNVENNNSLKGITWIRCXLNGINNIAKVRINHIGQIVSVGEY

SEQ ID NO: 5553 - protein, 945 aa, unidentified
  REGION 1..945: note = Description of Unknown: Cas Enzyme sequence
MKKVLGLDLGSSSIGWAVIEEKGNTTTIIASGSRIIPYDGTEGQDFAKGTGESRNSLRTKARTARKGYDRYQLRRKNLVDVLIKNGMMPDENLKGLPKMQLWELRDKAVTTHISKQELGRLLLWLNQKRGYKSSRSDANLDKKDTEYVATVKSRFEKIKDLDLTIGQYFYSELKNDEYFRIKENIFPREAYIEEFDKICDKQKKHLNLSDELILKIRNEVIYYQRPLKSQKGLVSVCEFEGFWTKSKDGKDFFVGPKVAPKSSPLFQISKIWESVNTIKLSSKRGEIIELTIDEKVQLFEHLNNDEKLTSTDLFKILGKSKKEFSVSKQLEKGIQGNLTKNAISKCFSDVAKFEHLFKLDLNVIETSDFGYLYSKKTGEVLGEKNIKYVDAKVEQEPFYQLWHTIYSINDTQECSNALQNKFGIDAETAEKLANIDFSRFGFGNKSAKTIRKTLPYLMDGDMYSVAMSYAGYDHSNSLTKEENSQRKLLDKLKPIEKNSLRQPIVEKILNQMVNVVNAIVETYGKLDEIRIELARELKQSKDERNDTDKAMSKRHRENETIAKRLAEYGLRATRNNIIKWRLFEEIDNQDKKLNAVCIYCGQPISLTDAIKGTEVDVEHIIPKSKLFDDSQSNKTLAHRRCNSSKGDMTAYDFMKTKSSETFDKYVERVNILFANKVIGKAKRDKLLMSEDKIPDNFIDRQLRESQYIAKKAREILQTICRNVWSTTGSITAELRHLWGWDDVTMNLQMSKYKELGLTEIKEWESEHGRNKHSKEVIKDWTKRDDHRHHAIDALVVACTKQGFIQRFNTLNASKTREDMQKEIEQRSEKYKEKLSLLEKYIISQRPLSAEEVEKVIAQILISFKAGKKVAVKGTRKIGKRGNKKVIQNHIIIPRGALSEESVYGKIKTIEKNKPLKYLFENPHLILKPYIKTLVEQRLEKFENDA

SEQ ID NO: 5554 - protein, 1171 aa, unidentified
  REGION 1..1171: note = Description of Unknown: Cas Enzyme sequence
MSKKILGLDLGTNSIGWALVDKEILQILGMNSRIIPMGTDKQEYEKGAGITKNAIRREKRTARKMGKRYKHRRNKLLFILDMLDMLPDQFQFKNGLPEPKKLQKLELLPIKKGTLQLDSLGQYELCVNALENKIELKELGKILYKFNQLRGYSGGNNDENTKKKQKDEDENDDTKKKLYEVITQKVEILNVEKSDEIFEIRGGINKGEKQNFFIVSVKIDGEEKEGKTKLQNLQEKIGQEEELEIRIRRNKKGEETSVEYTSPQKSNWRKAMETDEKILKGENLFISQLRLRDLQQSKWTKIRNRVFLRNRYKEEFDKVWETQAKHYPILKDCPKEILEKIANYIFPGESDSQKQLRKQAVENGLKYIIKEQVIYYQRPLKPQTELISKCRFEKEEKVIATSHPLFQEFRCWKQINNLYITSKVELSPIAFEQDLFGNQTPTCNKLKNTKTKFVYQNRYLTDKEKQAIYEKLQAQKEVGFGVVIDVLNLNKRKEEKLDKEQKDYFFNGLNIKAKLKGCDTLISIKKYLGEHYEKLIAQEPKIIEKLWEVIFDVRNHEGSEYETTSKRVSSIIEVLQNYTDKETAIELSLRLAQNIKFPRKYASLSVKAIQNILPLMQLNPQSLSDQIKTKFENIKNLIATGEIIDSVDYNLEEYVIDFVKNNPNILERGGLMEYLAISLVYGKHTAETIKAQIKNYHDIKEEKRNLRHPIVEQLSNETMQVIKAIWKQYKINPEDLEIRVELARDLKNSAQERDKIYKGQRKNEEINKNIKKRLLELKQEPSARNIDLYKLWSKQNIEEYPKQSKEPTKEEMQKLRLWEEQKCVSPYTGKPISLSKLFSPDRLYDIDHIIPKSRYFDDSISNKVVCETNINEEKGNRTAWEYIAQQNSEFDILSTENYLSFINKNFFGKKKKNLLAEKIPTNPVERQLKDTQYISTAIKNELAKIVGSENVKTSTGEVTDFLRSRWGLKKLFMELTESRFKQMELWDLDENGNPKSQWIEKYVDENGKNIYKIKNWSKRYDHRHHAIDALVVALTEQSHIQRLNNLNKYIQDELTNRKDEFKIVLKEDETILEAFFNLGKERRNEILEKIESSRKFDTPIPDLVKQVREHLETMIVSIKPKDKLGVSIDEFDKNTPNKQLKKQVKIRGALHQETYYGQLNGRDTKRVELST

SEQ ID NO: 5555 - protein, 1262 aa, unidentified
  REGION 1..1262: note = Description of Unknown: Cas Enzyme sequence
MKQILGLDLGSASVGWAVIEEKDDNTKIVALGSRIIPYDGTEGQDFAKGTGESRNALRTKARTARKGYDRYQLRRKYLVDTLVKNDMMPDENLKSLPKMQLWELRGKAVTENISKQELGRLLLWLNQKRGYKSSRSDANLGKKDTEYVIAVKSRYEIIKEKHFTIGQYFYNELKNNEYFRIKENIFPREAYIEEFDTISAKQKEHLGLTDELIAEIRNKIIYYQRPLKSQKGLVSVCEFEGFWTKDKDGKEFFVGPKVAPKSSPLFQLAKMWENVNNIKLSSKQGETIELTLEEKQKVFEHLDNHEKLTPTDLFKMLGKNKNEFTVTKQLEKGIQGNITKNAITKILCENEAYKNLLKLDLNIIETDKFGYLYAKKTGEVLGEKPIKYIDAKVEKEPFYQLWHTIYSINDTQECSNALQKRFEIDAETADKLASIDFSKFAFGNKSVKAIRKILPYLMEGDMYSSAMNYAGYDHSNSLTKDENFGRKLLEKLKPIEKNSLRQPIVEKILNQMVNVVNAIIGKYGKPDEIRIELARELKQSKEERNDTDKAMSRRQRENEDITKRLAEYGLRATRNNIIKWRLYEEIDNQDKKLNAVCVYCGQPISITEAIKGAEVDVEHIIPKSKLFDDSQSNKTLAHRRCNSTKGDMTAYDFMKTKPQQEFDAYVERVNSLFANKIIGKAKRDKLLMSEDKILDNFIDRQLRESQYIAKKAREILQTICHNVWSTSGTVTAELRHLWGWDDVTMNLQMPKYKELGLTEIKEWESELGKNKHSKEVIKDWTKRDDHRHHAVDALTIACTKQGFIQRFNTLNSSETKDAMQKEIKAAKEKYGNNYNEKILKETNEIVKNHTGKISKLEEYLITQKPFATNEVMNAVSKILISFKSGKKVAVFGKRKVGKRGNKKVVQEGIIIPRGSLSEESVYGKIKTIEKNKPVKYLLENPHLIFKSYIKTLVEQHLEKFENDTKKALASLKKEPIYLDKEKSKILEYATCFKEEFVIKYTVDANFNKTDKVIDGKIKEILQNRLQKFGNKPKEAFKDVQQGQKSLKWYEDEELACPILSVRCFTGLSAVVPVKKDEDGKDIGFVKPGNNHHIAIYTNKEGNKSEYVCSFWHAVERKKYGIPVIIKNTNEVWDKILQQPESTYPQSFLEQLPPVNLELNLSMQQNEMVVLGMTDEDIKTAIESGDYKQISEHLYRVQKLSLKPSSGQIDIVFRHHLETKLVDDTNSKISKRYFNVQSLKALFSLNPFKVKIDCLGNIKAIIN

SEQ ID NO: 5556 - protein, 907 aa, unidentified
  REGION 1..907: note = Description of Unknown: Cas Enzyme sequence
MTAAVKTLGLDLGTNSLGWAVIDENSVQKTGVLVFEEGVNREQSDSLVTPAADRRAKRMARRLRFRRHLRRRLILKILIEQKMCPLTQEELKAWSQTGVFPKGNAAFVEWLKSTDTRNPYCDRARAATENVDPLTLGRAIYHLAQRRGFKSGRKDQPEDGEESSSAKAKELGKVKRGISRLTATLEKFGLTLGQYFFSEIKAGHKVRNPLAREEQTGRVEHYEKEWVKIAAVQGLDKALADKIARALFWQRPLREQSHLVGKCPLESKRNRAQIGHPDFEEFRALSFVNNIRLVDGAEKTGWDDEKRRAALSCFNNNKTSGRVFTKDGEGNIQKISLSLQERAVAAECFVRKSPFEFKVIRKELEKKFKELKGAAFNYDDNVSLSPSKITAALMDVLPDGADRQVAFDALTFFDDNEKLKTWAQNKLGLSSEAAGKFVKIRIPEGRASYSLSAIRKINRFLRKGVELSEAIFLAKLPEVIPDFDAIENDVIAKVHERNELYRENKRTAYHDTRTDNRIGVLSLEKRLRSWLEEDYGINATVFDTLYFRDPKADSSYASVKPGGTVLPPVNLGMIRNPLVQRSMTMLRRLVNELRRKGDIDATTRIHIELARDVNNRNDRRAIQEWQDRNKKKRDDVREKLQKEYGIVNPTEDLILKYVFAEEQNWTCLYTGKAIPLNGVLFAGFDIEHTIPRSRSGDDSQANKTLCDSDFNRNVKKGQMPSELSNHDEILARLRPWKEKIDELKKRKEQQTKKAKSASKDNPDARADARKNMLVTKHELKYWKDKYDRFTKTADDVTPSFISRQLVDTGIMTRHAVALLKTVYPDVYPVNGKAVAFARKMWKVQAEDAVKDRSDHTHHAKDALVIAALSRDRFQKICTELKADDERKNPKFTVAPPFDGFAQAVYDA

SEQ ID NO: 5557 - protein, 1540 aa, unidentified
  REGION 1..1540: note = Description of Unknown: Cas Enzyme sequence
MKRILGLDLGTNSVGWALIEQDIETQNGNILGMGSRIIPTDAKMLGRFSSGQALSKAKAGQAYTPAGIRTDCRGKRHLYERHSLRRERLHRVLNILGFLPEHYAIQIDFEKHFGQFKDEAEPKLVYDANNQFIFRKSFEEMMTDFRQNKPELLARKNTKGKDAKIPYDWTIYYLRKKALSQKIEKEELAWLLLNFNQKRGYYQLRGEEEEETNKKEYVESLKVVSVEKGEPDKKNNKKTWYKMTFENGWEYSATFTTEPNWLNTEKEFLITEEYDENGNIKVVKDKKTDVTGKEKRQITPLPSFEEINLLSKEQQDRIYKKIKARTEITISNTRKTVGTYIYETLLENPNQKIRGKLVRTIERKFYKDELIAILKKQIELQPELFTEDLYNDCILELYCNNEEHQSALRKRNFVHLFVNDIIFYQRPLKSQKSSIGNCTLEYRKYKDKDGKEVKEYLKVIPKSNPLFQEFRLWQLLHNLKISKKEDDTDVTEQYITNVADKEKLFDFLNNRKEVVQKALLKYFKLTDKTHHWNYEEDKTFPCNETGTQIKTRLAKVENIPAEFLTSEMEQQLWHIIYSVTDKNEFEKALKTFANKHQLDEISFVKNFKNFPPFKSEYGSFSEKAIKKLLTLMRVGKYWDWETIDNTTKDRIEIIIADEPDEKINERVREKAINLKQRSDFQGLQEWLAKYVVYNRHSEAGNVDKFNSVLDLEKYLVNFKQHSLRNPIVEQVIIETLRVVKDIWIHFGNGEKDFFDEIHIELGREMKKTAEEREKYSKTVSTNENTNQRIKALILELKENSDGQLFTENVRPYSPIQQEALKIFEDDILNSDIEIPENILKISKLAQPDKSELLKYKLWLEQKYRSPYTGQIIPLGKLFTTDYEIEHIIPQSRYSEDSFNNRVICETAVNKQKDKLLGFEFIKKFQGQTIETSFGNSVQLFDEVGYKDFVQKHYAKNTRKRNFLLLEDIPEKMVNRQLNDTRYISKQISSVLSNIVREEKDDDGINSKNLLSCSGTITSTLKQDWGLNDIWNDMILSRFERLNRLTNSNAFTTWNEQYQKFLPDIPMELSKGFQKKRIDHRHHALDALIIACASRNHINFLNNQSALEKGKTKDEKQKSREDLRRILCLKKYDDQAERNYKWLFKKPWDSFTQEAKEKLLTTIVSFKQNLRVINKTTNKYQAYENGKKVIKSQEQTDSWAIRKPLHKDTFFAKVSLRKIKTVRFSEALKDWKMIVDKKLKQEIKRLITLYGDFKIDAINRYFKDRKNLFNKVDISKVEIYYFVTEKAAVRKPLDSSFTEKIIKESVTDYGIQKILINHLLAKENKPELAFSPEGIEEMNKNIILLNGGKCHQPINKVRVYESIDKKFQIGKTGNKKDKYVETAQGTNLFFAIYADENGNRSYETIPLIVVIERLKQGLKEVPEMNEKGHKLQFHLSPNDLVYVPTEDEKENITAIDWENLSNEQMKRLFVVNDFSNTCYFSPNSLAKQIVPKEVDLNFDVKNNKLSGSFDTKTASFEGKQIKDVCIKLKTDRLGNIKPTIY

SEQ ID NO: 5558 - protein, 1090 aa, unidentified
  REGION 1..1090: note = Description of Unknown: Cas Enzyme sequence
MRYNIGLDIGISSVGFAVMEIDEDSLPMRVVRIGSRIFDTAENPKDGSSLAKPRREARGMRRRLRRKRYRKERIRNLIIEKAILSAEQLEKLFDVPLPDIYEIRRDALERIVAKEELARIMLHLAQRRGFASNRKADTADKEAGKMKKAIEQNNASISEKKYRTVGEMLFLDPRYTERKRNKSDYLNVVTRDMVLDEARLIFSTQREMGNAFCSAEVEERYMEILSSQRAFDEGPGAGHAKCPSPYAGDLIGKMVGICRFTGEKRAAKATYSFEYSNLLQKVNHMRIEERGYTFELTEEQRKLIIEKAHTSEQLDYAKIRKLLGLPNNCFFNIHYSSDTDKDEAKTKFNHLPAYHAMRKALNNVSKDRIKYISLEQKNAIGQIFSLYKNDEKIKTELINAGIEHDDIEALISKLVNFRKFGNLSVTALDKIIPHLEKGLTYDKACEEAGYNFKAHGNTEKTRLVRLWHLAEEAEKTITSCVVRRALSQCAKVINAIIREMGESPEFINIELAREMAKDFDERKELEKSMLDNNARNERIKERLKNEFGLTNPTGQDIIKLKLYEDQKGECPYTLLPLDIEQVFNDHGYAEIDHIVPRSISHNNTYANKVLALASEQREKGNRLPLEYLTGKRRDNFIIWVNTSNLRQEKKKRLLKEVITEEERTTFKDRALHDTQTMSRFLLNYLSDYLLFAPSERKRKVIAVNGGTTSTLRKRWGLNKIREDGDLHHAADAAVIACTTQQMINDIARHYNHIETRYMDRSIDPRKHSNELPQPYPHFREELMARLAPTKEKLDVAMGQLGALPYPDNEIAKLAPVFVSRMPSRKVGGAAHKETIKGINENGEQIKKVSLASLKLNKNGEIEGYYRPEDDSLLYSALKEQLLKHGNDGKKAFAEPFYKPKKDGTAGPLVRTVKIAEKSTLNVLLKDPHGRVKASADNDSMVRVDVFYVENDGYYLVPIYVADTIKAELPNRAIVANKPYEAWKEMHDKDFIFSLYSNDLIYIKHKKLFNFSKAHEKNTLPDTFSCNEVLAYYKTTHSGKGSIEIINHDNSYSIGGVGVKTLQVLEKYHVDVLGNISKGTREKRQPFTGQE

SEQ ID NO: 5559 - protein, 1390 aa, unidentified
  REGION 1..1390: note = Description of Unknown: Cas Enzyme sequence
MKKILGLDLGTSSIGWALVNEAENEAEKSSIIKLGVRVNPLTVDELSNFERGKTITTTADRTLKRSMRRNLQRYKLRRANLIEILKGNMFIGDETILSESGNYSTFETYRLRAKAVEEEITLEEFARVLLMINKKRGYKSSRKAKGQDEGQLIDGMSIARQLYEENLTPGQFCLKILQSGKKYLPDFYRSDLQNEFDRIWNFQKDYYPEILTEHLKEQLVKKNEKSTWAICEKPMNLVGIKRGVKGPDIRLENFKWRANAISSKMELEQLAVVLQKINGQINSSSGYLGSISDRSKELYFKKQTVGQFLMSKLDSDSNVSLRNQVFYRQDYLDEFNVLWEKQAQFHKELTDELKQEVRDVVIFYQRRLKSQKGLISFCEFESRRIEIETDGKKKIITIGNRVIPRSSPLFQEFKIWQNLNNLEVFHKGHSTRSNASARLVTLQIESSERRFLDQEEKNLLFKELSVREVLSKTEALKLLFDNHKELDLNFSKIEGNKTFAALYKAFNEIIEVSGHEKINFDNLSADEITSSVQSVLTTLGCNAEILHFDSDVDLDKQATYRLWHLLYSYEGDNSNTGIDGLTNKISDLCTLENKYAQILANITFQNDYGSLSAKAIRKILPYLKAGNRYDLACEYAGYRHSKASLTREEIAKKVLKDKLEILPKNSLRNPVVEKILNQMVNVVNAIIDVYGKPDEIRIELARELKKNAGEREELSRIINETTRAHEEKRKILQDEFALSTVSRNDIIRYKLYEELETNGYKTLYSNTYIPREKLFSKEFEIEHIIPQARLFDDSFSNKTLEKRDINLEKGDRTAFDFVRDKYGEAGLEEFLDRIECLHNQNGNGISKAKYNKLKMSEKDIPDGFIERDLRNTQYISRKALGMLGEIVKTVVPTTGSVTDRLREDWQLVDLLKELNWDKYKALGLVEYYKDRDGRNIGHIKDWTKRNDHRHHAMDALTVAFTKNVYIQYFNNVNARYDKSSNAYSIEQKYFSERKVKPPIPVDEFRAEAKQHLEAILVSIKAKNKVVTKNVNVSRKGVGVNRKVQLTPRGQLHLETIFGSNQMPVVKEVRVGGNMNEDLIKQVTKPQYRIALLKRLADYNYDPKKAFTGKNSLEKQPLYINEKHSKQVPEKVRTLSFEPVYTIRKQVAPDLNVDKVVDYKIRTILQERIKEYGDAKRAFSNLNENPIWLNKDRGISIKRVTISGINNVQSLHEKRNKEGRIITDDEGRNIPVDFVNTGNNHHVAIYRDANGELQENVVTFYEAVTRANLRLPIIDRDYRSSEGWEFLFSMKQNEFFVFPNSKTGFNPNEINLLDPLNYPLISQNLFRVQKLSTKNYVFNHHLETKAVTGDTLKSKKQLSGITYRFIQSLPPIEDIIKVRINHIGQIVSVGE

SEQ ID NO: 5560 - protein, 1365 aa, unidentified
  REGION 1..1365: note = Description of Unknown: Cas Enzyme sequence
MKREWYLGLDIGSASVGFAATDTQYNILTKSGKLQCGARLFKEAQDASTRRGFRSSRRRFARRKVRIDLLQSLFNSHIAEKDASFFIRLNESNRHDEDKTVSWKYPLFNDPNFTDRDYYKNFPTIYHLRKHLLENEVDDVRLLYLACHHLIKYRGHFLFSRFDTGRDNSGYSEILAFFGVTSIESLSENKSIAGALKSNKIDLAKTLAHYFDDDKDALNEFKESLAEIKDELKEYKFSSEQFEECHGKASEILNESQIEYILMLKNLYDRIRLDGILGKHKTIADAMVARYDEHKADLELLKAFIKEHLPSEYDSIFRENGVYSNYVGSNMTHKTKTISHCAVCKMPITTITHDEFLAAIAKIIDKASVQEGYAELKAKIDNKTLCKIHNTQDNSIYPHQLQEMELFAILQKQSHFDLDIDKIRKLLTFRIPYYVGVLSEKHSDRFAWIVKNEGFEGRRVLPWNFDEVVDTASSGERFITRMTSKCTYLRSEDVIPKQSLLYQKYMLLNDLNNLKINGNRISQELKLFLLGGICQTEMSLTKAKIKKFLIDHSKIAKSDTVGKENENDTAFNSSLSSLIRFRDILGDSFDLQMCEKIIMWHTVFGDEKELVEQRIKEEYGTQLSDETIEKLSKLTFNGWGRFSEKFLNGITTTDKTTGEPALTIMWLLENAVTKNNTAPNLNEILNSDSYTPKFVDTVVLENPCGDVTLDYDGLVADLYCSPIVKRSIWQAILICKELTKINGCPPTKVFIEVTRGEDKNKSGKKTSSRRKQIEELLNKAVETGQDLTQLMSDFNSKTDEREFRSDRLYLYFTQLGKCMYCGKSIDVNALPYKNYDIDHIYPQSKIKDDSLTNRVLVCRNCNINKKNIYPIVDSVRSKMDSFWKCLLAKKLINSKKHDRLKATQPLTDEQINGFINRQLVSTAQAAKETKAALEILFPIYSSKNAIAQKMKVDIVTKVEFCKARNVSDFRNMFDLIKCREVNNLHHAHDAYLNIVVGNEWNVKYTNKCFSAVHTGDEKLLVRLFPNDWTEKHLEKIRTYLFDNKKYLDKFPVTTRPYEAKGAFCKKNALSKGNGQCEIKEGLAISQYGGYANADGNEGGSTAFNCVIEHDETFTNRIRNIFPVHKKYALKYKRYSGEFDWDGLLIEIAKNNNLLNPIWIVKKITMFSVLEIDGIRYHMRSGANNLQCSVTAEWYPDKNVIRIVRNIAKYKREVKKGRITKEESEEYSKLMIDVDFATRERNKNSKESKTITREGNLTLYDAIIEQVKKPFYANYSFAKKVAEGRISRGKFEELTTIEQAEQLISLLNLITMNGTLCNAKKIGGVDNETCKFLSNNVFVSDVYLITQSVTGLVENRIAINTTNTEE

SEQ ID NO: 5561 - protein, 1358 aa, unidentified
  REGION 1..1358: note = Description of Unknown: Cas Enzyme sequence
MRTKKNYIISLDIGTGSVGWAVLCMSKAGDLLAELIKCNKKIKIVNENDTSYKNTRTNLWGVRLFDGAETAEARRIKRGQRRRILRRKGRINYLREIFEPHMEALDPNFFMRLEESFLQNCDDIKEFKTEKGKGLIFAGKIGEGESYALDADYYREYPSIYHLRSHLLNAAHKVDLRLIYLALHHIVKYRGHFVNENRTINVENFDIKEDLLKFINACKDGGIGGFSNVSEENLSAANAVFKNRKLSMTRKVDELAEIFSKECKNVFTAAMGGSINLEKIFANLNYKYEDGGEIPKPTDFKFSLEAEKVEEKLALAEQVLEEHEIEILHLAKQVYSSMILSGILTKPTLSESMVDKYNTHKNQLAELKNLIKSNKKLYHEIFGENGLYENYIHASKDVSQDEFYKQIKKLVPITNEMQEAIEQENFLPKQRYRVNGEIPYQIHEYELCKILENQKAHYPFLGEECEVRGGKIEFKIQTLMKFRIPYYVGPLALHKKADKNHWIEKKSGMETEKITPWNFEKVVDKDASNTKFIERMTRECSYLPDEKVLPKHSLTYQEFAIYNELMSCGYYGKDFDGKSKKIYFTPEIKKEIVDGLFKKYKKVTIKEMLKFLDANGHVPGIATGQLFGIDIGSSAPKYNASYGTYIDIVQALGENAEQTIVAHKNRFEEIIKWATIFEDRDILKRRIKKANAEQWGHFLTDKQVGKLSKLRYRGWGRLSAKLIIGIKASNGKTILENLKEGSYKNFMRLLEDEKIEAAIKAAELKKGDPEKMNHALVEALAGSPAIKKGIWQSLKVVQELEEFLGKENIGKIVVEFARDAFEQKGKRTKTRWQRLNEIYKKFGSELKDELARYEKDQKALDSERLYLYFLQNGKCMYSGEPLLGDLSLYEVDHIKPQSLITDNSFDNKVIVKRIENQKKTDEVLSAATIRKMLPFWEMLAKTGQVSPQKLANLKREKITDGDKQGFIKRQLVEARQITKHVVNILSEHFKDEVEILTPRAGLTSQFAMEFALPKKNRDINDYHHAHDAFLNGIVATYVYNAYPELKDFWVYGNYVRNSEKTIGEKELKNIIKTMKDEPWVNMETGEIIADKEKTMGMVRKVLMYRNVNIVKKTEKLDSGFGDETIGAKGKDKIPVKRGLDTSLYGGRTAPRSAFAVVVKNAKGEIETLSIPVASATEYENAPNKLEFLKKLYPKKKLLEITVDKVEKYTQYRLPKGGTRFLASYQEAQNGMQMKMYKQPTEKSTEDEFIAAYDLLADFICSNNLFADAKKELLMGKMRENFICSEPGVMLKAVGELMRVTKGSNQGLSVLKELGLGTTNQQLTSSDQKITAGTTLIYRSATGLHETRVEIEQSAPAVR

SEQ ID NO: 5562 - protein, 1084 aa, unidentified
  REGION 1..1084: note = Description of Unknown: Cas Enzyme sequence
AYSAVYIFSEPLLPPKKGGVGEPKKAARRLARQQRRLIERRARRLRRIAHLAPLLGLNPAQIPADDGQRIHSLRADAISKKIELPELLNVLLKLAKRRGYGGGFKVRKEGEEGEVQSGVESMKALLRENNATTVGELLHQRFNRHESLKLKALKLYAHREMLEDEFEKIWNEQSKHHPVLTGAATAYSVRGSMEMLPIKQHFKEAIFYQRPLKSVAGFVGQCALEPTLPRASAAQPTAQVFRIEKQLADLRWGMGRAQRPLTDPQRDHVRAMLSDPDQLTKDGLLGFKAIYKSLEKAGLMSEFPRQFNTDRFSRENLVGDRTSKVMANLGLLDEWVATDEVTRLRVINFVADLGSPDMVDQKNWHLRLTKMVRQLNPKTGQQHSVRVPRKLDTAVVDFINKWVKTGRFDRLAKTDFDSGRAAYSIKALRRLAEEMRSDALDEHGAKTKVYPVPEPTGQLLTYLPPAAPTGNVVVDVALRMVRHGVNQCLRALGEPPAQVIIELSRDMALGIKGRNDKEAAIDKNRRARVRAKSEIEKHNPGSMASNNDIFRYVLWDEQDSHCPYCHDRIALGEALDGNATNVDHVLPRSLTRVKRLRSHLVIAHRACNAAKGDEVPMRAFANEPERIQAIERCASVLKKKRSFRKANYLLAESYEAEQLNDSTLRDFTERQFVESSWIAKLTAQWMRDLCVDVSVSRGELTARLRRAWKLETVIAQVRLETRVDPASDDPNNHFPLFDEEGLPISREDFERFRACWENHHGPEVERTDRRIDKRIDHRHHLVDALVIGLTDRSLFMSMARDYKERMEQKAAGVPNVKPWQTPPPPLRNVRDVALDLVRNVKVQHKSDRYPGGALFNDKPYSVVQDDTGVSRITQRRELSQLIDEGDSIQDARRAIGDIVNIQTRRTISEAFEQRIATGKSAWLVLQDPISHKAHTGRDGTGSIIRRVIAYQRDGRGLANGSEATSIVHKARAGQDLKKSYMPPKSNKYAFVAVMIEGDPPREYAVSVTRTAARQLDKRLVVRRIFKMDTVIDRFGTRYLVHQIHANGKIAVAPLTEARNWGEIQSAGGAKTFGARDVVGLMLES

SEQ ID NO: 5563 - protein, 1407 aa, unidentified
  REGION 1..1407: note = Description of Unknown: Cas Enzyme sequence
MAKTIGLDLGTNSIGWAIRETDADENQIVDDGVLIFKKGVGQKEGKEVSLAAERRKNRSKRRLYNAKRYRKWELLKVLIENSMCPLTLEELRLWSIGNWQKIEDKWKNTGRIYPINNVEFQQWLAFDPSIFGHKRISDNGNSIRKNPYDLRCELIEKEELNGYLKKLKTGRALYHLVQRRGFKSSRKSGQSAYAKNEDIEKLKTENPDFQISILAKEKLDKGERFRASGVIQRRYFEDEFYAICKSQKIDEELTQKLHKAIYFIRPLRSQKGLVGNCTLEKGKPRIPISHPIFEEFRALQFINNIKWREKDQKEFVAIPMYLKKNIFEELFFRRIASGKNKGKVNEESYFKFDEVIKNYSQNGEYEFNYKNLPNVSTCPTIAALMNVFDNEWTDKFIQDENTYGINWDGLSINYTVKYGKKEGKNCKLKVDGIWHLLFDYIQTKDKQEDLEKFCKEVLEFDDNKTKSFSKIDIPQGYGSLSFKAIYKILPFLQSGFIYSEAVLFANLKKVFGEKFEEYKEQAKNIIAKTIVEVSKTKEKLNIVNGLIKKFFGENEYPKPIGLDNKTVIEAYYKEVKAYLPYYFGSNDWNKKSDNEKTNLENTVWQLYQKFLNGEQTKEEKSTEKATTDFYKLPRLDEVIKQSLKDTFNVSDNVLKYLYHPSDIEMYPVSKTEKEYEINGYNTKVKLLESPQPPSKAWKNPMAMRTLHELRHLLNYLLKIGKIDKSTKVVVEMARELNDANKRWAIQTYQRYREDENIEFAKAIVGVVKEKYPNLNENDIENVNKVRLWWEQVDNSEEVYKQIKALKEDVEKYRLWKEQECVCMYTGKMINITNLFDGTQTQIMHTFPASISFDSSLANLTVGDTYYNNEIQGNKIPTQLPNYSQDVTINGKTYTSIEPRLKRWREKVEHLKNLIDENKKRTKKTQDPETKKGLIQRRHLLQFDYDYWNKKLETFTFTEIPVTWKNSQLVDTQIISKYARAYLKTIFEKVDVQKGSVTDIFKKIYQIKGDEQKDRSKHSHHAVDAAILTLIPGSAKREAILEEYFKAGETHCKFHTKPYEEYKTSHLLDIEENVIINHISHDKTWTATIKNIRKRGEKTGWVAQGDSIRGQLHEETFLGAIKPNVRNEKGFAIKDDETKKYLVLQNKNEDVIWTVQRKKIEEVDLDSIIDVALKNHIKQQLDSGVKINDVKDFNGKTIRHIRFKKFSPSYDKSLKVKSHLFQSKYEHKTLSLANNPSNYLCLLYIGKDKKGKEIKAYRFISLFEFSKIENRQDKSISNNLDYSVFIKFSGKNEYRLTLTNILKAGQKLILFKDSEEEIDKSYILNNRNRIYKIYKFNNSGADYVFLENIIEARTDDELKKSGINPAGETEFVSEKYQPRLKLTADKLNCLFEGIDFEINLDGTTTFLK

SEQ ID NO: 5564 - protein, 1528 aa, unidentified
  REGION 1..1528: note = Description of Unknown: Cas Enzyme sequence
QLFFIGKILLPLSLNFKNFSMKRVLGLDLGTNSIGWALVEQDFENKSGKILGMGSRIIPMGQDVIGDFGNGNSVSQTEVRTKFRGTRRLRERHLLRRERLHRVLNILNFLPDHYMTHIDFENRLGQFLDETEPKIAWKKVWNEQKNKDEFVFLFQNSFNEMVDDFKANGLNIKIPYDWTIYYLRKKALQQKIEKEELAWIILNFNQKRGYYQLRGEEGEENPNKLVEFHSLKIVDVVADEQPNNKGDLWYSLHLENGWIYRRSSKASLFDWKDKIRDFIVTTDVNEDGTIKTDKEGNEKRSFRAPSEDDWTLIKKKTEADIDKSQKKVGTFIYETLLQNPSQKIRGKLVRTIERKFYKTELETILKKQIELQPDFFTDDLYNDCIRELYRNNEAHQTTLSKRNCFVHLFVDDIIFYQRPLRSQKSSIGDCTLERRPVRDANGVLVKDERGKQVTNPLKAIPKSNPLYQEFRLWQWLFNLKIFRKDDDAEVTDKFIRNIADNENLYDFLYNRKEVDQKALLKYFKLTEKTHRWNFVEDKVYPCNETGTQVRARLAKVENLPADFLTLEIEQKLWHIIYSVTDKNEFEKALKTFAVKHNLDENSFVENFKKFPPFKSEYGSFSEKAIKKLLPLMRLGKYWDWEVIDAKTKDRISKILTGEYDPEVKNRVREKAIHLTSENNFQGLQLWLSQYIVYDRHSEAKNTEKWKTIADLDKYLEEFKQHSLRNPIVEKVITETLRVVRDIWKKYGDFSEIHVELGREMKNTAEERKRLTNIVTENENTNLRIKALIMELKESADVKNVRPYSPIQQELLKIYEEGAIHSNIEIPEDILKISKTAQPSKSELQRYKLWLEQKYRSPYTGQMIPLGRLFTEDYQIEHIIPKARYFDDSLSNKVICESAVNQLKDKQLGFEFIKNYHGQIVDLGFGKSVKIFEEESYQEFVKEHYTKNRSKRSKLLLEDIPEKMIERQLNDTRYISKFISSVLSNIVREDKDDDGINSKNVLPGNGKITTALKQDWGLNDVWNDLILPRFERMNALSNSAVFTAWNEQYQKFLPTVPLELSKGFQKKRIDHRHHAMDALVIACATRDHINLLNNQSAKSETSRYDLQNKLRNKEKNDKIGKDVFTEFKKPWDNFTQDVKMSMGNIIISYKQNLRIISKATNHYEKWGEKNGRITKESVKQKNVNWVLRKPLHKDTVAGQVNLRFKKQVNLSNAIDQCDAIVYKALRLQLKQLKTDGLDKKRMLKFFADNKYVWQGNDVSKPEVYYFSNDKEILVASRTNLDNSFNFSKIESITDTGIKKILKRHLEKYNEEKSEKIVEHPELAFSPEGIEEMNKNIVELNSGKFHQPISKVRTYEPMGNKFNVGFKGSKKKKFVEAAKGTNLFFAIYSNSDGKRFFQTVPLNIIIDNQKQGLPTVADRCVDEKGNEYLLRFWLSPNDLVYVPTEEDRENPQNMDFENLRRDQVQRIYKMVSSSGSQCFFVRNDIASSIVNKSEFSTLNKTEKSLDGVMVKDVCWKLRVDRLGIICSVQK

SEQ ID NO: 5565 - protein, 1055 aa, unidentified
  REGION 1..1055: note = Description of Unknown: Cas Enzyme sequence
MGADNRRRYRLGLDAGSNSLAWFILWLNEEDQPAGLGPGGVRIFPDGRDPKSKESNAADRRAARSARRRRDRYLKRRGNLMAKLIAHGLMPADEAARKALESLDPYALRARAIDETLPPYHIGRALFHLNQRRGFLSNRRTEKDDRESGAIKVAAGKLQNLMQESGARTLGELLHQRHQVREPVRTRNRSTGTKAEYDFYPTRQMLFDEFEAIWKHQAPHHPCMSKDAYDAIHCEIFFQRPLKTPPVGKCSLDPATSMDDLEGFRCSLAHPLAQRFRIWQEVRNLGITEAGKSGRGLCKEDDDRIALALIQSAKLSFDKMRSLLKLPPEVKFNLESEKRDHLKGDETAAKLSHRSLFGKAWRRLPLERQIEIVTRLEEETDEQSLVSWLVANTELDAEKAEGAASAVLPEGNSRLGLRAIRKILPIMEAGMNYADAAREAGYDHTQLPAGEVSPTGRLPYYGKWLQDDVLGSGDPRDTNDKRWGRFPNPTVHIGLGQLRLVVNALIEKYGAPTEISIEMTRDFKLTRKRLAELEREQADNQRNNERHAEEIRKLGHAVNARNLIKMRLWEEQNPYDHTDRRCPYTGEVISIKRLLSEETEVDHLIPFSDSWDDSTANKVVCMRSANHDKGNRTPYEAFGNDKGKPYDWEEISQRAASLPRAKRWRFDPNARERFAKQGGFQARQLDETGWLARVAKQYLAAVTDPRKIHVLPGKLTALIRSKWRLNDLLPDHNFSDAKNRKDHRHHAIDALVAALTDRRLLHRMSNAYDEERQRIEVPLPWPTLRNDLDAKLKAMIVSHKPGHGLQAQLHEDTAYGLIREPDKEDGFNLVYRRSFRDLNEKEIERIRDRRLRDLVNTHVERERREGKDLKSALLSFAERRDIPGLACPIRHVRLAKAERPEYLVPIRNKAGEVYKAYSAGENAFVDIFELQDGRWQGDATSVFRANQRGEEPRGPEDRSNARLVMRVFKGDLVALDFKGQRTVMVVHRLDASSNRFKLAAHNEAGNLDERHNDSDDPFRWLMASYNRLKTLNAERVRVDELGGPWRVRTKGKGIT

SEQ ID NO: 5566 - protein, 1113 aa, unidentified
  REGION 1..1113: note = Description of Unknown: Cas Enzyme sequence
MLGKPTDPLTFGFDIGIASVGWCVLGEKHIVDLGVRCFDKAETAKEGESLNLARRTARLMRRRLRRRAWRLTKLARLLKREGLIDSVQTIHQPAAKSPWQLRVEGLDRKLAPQEWAQVLYHLCKHRGFYWISRAEEKKAEADGEGGKVKKGLQDTKRRMNEKNYRSAAEMVLKEFPDAQRNKQGEYSKALSRLLLAEELVLLFKRQREYGNPHATPDLETHIVGCGDRKSGLFWEQKPALSGEKLLKMLGRCTFEKSEYRAPKASFTAERHVWLTRLNNLRIVVGGNARPLNEAERSIALPLPYQQASDFTYKQLKSALFKAGLLPENVRFTGLAYPTQQTENKAKDPESERLVKLPAWQELRKTLKEKGLETEWQSIAGAAAGGQPELLDQIAWTLSVFKDGDEVERELRKLSLPGGEKMIEALSEISFDKFHNLSLKALRKIVPHMEAGLRYDEACEKAGYHHSQLFKAGEGQYKYLPPFYSGRDKDGRMVFDDKEDIPRNPVVLRSLNQARKVLNALVSRYGSPSAVHIEMARDLSRPMDERNKVKKAQEEFRDRNEKAKADFMAEFNMPAKSREFEKYMLYREQHGKCAYSLKPLDLDRVLHDQGYAEVDHALPYSRSYDDSKNNKVLVFASENRNKGNRTPYEYLTSFAGGENGEHWRSYAAFVESNKSYRIAKRSRLLRKNFGQDESSEFKERNLNDTRYICKFFKNYIERHLQLAEGSDSKRCVVLSGQLTAFLRARWGLTKVRGDSDRHHALDATVVAACSHALVKRLSDYSRRKELKHAENAIDAETGEIFDLDLLSKLEQHFPKPWEYFREELLLRLNTDDPALLKSEAERYGYPPKTVENLRPLFVSRAPQRRNGGAAHKDTIYSQPERLKSKGSVTQKVPLTGLTLKDMDNLIDPHRNEKLYAAIRARLEAHGGKGDKAFPSDNPLHKPDRNGNPTGPVVRTVTMIIDKLSGIPVRGGIAKNDTMLRVDVFRHKKDKKYHLVPVYIHHAVAKELPNRAIVQAKDENDWTLIDEGNFDFCFSLYPNDLLKIGLKNVVIQGYYASCDRSTGNIGLWMHDRNTAIGKDGFIRTGVKTALFLEKFHVDSLGNIYPAPPEERRGLA

SEQ ID NO: 5567 - protein, 1523 aa, unidentified
  REGION 1..1523: note = Description of Unknown: Cas Enzyme sequence
MKRILGLDLGTNSVGWALVNEAETYEEKSSIIKLGVRVNPLTIGKGGELDTFIQGKSITTNADRTLKRSTRRNLQRYKLRRENLIEIIKEHGFINDETILSENGNKTTFETYRLRAKAATDEITLEQFARVLLMINKKRGYKSSRKTKSKEEGTLIDGKDISLVLHDEGITVGQYSLRILQSGKKDNNSYYPSDFQREFDEIFDKQKEFYPEILTDELKEELCGKKRDAVWVICEKHFIWKEKHTEWNSEEARNIEVEKEHRLVGINREGKKEEQNRENTEWRAKGLSEKLHLEQLVIVFQEINQKISGASNYLGAISDRSKELYFKKQTVGQYQMAVLDKNPNASLRNMVFYRQDYLDEFNTLWETQAKFRRGKSDSPFTEELKNEIRDVVIFYQRPLKSKKGLISFCEFESREIEVEIDGKKKIKKVGSRVIPCSSPLFQEFKIWQKLNDIEIFPAHEKNKKRKPNARRLEQDEKELLFAELSVKEKLSKDKILSMLDLPESDMNFNSIDGNKTQYELFKAYKKIIELSENEIDDDFSVESIEKAFKQLGINTEILRYSIPEEIRLTNDKGKDVVVAKECKMYNIYHLLYSFEGDKSNSGVDNLHNKLKELYGFQKEYADILANVEFQSDYGSLSAKAIKKILPLMKMGQDYTTACANIYERHSKNSLTTEELGQKVYKNKLDILPKNSLRNPVVEKILNQMVNVTNSIIDTYGKPDEIRIELARDLKKNADERFLLTEHVKGNTAEIEKINKTLKEDFGIKNPSRNDVIRYKLYKELLVNNAAHTLYSNTYISPAELYTKKFEIEHIIPQSRLFDDSFSNKTIETHETNHPKTGKGNKTAIDYVTEKYGESGLTDYLNRIIAVFGTKTIKKVITNKSTGNKSVKSETKTFDTLQKEYIKSLKKKQKEEWETLNENDKKLRIINKYFSNKLKKLVITENELPEGFIERDLSNTQYITKKAKTMLGDLVKFVISTTGSITDRLREDWQLVDVMKEINFPKYEQLGLVENEEHIDYETGEIRFVKKIKDWSKRNDHRHHAMDALTVAFTKRQFIQYLNNLNARRADENMTISNTEKEERDNFAITTEDTILNTRDVMGIEQKELYRDKRNKLRFKPPIPLNEFRAEAKKHLENTLISIKAKNKVVTHNINKTKKKGGTNRKIQQTPRGQLHNETIYGSQKQYAVKEEIVNAKFDKAKILTVAKPAYKEALLKRLDENGNDAQKAFTGKNSLSKNPIFINESQSSKVPERVKTVTFETVYTIRKEISADLNIDKVIDVKIRRLLEKRVNEFNGDVKKAFSNLDENPIYLKEIINENGQIDKTKSVSIKRVTISGVSNAEALHNKRDKNNKCVTDDSGKKQSVDFVNTSNNHHVTFYRDAESNLHENVVSFYEVVARANMGIPIIDKKYRISEGWQFLFSMKQNEYFVFPNEKTGFNPREIDLMNPENYSQISPNLFRVQTMSKVSYGNKVIRDYKFRHHLETTVNDMNELKNITYKQYKTLSFVDKIVKVRVNHIGQIVKIGEY

SEQ ID NO: 5568 - protein, 1072 aa, unidentified
  REGION 1..1072: note = Description of Unknown: Cas Enzyme sequence
ERRVIRANKVRGARASRRITLLQELFAPFIAAVDPLFFSRLAASSYWKDDKARVKGMPEGYDFSGDLNSLFADDAFNDKDYFAQFPTIYHLRDYLCDASNWDRSTDVRLVYLALHHILKNRGHFIYEGQSFEMNNAGRSVFEAINDYLDAEYREGHVDNEGVSKDELLEHSELDQLPADKKLKIPSDFKIIDDIMRGRYTATLRTEELLCAFGICEKKPVENVQNGKKSYELVNLIAKEDRTRLEAILKVVCGRKFDIANILPEKYGKTEESELKSLEFNSKWDDETAPKLQGLLGEDFTFVERLKSAYDWGVLSKLLDGNTSISQAMLRKYENHGDQLKILKATVRVAIANGWLDKGKYDEIFRGLAHKENKIKEIESHYSNYGDEKNGTYASYIGSNLVHNQKYINVKDSKIITPKTNRENFYNYIKSVVLKMGGLSKWDELDRPLDSDYPRNNVDVQFTLKNGEIDSQNFVEILKDIKSNIDNNSYLLKLRNSDNGTIPYQLHQAELKAILQNAVMYGLIDADLDDDGLSVSDKVNSILTFRVPYYVGRLNPFYNSLEYKNSREAKGVFSKDRAHHVWIHRSDEYNKLRAEGKTPKILPWNYQKMIDLDKSGVAFIERMLAKCMYMHDETVVPKNSLIYSKFMVLNQLNTVKINDQKLPLDIKHRVFNELLLKHKKVKTRQLLEFLKTIGHLPDDFEAEKHLTGVSSMSAEEKKQLKAQFSGIDKVEGFTQGLSSWIQSKAVFDIDGTTNDFDNNRDLQDMVEQVLVWQAIHTDKKLVEKAIKKDYIHEITDYCREPKITLPMSEIIETDLNTHPELKVSHPKTIKVIQGLKGLNYKGFGNLCKEFLVGQWVECNNGLKTSILDLLWDGTDNPNRTDDDNWSPNLMQILGNPMDANNKVFAHLNQINYGDDISGWDQNDPRWYDIISNSYAAPSVKRSTWQSIKIINELISEIGKQPDKIFVEVTRSGSDMKGEQGKKSPRRTLLQDWYDTSKKYIDSYVFDELNEKDNNGNYKIDEKALRGEKLFLYFMQAGKCMYSGEPINLEELLRSGSTEYDVDHIIPQRLVKDD

SEQ ID NO: 5569 - protein, 1082 aa, unidentified
  REGION 1..1082: note = Description of Unknown: Cas Enzyme sequence
MKYKIGLDIGITSIGWAVINLDIPRIEDLGVRIFDRAENPKTGESLALPRRLARSARRRLRRRKHRLERIRRLFIREGILTKEELNKLFEKKHEIDVWQLRVEALDRKLNNDELARILLHLAKRRGFRSNRKSERTNKENSTMLKHIEENQSILSSYRTVAEMVVKDPKFSLHKRNKEDNYTNTVARDDLEREIKLIFAKQREYGNIVCTEAFEHEYISIWASQRPFASKDDIEKKVGFCTFEPKEKRAPKATYTFQSFTVWEHINKLRLVSPGGIRALTDDERRLIYKQAFHKNKITFHDVRTLLNLPDDTRFKGLLYDRNTTLKENEKVRFLELGAYHKIRKAIDSVYGKGAAKSFRPIDFDTFGYALTMFKDDTDIRSYLRNEYEQNGKRMENLADKVYDEELIEELLNLSFSKFGHLSLKALRNILPYMEQGEVYSTACERAGYTFTGPKKKQKTVLLPNIPPIANPVVMRALTQARKVVNAIIKKYGSPVSIHIELARELSQSFDERRKMQKEQEGNRKKNETAIRQLVEYGLTLNPTGLDIVKFKLWSEQNGKCAYSLQPIEIERLLEPGYTEVDHVIPYSRSLDDSYTNKVLVLTKENREKGNRTPAEYLGLGSERWQQFETFVLTNKQFSKKKRDRLLRLHYDENEENEFKNRNLNDTRYISRFLANFIREHLKFADSDDKQKVYTVNGRITAHLRSRWNFNKNREESNLHHAVDAAIVACTTPSDIARVTAFYQRREQNKELSKKTDPQFPQPWPHFADELQARLSKNPKESIKALNLGNYDNEKLESLQPVFVSRMPKRSITGAAHQETLRRYIGIDERSGKIQTVVKKKLSEIQLDKTGHFPMYGKESDPRTYEAIRQRLLEHNNDPKKAFQEPLYKPKKNGELGPIIRTIKIIDTTNQVIPLNDGKTVAYNSNIVRVDVFEKDGKYYCVPIYTIDMMKGILPNKAIEPNKPYSEWKEMTEDYTFRFSLYPNDLIRIEFPREKTIKTAVGEEIKIKDLFAYYQTIDSSNGGLSLVSHDNSFSLRSIGSRTLKRFEKYQVDVLGNIYKVRGEKRVGVASSSHSKAGETIRPL

SEQ ID NO: 5570 - protein, 1073 aa, unidentified
  REGION 1..1073: note = Description of Unknown: Cas Enzyme sequence
MRYGIGLDIGITSVGWAIVLLDEDEQPWRIFNLGVRIFDAPEQPKTGQSLAAPRREARSARRRLRRRKHRKQRIRSVMLQHELLDADALESLYDVPVGDVYALRAAALDKPVRREEFARVLIHLAQRRGFKSNRKAESGSKEDGKMLGFVQENAQRMREKGYRTVGEMLHCDEDFAAEKRNKSVDYKNTVTRDMIAHEAELLFTRQRELGNTWASENLQAQYLAVLLAQRSFDEGPGGDSPYGGNQIEKMVGVCTFEAPEPRAAKATYAFEMFDLLQKINHIRLDLGGKTRALFAEERQTIIEKAHASPSKMTADSLRKLLKLPEDAKLNVRDYTPLKAYHEMRKALKGVVDIKYIDIETRNEIGRIFTLHKNDEKIRAALAATSLGADEINALVDKLKSFSKFGHLSVKALNEIVPQLHEGLTYDKACETAGYDFQVRGGEKSRLISLQHLAGETEHTITSPVGRRALSQSAKVLNAIIRHMGESPSYIKVELARELAKPFDERRKITKRMEDNQAQNERIMEDIRQTDSIDPSGQDLVKLKLYQQQGGLCLYSGRQLDRRELFKSGYAEVDHIIPYSLCFDDSYNNKVLVHTGENRQKGNRLPLEYLSGTAADRFRVLVNNSKLPHRKKQNLLKEEFTDEDRLKKERHLHDTKSIASFFHNYLLHCLAFAPSTIERKKRVHAVNGAVTSIMRKRWGLTKFREDGDLHHALDAAVVACVTDGMIRNITRYAERQENYIVDKRTGEAKERFPQPWTNFRDELQARLNDNPQRALQRLGTYTDAELAQVRPVFVSRMPRRKVTGAAHKETIKSRPVSLPTEEREVVLKKVALTDLKLGKDGEIADYYNFKSDLPLYNALKVRLNEFGGDAKKAFAEPFRKPKSDGTPGPLVKKVKVTEPFTVNTEVHKGAGRADNGTMLRVDVFHVAGEGYYLVPIYVADTIKPRLPNRATVAHKPHDEWKKMKDDDFLFSLYPNDLVRIEGKKSVGMKRVRKESKRLAEKVEFNDGVFAYYQGTDIANAQIKIITHDNTYVQGSLGVKTLVSLEKYSVDLLGNATRVGRETRLDFKKPRKHKK

SEQ ID NO: 5571 - protein, 1437 aa, unidentified
  REGION 1..1437: note = Description of Unknown: Cas Enzyme sequence
MSKILGIDLGTGSIGLALRNPEAGDNIIEQLEYFSSDIYQAGVGKDRTGEFSLAAERTSHRQSRRLKETRRRRLWATLQLLIDHHLCPMSQSSLDQWKTYDKSKGLYRIYPVNDIAFDSWIKMDFDSDGVPDYSSPYQLRKELVTIQFDFTNQTNLYKLGRALYHIAQRRGFKSSKGETISSQETESKESVDFSDKDISAEMQKSETKMSQEIANYMNEHGIHTVGEAFALLEDEGIRIRNSRYVAVRKQLEEEIKYIFEFQKGLSIDSDLYTRLTSKKKNIGTIFYKKPLRSQKWLVGKCTLEKNKTRCPISHPEYEKFRAFCFLNNIKYRKDSLSEWESLPLEVKQVLFETLFSKRVKADFPFKEIREKVQTILHVSLNGDCEKEYRTINYKDRQSVPGCPVIARMRNLLGDDWETFQMEGKKQRTSHSKNNISVHSVKYSALDLWHICYETDDPEYLTEFAHQQLEWNDEQTKKFIRLWSTQAQGYAMLSLKAIRNINQMLGAGMKYSDAVLLAKIPDIVQLSETELQQLLYDYELKVKKSIGNEKVICSIVNSLIAQYKSLDTKSKFAFHDFEYQLQDSDYKDIQKQIYSTIGNKTWDLMNTIEKDSIYQQVCHKYQAFFHDFKRDFYRLPHLADTLKDYLTKRFPAIETSQWEKLYHPSLISLYNVERTGTDNDELRLGSPSIGAMRNPVARRTLNILRKKINAMLDAGLIDIDDTRIVIETTRQFNDANMRWAIEAYQRERENENKAIRELLQELYPNRDINDSDVDSARYAIEQPVKADGRKNSEEQLESLNKYKENKNRTYGIDVTKYRLWKEQKCLCIYTGKMINITQLFNENSFDIEHTIPRSISFDCSDKNLTICDSYYNRSIKKNLIPTQLPNYEKNAVINGVEYTAIKPRLRPWIKRVEQLKDNVEFWKAQSRRAMEKGRKDYCIRQKHLWQMELDYWKAKVERFTMTEVKEGFRNSQLVDTGIITKYATLYLKSIFNNVDVQKGTATAEFRKMLGIQSIDEKKDRSLHSHHAIDATVLTLIPVAAKRQRMLKLSYDIEEAERLGHDSQYMRRTLNQEIDECSFGGNVSQIPQYIEEHIIIKHHTTDRTFSSINTKPCINKHISGGDSVRGRLHKETFYGAIQLPCESGTGIDRKFITTEGKFVYSDKQPITIVTNMDITSFASEKDFETIIDFHVRDSINKTIKKRLIDGLSFKEAINQPIWMLDKNGNEIKTSKNGKQLCPIRHVRCKVKAGRGYMTREKSLEIRQHIQISTKRNINISDKSYKQKVYAQNDTNYLYLLYEGIKKGHVDRKSRIISLWEATMLHGNNNNVDIDYLIRNTLDYNTITEKNIEYNLSAIIRVGDYVLLWNENPDELKELDTAQISKRLYVVVKFNNMGSDFIYLRKHITADIDPDVKFVANNFNSLIEHRDFEIDTLGNIIFKD

SEQ ID NO: 5572 - protein, 1371 aa, unidentified
  REGION 1..1371: note = Description of Unknown: Cas Enzyme sequence
MKKVLGLDLGTTSIGWALVNQAENKAEKSSIIKAGVRVNPLSSDEKDQFEKGKAITTNAERTKKRHIRRNLQRFKLRRNSLIDVFLREHWIDKSTLLSEDGKGTTFQTLELRAKAAESEVSLPELARIILLINKKRGYKSSRKANSSEEGHLFDEMDVAKELEKTGTTPAQYALKELKDGNKNLPTFYSSDLINEFERIWKTQSRYYPDILTEEFKSKLAHSGRAYASKLFRDIYGIDTADNKGKDKKLQALTWRSKAAEEEISDRSILAYVICDMRGEIEGASSYLGAISDRSKELAFNGKTIGQLLYEKLSKDRNFSTKNLVFYRQDYLNEFNKIWECQRKYHPELTDALKKEIRDEAVFYQRRLKSQKGLISFCEFEQNKITVEIEGKKCEKIRGCRVAPKSSLLFQEFKVWQRLNDIVITDRETDDKRSLSEEEKSVLSKELSIKSKFKGTEALKLLGFNTRKFELNFKELEGNTTLAAIYEKCMDIVNLSGHGDYDISKLQFGNADRIIRDVFSGLGFGTDFLSFKPLLEKKEYEQQKIFKLWHLLYSFDGDDSPTGDENLVEKISILCNIPKEYARVISTITFQDDYASLSHKAIRKILPFMMEGNTYDQACAYAGYNHSHSISAEERDKRELLDALPLIRKGELRNPVVEKILNQMVNVTNCISKEFGKPDEIHIEMARELKQTSAQREKSSQTIADNTKQNAMIESILKKEFGMKYVSKTDIIRYKLYEELKTNGYKTLYSNKYIPKELLFSKDIDIEHIIPQALLFDDSFSNKTLEYRDVNLKKDRKTAMDFVSSEYDEASSDEYKLRVEDLFNRGSISKAKRDKLLMHQEDIPEDFVNRDLTNSQYIARKAKEMLESYVRVVMPTSGSITARLREDWQLVDVMKEINFDKYEKLNLVEHIVRADGHSFKRIKDWTKRNDHRHHAMDAITIAFTKPAHIQILNNLNASSNKDSTFYNLKEKETEMNGTKRVFIPPIPLKDFRDECKEALSGILVSFKAKNKVATKNVNITKAAGNAKNKTIALTPRGQLHKEQMYGRRLYYVTKEVAIGGKMTEEIISTVASKLEREALMARLHEYDGDPKTAFTGKNATSKKPILINDTPIPEKVKCVEFKESFSIRKDISPDLSLDKVMDTRVRRILQQRLDEFGGDKKKAFSNLDVNPIWFNHDKGIALKKVSILEQFDLVALHDAKDKDGKKILDNQGKPVAADYVNLRNNHHVAIYEDSEGNYQEKVVPLFEALQRTSASLPVIDKTFHQDIGWRFVMSLKSNEMFVFPDEEAGFYPNEIDLTDPENYPVISKHLFRVQKLSSMDYYFRHHLESTIDDNTELKGITWKRITSLDNLRGVVKIRIDHTGRIKSVGDYD

SEQ ID NO: 5573 - protein, 958 aa, unidentified
  REGION 1..958: note = Description of Unknown: Cas Enzyme sequence
PKKGKDDDKRTAMMNALKGHQTYSGFDELMGSCPFYPNEARGHKNSQLYDMYVMINSLSQFEFKQNGNIVNCPESMIHELRQKLFETNGIITKKQLDKICKDYSIERVSNAELDKKKHLIKAPFIQFLSNPEYFPDDLIKEFMEEDFTDLNSLSSKIGFALAKYATPRRRQEEIKAVLSEEDFAAIDNANKIKLYKSNGAANISFKYMSEAIEAYIQGIKYGDFQARFNKEHPNDTKYDYLYPNGKIKPITDPDMVRNPVVYRSLNETRKVINAVLGKYKDISAINIEVAKDVGKSFEQRKETAKFQRDNEELNEQTRAELVQKLTAEKYPVMLSDKLMDKYTLWKSQDHQCIYSGKDISFAELVSGTKVQVDHIIPQSIVLDETLNNKVLVLTEENQKKGNSLPLQYMYDDQAQEFKNRVGNLSRKGNISRIKKEYLLLPYLDDEVISGFVDRNINDTRTISKYIASYLKNAYGNKIKINVIKGAVTSRFRRRWLGSRVKAYNYIPSIYGLDQKNRDLHYYHHAIDAAVVANLKRSYIELAQDYCRFESIKNDIKYHEKHGNAATVGRLSLDLAEEKAKTVDKMFRQYHFNREFTLSLLENNYVPSICENFRNEIEVRVPLSIDFKAKEYADMEKAYRELKQLLNGVRYNLKDCDIAGTEKVIDDDTLEDINSIIHDVDPKVACMNYKAQIIFEDRPIGEIDPEKIRKELDSYVKKLAPRDIKDYINDISMASEDEYAERVHAYYDDDSFADQIEFPYVSFKIDRKFRGSMVASDNPVPLDKTGFATYKELENDINNNLKSPYYVRFNKGIGESGNFTIYDARSYYCMEIYTDENDAYQIRGIRYVDVRIDYKSGRMVLLKPLPENYKHYMYLFKNEYIKAYKKGKLRNNGFGAYRSVNNINQNTGKMRLFSNTNMKGSDIVIILAGECKKIELSILGHIIGECECGDQSLFITENG

SEQ ID NO: 5574 - protein, 1452 aa, unidentified
  REGION 1..1452: note = Description of Unknown: Cas Enzyme sequence
VSLYDIDCDVYLLKYTFCKNRENLQISQKKTLFLQKRTYIIKQSYLKETLWRCLSMKKILGLDLGTNSIGWAVVNEAEKEGEKSSIVKLGVRTISFDNFVNTASKKKCMDAVADFNGGKSISCNAGRTQSRSMRRNLQRYKLRRNYLRKLLKEHGFIDDATILAEKGNGSTFETYRLRAKAATKEISLTEFARVLLMINKKRGYKSNRKAKSSDEGSLIDGMAIAEKLYNENITPGQFVLSLFNQGKRYEPEFYPSDLQTEFDKIWDFQRTFYPEIMTDSLKQNLEGKNKSATWAICKTPFSIVGIKRSTKGFDQKKEDYEWRVKALSEKIGLEELAIVLQNINGQKSGTSSYLGNIGDRSKELRINHLTVGQYQMNELAKNPNYSLKNQVFYRQDYLDEFETIWETQAKYHCELTPELKHEIRDITIFYQRPLKSQKNLISICELEGRKVNRTIEGQTKTVLSGPKVIPASSPIFQEFRIWQVLNNLMLTSKETGEYCALKQDEKEKLFAELNVKEQLSKSDALKILFNKEYREYDLNFDKIEGNRTQSKLFDAYRRIIEISGCGEFNFQKMSAKEIFKTVHSSFDKLNIKTDFLSFDSSLTNQEFENQPLFRLWHLLYSFQDDNKSSTGIGSLITKIEKLCNMERDYAAILANVTFEDAYGSLSAKAIKKILPFMKQGQMYSDACASAGYKHSKRSLTREELANKVYKDHLDALPMNSLRNPVVEKILNQMVNVVNSIIDTYGKPDEIRIELARELKKSAKEREEMTNDIKKSTADYDDFRKTLINEFGLEHPSKNDLLRYRLYKELESNGFKTLYSDTYIPQEKLFSKEFDIEHIIPQAKRFDDSFANKTLEKRQINIEKSNSTAYDFIFAKYGENGAEQYKSRIDKMYNEGMISKTKYKNLLMHEADIPSGFIERDLRDSQYIAKKAREMLEDVVKFVVPTTGSITDRLREDWQLVDVMQELNWEKYNKQGLTETFKDKDGRTIHKIIDWTKRNDHRHHAMDALTIAFTKRSYIQYLNNLNARVPKSEQEYIDLTDYDLSNINPADVKRIEASIEQKELYRNEKGKLCFIPPIPLDEFRTQAKEQLESTLISIKARNKVVTRNTNISKGKNGTLNQQKTLTPRGQLHNESIYGSYQAENVKSEKIDAKFTAEKIAMVCSVKYRNALLERLNAFNGDAKKAFTGKNALAKSPIYLDEMHTTKIPEIVTTKSYEMTYTIRKVISSLNFKDAKSVEKVIDGKIKQILLDRLAEYGNDSKKAFDNLMDNPIWLNKEKGISIKCVTIRAVNNAVALHNGRDFVNTNNNHHVAIFLDKDGNLQEHIVSFYEATQRATKGLPIIDKEYNKELGWQFLFTMKQNEFFVFPNQETGFDPQKIDLLDSKNNALISPNLFRVQKFTTKDYFFRHHQETTLNDNKKLLGITWKRGGLSLLNGVVKVRVNHIGQIVSVGEY

SEQ ID NO: 5575 - protein, 1393 aa, unidentified
  REGION 1..1393: note = Description of Unknown: Cas Enzyme sequence
MKKILGLDLGTTSIGWALVNEAENAEEKSSIIKLGVRVNPLTVDEQTNFEKGNSITTNADRTLKRSMRRNLQRYKLRREQLIDCLKENGIISDDTILHENGNASTFHTYRQRAKAAEERITLEDFARVLLMINKKRGYKSSRKANSQDEGQLIDGMEIAKKLYEEQLTPGQYSLSLLQQGRRYTPDYYRSDLIEEFNRIWDVQKPFYPNLLTNELRQELWGRGKIDSSKFLFKKHEVTTAKVSGKEKRMQGLLWRVEALKRKLEEEELAYVLCDLNGEISSSSGYLGAISDRSKELYFNRQTIGQYLMTRLDENPNNSLTNIVFYRQDYLDEFEIIWEKQAEYYSQLTPKLKHEIRDIIIFYQRPLKSQKGKVAFCELEHSERKITTDGKKRTILTGSKVCPKSSPLFQEFKIWQVLNNLQVSLLGRKRKKIKVSANELSLFSQEEMQATQRFLSLEEKQILYAELCTKDKLSKKDALNLLYKNAKELDLNYKEIEGNRTMATFFKSYQEIISMTGNGEYDFSKMPASKAAEIVTKIFKGLGYKTDFLYFDSSLDKKAMEQQPSYRLWHLLYSYVDDNSKTGDEKLIERICELTGFEPEYAQILAKVSFAPDYGSLSAKAIRKILPFMMEGNTYSEACLFAGYNHSVRSLTKEQIKNKVYKDHLELLKRNALRNPVVEKILNQMINVVNMLVDTYGKPDEIRIEMARELKKSQQERKDMTDAINKNTTEAEKIRQLLQKDFGISHPSRNDIIRYRLYEELRSNGYHTIYSNTYISREQLFSDKFDIEHIIPQARLFDDSFSNKTLEARDINIEKGKATAFDFVNDKYGEEYLEQYEKRIDDLVKCGAISRTKQRKLLMSETEIPTDFIERDLRNTQYIARQALEMLNNLVPSVVATTGAITDKLRDDWQLVDVMKELNWDKYDKLGLTESYEDKNGQQVKRIKDWTKRNDHRHHAMDALTVAFTKRSIIQYLNNLNARSDKGSSIYGIEQKETEMKNGHRVFRAPILPLGAFRMQAKEQLESILVSIKAKNKVVTENINKSKRKGDVVKKKQLTPRGQLHLETVYGRIMQPENTSEKVGSSFDAEKIAHVSNPRMREALMSRLNAYDGDAKKAFTGKNSLEKNPLYLDDGHHDVVPAKVPTTYYKEVFTIRKKIDKDLKLDKVIDSHVRDILIARLEAYGGDAAKAFSSLDKNPIWLNEEKGIAIKRVTIRGISNGTPIHEKRDVNGEKIRDAEGHAIPNDYVNTGNNHHIAFFVDETGILQEHVVSFFEATARAQMGYPIVDKEYNSEAGWKFVFSMKQNEYFVFPNEQAGFNPNEIDLTNPDNYAIISPNLFRVQKFSNGDYFFRHHLETNVEDKKELKDIAWKRLSRKGLYGIVKVRVNHIGQIVDVGEY

SEQ ID NO: 5576 - protein, 1051 aa, unidentified
  REGION 1..1051: note = Description of Unknown: Cas Enzyme sequence
MKKILGLDLGTTSIGWAMVNEAEKAGENSSIIRLGVRVIPLTVDEQTNFEKGKPITTNADRTLKRSMRRSLQRYKLRRDNLIELLKQQGWITDQTLLSEQGNNSTFQTYRLRAKAATEQISLEELARVLLMINKKRGYKSNRKAKSTDEGQLIDGMEVARLLYDEGLTPGQYGHKILSEGKRYVPDFYRSDLEDELDKIWAFQSQFYPEILTPDFRKQIGRQAEKGTSAIFIAKYNIFPLDIKGRGVERLIPIYALRDKALKEKLTPEELALVVGKVNGQINGSSGYLGAISDRSKELYFKHQTIGQVLMAKLDADPNVSLKNQPFYRQDYLDEFEQIWETQSKFHPELTPELKHEIRDIVIFYQRRLKSQKWLVSTCEFENRKVCPKSSPVFQTFKTLEVINNLKVISPDEERYLDEDERQILFNELRYRAKLSKSDVLKLLYGKTRGLDLNYKEVEGNRTMAALLKACQDVIEMSGHGEFDFAKMSAEESLDTIRSIFGALGFATDWLTIDLDKKGAALDQEPQYRLWHLLYSYEGDNSPTGDEGLIDHLRRLLKMPREYAKVFAAVSFQDDYGSLSVKAIQNIMPFLMAGHEYSEACALAGYRHSATSLTREELDTRPLQDHLAILPKNALRNPVVEKILNQMVNVVNAVIDEYGRPDEVRIELARNLKQNAAQREEETKRISANTKEHEQITQLLQKEFGLTHVSRTDIVRYRLYKELEQNGFKTLYSNQYIPREKIFSKEIDIEHIIPQARLFDDSFSNKTLEYRDVNIEKGNATALDYVASKVDAQGVADYKARVDELLKKGAISRAKALKLKMAQADIPTDFIERDLRNSQYIARMAQQMLREITRTVTATSGSITSRLREDWQLVNVMQELNWDKYDQQGLTKIIEGRDGQKIRRIDNWTKRNDHRHHAMDALTIAFTKPSFIQYLNNLNARSDKAGAIYGIEQKELYRDGSHLLFRAPIMPVAQFRAEAKKQLEDILVSIKSKNKVVTRNTNTTKTKNGTHKVVQLTPRGQLHKETVCSSMKVPCTKEVAVGAKMDAAMIAQ

SEQ ID NO: 5577 - protein, 1086 aa, unidentified
  REGION 1..1086: note = Description of Unknown: Cas Enzyme sequence
MGKKILGLDIGITSVGWGILNFEGEKIEIIDKGVRIFPEGTTAENEKRRLHRSSRRIKRRRQQRLIDLKALLKRNNIIDGNFKTLNDPYAIRNKGLSQKLTNDELATALFHIVKRRGSCLDVIDDTDAHNESDTKAKKELTLEELTQKGSSKMILDYNGKLLRSRRVFVSQLQFERLKQDGKIRGIENIYKTQDYVTEAEEILKHQKVSTEFTKAVIDLIKRKREYFDGPGSQSSPTPYGQWFFENGQLKHMDMIEKMRGKCTIFKDEPCAPKMSYSADLFNFLNDLNNLDINGRSISTEEKNGIIDQFIKVKGDISPKELADFLGEDLSLISGFRTDKNEKPLLTGFSGYKKLLLAFKEKNHSQMPNFLKNQDFVDKIIEILTRVKGLESRRKELSEIDFNIFDEEKCEILANISGIVGYHSLSKKAFDILIPELIETSDNQMEIMAKSGLLGNRRKNYKGLKEIPADEEAILSPVAKRAQNEALKVINAIRKRYGEMDSIIIETARDKNSLEEKQRINKEQQRGEVLNKQAEEVAGKTELNKKIRQKIRLYMEQDGKCLYSGLSIDLNRLLNEPNAYEIDHIIPISISLDDSFNNKVLVLSDFNALKGNTTPFQFLKSGKARGWSFEEFKSHCQKLRKDHRISDKKLQNFLFEEDITRFSVQKEFIERNLVDTRYASRVILNTLTDYFKANGLSTKIHTVRGSVTSMLRQRAGLHKNRDYFYHHVVDGLLIASIIESKQIDRYLDIYQMESRGINPDTGEIMEVAGEQAIFDPKLFCFLSSLKDIDEAITFRNDIRISHKIDRKPNRQFTDETLYGVRKVEGINYRMGRFKDIYGPEGTTVAKEIRDGKDQKFLMAKNDPATFELLKKIVFNTILYPEKKENNPFAEFKKENGFIKKVSKNNKGPIVKSLKYYFEKLGNHLDITKKYLPKSSETKVVLLQIKPFRTDFYRCKNGKFKFVTIRFSDLKQDKEGLFVDEIWYAQQKAKKGILVDDEFLFSLNRNEYLEICKEDVPGHQAKNLYRFIATNTDQASIIEVKQLYCNVEKEKPQIMVSIGNKIKNIQKFHHDVLGNIYKVEKEVLHLRF

SEQ ID NO: 5578 - protein, 915 aa, unidentified
  REGION 1..915: note = Description of Unknown: Cas Enzyme sequence
DTEVSTDNTFEEIEAILLDKDLRTKEKTDKLSVIINSGDESKGVREFINLISGGTCKLREIFDPTGDSDELKDEKLKFSDVDWDAKRPELEDKVQEGIFLLDLAKQIYDWAALKKLLGESECISLAKIGEYDRHEEDLKLLKEVVRNYLGKEGYTEIFMNKSSADNYAAYSKSNTGEKACSQNAFCGFLKKNLETVFSGPDFETGEYRRMKNQILESTFMPKQTSKENGLLPNILHYKELHDILVNCSKWYSFLETEDGSGYTVSEKIEQLCKFRIPYYVGPLSPNAKHKWMVRKREGEILPWNFEELIDMEGSSEGFMNNLIGTCTYLPGEKVLPKNSILYSRFMLYNELNTLSIKNDRINVKLKGEIVRDLFENQEGPKKITKKILESYLRSRGLFHDDDEINGIDDDVKSNLKSEYQLKGILKDKYKIPLAEEIIRSIVVFGDDRKRLKSKLFSDYSGLLSKDEIEKLSSLQFKGWGRLSEKFLLGIRAQIDGNTMNILTALEQTNLNLNEIIRRHDYSKQINFLKNEALGINTGKITYDLLKDLYVSPPVKRGIWRTLRIIEDILEVTGHPPTKVFIETTREAQESKRTISRKTSLMKLYEACKEDEWVQQIKGEDEGRFSSKKLYSYYCQHGQCMYCGTKIDLNDLEDANKYDMDHIIPKSKKTDDSIHNNLVLVCKNCNSFKSDVYPIRPEIQQEMGPIWKSLLDCKLITKEKYARLNRQRPLSEDELSEFIARQLVETSQSVKAVADTLKRVFGDKSEIVYVKGRNVSDFRNNKGYVKCRSVNDHHHAKDAYLNIVVGNVYHVRFTSDPRRNIIERGEKYTLDVGRIFDRDVERNGEHAWTPGETGSIFIVNKYMRRENILFTRFSYRVGGQLFDLTPMKKGKGQHPLKEWKKIDKYGGYNKVAGSYY

SEQ ID NO: 5579 - protein, 959 aa, unidentified
  REGION 1..959: note = Description of Unknown: Cas Enzyme sequence
DYGKALSRVLLAEELALLFQKQREYGNPHATPELEMHIAGCGNRKSGLFWEQKSPFSGKDLLKMLGHCTFEKNEYRAPKASFTAERHVWLTKLVNLKVVVDGVTRRLQPEEVKAVLSLPYEYKSALTYKQLHSALIEKGFLPKSFVFSGLTGKKDKDPLDQTLVTIPAWHEIRKTLEKADLKTEWQSIAGAATGGQSELLDQIAWTLSVFKDDDEVEQGLRKLPLPGGEKMIKELSEISFDKFHNLSLKALRKIVPHMEAGLRYDEACEKAGYHHSQLFKAGEGQQKYLPPFYSGRDKDGRMVFDEKEDIPRNPVVLRSLNQARKVLNALVSRYGSPSSVHIEMARDLSRPMDERNKIKKAQEEFRDRNEKAKADFEAEYNMPAKSREFEKFMLYREQHGKCAYSLRPFDLDRVLNEPGYAEVDHALPYSRSYDNSKNNKVLVFASENRNKGNHTPYEYLTSFTEGENGERWLNFVAYVQGNKSYRLAKRTRLLRKNFGEDESKEFMERNLNDTRYICKFFKSYVERYLQLAEGSDSRRCVVLSGQLTAFLRARWGLTKVRGDNDRHHALDAAVVAACSHALVQRLSNYSKRKELEQAKDAIDAETGEIRDLELLAKLEQHFPKPWEYFREELLLRLNTDDPALLKSEAQHYGYPPETLENLRPLFVSRAPQRRNSGAAHKETIYAKPRLEHKLMVDAKTKEGKSRQAATPEELEGMVIERLGVFDTTGQGKAKKYRFTLEHLKNIVGHDRNRKMVDSLELWLKERGDDPNESGIKTFPRKPQKSDPKEGPFTGPEIKTVKLNGGKMTGISVRGGVTQNDTMLRVDVFRHKKDKKYHLVPVYVHHAVAEELPIRAIVASKDEDDWTLIDEVNFDFCFSLYPNDLVKVSLKKEASLGYYAGCDRSTGAISLWIHDRNKGTGKDGLIRGIGVKTALCIEKFHVDALGNIYPAPLEERRGLA

SEQ ID NO: 5580 - protein, 1384 aa, unidentified
  REGION 1..1384: note = Description of Unknown: Cas Enzyme sequence
MRKVLGLDLGTNSIGWALVNEAEGEEEKSSIVRLGVRVNPLTVDEQQNFEKGKSITTNADRTLKRSMRRNLQRFKLRRENLIEILKEHGFISDETILSENGNKTTFETYYLRAKAASEEISLEQLARVLLMINKKRGYKSSRKAKSQDEGQLIDGMEVAKKLYDENLTPGQFCLQLLQTGKRYLPDFYRSDLQMEFDKIWKKQQEFYPDILTDELKENLRGKNEKATWAICEKPFNIVGIQRTTKGEDLKKENFTWRDKALSEKMDLESLVVILQKVNSQINNSSGYLGAISDRSKELFFNKQTVGQYQMVVLAENPNASLRNMVFYRQDYLDEFNIIWNKQAEYHKELTEELKQEIRDVVIFYQRRLKSQKGLISFCEFESRKIEVEIDGKKKTKTVGSRVIPRSSPLFQEFKVWQTLNNLEVSVKGRKTKKQKGTSLFAGQEDTLEIYGKRELYQEEKEVLATELSVKKKLTKAEILKILFDNPQELDLNFREVQGNLTQAELFETYIKIIEHSTGEIIDAKKSACKILKNIETTFLTLNYNTDILYFNSEEDIDKQAMYQFWHLLYSFEGDNSNTGNDNLINKISELYGFEKEYAGILANVTFQDDYGSLSAKAIRKILPYLKEGNKYDIACEYAGYRHSKSSLTKEEIENKVLKEKLEILPKNSLRNPVVEKILNQMVNVINSIIETYGKPDEIRIELARELKKNAEERAELTKSIAETTKLHDEYKKILSQSPFNLTYISRNDIIRYKLYEELKDNGYKTLYSNTYISPGAVFSGDFDVEHIIPQSRLFDDSFSNKTLELRSINIEKGNQTAYDFVKEKYGENELEEYLNRIETLFKDKKNKLRKLKMQEKDIPEGFINRDLGDTRYITKYAKTMLGELVRRVVSTTGSITDALREDWQLVDVMKELNWDKYNALGLTYYEENREGKQLKRIKDWSKRNDHRHHAMDALTVAFTKDAFIQLFNNMNASLKPNSNEFALKNLHIENGKVKPPMPLNEFRAEAKKHLENTLISIKAKNKVVTQNINTTKKTGGTNKKIQQTPRGQLHLETIYGSQKQYVVKEEKVGTTFDEAKIMTVAKPAYRNALLKRLQENGNDPKKAFGGKNAPAKNPIFTDNAQTKQIPEKVKTVVFETIYTIRKEISPDLSLEKVVDVGIRKILENRLKEFGNDPKKAFSNLDENPILNKNGKSIKRVSISGISNAESLHEKRDKEGNIILDKKGNKQPIDFVNTGNNHHVAVYRDADGNLQENVVPFYEAVARVNMGLPVIDKDYKQSEGWKFLFSMKQNEYFVFPNEKTGFNPKEIDLINPENYALISPNLFRVQKFGSLLSGFWFRHHLETSVNIQKELKGITYKVIQSANNLQSIVKVRVNHIGQIVSVGEY

SEQ ID NO: 5581 - protein, 1458 aa, unidentified
  REGION 1..1458: note = Description of Unknown: Cas Enzyme sequence
MKRILGLDLGTNSIGWALVEHDFEEKSGKILGMGSRIIPMGQELSKFEQGQAQTKNANRRIARGMRKLNKRYKQRRNKLIYILQQFDMLPEQIRLSELFSNPLKLDRVSILPIDKKQKQYSALDLLELRVKALSDPISLKDLGKIIYLFNQLRGYSGGGNEPDKEDTDDENTYNEEKRKNKSYVTFGKILSLSEPTNTTVRGKELKKYKVSFETEDGVLEGDSFLDILKIGESLELFVNITESKKYGETIIFKLPNKTNWRKKMENLEKELTELSQKEGREIYLSEYFLSILKENKWARIRNNVVLRSRYQSEFDAIWKVQSKQYQFLNNCPQEKLYEILNFIFPGTKDSQEKYRQTGLEKGLYHVIKNQIIYYQRELKDQGDLISNCRFEKGEKAVSKSHPIFQEYKIWEQINKLTINTKIETGTNKKGETKYKYVDKPIPATLKEWIFDELQEKKEMSFSVILNKLKKEHNLREGIDFLNGMNPKAKLRGDETKYIFKKILGNELWGKLGMTDIARQIELWDILYNAKGNEYDIDSERTSKVLNFLKEHSEEIQNIEQTAIQISKTKFSRNYAALSLKATEKILPLVRCGKYFDDEFSEALNEKIMYLLNENVSDPFEKAVQEYLENNLDLLIYGGIMNIYATILVYGKHTEKDYSENEQIKEPNQILGLKQGELRNPLVEQIINETLMVVKDIWKDKDYGKPDEIRIELARELKNNAERRSKIYKSNSENQKANDEVKNLLIELKQEVTLANIEKYKIWKSQENIEEEFIKQYKDPSKSEIEKMRLWREQGHVSPYTGQPIPLSELFDRERYDIDHIIPQSRYFDDSITNKVICEKSVNKEKMNRTAMEYFETGSLIPSVFSKEKFIDHVNLYFRDTKRKNLLATKVPDNPVARQMKATQYISIKVKEELNKIVGNENVKTTTGGVTDYLRNQWGLTDKFKQLLKLRYENVQPLLAVSEYEKYVDSIEKKEKEYEKLNIPFTDIVLSKENFIQLFNQSFLLKKNNKLVIKGWSKRIDHRHHAIDALTIACTEPTHIKRLNDLNKELQTWLDNHKKEILPDFEGSPSELLDEILNLDKQKQKTIFTQIEKFKSIDLPWVGFPEDAEKAMQEIIVSQKPKDKLLIQYEEQRNNNGKIVTTDKLQIKIRGQLHEGTLYGKSQGVETYRIPLSKLAGKNFATEKTIDKIADKYLKTVIKEHLKDFDNKKEEAFSVEGILAMNKKIAEKKRESEWKRKGKKKKIGEIAPHTPITSIKIFYRDPKKIKKKKEQEETDDALQKLDRINAFNDNLYVATGGNYLFAVMEKSEERIFDIISFFDAVNLLKDEFNNTTNRKKFNKEQVFKNYFEEKNKAKLLFTLKQGDPVYMPSNDDEVIIDTDSPLYDNFWKDKMARSKNIHYVTKYSGKQIYFIKHNIANPILNKQEFGTQNAYEKVDSLSIKEYCIKLNIDRLGNIKPLLK

SEQ ID NO: 5582 - protein, 1473 aa, unidentified
  REGION 1..1473: note = Description of Unknown: Cas Enzyme sequence
MKKIGIDMGSASLGWVVTEDGKIIKKGVVRFKTGMSKESGGYESPTRERREARSKRNLIRARKYRKWELLEILVDGNFVPLTKTELEIWSKYKKGSIQKFPENELFLKWLACDFTYLENGEKYKNPYELRVNSLKNQLKKHEFGRALYHLVQRRGYKDIGETDKETEKQIARRSERGFQKALDENDKIISKALLNEFLNKDKRARNQYPYRDEYQYELEEICKAQGYGVSKCNDKDGNYNDDFVKKLWKVIIWQRPLRTQKGNIGKCTLEPQKLRCPVSHPVFEIFRTWSFINTIKYYDENNEKQSILPEYRNQLFDWFLKKEKNFKFEEIKDFLNKKYGINTKYNYPITKNKKGEEIYDTSVSGMPVCRGLIDVFGEEMRKVLNVIEFQNITQKDKCGGFGNAFKIIGNYSIFDLWHILFAFDEKTAKNKNFLTIFATEKLKLTDEKQINKFVKLKDKFLQGYADLSLNTMCKIIPFLKDGYLYNEAVALAKMPELLGENWENYKDKIIDAVKEANSIYEWNKSVVDITNNLIDRYKGLKENEQFAFKNYEYQLDDDDIKEIFKAIEGKFGKEKWKKKKDKEEIINAVTEKYQEFFKDEKRAYCELVTLTDIFNEKLKLLNINIDAKQLYHHSNTENIYLKKCKTDKEIDKKELPKAKNKNGFDVEILPQVQIDSIKNPMFNKSMSILRKLMNEFIKNDEIDKETQIVIELARELNDNNKRIAIERYQKERENNRKKYREFLEEFKKNENLNLNIEDSIPTFELWTEQTFEKTVDENGNEITNKNRLEILKEKDAIKRYELWTEQKGQCMYTGKMISLSKLFTNEIDIEHTIPRSILPDNTLANQTVCYAWYNRDKKRNQMPAQCDNFNKDVDGWGTRIEPRLKNWQELRDHYKKQYEDRLKGKGNEDETTKNKRIQDKHYYKMHYDYWKDKVERFEATEVKDSWARRQLVDTQMVSKYAREFLKTYFMKVSVQKGIVTATFRKIFGFQEEDEIKSRNRHTHHAIDALVLTLIPINSSHRERILKEYFKAIENNEKEKVKTIRQNEIPQSFNIQKFITDIENSTLIYNYEKDKIIKQTSKIVRKRGVKQYLKDKNGKFVLDEKGNKILLRAKGDTVRSGLYKETYLGKIRDVERFDDGQPKRENGDWKYKTGKDEYCFVKRENIDKVKVSDDLIKLIIDPVIRELVRKQKNNSEIKDYQGNIIRHVRIRTKSGKEIKERVNYRSEYDYKNKFYAEAGSIPYAILLQKFNKDEIKREMLPIASYEIAKMYKKTGGVDIEEYIQNNNPEFADWNKQLLKVGQKVFVLKEDVDYEKRNNIDFQRNRLYVITQFSDVDNTIMLKYHLEAQNDDAIDDDIKNQKDKLLRKYELQYDIPEIFEDKTIENIKERQTKYKKEKYSFKSFNDYRFKRLIEIIGIDETRRIKNELGMFKTYSSSIEMEGNTSLLKMSKENWNFLFEGKDFEMNIDGTINFLN

SEQ ID NO: 5583 - protein, 1381 aa, unidentified
  REGION 1..1381: note = Description of Unknown: Cas Enzyme sequence
MAKILGLDLGTNSIGWAIVDKENNNFSFVDKGVRIFSEGVNIEAKTNSESSKAAKRTEFRSARKLKYRRKIRKIELLKVLSENNLCPKLSDDELNDWRYKKIYPQNDEFRIWLSTDNQDNETERKKQKENPYSYRFKTATENLNLNNKEDRYILGRAFYHIAQRRGFLSNRLDSSDNSIIEEKNSEITAIINDATSIVEFSDLFLEFLSSYDKEETSNKPLFTLSRAFNAIIKENSTLVYADLKEKLHERLNKKEFLGPVKRAINDLTEKIQEENCSTLGEYFYILYQKGEKIRGEYTHRIDHYLTEFNFICNKQNIQNDIKEKIEKAIFFQRPLKSQKGLVAKCPLENRKACVPISHPDFEEFRMLSYLNNVKIKLSTDEKLRLLNEEEREQIQSLFFRKSKSNFDFIDIAKKLTPKNLKSGYYRDKNVSEYDVLFNYNLGSNVAGCPTIANLVDVFGADWKECLLSNFVKNTKTDKDIKVQKSIDDIIDDVWHVLFRFDNEELLKQFAIENLNCDEKTAIKFSKIKLKQDYGSLSLKAIRNILPYLRQNLIYSHAVFLANMKNILPQEIWNNEENRNIINNEINSIIENYKLYSNNIDIVNGLIKNVKKENGTWSSTNNFVAEAYKNSLNKQVKDFFGTKKWNETPEKHQNEILLECFELFSNQMKLNLGRGEFAKKQTIDEILKTFLSDNFNVAEESLKKLYHPSAIEVYKKAKRSDVDGKKYLGSPLISSIKNPMAMRSLHQLKKVVNQLIKDNMIDEDTLIHIEMPRELNSSNERVAIRQWNEELKNRRNKYTEEIKSIFRGDIKIEGCNDTNSSYNDYEPTETDILKYQLWIEQNKVCLYTGKTICLSGFIGNNPKFDIEHTVPRSRSLDNSQQNKTLCCATYNRQTKKDRIPFECPNHEEILPRIKHWYAKYKGLEQQIKDLSKKVKAASTKEKRDKYIIERTKLRFEYSYYFKKYKSFIMEEVPESFKNSQSVDIGIISKYGNLFLKTVFNKVYPIKGKTTANLRQMWGLNEKSRDNHAHHAKDAVVVACCTYDINDALANYYHNYEQHEFFGKPKPSFSNRIPWEGFHKDVDNFDNDTLISHHTPDNLPVQSKKAIRKRGIIQRNENGEIKYKQGDTVRGALHKESFYGAIKRDEINKKTGETEEVIKYVKRQGIEMFKDADLKNIVDDKIKELVTNGREQEKQIKKQIEEFKKQLKNLKEEEEQPIKEAIQILENKIKNDLYVLPNKSGNPVPIKKIRYYTSDVTNPLFIKKHRDVSRHEHKQFYHAKNDGNYCYAIYEGVDKKNKKLVEFKVVNNFESGKYFNSGLNNLKYPLETNIFDNKKNVLELKYLLKTGTLVLFFKESKNEIWEIDKIDLTKRLYKTVAIESDGR

SEQ ID NO: 5584 - protein, 1218 aa, unidentified
  REGION 1..1218: note = Description of Unknown: Cas Enzyme sequence
GMEIAIRLYNENLTPGQLVHLRLLEGKTNVPDFYRSDLQKEFDAIWNFQKQYHKSILTDDLYEQLIGKTKTVTAAILRKLGFDGVELKGNLSEKRKERYAIRSRAVSKECSIGEIAEILPEINNNINSSSGYLGAISDRSKELYFNKQTVGEFQYQQIISQPHLPLKNQVFYRQDYLDEFNTIWEKQKEFYPTLLTEELKEKIRDTVIFYQRRLKSQKGLLSICEFEGRKTKVLEDGKMKVKTVGPRVCPKSSPLFQEFKIWAQLNNIEYLPENEKKTKGISLELFQMEQLFTELNWKEKMSSTEVVKLLGLKGYKLNFETIEGNKTNAAFLDVLTELFEKEGHDELNLSKLNNAALLKELNSLLDIYGINTQLLYFDSSLEGKSLEQQPIYKFWHLLYSFEGDNSKSGIDKLRIALQEKFGFPYESNSPISNIKLPQDYSSLSSKAIKKILPHLKAGNRYDLACLLANYNHSHSETKEDLDKKTLKDKLEILPKNSLRNPVVEKILNQMINVVNGIIETYGKPDEIRVEMARELKKSAKERESATKAIRQATDEHEKLRNELQQEFGLQKVSRNDLIRYKLYLELKDNGYKTLYSNQPIERSKLFSSEYDIEHIIPQSKLFDDSFSNKTLELRSVNLKKDNTTAFDFVSLEYGEVGLVQYQERVKTLFGNQIGKKSKYRKLLMSESEIPDNFIERELRDTQYIAKKAKDILSELVRNVGTTTGSITEKLRKDWQLVDVLEELNWEKYDKLGLTETYKNRHGQEIKRIKGWSKRNDHRHHAMDALTVAFTKREYVKYFNNMNAKSDKDGEIYKILKTETYFDKDQKRRFNPPIPLAQFRSLAKEHLENTLVSFKAKNKVSTKNKNITKTTNGKKITISETPRGQLHLETVYGSSQVYSAKLEKIGASFTIEKIQKVANQKYRSLLLKRLDEFGGDAKKAFTGANSLTKKPIFLNALETHTLPEAVKLVEFETQYTIRKPIGPDLKIDKVVDKAAQRVLKLRLHEFGGDPKKAFANLEENPIYLNKEKGIVLKRVTISGVSNAVSLHDKRDKFGNKVLDKEGNPIPVDFVNTGNNHHVAIYRDEKGNLQEEVVSLFEAISRKNQGLPIIKKAHEKGWEFVFTLKQNEYFVFPNEQSGFGPNEIDLLDPENFKKISPNLYRIQKIGSKDYWFRHHLETTLNDSNELTEITFKRRRSPSALEGLIKVRINHIGYIIQTGEY

SEQ ID NO: 5585 - protein, 1106 aa, unidentified
  REGION 1..1106: note = Description of Unknown: Cas Enzyme sequence
ACCLELYPNNEAHRTSILNRDFLYLFLQDIIFYQRPLKTKTHLISDCELEFRVRFDTQEKVKLKCIAKSNPIFQEFRLWQFIANLRILEKDKGSKGEDVDVTGNYLDSEEKWVELFEFLDEKEDITQKQLLAKFKLKEDKFRWNFPEDKTYPCNETKAKFINRLKRIEGLKDFNLNKEQIQILWHLLYSVTDPEEREKALKKFAEKNDLNDDFAKSFAKMPPYKKDYGSYSEKAIKKLLPLMRRGKYWNENEIPKQAFERVNDIENRLNSIDYDLNKIESIADDQVSKAVLKSFIKTNGRLNALNTYQASYLVYGIHSESKDTEKWETSIDIQNYLNNEFKQHSLRNPIVEQVLTETLRVVKDIWDEFGNGEKGFFDEIHIELGREMKNDANTRKRISDKVTENENTNQRVKAILTELMNDGIDVRPYSPSQQEILKIYEEGVYLSENRKDELVEIDKIRKSNSPSKSEINKYKLWLEQGYISPYTGKPIMLSELFSTKYQIEHIFPQSRFFDDSMSNKIICEAEVNQLKDNLTAYEFIEKFGGSSVQVSGGKQVEIFSIAAYEAHVKYYFAKNKTKRENLLSKDIPEKFLNRQLNDSRYISKVVKGLLSKIVREDGEVEATSKNITTISGSITSQMKQDWGLNDIWNDIITPRFVRMNDLTNSADFGYINPNTDKFLPKVPDELAKGFNKKRIDHRHHALDALVIACTTKDHVNYITSINTERTNRALISKLRKVEEIQKTIKNLDGSTKTETRKVAKDYLKPWGTFTQDARAQLEKTIVSFKQNTRVINKTKNKFLKWVNTENGKIEKQLVPQTKGQNWAIRKSLHKATIYGKVTLTREGKTFEATAGRITLSDSFTRKQLDKITDTGIQKILNNHVKNYDENFAEAFSPEGIEVLNANIQSLNDGKPHQPIYAVRVYEVGNKFPVGTRGSKSSKFVEADKGTNLFFAIYKGKNKKGEEVRTFETIPLNVAIEEMKQGGEPAKPFYFDKNKCEFKLLFTLSPNDLVYVPTKDEIENPSLVDFGKLSKSQVERVYKMVSSSGTECFFVRNDISTLIKSYDPKSKIGELESKNKLEITISIEKQRIKECCWKLKMSRLGQIEQVIH

SEQ ID NO: 5586 - protein, 1080 aa, unidentified
  REGION 1..1080: note = Description of Unknown: Cas Enzyme sequence
MKYRLGLDVGTNSIGGALVELEDVNGCLVPSRLVHMFVRIFSDARHPKDRSSNAAQRRGPRSMRRNRDRKIMRRDFMLRALVKYGLMPGDKGQCKALERDDPWILRMRALDERLTPYQIGRALFHLQQRRGFQSNRKTDSKDGGKLKDGIEQAQQMMAVAKVRTLGELFGKRRLEREQDNAKLPKGQRQTQRLSRVRSSGEGAKLTYDFYPQRDMILGEFELIWAAQSTHHPQIMTDDAKAHLYHILSHQRPLKPQKSGKCTFLPEEPRAPKALPTAQYARILQEVNNLRVGATGEAQRALSPDEREKLIDYLMRPSSKMAKRTFKKIRKVMSLPESQIFSHETAKRDHLVGDLTAATMMQKDAYGPAWFDLSRTQQDDLISYLIESEQFDDWARDGEAIQGFGSYAAETFGLSEDHARAVFDTTHLNDGHGKLSKAALDRLMPHLEAGLRYDQAKEEEFKNSDLGDGEIHDHSLPYYGEILDRHTAFEKDDPKNTEEKYGKIANPTVHVALNEIGKLINDLIKRYGKPTQIVLELARDLPLSDRGLRELESRQKKNQDANDERRAELETMGLPDNYNNRLKLRLYEEAEKAFGGVVVCVFTGETINKTNLFTDNVEVEHILPLSRTLDDSIANKVLSVRRANREKKNRSPYEAFGDSSDGYDWEMIAQYARDLPDNKRWRFDPDAMQKWKERGGGDFLARHLNDTRYIARLGKKYVEALYGGQGQKGQSRQVWVVPGRLTSDLRHFAGLNNLTGLTGGNRKDRTDHRHHAVDALVIALTDQAMIKRAADLAKREDKVAHYEIMQAMAEPLKRYRNEAEDRLSKLVVSHKPDHGFQDAMHRDTALGITGEIDKKGQMIVVTRKAVGDLSDKDIKKIIDPHLRWLFASATEGLSGKAFKTALLDTAEAQTPTVKRIRVQMPKKETSLVTIKHGSYVKNGSETQHMKAYEGSSNYCYDIWMGDKGKWAGEVITTYQAYQMAQDNFKWWQCLLGRQGQELIMRLRKGDMLEIDWNGKRIIVLVYKFTAGAINMAQHYESNASKRIDAKELERIQMSVGPLQKANAVRVTVSPSGKVKRHKYKS

SEQ ID NO: 5587 - protein, 1093 aa, unidentified
  REGION 1..1093: note = Description of Unknown: Cas Enzyme sequence
MRRFAFDFGTSSLGWAVFDLKDGKPDNLVALGSRIFSSTEADAGREANGDSKAKKRRDARAMRKGYDRRIQRYNHVSKLLVEMGLFPEDKDARKALINLSPYELRAAALKHALPLHHIGRAIWHINKHRGFKSNRKTDAPDEKGKIASAAERLESKMRAMGAETYGAFLAARQNDPDPRKRLPTRIRQNSDKTKDLYEFYPLRDMIIDEFDLICARQKTMNPDFPDNEQISKLRKAVFCQRRLKPVEPGCCSFYPDETRLMRAHPDAEEFVIYQKVNEIRITDEDGRILPLEKSVRDEIVSILLKGQDITWPAFRKKVGLHKTEGQISLEEGGEKKLVGSAMAHRFMGTSRKPGPFTEEWSQLRHDEKRMEQLLDAYKEANTDEDLQQALEPFALSTDRAKLALKCSLPDGYLNISHKAIRAILPHLKANVITYSKACENAELHHSDKRDGEVFDTLPYYNEIDGLKRFLGYGTGHPNDPRDIQYGRIANPTVHVGLNQLRRQVNEMIKEYGRPDEIVLELSRELKKNKKQKDNIKKQRDINRKANDSRRADLENNNFYQKGDRVRTREALQRMKLWEELGKSPNDRFCPYSGKPITSLAVLMSDEVEIEHILPRSRTLDDSLANKTVAFREWNRKKRNLSPAEAAEQMPDLFNLEDMIARSKTMPTNKRWRLQPDAMERFDKNDGLAARLLKETQHFGVVARHYLTKLNPANPEQNEMNVWVTSGRLTAELRRKWGINLGTNYKNRNDHRHHAQDAAVIGVTDRRLINCLSRAAAKDEKAEFGRILAGIEEPYPGFSDQVNDMAKTIIISHRANHRVAGQMVKDGIYGKVRENATNRERGEIKRGNLVVRRDLLTLTPKQIGQVRDTKLREKLEGILDDSTQLAHGDKKELEKALLNDLTDFQKRTGTRRVRCLYPKENAVPIGRIKSGKPYKYAVPNENLYVDIVELQDGSWKAAFVDVFEAYQAQRKEEYIRKAKARGETVDAKRLPKWQTEYPNARFIMRLHKGDTLQLFDEDGTANQIKRVNGLQAKQTRVQLANHFEAGSLEKRHKEPDDPFRWDLATISKLMTRRARRVRIDEIGRVRTVPYGLIK

SEQ ID NO: 5588 - protein, 1075 aa, unidentified
  REGION 1..1075: note = Description of Unknown: Cas Enzyme sequence
MKYRLGIDLGTNSLGWAEVELREGADGTLSAGPLLDMGVRIFSDARHPKEKSSNAAQRRGPRSARRNRDRKLGRKRKMMHALVRAGLMPEDESARKAFEAIDPWILRSEALDCRLEPYEIGRALFHLQQRRGFKSNRKTDGDEDGAMYAAIEAARSKMAHEGVRTLGELFGRPRKLQLAENNKLKDTVRQPMPQARVKARSEGSKMAYDYYPDRTMIIGEFDQIWAAQAIHHPTLMTSFARDKLRSIIEEQRPLKSQKVGKCTLMPDQPRAAKALPTVQYSRVLQEVNNLMVGATGDRMVPLSAEQRAKLVAFLMRPSSKTGRRTFKSIRKHLSLPGSQKFNLESRKREFLVGDETAARLMQDDAWGEGWFDLERASQDTIVQHLLETEEVSELLDWLRTNHEIDENHAGAIAAIRLPDKHGNLSAVSLERLIPHLEAGLRYDEAAKSEFGDHRGLGDGVIYEDGLPYYGEVLSRHTAFEKDPPENGEDNRNDEERFGKVANPTVHVALNELRKVINDLIKRWGPPTEVVLELARDLPLSDKGLRELEKTQKKNQEANDVRRTFLESINEANTYENRLKLRLYEEALEAFGGAAQCVFTGKAISKSALFSSDVEIEHILPFSRTLDDSFSNKVLSLRVANRIKGNKSPAEAFASNPDGFDWDTISQCAALLPSAKNWRFSVDAFDQWEARGGDFLARQLNDTRYIARLGKSFVEALFGGQGAKGQSRRVWVVPGRLTSGLRHYAGFNTLTGFTDTNQKDRTDHRHHAVDALVIALTDQAMVKCCADFAKRESSVEQYEILAAMAEPLKRYRSSAEDRLQKLIVSHKPDHGFQGAMHNDTAYGVTGRRDEKKQMLLATRKPLDALEPTHITDIVDPVIRKHLAYATEGLKGSAFKTAIVKAGEALSPPVRSVRTIKPMKDASYVVIRHGKNAEHAKAYKGDGNYCYDIFLDKKGKWTGGIITMFQAYQNAQENPDWWQSKTRIDGTPLIMRIRKGDMLELSSDSHLEPIICLVAKFTHGAIAMAPHFEANIDQRTRAAYKGDAPTKYIFKAPTTLQKANAIFLSVSPAGKVRRHKA

SEQ ID NO: 5589 - protein, 1100 aa, unidentified
  REGION 1..1100: note = Description of Unknown: Cas Enzyme sequence
LKKKLTLGIDIGITSVGWGIIDEDFNIIASGVRLFNEANKSLNEGRRTNRIRRRVIRRRKLRLLELRQLLIREGIISNNFKPLNKPYHIRAKGLKEKLNNEELATALLHIIKRRGVSYEVEETSGNTKGEKLGAKEAVNQNQVRLKELGYVSLVQLERLEKGEKVRGDKNVFKTSDYVKEITRIMDVSECSDQIKEKVLELLTRQRHFSAGPGGFNSPTPYGSHRIPEDEILDDIYEIIEKKYGDLYLQKAFDIEYKGITYHVHKNGTIINKKPYNLIELMRGRCSLYPKEFRAPKKSPSAEKFNLINDLVNIKIVTENNRQLTTEEIKLTIEFLEKNFRFKPKGVKGLLKFLSLEENEITGLRINENKKPIITEFETLEKINKSLTKEEFKKVFNYELLDEIIAILTASKIIEERIEQINELIDNIEISTKLANITGISEYHSLSLKAIYEINVEMIENVINQQQVITKRTENTKEKVKKLVFDNTAILSPVAKRAHRQALRVVEELMNEFGEFDSIVVETTRSKNSDHEKKIIADIQEENAKQRQKASEIIEQVYNDDRRISRTLIEKVRYYEQQNGKCAYTNNSIDLKTLIKDPYAYEIDHIIPFSISRDNSQNNKVLVTHSANQKKDNKTPFLYFMSGNIAKGKINSYDEFKAIVLSNKNYSARKKQNLLFEEDINKFDVQQEFVARNLVDTAYAARTFQRTLKSFFDSNNIKTKVYAVRGKNTAEIRSLANYRWRKENKDLENQTPPLVKNRTELKHHAVDAIIVAGLSRQENFNALPFIMSEDKDLQEIIKAKIDYDVRKDPKVKKLIKQLNNLQENKIRFSWKIDSKPNRELSNQTISSTRVYEGEHHVVNTVDNIYEMTKENIKKLFVDNKEKMLMYQHDIKTYNLIIKAYKQYKHEEKPLQAFKDNHGPIRKYSKKGNGPIINKVKYLGNKLGNSLDITHKYITNNKKVVMLNPPVYRVDIYLSNKLYKPLFIEYNDVKKINGKYQITKQRYEQLMKKNQIDKNDEFQFSIFRNTIIRGFNKRNPNFAEFYRFISVRHQATNRLEVKRISQTHTDRPEIRITGNIIKLEKYNVSVTGIYQKVEKESLQLII

SEQ ID NO: 5590 - protein, 1393 aa, unidentified
  REGION 1..1393: note = Description of Unknown: Cas Enzyme sequence
MSKIDKDYIAGLDIGTNSCGWVATDLQNNILKMHGKTAIGSHLFEEGTSAADRHGFRTTRRRLKRRKWRLKLLEEIFDPYMVKLDPYFFARLKESGLSPLDRRKTSSSIIFPTKSEEQEYYKKDKYPTIYHLRNALMKENQRFDLREVFLAIHHIVKYRGNFLQDTPVKDFNASKIDVKITLENLNKLFPDVSEEYSVEFAVENVDKIETILRDDNTFKLDKSRQISKLLVEPSKNKDENKLRKDIARQVANAILGYKTKFEDILLVDIDKDEKSNWEFKLSDSDADEKVDQIITALSDTQQEVISEIRNLFSAITLSGIVDEGKTLSESMIRKYKDHQKDVALLKKVIKNHPDKDEAKRLSLAYDLYVNNRHGHVLEAKKVLKSQGIKTNKTLTKEDFYSLVKKNLDESKEAKEILNKIALDSFMPKQRTNENGVIPFQLHQIELDKIIANQSKYYPFLAEKNPVESHRSQAPYKLDELVRFRVPYYVGPMIQPKETKDQQVKQNQNFAWMVRKEKGQITPWNFDQKVNRMESANHFIKRMTTKDTYLLGEDVLPANSLLYQKFMVLNELNNIRINNRRISVAVKQNVYNDLFMNKATVSTKNLVDYLKQKYRLPSVEIKGLADPKKFNSGLIVYNKLKNTNLFDAEIADSRYRSDLERIIEWSTIFEDKTIYKAKLQTIDWLNDKQIRTLINIRLQGWGRLSRKLLTGLHDKNGQTIMEQLWDSQKAFMQIVNEPDFKAEIASENQAIVKNTSIEDFLTDAYTSPANKKAIRQVIKVVDDIVKAASGKAPKQIAIEFARDADRSKRTVGRGARLLNIYEKITDDLITTSLKESLKQASETNQFIHDKIYLYFMQGGRDAYTGKPINIDEVITGYQIDHILPQSFIKNDSLDNRVLVSSPVNNGKSDHVPAKMFGNKMAAGLGITISDMWKKWLDLGLISKQKFQNLKLDPNHINKYQASGFINRQLVETSQIIKLVATILQTKYPDTEILVVKASSNHCLRKHFHLYKSREVNDYHHAIDAYLSTICGNLLYQAYPKLRPFFVYGQYQKFSKDPEKENKILGSMRHFNFISNLFEQKDSKIRAGKNGTVIFDRNEIKEQLQRAYNFKYMLVSRETSTRNQGMFQMTLYPRADRDTAKSRNLIPKGKNMPTEIYGGYTGNSDAYLAIVRINKKKSVEYKVVGVPMRALERLNNTKNYNEELKRVLEPTILFNNKGKRKATILSFDIVKGRVPYKQVVIDGDRKFMLGSSTYVYNAKQLTLSWKAMQVITNNLESDKYDEDAIDRAYIDVFDEILEKLDKYLPLFDINKFREKLHLGRDKFIKLSIAEKRDTILQILNGLHDNPVMPKIKNLGLTTPLGFMQFSGGITLSKDAVLIYQSPTGLFEKRIKVSKL

SEQ ID NO: 5591 - protein, 1368 aa, unidentified
  REGION 1..1368: note = Description of Unknown: Cas Enzyme sequence
MRVKVYYIGLDIGTSSIGWVVMGEDGKPVRVKGKTAIGARLFQEGHVAADRRMFRTTRRRLNRRKWRLKLLDEIFDPYITPVDSTFFARLKQSNLSPKDSRKEFKGSMLFPDLTDKQYHEDYPTIYHLRRALMTEDKKFDIRMVYLAIHHIVKYRGNFLNSATVDTFKASKVDFKKSFNQLNELYSAINPEDAFQVDMNKSDETGRLFLDSSIRKFDKQKQISKLIPVVVEDKEAKKLNGKIALEITKAILGYKSKLNVVTQTEPEDPKKWAVKFDDEDIDSKLNDILPEMDENQQSIVEIIQDLYSQVTLNQIVPNGMSLSDSMIKKYNDHHEHLKLYKKLIDNISDTKKRSALKTAYDKYVGDDGKTIEQDEFYSNVKKNLDDSDLSKQIADLIEAEKFMPKQRTSQNGVIPHQLHQRELDEIIEHQSKYYPWFAEANPNKHDLHLAKYKIEELVAFRIPYYVGPMITPEDQEKSSQTIFAWMKRKEPGQITPWNFDEKVDRMESANRFIKRMTTKDTYLIGEDVLPDQSLLYEKFKVLNELNMVRVNDHPLKVSEKQAIYRDLFENQKRISVKNLQNYVKSKSGLPTGPKISGLSDPDHFNSSLGTYNDFKKMFGDKVDDPDLQDDFEKMIEWSTIFEDKKILRAKLDEVAWLSDTQKNEFKEIRYQGWGRLSKKLLTGIVDGNGQRIIDELWNTNKNFMQIQSDDSFAKRIHEANANQMKATDVEDVLADAYTSPQNKKAIRQVVKVVDDIQKAMGGVAPKFISIEFTRSEDRNPRRTISRQRQLENTLKDTAQALVKSINPDILSELDNASKSKKGLTDRLYLYFTQLGKDMYTGKPINIDEISNYDIDHIFPQAFIKDDSLNNRVLVSKAGNNGKSANVPLKLFGAKMGGYWKQLADAGLIGQRKLKNLQTNPDTISKFAMHGFIRRQLVETSQVIKLVANILGDKYRNDDTKIIEITARMNHQMRDEFGFIKNREINDYHHAFDAYLTAFLGHYLYHRYIKLRPYFVYGDFKKFREDKVTMRNFNFLHDLTDDKQERIADTETGEVIWDRKRSIQQLRDVYHYKFMLISQEVFSLNKEMFKQKLFPATLAKKSKLIQIKKDKPVDIYGGYSNNTDAYLTVVKLKGSKEDKYKIVGVPMRALDNLKHAEKESPQSYTAELRKALEPQFTKIKKNRKTGEVSKVVTNFDIVLGRLFYRQMVIDGSEKSLIASSVYQYNAKQLVLSDQAIRTISDQEGIDEFELSSQYDKVYDEIVQKVEKLLPIFQHRHFQERLNNGKSLFVNLPVHDVYEGNKLEQVGKKHIINSILGGIHANADRPDIDLFGIKNLGQFSSTSGINLSSDAIICYQSPTGLFERRVVLKDL

SEQ ID NO: 5592 - protein, 1064 aa, unidentified
  REGION 1..1064: note = Description of Unknown: Cas Enzyme sequence
MTQKLNYRIGLDVGVGSVGWAAIQDDKNGHPIKILDLNSYLFPSGEDARGNSPAQNRREARSARRLKRRHQFRKLRVRNFLVKEVGLIKPQELTEVLHTSLYNDLTALRSQALDHPLNNPALFRIFYYFAGHRGFQSTRKAELKDSEAKGMLAELNKTETALKGYRTLGEYYAKAPQFKGGFHNKGYLSGYSGTAKRAWLIKEITLIWHTQHDQFHNPLLTEDKLQAYLKLFKQQRSFDEGPANGPFSGGIAKLVGKDPFNKTELRAAKATDSFVKANLLIQLNNLKYLSRDPVNHKAISFAINGDNKTKIVKACLFKKKKVTLATITKILGLPKDTHYNLQLKGETPGKHILIDLTANTNLHKILKGVNVSSKEYDQIADILTKFKTDSTRLKKLAEVTALKPLIQSHDKRIDDLLLETPSQFGHLSVKTLRQIMPSLKQGFTYDQAMQAAGHQFSTLTTSLDDIRAIANPVVKRSVLQTIKVVKHLIARYGNPDYICLEMARELGKTKLERNQILANNLNYQNKYRDDQKKLADSGFGQVNATQVKKYELWKQQNHVDIYSGQPISIKAALTAATEIDHIVPYSLTLNDSLNNKVLTTVKNNRQKGQRVPMDYLSGAALTNFQTLVSNLFSNKKISYTKLNNLLSKKTPEHQDILKTWRTSAVNDTGYINKLLNNYFKNSGDIHYHNPQGAKKNHLTVVVINGRVTSYMRKIWRLNKNRADGDLHHAQDAAVIAVTTPGTVQKIVRYYQFKETGRPLTHKLYAEQPFEGFTKQLKVLLADDPLSMNQQLHAFKDGTDLKPKIPVWKPDHHIAGKVNGDTRYSGKLISQNKVLIRKPITSLMAGKDPDGRDVLYYSSNGTKKANPKTVAYNYLTSGKLVNDKLCELIKQKDPKELSGANAFPDGVAIFEHNGQTVRVTKVRLIKTMNINPVNVLKVKSNNSVMDLANNAYLNIFWNKAKKKYEFGPEFSYQIHQSKMTGKPIQHFVQKDFKNIILQNKNQKLLFKLFKRDLVELTLNKELVLKPNTDSSNQNQKIIPAGDPILMHLCNKTGIQLGFSEVRGRF

SEQ ID NO: 5593 - protein, 979 aa, unidentified
  REGION 1..979: note = Description of Unknown: Cas Enzyme sequence
MGKIILGLDLGITSIGWALANVDDENSQNSKIIDSGVRIFTIAEHPKDGKSLALPRREARGARRTTKRKAQKIRAIKRLLISEKIVTKDELENLFIGNKNQKDVWQLRRDALYRLLDNKELTRIMIHLAKHRGYASNRKSEESMDNEGKAVLSGITANQKIIQEKAYITIGEYISTKTKKRNGKDSEGKLNYDNSISRDMLINEITTIFEKQKEFNHPFINEKLLNNYKEIAFTQRPLKSVEDMVANCPFETDQKRAPKASLTFETFRALQKLKNLRIITQDGEMALSKEQMKQAIQKAKNTKTFTYKTLKTLFSLDKEAEFKGLTYFDHKTGEATKDPEGAKLLDFSAYQKIQKAIEGADHLFWSKIENDDALLDAIAKILTTEKDDKKSLEKLHKIIENETVCNTLISVSFSGFGHLSTKALAKIIPHLEDGLDYDKACEEAGYDFKAIFKGDKSLFLPPLSEQENLEMTNPVVKRAIAQMRLVYNAIARKYGAIDAVHVEFTRDIKNSHEDRNKIKKEQEKFRDIKEEAKAHAIEVLGKEPNAKELLKFRLWKEQNGECIYSGEKIRPEHLMDNFATEVDHILPYSRSLDDSQNNKVLCFTKENQNKGNKTPFEYFGADKESVIWQNFVGRVEGLKNLKYAKKSRLAKTNFDESSEIAFKDRNKNDTSYISKFVKNYIEAHAEFKESKMNRHVFTMNGMLTSQLRYKWGVGDKNRETHLHHAEDAIILAFATQSQVQKLSTVSAKREEFSYKNKEEKAKNLKFEPPMEEFGAKVQESLSEIFVSHMPRRKIGGAAHKDTVYSNKTLSVKKADGKVESLKGNSVNNNVKLKHGIALNDAMPRVDLFQHKKSKKYYLVPIYVSDFVKPKLPNQAIVQGNKPWIEMDENYEFRFSFYKRDLIEIQTKKTATKEALRVLGYYDGTDSSTANIAIFSHDDKDTYRMGIQNSTYIKKYQVDALGNYVEAKNEKRQGTKKEKK

SEQ ID NO: 5594 - protein, 1314 aa, unidentified
  REGION 1..1314: note = Description of Unknown: Cas Enzyme sequence
MRKILGLDLGTNSIGWAVVETEDNKSFELKEKGVHIFQEGVKIEKGIEGSKAEERTNYRSARRLKYRLKLRKISTLKELIKNDYCPKLTEQELNDWRFKKNYPENEDFRKWLLTNENKNPYFFRNIAVTEKLDLSVRENRYNLGRALYHLAQRRGFLSNRLEGTKESDGTIKKAISELTEKKGDKTLGQYFYEKYNVGEKIRNHYTHREDHYLEEFNKISEVQKIDSNIKDAIQKAIFYQRPLKSQKGLIGKCPFEKNKARCASSHPLFEEYRMLCFINNIKIKTPNDEKLRFLGKQEKEKIAPLFHRKSKEHFDFEDIAKQLAPKMQYKFYKASQKNPEDYLFNYTMKTTVSGCPVSARFESIFGENWKELKIEHKRKKDDSTSIINIYDVWHVLFTFDNDDKLEQFAMNKLGLKDEKLKEFINLNLKHDYSSLSLKAINNVLPYLREGLIYSHAIFLANMSDAISKEIWSQEENRTLIQKEVLELIQTQNQEKLIIDVVNGLIKKCRENNWYWSEKARLQFEKDIEKNIISVFGKDFWSKYDEEKQKNILDYAINHFQIQIQKNNGKGEFLRVETIDERVKNFLENNFDVDKEDLEKLYHPSAIEVFKQPIRAEDGRKYLGSPMVSSVRNPMAMRALHQLRKLINELVKQDIVDEGTKINIEMSRDLKNANERKALQSWQRDRENLHKEYYERIQEQFNSSGIKREPSETDILKYQLWEEQEHKCIYTGESIGISDFLGNNPSFDIEHTIPRSLSFDNSQQNKTLCQNRFNREIKRNKIPSELANHSEILGRIDKWKEKYEELDNKIQKLRKVTTSDKISKDRVIQIKHKTTFERDYWKNKYERFTMPEVKSGFKNSQIVDIGIITKYSRLYLNTLFDKVYTVKGNTVADFRKIWGLQDEYKKKARINHVHHCIDAITIACITKQNYENLAKYYHDSEEMFISRSDKKPQVPKPWETFTEDVKEIEKEVLVSHHAPDNLHKQSKKKLRKRGVVVKNKDGNIIYQKGDTVRGSLHKETFYGAIKREVVNKEGEKEEKILYVVRKPLEYSDFGFKTVNDLNKIVDEGVKNIILTSVNEKGIKQALSEPIWMNEEKQIPIKKVRCYTPTVTNPIHLKNHRDVSKHDYKQSYHVTNDGNYLMAIYEGKDDKGKIKRDFEIVNNIKAGEYFKQSVRDALKAQGIEHLEGLIPDSKESGKLTLPLKYVLKTGTMIIFWENNPDEIWDLENEDIKKRLYKVVGLSINRIKSGNKYYEFGMAILRFHQEATPAGELKTIDGAFQKDESYISQRKLSHNQFNALVEGYEFKINVLGQIEKL

SEQ ID NO: 5595 - protein, 1006 aa, unidentified
  REGION 1..1006: note = Description of Unknown: Cas Enzyme sequence
RTARLMRRRLRRRAWRLVKLARLLKRSGLNCDPRQPSAVSPWKLRVEGLDRRLANDEWARVINHLCKHRGFHWISRAEEKKAEGDKKEGGKVKQGLDNTARRMANYRSAAEMVLAEFPDAQRNKAGDYGKALSRALLADEFALLFRHQREFGNPHANTELEAKILGNGDRKSGLFWEQKPPLAGADLLKMLGRCTFEKDEYRAPKASFTAERHVWLTRLNNLRIVIDGTTRGLSGAERKLALPLPYKQSGDFTYKQLRAALVKAGLLQENFKFAGLNYPAGKQLDEAKPKDPETEKLVKLPAWQELRKALKDAGLETEWEGMAGATTGGDPTLLDDITRVLSVFKDGTEIEAELRKLNLAGGEKMIEALLEISFDKFHALSLKALRKIVPYMEAGLRYDEACEAAGYHHSQPHQDGEKALYLPPLYSGRDKHGRMVFHEELDVPRNPVVLRALNQARKVLNALVRTYGSPAAVHIEMARDLSRPLDERNKVKKAQDEYRERNEKDKVAFAAEYGIAPKSREFEKFQLYREQQGKCAYSLKPLDLHRVLHDIGYAEVDHALPYSRSFDDGKNNKVLVLTEENRNKGNRTAYEYLTSFPGGENGERWRNYVTFVETNKSYRLTKRTRLLRKDFGDKAAEEFRERNLNDTRYICRFFKNYVERYLKLGAGEAAEKTAKRCVVLNGQTTAFLRARWGLLKIRGDSDRHHALDAAVIATCSHGMVKRLGDYARTKELAKVRDGFPDPETGEILDPAKFQQLHAHFPDPWPHFRQELEARLGIDDPSALHAQLEMFSTYPPEVLATVRPLFVSRAPQRRNGGAAHKDTIYAQPERLKAQGGVTQKVPLTSLKMSDLDKLIDPHRNEKLYAAIRARLEAHGGKGDKAFPLDNPLHKPDRDGNPTGPVVRTVTMVIDKLSGIPIRGGIAKNDTMLRVDVFRHKKDGKFHLVPVYVHHAVTKELPNRAIVAHKDEDEWTPIDDRYTFSFSLYPNDLTRVTLKSETRACAEFCVNG

SEQ ID NO: 5596 - protein, 995 aa, unidentified
  REGION 1..995: note = Description of Unknown: Cas Enzyme sequence
MKTVLGLDLGTNSIGWALVEKSENGNEQDGKILGIGSRIIPMSQDILGDFGKGNSISQTAERTGYRGIRRLRERHLLRRERLHRVLNVLGFLPKHYADQIDFEKRLGKFKDEAEPKLAYQVFGNKGKENNNYDFIFKKSFEEMLGDFREHQPQLLENDRKIPYDWTIYYLRKKAITHKIEKEELAWIILNFNQKRGYYQLREEEIEEVPNKLVELHTLKVIDVKADQPQKGKKEIWYSIVLENGWIYRRSSKTLLFDWKDKVKDFIVTTDLNDDGTVKTDKEGKEKRSFRSPGEDDWTLLKKKTEFEIDKSKKTIGEFIYDALLQNPKVKIKGKLVRTIERKYYKEELKQILQKQFEFHPELQSEDLYADCIRELYRNNESHKFLLSKRDFIHLFIEDIIFYQRPLKSQKSSISNCSFEYKKYIVNGTEQTQYLKVIPKSHPLYQEFRLWQWIYNLSIYKKDDDKNVTVEYLNSTEDYEKLFEFLYGRKEIEQKPLIKYFIEQRGLKGKALNAETEKYRWNFVEDKKYPCNETRTLISTRLAKVENLPDNFLTTNIEQHLWHIIYSVTDKIEYEKALKTFAIKYGIDENSFIDNFLRFPPFKSEYGSYSTKAIKKLLPLMRIGKYWNEKEITEEVKGRANSIFERLKAINFDEEKIENVSDDEVPKQVLKSFLKKQEFIKGLQLYQASYLVYGRHSEATVAYKWNSVADLENYLKEFKQHSLRNPIVEQVVTETLRVVKDIWQYYGNGSKDFFDEIHVELGREMKNTAEDRKKISEQVIENENTNLRIKALLSELKNDPDIENVRPYSPIQQEILKIFEDGVLSSEIEIPDDISKISKTAQPSSSELQRYKLWLEQKYRSTYTGEMIPLSRLFTTDYEIEHIIPQSRYFDDSFNNKVICEAAVNKLKDNQIGLEFIKNNHGATVETGLGKSVRIFEVNDYEDFVKTHYIKNRSKRNKLLMEDIPEKMIERQLNDTRYISKFISSILSNIVRRVAP

SEQ ID NO: 5597 - protein, 1246 aa, unidentified
  REGION 1..1246: note = Description of Unknown: Cas Enzyme sequence
EQLARVLLMINKKRGYKSSRKAKSQDEGQLIDGMKIARQLYEENLTPGQLCLDLLESGKKKIPEFYRSDLQNEFDRIWNFQKAFYPDVMTGNLKDQLLNKNDKATWAICEKPMQLVGIKRVFKGADARLENYRWRVRALSERIDLEQLAIVLQMINGQISSSSGYLGSISDRSKELFFKKLTVGQYLMSQLESNPNTSLRNQVFYRQDYLDEFNAIWEKQKEYHSELTDELKKEIRDVIIFYQRRLKSQKGLISFCEFESRQIEINSEGRKRVITVGNRVAPRSSPLFQEFKVWQNLNNLEVFPKGQLSRRNSSARLIAAQEEVGGRRFLDLEEKEVLYKELFIREGLSKPQALKLLFGNENKLDLNFDKIEGNRTFAALYKAANEIIELSGHEKIDFASQSADKISSSVKSIFSALGCDSDLFNFDSETDPDKQSSYRLWHLLYSYEGDNSNTGIDGLIGKISDLTGLSSEYARILTSITFQDDYASLSAKAIRKILPYLKTGNKYDLACEYAGYRHSKSSLTKEEIASKVLKNKLEILPKNSLRNPVVEKILNQMTNVVNAIIDEYGKPDEIRVELARELKKNAGEREELSKMINETSRAHEEIKKILQEEFSISYVSRNDIIRYKLYKELETNGYKTLYSNTFVPREKIFSKEFDIEHIIPQARLFDDSFSNKTLERRDINLEKGDRTAFDYVKEKFGDTGLQEFLARIESIYNLKSISRAKYNKLKMSEKDIPDGFIDRDLRNTQYISRKALGMLGEIVRTVVPTSGSITDKLRVDWQLVDVMKELNWDKYKALGLVEYYEDRDGRQIGRIKDWTKRNDHRHHAMDALTVAFTKHVFIQYFNNVNARYDKSSEAYAIEQMYFDERKVKPPIPVDEFRAEAKKHLESILVSIKTKNKVVTKNVNVSKNAGGVHRKVQLTPRGQLHLETVFGCQRVPVVKEVRVGSALTEEMAKLVTKPHYRDALLQRLAENNHDPRKAFTGRNSLEKQPLYLDELHTKQVPEKVRILTFESVYTIRKQVAPDLNVDKVIDPKIRKLLQERLAAYGDAKKAFSNLDADPVWLNRQKGILVKRVTVSGINNAQALHEKRDKEGRLITDSEGRTMPVDFVNTGNNHHVAIYRDSLGQIQDKVVSFFEAVARVNLGLSIIDREFNSHEGWVFLFSIKQNEYFVFPNDKTGFNPLEIDLMDKTNYSIISPNLFRVQKYTYRNYVFRHHLETNVEMDYSMKGVTWTDFRSSKGLDKIVK

SEQ ID NO: 5598 - protein, 1354 aa, unidentified
  REGION 1..1354: note = Description of Unknown: Cas Enzyme sequence
MTKEKTYEGWYLGLDMGTNSVGWAVTDDRYNVVKKGGKALWGVRLFDEGQTAADRRAFRTARRRTQRRSRRIDLLQELFAQAVAEKDPGFFQRLNDSRYLPEDKHVQQRNALFCDPDYKDKDYYKAYPTIYHLRKALMEEDGPFDVRLVYLAVHHIIKHRGHFLFDSLALGADGLPDSGEAFRAFRDAAQDVLELTVPEEAGPSIAAILSDRSLGVTRKKAALLECLPRAKEKSVKELAGLLAGGKASLDGLFGDEILKEFDKNKISLGDSDYDDKADEIAAAVGEDRWELIAAAKSLYDWALLAELMGGCRTLSEAKVRAYEKHRADLKRLKALLRPYPKLYHDMFRSAGKNSYGAYAGLCMKNGKKLVIEKRASADDFFDSLRKIVKGIHSDEAEAILQEIDAGQFLPKAVSKINGVIPHQLQEQELKAILNRAEAYLPFLKEADRYGTVKDKIVQLLTFRIPYYVGPLNTAHSADDGRRGFAWAVRKEGGRVLPWNFSEKIDAEGSAERFIRRMTNKCTYLLGEDVLPKNSLLYTEFMVLNELNNVRLGEAGVRLTEEQRDILWKELFLRHKKVTGKRFRDFLVKEGWLSRDEQDTIRGIDGDFKASLGPWIDMDNLFRGGEKPDRAVLEKLIQDITLFGDDRRMLARVLRDDAPQLDPAQVKALTKLRYSDWGRLSEKLLAGLPAVDKETGAVQTLIEAMHTTGLNLMELLTDRFGYAEAISKENEKEMEDSALTYDTIERLRIPPAVRRSVWQTLSIVKELRHILGCGPKRIFIEMARGGDAVKQRTKSRRTQLMELYKACGRDARQWSEMLEKTPEDALRRDKLYLYYTQMGRCMYTGDVIRLEDLENKDLYDIDHIYPQSLTADDSLDNRVLVKKQVNAAKSDRYPLAEEVRQKQKPFWEMLYHKGLISRTKYARLIRSTPLSADELASFIGRQLVETRQSTKAAAEILKKVFPEADIVYAKAGNASRFRQYFGFLKVRDVNDFHHAKDAYVNIVVGNVYHTKFTTNPAHFLREKNARYSLNPAMYDYPVARDGVTAWTPGDDGTIAVVKRWMGKNNILFTRRSYCQQGGLFDQMPVKKGQGQVPLKADGSPIGDIEKYGGYNKAAVSYFMYVQGKDKKGNPAYLFVPVLLYRAGALRTDADRKAYCLEEWQREKAAFTEPRILLREIPYNALLEQNGFRMHLSARSGTQLIMKNAVELCLSEEQAALVKRIGKFLERSRTEKGSRITAYDRLGTEDLRHLYETFEDKLNHSVYQEKLETQAKTLAEKKENFEQLTAEEQCQVLMEILHFFQCNPVLSDLRLIGGVGQAGRFTLSFNATKQKGLTLVAQSVTGFFEKRIPLVPFGRP

SEQ ID NO: 5599 - protein, 1168 aa, unidentified
  REGION 1..1168: note = Description of Unknown: Cas Enzyme sequence
MKYTLGLDIGIGSVGWAVVQNEGEHWIEDFGVRLFDSSENPKDKCNKNQERRAQRAARRVTRRRSHRKMRVKQHLQRMGLLTLDELSRYFEAPHPDPLSLRVKGLDEPLSPCELAACLIHISNHRGYQDYFETDTEDMTKAEKEEAEQELAGISRVNRLMEQGGYRTAAEMFLRDAAFACPTGGEQRAYLNHPYVTDRCLVGRDLLRKEVQMLLQKQGETYPILLAPNPAVKKRAGKEPLASPMTNAEILEEILLNQRDFEDGPGTAGDPMRKYKGFLDTLGNCRYYRDEPCAFRASPLADIYSLVNVLSQYRYTNLETGELTLAPELARALLQKALEQGELKKNDVTKLAKKFDTGVNMPTAKESGKQETLGKCLKFLKPMKKLLDECGIDWLSAVGENYTAPDTLLNRISKIVCENHTPRRRLRALRAVPELNEAAIRKLAGQNFSGTAAVSEKYMKGAIAAFEGGELYGHFQSKLDNAPIMAKGGTHRLLPAFSPDAEFAKNAVVMRSLNETRKIINAVIQAYGAPYAINVEVASEVGNSFEERQNIDNRQKENEKNNQQITETVAALLGIEPTAVTGEMRLRYRLGERQGWHCLYSDKPIDKVTALNPRRQEFEVDHIVPFSLILDDTIHNKALVYTDENRRKGQTVPLMYLDAAACDRLRVRANDMLKHKQISERTYRYLTLPNLDNTELLSEWKSRNLNDTRYITKYLVRYLSETLQFAPGARSTPVFGVKGQLTSSLRRQWLNKQTWGKDEKDATRTETQLHHAVDAVVIAHITPATSMLMENKLRLNRIYHAAGKQKTSEYYQTMEKCINALEDHYHMPRRVSMEILCRKDGCTALHPALGLEVDVRFFDVDAARKEAELFAKQAKKDGEEVPPVPTRAELLERYYNQLRNFYHDEAFVARLSPPLVSYKTSTRCRGAVTSQNALLIKQTPEGAVEMKRRDVLSLKAKELDKLCTDDTDLRESLEAAFALPRKKEDDPLGEILKAQGKTEFVTQKGRTVRKVTLTGNEWRNPYYKETPESGKTALDTRNYWCVELYRNEKGELQMRGIMNADVKREGKKLVLQTPPPADYAAHVMYLFPYEYIVVTKSNGEEKYRGFYKSVFNINQNALCYIAGNAPFDGKKAMSIGKKDTVRKYAVSLLGRLGGEVACGAPLLYKPAKK

SEQ ID NO: 5600 - protein, 1347 aa, unidentified
  REGION 1..1347: note = Description of Unknown: Cas Enzyme sequence
MINQEYFLGLDIGTDSVGWAAANSEYHIIKKNGKALWGVRLFDSAQTAAERREYRIARRRIERRKQRLAWLQDQFAAEIAKKDPAFFRRLQESKFLEEDKQSNHPLGRYTLFADRNYCDKDYYRDYPTVYHLRKKLMEQPGPFDVRLVYLALHHIMKYRGHFLYGDLAMDSISLKAGMDRLNHVLEQEFEYKLEVSNMEALKEVLISRKGSKTWRKKCLAELLSVEKREDQMGFALAELLAGSSVPLDALFGDGTATEDFKKISLEDDFEEIVPKLEAALGDRIEVVLAAKGIHDWALLETMRDGERYISSAKVKSYQKHEDDLTLLKTVVRQLNDRDMYREIFHTAREKLNNYPAYSGKDANGCRCGYDDFRKYLTGKLKPYKDLYSDIPAILSEFEQGTFLPLQTTKDNGVIPHQLHEEELVKILGNASAYLPFLTQVDESGLTKAEQIHRMFCFRIPYYVGPLDSRSEHSWVVRKNDKVYPWNFEQVVDLEACRRNFIERMTRKCSYIGEPVLPQNSLLYTRFQVLNELNNLKINGEGISVAQKQAIYHDLCLSGKKVSLSKLRNYLNLDKNDEITGIDGDLKGTLSPWKHYAWLIKQPGGYEITEDIIRQITLFGDDRKLLANWLHKTYGNKLTREEEKLALRFQCSGWGRLSRAFLTEIYHGESSTGEAMSIMDMLWETNYNLMELLSSRFDFAGAVQAYREAHLNQYMSLQDYLDESYASPGIKRAIHQVMGIVNELEGILKCPPKRVFVEVAREHGEKGKRTISRKNELLALYQKCGEECDELFQQLSDEPEGNLRRDKLYLYYTQKGRCMYSGEPINLSELDSGYDIDHIYPQSKTKDDSIQNRVLVKRELNAVKSDNYPIAADIRMKMRPFWTKLERAGLISKEKYHRLTRSTEFSAEEQAGFISRQLVETRQSSKIVAELLKQRFGSHTEIVYVKAGNVSSFRQDQRLTKDGQQKQAGQCKQNEQTVQDPLFVKCREVNDFHHAKDAYLNIVVGNVYHVKFTRNPANFLREKNAKFSLSRMFDFDVSRGEDVAWRAGPEGSIAIVRHTMRKNNILFTRRSAEATGGLFDQMIVPKGKGQAPVKDSDPRMSIEKFGGYNKLTGAYFILVEHTAKKKRVRSLETVLLMYKEKYEAAPERYCCEILGLQEPKVLIPRIKINTLVSYDGFRMHISGRTGDRIIYKNANQLVMPPDWQQYIKNISKYLERCRTAGRELELTTFDGITDEANLTLYRLLLEKLENGRYRVKYETPAQTLCSCSEKFRRLSVPDQCRILMQILNLFANTAASADLKLLNGKAGIGILLTSKNLDNYRGHSFKLIHQSITGFFEQEIDLMGEMLS

SEQ ID NO: 5601 - protein, 1123 aa, unidentified
  REGION 1..1123: note = Description of Unknown: Cas Enzyme sequence
VDSNNLTLGLDLGVTSIGWALADVEGQQIVDAGVRIFEAPMDVAKFEAGEPGGSKAAIRRKSRMQRRQTSRRQARHRDLYLALQSAGMLPFAGKKAEDRHKKLTDFDKDLMSDKTRDDQLAWGWRERIRAEAPTIADPDQVICYYLRAKAATEKLELPELGRALYHLGQRRGFKSNRREGRSGLTTADAKKEETERSNKLNNIRTLQEELTATGLTLAQRLAFINPHQAAIRNRKRSDIAPIETGRRMYQDEFKKIWETQQAHYPDLLTANFYNRIERLMFKQRDVSAGKPGKCELERDPPLPRAPKSSLLAQHFRLVQTVNNLKAEGISGTEWREKQRELIAMLSTVIFKKETKKGTQTFFGLPFAEVKVRLGLHKRTKLNLDDDEDSTYLRGNRTNAIMADAFGVERWSAMEEQECRRIVRKWITESSPEKLFRIARTQWNLDDAKAEQLASLEAEEGYAALSHVAILKLLPHMEQGLTYSEAVKEVYPSQLSGGEAYEFLPPVETDELPRIPNPVVKRALTELRKVLNAIIRKYKIETGQETWRPARIRIELARDLKRNAEQREKIHKGNKERERERITAKKWIEERGQRPTDRLVERVALYKRTRGQCVYCVLPLGDMENVFSEDSGIEVEHILPRRCNDNSFSNKVLAHRACNLRKADRTPRQAWDPSPEWDEMLKFVNALKDKALHDRFIIQTEEELQSFTNRHLSDTRYISKLASEYVELLYGGRDAQLDWDDRVRRCVYASSGALTAEMRKRWGLNGILKPKPVNTEAARQETKSRDDHRHHAVDAIVIALTTESTIQRAAFEAQRHDRASGHLLPRYFPPPWPANGEIEERIRSFRGEVQQAAEKIKVSHRVDHALNGKLNEETFYAPPKPGSDVAHITKLVHKLTPSDLKNLDLLIEDKSVREAISAQLQKVGNDPKSLEGNLPYLEGKDGRKTPIRKVRLAKRGLTLETLRHGAVLNAENHHIVIFKRIDPVAGELWYTPGPVTRLKAMRDRAQEAKRIAPKKGPYEIVNKKDGEGSTYVMHLMKGDAVEMLDPVNDLRDVYIFSSMSDGDYVFLRHSAVVSSAKKMGLTLSQMRSEMQKSGDRVRTRLDRLRELECEKITLDPLGKVIYSA

SEQ ID NO: 5602 - protein, 1464 aa, unidentified
  REGION 1..1464: note = Description of Unknown: Cas Enzyme sequence
MCKKILGLDLGTNSIGWALIEQDFENKQGKILGMGSRIIPMSQDILGEFDKGNSVSQTAERTGYRSIRRLRERHLLRRERLHRILNVLGFLPEHYAAEIDFENRLGKFVEGKEPKFVYNNKQFIFKKSFEEMLADFKEHQPQLLKNEKEEDKLVPYDWAIYYLRKKALSQKIEKEELAWLILNFNQKRGYYQLRGEEEEENPNKLVEFHSLKIAEVTADEKPNNKGEIWYSLTLENGWIYRRSSKMPLFDWKDKVRDFIVTTDLNDDGSIKKDKEGVEKRSFRAPGEDDWTLLKKKTEQEIDNSHKTVGTYIYDTLLRNPKQKIKGKLVRTIERKFYKEELKQILQTQKQFHAELQSEDLYNDCVRELYRNNEAHQLVLGKKDFTHLFIDDIIFYQRRLKSKKSSISNCSLEYRKFKDADGNEKTEYLKAISKSHPLYQEFRVWQWLYNLKFYEKTDDKDVTGQFIQSVEDVERLYEFLMSQKEVDHKDILKHLLSPQGLKGKALNAEINKYRWNYVYDAEKNESKKYPCNETGYEIKRRLEKVENIADGFLTEETETQLWHIIYSVTDKTDYEKALKPFAAKHHLNEVSFIENFKKFPPFKNEYGSFSEKAIKKLLPLMRIGKYWNWDAVDNTTKNRIDKIINGEYDATIRDRVRDKAIHLTEHQSFQGLQLWLASYVVYGRHSEANIASKWNSIDDLEKYLEAFKQHSLRNPIVEQVVTETLRVVRDIWQQYGKGAKDFFDEIHIELGREMKHTADERKRLTNQVSDNENTNLRIKALLAEMKNDNAVENVIPYSPMQQEALKIYEDGVLNSDIEIPADIEKISKTAQPTTTELQRYKLWLEQKYRSPYTGNVIPLNRLFTADYEIEHIIPQSRFFDDSFSNKVICESAVNKLKDNQVGLEFIKNHHGEIVETGNGNKVKIFSEEEYTEFVKQHYAKNRPKRNKLLLEDIPERMIERQMNDTRYISKFISSVLSNILRVDKDDDGINSKNIILCNGKITTALKQDWGLNDIWNDLILPRFERMNQLTNSNAFTSYNEKYQKYLPTVPLELSKGFQKKRIDHRHHPMDALVIACATRDHVNLLNNQYAKSEVTRYDLQRKLRKFERVAYFSKKANQQVERGVPKEFYKPWENFTVDAKNELEKIIVSFKQNLRVINKTTNKYEKWIDKNDIKVKELVQQTKGDSWAIRKSMHKDTVAGKIKLDRVKVPKGKILTATRRSIDISFDLKTIESITDTGIQKILKNYLLSRNNNPELAFSPEGIEEMNKNIEQYNDGKKHQPIYKARIFELGSKFPLGQSGNKKDKFVEAAKGTNLFFAVYQDKDGKRSYDTVPLNVVIERQKQGLTSVPETNEKGDVLLFHLSPNDLMYIPTEDEKENRIDFNNLNKEQMKNLYKIVSFTGNRLYAIPLNVASVIVNKVEYTQLNKIEFIKEKEACIKLKVNRIGNIYTFTSNEVKKAFDEFRKA

SEQ ID NO: 5603 - protein, 1095 aa, unidentified
  REGION 1..1095: note = Description of Unknown: Cas Enzyme sequence
LTKYLFSFDLGTNSNGWCIFRLDGDGAPVAIIDAGVRIFSDGREPKSGNSLAEGRRVARGMARRRDRYKRRRKAVLRTLSEYGLMPADPKARAALVAETQDAKEGEQANDVYALRARALDEKLPLHHIGRALFHLQQRRGFKSNRKTDRKDNDKGAIALGADRLVLEMREDNARTLGEFLAKRRGHDPSARGNVRVRIDIDTNDEPAKDGKPTKPGYNFYPQRAMLEHEFECIWNAQAAYWPDVLTDERKAHLFRVMFYQRPLKAPIVGRCSFNPSEQRLAKAHPLFQAFRLYKEVNELGLVMPDESERKLTLDERNALITKLRGVRSASFGALRKTLKLSERGARFNKEGEARDKLLGDEIYSVLSDKAIFGNRWAKLSMERQWEIIEKLREEPDPFALHTWLVENAGLSEEQAREAADVSLPEGYGRLGPTALAAMLEELKAEVITEAEAAKRAGYDHALARVGEAVDLLPRYQDILERRIPPGTNDPDDDYDIRKGRITNPTVHIALNQLRAVTNRLIARYGKPERIHIELARELNQSEEQKREATSRNAKNRREAERRSAILKEFGQPDNGFNRQLLKQWEELNPENPLERRCIYSGTVITPTMLFSGAVDIDHILPWSRTLDDSQANRLLCTREANREKRNHAPAEVPQWTDRYDDILARAQRLPLNKRWRFGHDAMARLEKDRDFLDRQLTDTQYLARLAHDYLGSLYPDEEPDGDGVVGRRNHVVVVTGRMTEMLRRRWGLNGILPDHNFADPTKAKNRKDHRHHAVDAAVIGTISRSLLKRIADAAREGENQGAEDVIRTIQPPWPSFREDLKAVVDRIIVSHKPDHGTLPKPGERGHTAGQLHNDTAYGLAKDDDGNPIAVHRKPFLALEPKDLPFIRDPQLRGWLEANTAKLSGKDFTARLMKLRKLDGHPFKRIRRVRMVERLALIPIYDATGRAYKGYKGDANFRYDVWEMPDGKWRHDVVTMFDAHRPDMDWQARRPHPAARKVLSLKQNDMVAYEQPSVGFVIGRVVKFNTAGQIYFASHLEAGALKARDADPDDPFKYFSKSANGLRDVKARQVRVDEAGRVFDPGPRDRSSHGQKAQPG

SEQ ID NO: 5604 - protein, 1524 aa, unidentified
  REGION 1..1524: note = Description of Unknown: Cas Enzyme sequence
MKKILGLDLGTNSIGWAIVNAEVKSRDNGNPYLQPKNISAAGSRIIPMSADILGEFDKGNSVSQTADRTSKRGIRRLLERNLQRRERLLRVLKVMGFLPVHYSDKINDYGKFTDYSEPKLAWKKGKDGKPEFIFKDSFNEMLSDFEKHQPQLVANGKKVPYDWTIYYLRKKALYQRIEKEELAWILLQFNQKRGYYQLRGEEEEENSDKSIEFLAQRVVRVESTGEKKGDDVWYNVYLENGMIYRRPSRIPLDWEGKIKEFIVTTDLEKDGTPKKDKDGNIRRSFRAPKEDDWTLIKKKTEFDIDKSQKSVGSYIYDALLANPNQKIIGKLVRTVERKYYKDELRQILEIQVSFMPELQNDSLYKSCIEELYPNNEAHRNNNAKPDFINLFINDILFYQRPLKSKKSLIDDCPYESRRDKDGNVHPVKCIAKSNPLFQEFRLWQFVQNLKIYQREREVNGKLQTDVDITNELLINEDDYIAIFDWLSDRASIKQDTLLNTYFRFKKEKGKEHYPYRWNYVEDKEYPCNETRAAILSGLNKSGISNDFLTLDKEMQLWHLLYSIDDKTQITKALNKYATKNHLPESFVQVFAKIKPFEKEYGSYSEKAIKKLLPLMRMGKYWNFEDIDIHTKDRINKIITGEYDENIKNRVREKAINLSVESHFKGLPVWLACYIVYGRHSESKDCTKWEQPDDIDRYLREFKQHSLRNPIVEQVVTETLRTVRDIWKQEGQIDEIHVELGREMKNPADKRKWMTTKNLQNENTNLRIKAMLMEFMNPELGIENVRPFSPSQQDILRIYEENALDNLTKEDKDFEFISKISKSAQPSKTDIVRYKCWLEQKYRSPYTGEMIPLAKLFTPAYEIEHIIPQSRYFDDSFSNKVICEKEVNGLKDHQLGFEFIKNHNGEKVQISQGRTVQILSVEAYEKFVKEHYANNGIKMKKLLMEDIPDDFIERQMNDSRYISKLVKGLLSNIVREKDENGELEQESVSKNVISCNGNITDRLKKDWGMNDVWNSIVLPRFRRLNELTGKDVFTTISAEGHEIPAMPLELQKGFNKKRIDHRHHAMDAIVIACATRDHVNLLNNEAAHSKHNANRYQLQRKLRRFEKTVIDGKEREIAKEFLKPWESFTTDARHTLEEIIVSFKQNLRIINKTTNYYQHFDNGKKVMIKQVKGDSWAIRKSMHKDTVFGEVNLRFIRTVSLNEALKQPKRIVNKDFKEKVLELLAIGRDSKYIKKYVEDNKEVWSDIDVKKIEVYYFTKESKDHYYASRKSIDPSFDRKKIEESITDTGIQKILLAHLDSKDGDPELAFSPDGIDEMNKNIFFLNGNKAHKPILKARVFEKAEKFAVGQEGNKSAKFVEAAKGTNLFFAVFCSERFNKETGENEMVRSYLTIPLNIMIDCQKKFGSKWHDNIEKYLKEQELVNNELKLLFILSPNDLVYLPTYEDFSDRIKVVDRKRIYKMVSSSGNQCFFINETVAKAIVDKVEFTSLNKAERSITGEMIKDTCVPIKVDRLGNIIELNKKNYE

SEQ ID NO: 5605 - protein, 1372 aa, unidentified
  REGION 1..1372: note = Description of Unknown: Cas Enzyme sequence
MKKIIGLDLGTASIGWAAVNVAEKESEKTEILACGSRVIPLSTDEKGNFEKGKAITTNADRRLKRSMRRNLQRRKLRRDNLKSLFVEEGWVSPSFSFSEDGKGSTHETLSLRAKSAQEEISLEEFARVLLSINGKRGYKSSRKTDSEDDGQIVDGMSVAIELEKNNLTPAEYVKKLMSTNRAARVEFYRSDLEKEFDRIWQFQQAFYPQILTDELRSQLSHQGKNGTSKIFLAKYNIFTADNKGKERRSVAIDWRIDALSKQLDKSVLAYVIADLRGAIQNSSGYLGDISNRSKELYFNKETVGQYLYRHIQEDALFSTRNQVFYRQDYIDEFNRIWEVQSKFHPELNQDLKRRISDRILFYQRPLKSQKGLVSFCEFESHQIKVVIDGKKKTKLTGSRVAPRSSLLFQEFKIWQTLNNIEIFDNSREETRALSQEEKQLLADELTIKPTMKASEVLKSLALSNRRYGLNFKELSGNSTMATLFKGYFDIVEASGHGEFDLSKLHYQEAIQILKEILPVLGCTRDIIHFDSQLEKDAYEQQPLFKLWHLLYSYEGDNSPSGKEALYGRISDVTGLSRDYARILGSISFLDDYASISHKAICKILPYLKQGYKYDEACNLAGYNHSHSRTKEENDSRKLQDKLDQLKQGELRNPVVEKILNQMINVVNAISDTYGKPDEIHIELARELKQNAKDREKTAADIEANNKRNQGITQILQNEFGIQSVRKTDILRYRLYEELRENGYKTLYSDKYIPRDKVFSKDVDIEHIIPQALLFDDSFSNKTLEFKDINIEKGRRTANDYVKDKYGEDGYTRYRLRIDDLCNRGVLSERKKKYLLMAESDIPSGFVDRDLRNTQYIARKAYELLDKYVRVVVATTGSVTARLREDWQLVDVMKELNFSKYEKAGRTTIVEDVDGRRIPKILDWSKRDDHRHHAMDAITIAFTKPEHIQILNNLNARSGQDAAFHQLFLKETTKNGTKTIFVPPLPLDVLRGEVKKHLDSALVSIKAKNKVVSKNVNRTLSAAGVRKTVELTPRGALHKEQVYGQRKQYEVFEVPVNAKMDIDAIATVASPTIREALYCRLDSFGGDPKKAFSGKNSLEQNPIFLDLAHTSAVPQKVKCVRFKTFYSIRKDVAPDLSVEKMLDAKARSRIQERIAAYNGDVRAALSNLEENPIWLDEEKTIPIKRVTIAENFNLCAIHNKRDKEGRLLLDANGYPVPNDFVNLRSNHHVALYLDENGKVQEMVVPLFEALNRINQGAPVVDRSFHSDRGWQFLYSMKVNEMFVFPDEESGFDPRDFNLCDERNAIEVGPHLFRVQKLSKGDYYFRHHLETTIKEDKELREITWKRINNPQIMLKAIKVRIDHLGRIVGVGEYD

SEQ ID NO: 5606 - protein, 1390 aa, unidentified
  REGION 1..1390: note = Description of Unknown: Cas Enzyme sequence
MKRILGLDLGTTSIGWALVDEKENDNEKSSIVKLGVRVNPLSVDEQTNFEKGNSITTNADRTLKRSMRRNLQRFKLRRQCLVDCLKEHGIIRDDTLLHEHGNASTFHTYRQRAKAASEEIPLEDFARVLLMLNKKRGYKSNRKTKAQDEGQLIDGMAIARKLYDEHLTPGQYCLQLFESGKKYIPDFYRSDLQDEFDRIWDRQKQAYPELLTDELKEELRGRGRNDSSKLLYAKCEISTAKNTGKEKTLQEFRWRAEALHHPLEVEQLAYVICDLRGKINASSGYLGAIGDRSKELIFNHLTVGQYLIRQLEENPNTSLKNQVFYRQDYLDEFETIWEKQAQYHKVLTPELKHDIRDMIIFYQRSLKSQKGLVSFCELEHQQREVKVEGGKTKVITTGSKVCPKSSPLFQEFKIWQILNNLQVSLAGTKRKKTKKSAQMEMFSEETTSRPLTIEEKNILFAELSVKDKMTKKDALALLFENAKDLDLNYKEIEGNRTMAAFMKACQDIISMTGHGEYDFGKMPVAQSMEIITSVFDALGYKSDFLKFDSSLERREMERQSAFRLWHLLYSYIEDKSPTGDQKLIACIQELTGLEAEYAHVFANISFPADYGSLSAKAIRKILPFMREGTEYSQACLYAGYNHSARSLTREQIANKEYKGHLELIKRNSLRNPVVEKILNQMVNVINGIIDAYGKPDEIRIEMARELKKSQQERKEMTDAINKNTAEVEKVRNILIKDFHLEHPTRNDILRYRLYEELRPNGYHTIYSNTYIPKEEIFSDKFDIEHIIPQARLFDDSFSNKTLEARAINIEKGKMTAYDFVAEKYGEDHLAEYEARIADLVKNGSISRTKQRKLLMQEADIPSDFIERDLRNTQYIARQALEMLGDLVPSVVATTGSITDRLRDDWQLVEVMKELNWDKYDKLGLTESYIDKNGHTVRHIQEWTKRNDHRHHAMDALTVAFTKRSIVQYLNNLNARSDKGSSIYAIEQKEVENYKGHRVFRSPILPIESFRAQAKEQLSRILVSIKAKNKVVTSNINKTKQKGGLNKKAQLTPRGQLHLETVYGRIQQPFGKEEKVGSNFDATQIAHVNNPRYREALLQRLSQYDGDAKKAFTGRNSLEKNPIWLNEEHSECVPPRVRTTYLQEVFTIRKKIDKDLKLDKVIDSHIREILQKRLDAFGGDANKAFSNLDKNPIWLNEAKGIDIKRVSIRGIANGTPIHEKRDIDGRLILDGEGRPIPVDYVNTGSNHHVAFFRDSNGNLQEHVVPFFEAVARAQLGYPIIDRDYNKELGWEFQFSMKTNEYFVFPNEETGFNPNDIDLMNPDNYALISPNLFRVQKFATGDYVFRHHLETDVNDRKELKSITWKRISIRGLSGIVKVRINHIGQIVQVGEY

SEQ ID NO: 5607 - protein, 1456 aa, unidentified
  REGION 1..1456: note = Description of Unknown: Cas Enzyme sequence
VKTFRAGINVLALFFENYFNMKKILGLDLGTNSIGWAVVNEAETADEKSSIVKLGVRVNPLTVDELTNFEKGKSITTNADRTLKRSMRRNLQRYKLRRENLIEILKEHHLIQDDTILSENGNNTTFETCRLRAKAATEEISLQEFARVLLMINKKRGYKSSRKAKSTEDGQLIDGMEVAKRLYDENLTPGQLSLELLQAGKKHLPDFYQSDLQDELNKIWYFQQQFYPEQMKDYVKDEIRGKNRSQTWAICAKPFGLVGIKRQTKTNSIEQKLENYQWRCDALSKQIGLEELAIVLQEINGQISNSSGYLGKISDRSKELYFNHQTVGQYQMAQLDLNPNFSLKNQVFYRQDYLNEFETIWEKQAEFHPELTPELKKEIRDVVIFYQRPLKSQKGLISFCEFESRQIEVNVDGKKKIKTIGSRVCPKSSPLYQEFKIWQILNNVQVFGKTRNRKSDDQTEIDDSKGGKRFLYQEEKEKLFAELNYHEKMSKADALKLLFGNVKDLDLNYKQLDGNHTQADLFKAYQTIVEVTGHGEHDFSKMSSAKALAMLDEIFSGLNFNTEILRFDSTLEGQALEQQPMYKLWHLLYSYEGDKSNLGNESLIEKLKETYGFDKESATILAGVVFDQDYGSVSAKAIRKILPHLKDGLDYSVACEYAGYRHSKNSLTKEEIENKVLKDKLELLPRNSLRNPVVEKILNQMVNVVNGIVDTYGKPDEIRIELARELKKSAKEREEMTKSINDTTRLHEEYVKVLQGEPFHLDHVSRKDIVRYKLYLELKDNGFKTLYSNTYIPQEKLFSKEFDIEHIIPQAKLFDDSFSNKTIEVRQVNLDKGNATAYDFVLSKYGDESLVDYVKRVERLYADKVISKTKHDKLLMREKDIPSDFINRDLRDSQYIAKKAREILEEMVRFVVPTTGSITDRLREDWELVDVMRELNWDKYERLGLTEIETDEDGRRIYQIKDWTKRNDHRHHAMDALTIAFTKRSFIQYLNNLNARVPKGMDDCSELNDVEFFDLNKEDRTRVVYWIEKNQLHRDSHGKLRFNPPMPLDEFRAEAKRQLENILVSIKAKNKVVTQNVNISKKRSGKNSKVQLTPRGQLHLETVFGSSKRYVVKEEKVNASFDAAKIQMVASPKYRAVLLERLHQFEDDPKKAFTGKNSLDKNPIWLDEFHQDKLPEKVKLLSFETIYTIRKQIAPDLKLDKVVDAGVRAILQKRLEEYGGDAKKAFSNLEENPIWLNEEKGIAIKRVTITGISNATPLHDKRDKDGSLILDDNGKTQPVDFVNTGNNHHVAIYRKPKLDKNGIQIQDDKGVPQYELEENIVSFYEATSRAMMGLPIIDKDFNKDKGWEFLFTMKQNEYFVFPRYDEEGNMTFNPLEHDEAWYRNPENYAVISPNLFRVQKISVRDYSFRHHLETTVADDKLLKEVTWKRITNISILNGIRKIRLNHVGQIVSIGEY

SEQ ID NO: 5608 - protein, 1201 aa, unidentified
  REGION 1..1201: note = Description of Unknown: Cas Enzyme sequence
MERILGLDLGTNSIGWAVVDRGDNNTCTLVDRGVHIFQEGVAREKGVEKPAVQERTAARANRRHYFRRRLRKIELLNVLIENGLCPYLSPKMLSDWKLRKKYPLDEEFMEWQRTDDNTEKNPYFARKEALSRKLDLSLEMDRYLLGRALYHLNQRRGFLSGRKDSSQDSEEGKVKQDISDLSKEMEDANCHFLGEYFYLLYKQGGKIRTRYTSREEHYRKEFEEICRVQNLPENLKNNLERAIFYQRPLKSQKGSVGKCPFEKTKPRCPVSHPLFEEFRMLQFLNGVRILSPQDEEYRPMSENERLMVIPLFFRKSKPHFSFDELAIKIAGKNNWSFREDAAQTAYKFNYRRDMTISGCPVTAAILSAFEMKYAPDWAEAVCAQYLKGEGKTREQIVDDVWHSLFFFPDAKNLSTWLQNNLQLGEKQAESLAGYPIPQGYANISLKALRNIVPWLRKGYVYSHAVFYANLEHAISPEVRQNPRIMEMVKENVRVILEDGGIEREGAKIKEIGNYLLSVGNRSHPEKLYHPSVIELYPKVLPNNAGAIHLGSPRTDAFKNPMALRALFRLRVLVNELLDRGVINPETKINIEFARGLNDANRRRAIELYQRENEKAGTAAREAIKQELGIEPTDTDVLKYLLWEEQGHRCLYTGEQIGITQFIGEGNVYDIEHTIPRSLGGDDSRANKTLCNNVFNRDIKKGKIPFELSNHNAIVDNVEFMKQNAEQFDKRIYAAKKAQRNATTKESKDRAIQDVHLNKMRRDYWLDKYARFTMKTVPEGFTNRQGVDIGIIGRYARMYLNSVFHKIYIVKGATTADFRKAWGLQDQYTKKERVNHVHHCIDAITIACIGKTEYDQWKWYMERMDAYHFGRGAKPMFDKPWKTFTEDVLATSEELMVSHYTPDNLAKQDRKKLRVRGKIQRNQEGEIKYCQGDTARRVLHKDTFYGAIQKEDSIRYVVRKSLDSMEDKDIKNIVDDVVREKVLAAKESAGNLKKAVALGIWMNEEKGIPIKKVRLYVPSVVSPISLKIHRDQSPKEYKRSIYVANDSNYCMAVYQGKKSSFRLFSTFEAVQHFKAGKNESEWIPTLNGDGDALRFVLKVGTMVLFYEKNAEELKNCSQAELSKRLYKVTGMSSMTIRKKYNYGVVSLKHHQEARPDSDLKASNGIWENNSDYRSKISLLHTQFTFVVEGVDFFMSTSGIISF

SEQ ID NO: 5609 - protein, 1378 aa, unidentified
  REGION 1..1378: note = Description of Unknown: Cas Enzyme sequence
YKKDAYGARQFAFMDSFNEMIDDFAHHQPDLISDGKLVPHDWCIYYLRQKALTQPISKEELSWVILNFNAKRGYYQRMEEEGDDSKLEVYKRLKIIDIEDVGVNKKRKEQHDYNILFEENIKKVITSKFIPYEKGDELNLIVTYKLDKNGQKRTDIEPSTRIVNNEKDWTLLKKKTEADLEVSSLTVGEYIYQHILQIPSDKIRGSFVRTIERKYYKDELIKILNKQAEYHPELKDSSLYDKCLNELYYQNEAHRDSLAEKSFTDLIVNDIIFYQRPLKSKKYLISECPLESYTYIDKETGEIKPKGIKCITKSNPYFQEFRLWQFIRNLKIYAKQREVNGKLHIDYDCTSDFIKSEEDVAELFEWLNEKKEIDQTQLLKYPGFNIKKAELDNYRWNYVEDKKYPCNETRYILTSRLKKVNKELMLSNEDLFHLWQILYSVDDRIQLDKALRSFARNIGLDEEDFCNQFRNTPPFKAEYGSYSQKAIRKLLPLMRCGKYWDESAIADSVKERIKSILTGKDVNKKMQDRINERAITLSCISDFRFMELWLALYVVYGDKADFREDTRWTKPDDIDTYLRFNLRHGTMRNPIVEQVVTETLRVVRDIWKTYGKIDEVHIELGREMKQTKEQRVRALTRINDNENTNLRIRTLLQEFTDQSYGVKDVRPYSPIHQEKLKIYEETVLNSAEADDDIKDILKAFRETDASKRPSHKQIERYKLWLEQHYCSPYTGQPIPISRLFTEDYQIEHIIPKARYYDDSLSNKVICESEVNQLKSNMLGYEFIRKNGGQIVGKGLKILKTEQYETFIKDHYSRNKAKMNNLLLEDVPESFLNRQMNDSRYISREVMHILSNLVRNEKEDDELVSKNVISLNGKITTILKKDWGLNDVWNQIVYPRFERLNRITGTHDYGEWRMVGGKRVFQTSVPVSISKNFQKKRIDHRHHAMDALTIALTTRNHINFLNNVYSGSEGIKNREALKRLLCTKRNGEWLFVKPWDTFTQDAFKAISSIIVSFKQNLRVINKMNNHYQKYVDGRKQYVKQNTGDSWAIRKSLHKASVSAAVNLKLVKTVKLSDALKNDWKQICNKDIKTAIKDLIKQYGGKYDAKTFTKYFKDRSWKLNGKDISKVEVYYFSNEKEPLSARRELLDTSYDEKKIMSITDTGIQKILLNHLHKYDDDKGKTHPENAFSPEGIMEMNKNIQELNGGKPHKPIYSVRKTESMGMKFSVGSKSHNLHKYVEADKGTNLYYAIYVDEKGSRSYESIPFNIAVERLKEGLTIADSIKPDGRKLLFTLSPNDLVYVNDNESPINETDIENELIYKMVSSSETDCFFIPAFVANPIVKTIELGSNNKSQNSWNNLQIKRLCCKLCIDRLGHVVKIIQ

SEQ ID NO: 5610 - protein, 1226 aa, unidentified
  REGION 1..1226: note = Description of Unknown: Cas Enzyme sequence
MKKILGLDLGVGSIGWSVISVDENGDPSEILGMGSRIVPLSTDDANEFSTGNAISKNQKRTQKRTARKGYDRYQLRRENLTAELRMHQMLPDEHLIKLPVLDLWTLRANAATEGHKLSLPEIGRVLYHINQKRGYKHAKADEAGDKKQTEYVENVNKRFAMIKDLGLTIGQFFASKLKESEVVSEKGKFYTYRTKEQVFPRGAYIAEFDQIIEVQRKFYPQVFTDEFINRLRNEIIFYQRNLKSCKHLVSLCEFEKHEYKNKDGKIVFDGPKVAPRTSPLFQICRIWEFVNNIRLENGYKEARTLSQDERLKVVDFLDNHEKMTAKDFTKLLELNKNDEWDLKRYFGKNGIQGNTTKTQLATALANIPNASELLQFNLTLENSNYVNEKTGEVLKVVSSDFQNEPLYMLWHTVYSLSDKEGLKNTLNKKYGITEESVINNLFKIDFVKPGFGNKSAKAIRRILPFLREGLVYSDACVEAGYNHSDSLTKSENEARTLLSRLPQIKKNELRQPVIEKILNQMVNIVNAIYDEYGQIDEIRVELARELKQTKDERNTTASNIAKRERENKNIEAKIQEFGIRSSRNRIQKYRLWEESDQKCFYCGQPVQAKEFLSGLDVEVEHIIPKSLLFDDSFANKVCACRKCNAAKGNKTAYDFMKGQKEEVFDAYVKRVNDFYKDGKISKTKKERLLTTQSEIPSDFIERQLRQTQYIAKKAIEMLKDICYNVYATSGSVTDFIRHTWGYDEILHQLNFDRYKKGGLTELREYDHKGETHTEERIQNWSKRLDHRHHAIDALVIAMTRQSIIQRLNHLNTERDAMFQEVEKQSKEWKNDYSMLQEWLRERKHFPTEDVAKKVSDILVSFKAGKRVATIGKRVKYEHGKKIVLQTGITIPRGPLCEESVYGKIKVLDRNKPLKYLLENPQYIVNADIKFAITNRLAQYENDVKKAVQSLKKSPVVLANGKKLENADCYKEEFVIKYSLNGFKAKDIDSVVDNRIKNVLYKRLEEYNGNEKEAFKDIENNPIYADATHKIKIRNVRCFTGLSAVVPVKKDENGNAIGFVKPGNNHHVAIYKDENGNLQESVVTFWHAVERKKYGLPIVITNPIDAWKLAREQNCPKEFLDCLPNENWIYEQSLQENEMFVMGLDDNMYDKAVAEKNYALLNQHLYRVQKISSSDYYFRYHLETKLDDSASSIEIGKYKRIRSFKAFALAKPHKVKISLLGKLITRV

SEQ ID NO: 5611 - protein, 1537 aa, unidentified
  REGION 1..1537: note = Description of Unknown: Cas Enzyme sequence
MKRILGLDLGTNSIGWAIVERDNQKGRIVKAGSRIIPMDAATIGDFARGNTKSQTKERTKQRMARRMRERALLRRERLHRILKMLGFLPQHYEEKIGWDIENDMKHYGTFLDGEEPKLQWRKDIEGKTNFLFGESYKEMLNDFREACPEFTANNHKVPYDWTIYYLRSKALTKKVSKEELAWIILNFNKKRGYNQLRDEVLVDTTDKKVEYMSLKVKSVTTSNEDSKGCWYEIRFEESDIIYRRQSRYPLDWVGKNRDIIVTTKLDEAGNTKKKKDGTPDYSIKSPDEGDWAVLKLKTELDLEKTGKTVGQYIYNALLTNPNEKIRGGLVHTIERKYYKDELERILKKQTEFHSELSDNTLYQECIKELYRNNESHRKNISKNDFVYLILEDVIFYQRPLRSKKSLIQNCPYEYHLGVDQETGEIKKYAIKCVAKSNPYFQEYRIWKFISDLRIIANTQEINGNVYSDVDVTDKFIHNSDDVTSLFLWLNDRGSIDQKSLLTYIGITKKEQNNYRWNYVEDKVYPMNATRHSILSKLTKDETLSRELEQSLWHLLYSTKSKEEIEKSLSPSNKKNNTYNRLKSLCISDETINKLKTVKFPDEGYGAYSEKAIKKLLSVMRQGKLWSANNIDDCTKKRIAEFSNGGNMQKISERVKEILISRKNITQYQGLPEWLACYVVYGKHSEANEITKWRTPNDIDIYLNNFRQHSLRNPIVESVILETLRVVRDLWNTFGDIDEIHVEMGRELKNPSDKRAKITQQILRNEETNLRIKALLAELAQPDAKCENVHPYSPSQQELLRIYEDNVLENNTPDNSIANIILALQNPTKQPSHADVIRYKCWLDQKYRSPYTGKTIPLSKLFTSDYEIEHIIPQSRYFDDSFANKVICESEVNKLKDNQLGYEFVKNHHGESVILSGGRIVRIFEVNDYEQFVKDNYASNASASKRRHLLMDEIPNDFIERQLNDSRYISKVIKGLLSNIVRVEGDNGELEQEAISKNVITCSGKVTDQLKRDWGIMEIWNSIILPRFVRLNKLTGRNCFTTMNKNGHEIPSMPLELQKGFNKKRIDHRHHAMDAIVIACTTREHVNLLNNEASKPDNKEMKYALSHKLRRYEDAMINGKKRSVPKEFVMPWPSFNVDVCASLLDIIVSFKHNIRVLNKATNSSLHYVDGHKEPQKQNSNEHYAIRKSLHKDTVFGRVNLHRIKEVALNSAVENYANIVDKHLKSFIKELVSKHYNVKQILTYFKNHENEWKDYDLKKIKIYYFTDDNEPMVATRFLNDIVNIFSGKTKRTDIEKVINMITDTGIQKIFLNYLSMNESNIAAAFSAEGLEAFNENIQAYNNGKKHKPIKVVRLSQALGNKFAVGHTGNKSKKYVVADSGTNLYFAIYTTKTGQRKYQTLPLEEVIERKKQKLTPVPDIDSEGNSLLFYLSPNDLVYIPNADEIVNNNIDFANISRDRIYRFVDSSGTTANFVPHQSASVIYHLDKTSATAFCKNEIIQDEYGQGSPQSKNQKAITGEMIKDICLPLIINRIGDFVHYD

SEQ ID NO: 5612 - protein, 1369 aa, unidentified
  REGION 1..1369: note = Description of Unknown: Cas Enzyme sequence
MKKVLGLDLGVASIGWAYVNEAEKEGERSSIVKLGVRVNPLTTDEQTNFDKGKPITTTADRTLKRSMRRNLQRYKLRRDELKKILVEQHFITEETILSERGNKSTFETYRLRAKSADEKVSLEELARILLMINKKRGYKSSRKSKSSEEGSLIDGMDVAKKLYENDWTPAQFVLDQFNSGKKYIPDFYRSDLQGELDKILLVQKEFYPGLITPLFSNEIFGRDSKATWAICAKAFNVVGAKRTTKGFELKKENYQWRVDALNGKVSLEQLTYILQDINGQISSSSGYLGKIGDRSKELFFKKQTVGQYLMAQLASNPNASLTNQVFYRQDYLDEFDRIWTTQAKFHPELTDELKHDVRDVVIFYQRRLKSQKGLISFCEFEKHQIEIEEAGKKKIKWVGPKVAPKSSPVFQDFKVLQILNNLEIVNLNTGEVEQLDADGRALLYNELSIRDKLSKSDVLKLLYGKTRGYELNYKELEGNRTMAALYGAFNQIVDISGHEPVDFAVGKKSVDEIKTQFKDIFELLGIDVGVLETESSYQLWHLLYSFEGDNTPTGDGKLLEKLEKKFGFTKEYGKILAQITFQPDYGSLSTKAIRKLLPFMQEGLRYDEACDKVGYNHSHSMTKEELDARPLKARLEVLPKNSLRNPVVEKILNQMVHVVNGVVDAYGKPDEIRIELARELKKSAKERDEATKSIAETTKNHERIRKILKDEFHLDYISRSDIVRYKLYEELEATGFHTLYSNTYIPKEKLFDKSFDIEHIIPQSRLFDDSFGNKTLETRECNIEKGNDTALDYVQKKYGEEGTEQYRQRIGDLLKDGKISKTKYNNLLRPGNEIPEGFINRDLRDSQYIAKAAKDLLQELVRDVVPTCGSITAQLREDWELVDVLQELNWDKYDKLGKTSVIENRDGRKLRRIDDWTKRNDHRHHAMDALTIAFTKRSIVQYLNNLNARSDKNGVIYAIEQKELHRDKNHHLRFNAPIPLKEFRAEAKQQLENILVSIKAKNKVATRNINVVRQKNGKLLKKMELTPRGQLHNETIYGKQLNPVSKMEKIGASFDASKIATVSNAKIRDLLLVRLNEFDGDAKKAFTGKNSLSKNPIWLDADHTKQLLDKVKTISYETQYTIRKEISPDLKIEKVVDGKVRKILEARLAEYDGDAKKAFSNIDDNPIWLNKEKGIAVKRVTITGVANATALRNKRDKEGSLILDDKGNPIPVDYVNTGNNHHVAIYRDSDGNLQDVVVSFYEAVQRINRGEPVIDKNFNKDKGWNFLFSMKQNEYFVFPNEIIGFNPKEIDLMDEENYPLVSPNLFRVQKFSKTPNRVLVFRHHLETLISDDNDLRNITWKRLNTLDEMKKAVKVRVNHIGKIIAVGEE

SEQ ID NO: 5613 - protein, 1237 aa, unidentified
  REGION 1..1237: note = Description of Unknown: Cas Enzyme sequence
MKTGLESTEYYIGLDCGTESVGFAVTDLNYNILKFNGKSMWGSHLFDEAKTAEGRRGARCARRRRQREIQRISLLQEIFAEEVYKVDPTFFIRLNDSNLNPEDKSFPDRNIVFNDPTFKDKDYFKLYPTAYHLRRALMRDEITDPRLLYLGIHHILKHRGHFLFPGENLQAVNDLGALVLNVQKACSAIDISLSFSSSEELESALRIKGNSRKLEELANVISSEDSKFLKNVMRVLVGYKVNAEKLFGNEEYKDLNIEFKKQSFEDEDLPALEDALNEDEFQIVYNLKAMYDWALLCDVMGGYAYISDAKIALFDQNRKDLKLLKSLVRKYTPDSYDSFFHSGDVGMFSSYVGKIHDRSKSREKRVQKCKTEDFYKSVEKLLKRMDPEDKDVKAIEEAIGNDAFLPLLSSFRNGIVPYQVNYFELNAILDKAKCSFTFLNNVDEEGLSNIDKIKAIMKFRIPYYVGPLGRDSESSSCYSWMERREAGRILPWNLDKKVNIGKSAENFITRMTNKCTYCKDQDVLPKNSIAYSKYLVLSELNNLRIKDQRLSVERKQAVYENLFKKYSRVTKKRVLNFALSESWYSKNELSIDDITGLESDFKSSLSSYLDFKPYIEAGKLKASDADLIIKWITVFSEGGDVLTDRISKEFAGKLTSEDVKQISKLKYSGWGRFSNKFLYEIQDAHPETGEMMSIVRMMWNTQYNLMELLSDNFEFRSQTTGVEKVGKLEYSIVDDLYVSPSVKRQIWQTLRIVDEIQRIMKHSPKKVFIETTRSEGEKKRTISRRTDLIQKLKDAQKGDSEFSKDFRELLVALEGKTESQISIQDKLYLYFTQCGRCMYTMQPINLDDLYRTEIYDIDHIYPYSKSNDDSLVNKVLVLHSENLRKSADYPVSSSIRSKMLPFWNMLKDKGFISREKYDRLTRTTPLTDDDLKGFINRQLVETSQSIKASAEILKAFFGDDTKIVYSKARNVSEFRHDNGFIKCRTMNNLHHAKDAYLNIVVGNVLDTKYTKNYYMQLNGSGYGNLSEPFRFNVAGAWEAGRDGTIATVKKYMRKNDIRFTRQPILRNGQLYDLQIVPKGSKEGALPAKPSNPRLKQLVELKGREVAYSEWTAKYGGYNSLSTAYFALVKHKEKNKSFASFIPISMVDSRRLSSTEALRKYCVESLRLTDPVVLYPRLLINSVVEFDGFRFVIVGKASGGKQVTLESSVPLILSNEGEKTLKKIESFANKKKDYKNLT

SEQ ID NO: 5614 - protein, 995 aa, unidentified
  REGION 1..995: note = Description of Unknown: Cas Enzyme sequence
NPLTVDEKSNYEKGKSITTNADRRLKRSMHRNLQRYKLRRQNLIECLQEHHIISEDTPLFESGNQSTFSTYRARAKAVTDEISLDDFARVLMMINKKRGYKSSRKIKGDEEGELIDGMEISKRLYDENLTPGQLLLELQSKGKKTKPSFYRSDLQAEFDKIWDKQSAYYPAILTDDFKTSVRGFNKTQTSGAFYGIHKIYTAKINGKDGYTQALQWRTDALHQQLEMEAVAYILSDINGAINNSSKRLAMISDRSKELYFSHLTVGQYLMQRLDKDPNSSLTNIIFYRQDYLDEFEAIWEKQAQYHPELTPALKKEIRDIIIFYQRDLKSCKNLVSYCELEHQEKVIDIDGKKRTIVTGCKVCPKSSPLFQDFKIWQILNNIQVSVVGHQRKKLKKDKSQLSLFNDADVDSLQRFLNQEEKDILFRELSIREKMNKKDVLKLLFDNYKELDLNYKEVEGNQTMAAMFKAFQDIISQTGNGEYDFSKMKADEVMSVTREIFTGLGYKTDFLTFDPLLKGKALEQQAAYRLWHLLYSYTSDKSVTGNEALLKKIGEICGFEKEYALILSNISIPLDYGSLSAKAIRNLLPYMMKGYEYSEACKKAGYNHSSRSVTKEELDNKEYKTQLEELKRNSLRNPVVEKILNQMINVVNEIVATYGKPDEIRIELARELKKSREERELLDAAIRKNTAESEKLRKELEDDFGIQHVTKNDILRYKLYQELKPNGYKTLYSNTYIPKEELFSKRFDIEHIIPKARLFDDSFSNKTLEARDVNIEKGDLTAYDYVEGKYDEQYLASYESRIEELFAQKAISKTKRNNLLMKESGIPSDFLERDLRDSQYIAKKAREILEDMVPFVVSTTGSITSRLREDWQLVNVMQELNWDKYDALGLTEHYTDKNGNIVSRIKDWTKRNDHRHHAMDALTIAFTKRSIVQYLSNLNARSDKSSSIYGIERNELHRDEKDRKLVFNAPMPINEFRAEAKKHLENILVSIKAKTR

SEQ ID NO: 5615 - protein, 933 aa, unidentified
  REGION 1..933: note = Description of Unknown: Cas Enzyme sequence
VDLDPNNAEKYLPFLSEKDVSGLTVKERIFQLFTFTIPYYIGPVSEESKTGWVTRLEPGRVYPWNLEQKIDVKKTSEDFINRMVRRCTYMHGEQAMPKCSVKYQKFCVLNEINNLCIDGERIDTKLKQDLFNELYLSGKKVTRKRLEQWLHNQCGVSEDAAITGIDKELNNVYSSYNRFRELFGDMVDTDSGKKMVEDIIFKCTVYSDAKQRLKEYLKESYPEKDYPMMTASAINRICGFKMKDWGRMSQRFLDLEGVDYQTGEVFTLLQAMWETKFNLMELIHNAEDFSFKEAIEKTEKDALRQLSDITPQLLQDEYYFSAPVRKMVMQTVEVIREIQHIMGTEPERIFLEMTRTDEEKGDRGRKDSRKKLLTDLYQSIKDETLDKRKWIDLIEKESDSGRLRSKKMYLYLRQMGRDMYTGKEIDLDELFTTKYDIDHIYPRHFVKDDNLENNLVLVEKKENANKTDDYPLPSQIRQNPDVISLWERLHISGLINDEKYSRLRGNQGLTDEQKADFIARQLVETGQAAKGVADILKLVLPKTKIVYSKARNVSDFRRDHEFFKSRLINDEHHAQDAYLNIVVGNVYYTKFTDNPINFIKKEYHANSKDGEYNLGKMFYNRVERNGYVAWTPSGKNEERGSIVTVKNMMDKHTPIISKQCIEGHGQLANLTLYGATAVQSGKAEAYIPIKASDPKMQDKGKYGGYTNATTAYFFLVEHTKKKKRVRTIEMVPLYLADKIEKDPSQLENYCQNDLQLIDFSIRIRKIKLQSLIKLNGFFVRITGRTGNQLILRNAVSLVLPSRWVKYIKKLEKDSEASGLDEINTEDKNVMLYDLLMNKHKGIYSKRPNPVASTMEKGFDLFKKLTCAEQAELLLNILLLTSMTSTAADLTKIGGSKKSGVMLTNKDISGDTEILLVHQSVTGLYQNVVDLKSV

SEQ ID NO: 5616 - protein, 1174 aa, unidentified
  REGION 1..1174: note = Description of Unknown: Cas Enzyme sequence
IWTVQSRFYPDILNDEFRKQLSRQNKKGTSNIFYAKYGISSAEVKGKERRKIGLEWRVAALSDRLEKETLAYVISELRGEISGSSGYLGEISDRSKELFFNGETVGQYLYRNIESDPLFSTRNKVFYRQDYEDEFNRIWETQKKYHPQLTEALKRKIASENLFYQRPLKSQKGLVSFCEFESHPVKVMVDGKMKEKTTGSRVAPRSSLLFQEFKIWQTLNNVLVLDRVSESNRPLHSSEKEILARELTVKAVMKQSEALKSLSLSPRQYELNFKELPGNETLSAIFRKYIDVVNESGHGEYDLAKINYESALQVIKDVFGALGCTKDIFTFDSGLSKEEYEQQPLFKIWHLLYSYEGDKSATGTESLVSKLSELTGLEPAYSRILAGIVFKDDYASLSHKAISKILPYLKQGYKYDTACMLAGYNHSGYMTKEELDSRELSDHLSQLPMGELRNPVVEKIINQMVNVVNAVGEEFGKPDEIHIELARELKKSSKEREQATADIQASNRRNEAITEILQRDFGLKYIRKSDILRYRLYDELKENGYKTLYSNKYIPASLLFSKDIDIEHIIPQALMFDDSFSNKTLEFKDINIEKGRSTANDYVKAKWGEEYYNQYRLRVDDLRNRGVISERKRKYLIMPESDIPSGFVDRDLRNSQYIAKKSLELLQGYVNTVIPTTGSVTDELREQWHLVDVMKELNFDKYDKAGKTYVEEKPDGGKIKRIQDWTKRNDHRHHAMDAITIAFTRREHIQILNNLNARSRKDPSFVELFKKETVITGKERIFVPPMPLDELRAEVKHSLESALVSIKAKNKVVTKNVNKIKTASGVVRAVEMTPRGALHKEQVYGQRKQYEVFYVPVGSKMTEDVVRQVASKRQREALAARLAEFGGDAKKAFTGKNSLDKNPVYVDTLHSVAVPAKVKCVRFKNIFAIRKDISPDLSVDKVLDVRARKLIQERIDQFGGNARQALSNLDENPIWMDDAHTIPLKRVTIGENFDLYAIRNKRDKEGNLIFDRNNQAIPVDFVNLRNNHHVALYKDADGKIQEVVVPFFEALRRINEGLPVVDKGYHADLGWTFMFSMKINEMFVFPDPDTGFEPKDIDLLDSANSQLISPHLFRVQRLSETDYWFRHHLETVIIDDNSLKDITWKRIKSLSKMEGVVKVRIDHLGRIVKVGEYD

SEQ ID NO: 5617 - protein, 1023 aa, unidentified
  REGION 1..1023: note = Description of Unknown: Cas Enzyme sequence
LLTPRRFSTKFHEEPEFAAIMDAQGEGIPAELREKIHEAIFHQRPLRSQKHLVGPCPLEPESPRAQIGHPAFEEFRMLSFVNNLSFEDADGEWRDATGALLHPLSAEDRRLVRSAFMKAAPTFKFGDIAKKFKKDPRFKKGGLRFHYYRADETLPSCSVLHRLGEIFGTGDDADPFSHQEAFDALTFYDDTDKLRGWVEKHHPELDEAAVARFLKIRPREGNAQYSLKAIRRMLPFLREGFQLSDARFFAKLGDVVPGFAARRGEILKNLLDIEEAFRRERANRSREGSGKDVPPIVPLLDRWKEYLARSCGVDEENWNRLYLRDESPYAPQTFFVAKGKTIDLDSPRLPRVELGMIRNPVVQRSMTTLRRLVNYLAEHGKIDSATTIRIELARDVNDYATRSGWQAWQKSRRKLRDLAREEIAGLGMAATEDALDRWVLWKEQDGKCLYTGRSIPLEEVLKGNVFDIEHTVPRSLSGDDSLANKTLCEVVYNRQTKQGRLPRECPDWEAIELRLAPWREKLEGLEKECRKLVGKARAATDPVRRSNARRDAVAKRFERDYWRDKLRRFDATREQLAFGTGDLTGFKKRQLVDTGITTRHAVDLLKSLYPKTYTVNGTATAFARKAWGIQADGAKDRDEHTHHATDAMVIAALTPARFTAICSALKDDGRDRRRPCDVCPPPYADFAGKVRAATDGILVKHVVRQTTLRQSSKRNVLAKPHAPKGNPEGRKIRAVLSRGDTVRGKLHKDTFYGCIQKPGGTEKAFVGREPLTGPVKDVAAFVKDIVDPVVKAVVEKAVHDAEASGKKFFEPGDVRMPSGVPVNRVRIVQKSVANPFRLRVHDMPSRHDYKTPYYVTAAKGSNFRLALFRQGGKFRAEVENALGWAQERKNPDHVPLDKREGFVGYVHPGCMALTHAPDRPGELHTLPAAELSKRLYKVVNIEGNGQILFRFHAEARASTVLNAFLRTLPGRNVKGESRISLDAPYELLRLSPGTYGRQVLFEGIHFRMLLDGSVQWMDTGDGA

SEQ ID NO: 5618 - protein, 1052 aa, unidentified
  REGION 1..1052: note = Description of Unknown: Cas Enzyme sequence
DQNKTYGKFLDDSEPKIAWAKEETETMKFYYKEAFDEMMEDFRQHQPSLVSDGRKIPYDWTIYYLRKKALTRPISKYELAWILLNFNQKRGYYQLRGEEEEVDELKKEEYYELKIVKVEETDEKTGNNIWYKVHLENGWIYRRKSSKPLFDWEGKTKEFIVTTEYETDGSVKKNKEGEDCRRFRAPGSDDWGLQKKKVENSIEKSGKEVGEYIYDTLLDRPYEKVRGKLVRVVERSFYKKELRAILKKQMEFIPELTDDALKYKCIKELYARNTSHQDFLKNKDVVYILIDDLLFYQRPLKTKKSLISNCPYESYTYVDRETGEIKEQHIKVIAKSNPYFQEFRLWQFIHNLRLFKRGDINDTDVTSAYLKDEEDYVSLYRYLNDRAAVKQEQLLKDFFKIKKPSGKESVYPLRWNYVETKEYPCNATRYVMLSALKKAGLDATFIDTREKEYRLWHLLYSVNDKKELENALKAYDVPDGYSEAFVEAFKNLTPFKKEYGAYSEKAIKKLLSVMRMGSMWNESDIPESVDKFISGDVDEMIKSRISNAQITIESRKSLKGLPVWLACYIIYGRHSEVSETEKWKTPEDLARYIRNFKQHSLRNPIVEQCLMETLRTVHDIWKECGHIDEIHVEMGRSLKNPADRRRALTELSLKNENTNQRIRCLLAELYNDNNVENVRPHSPMQQEILRIYEEGALQELKKNDKDYADIVKISSSGSPTQSELMRYKLWLEQKYRSPYTNKAISLSKLFTPAYEIEHVIPRSRFFDDSFSNKVICEAEVNKKKSNMLGFEFIKNNGGEIIHCPTLGDVRVLTADEYTQFVKDHYSSNKGKAKKLMAEDIPEDFLQRQMNDTRYISKVVIGMLSNIVREEGEVEATSKNVIPCTGGVTDRLKKDWGLNDVWNTIVYPRFERMNDITGTQNFGHWEDKQGKRVFQTDMPLELRQGFQKKRIDHRHHAMDALAIALASRNIVNYLNNESARDSKRREDLLHKLCEKNSEKNWVMRKPWPTFTEDALQALQNITVSFKHYIRVINKATNYYEHYDENGKKCMVKQ

SEQ ID NO: 5619 - protein, 938 aa, unidentified
  REGION 1..938: note = Description of Unknown: Cas Enzyme sequence
NIEGNRTMASLFRAYQDIIEQSGHGEYDFSKLPAAECLNTATEIFSGLGYNTGILSFDSSLMGSDLETQPLYQLWHLLYSFEGDNSKTGNEKLIEKLSEKFGFEKEYASILANVVFEEDYGSLSAKAMRKILPHLKDGLEYSVACEYAGYRHSKASLTKEELSKKTLVDKLELLPRNSLRNPVVEKILNQMINVVNEVVDTYGKPDEIRIELARELKKSAKEREEMTKAINEGNSLHEKYKIELEKEFGIQHVSRNDIIRYKLYQELAKNGYKTLYSDTYIPKEELFSKKFDIEHIIPQAKLFDDSFSNKTIEVRQVNIDKGNATALDFVADKYGETGLAAYTARIKRMLKEGAISKTKHDKLLMAENDIPSGFINRDLRDSQYIAKKAREILEGMVKFVVPTTGTITDRLREDWQLVNVMQELNWDKYDKLGMTEYHQDKDGRQIGQIKDWTKRNDHRHHAMDALTIAFTKRSYIQYLNNLNARVQKGVDDYFDLDMVEISKLPKEDRGPVVKAIEKKELHRDSNGHLRFNPPMPINDFRAEAKRQLENILVSIKAKNKVVTHNINVTKNKGGKAKKIQLTPRGQLHLETIYGSHQELVKKEEKVGGNFTEEKILTVIHKNIREALLNRLHEYNGDAKKAFTGKNALSKNPIYLDKFQEKCVPEKVTTGHFETVYTIRKPISPELKIDKVVDSRIRDILQQRLNEYGGDAKKAFSDIEKNPIWLNREKGISIKRVTISGISNAIALHDKRDKDGNLILDENGNKQPVDYVNTGNNHHVAIYQKPKLDKNGQPVVDDNGDIQYELDEVIVSFYEATARAIQGLPIIDKDYKKSEGWQFLFTMKQNEYFVFPNEETGFDPHEIDLMDPNNYATISPHLFRVQKMSSKDYIFRHHLETTVDSSKELKDITWKRYQSLNGLDKIVKVRVNHIGQIVGVGEY

SEQ ID NO: 5620 - protein, 1127 aa, unidentified
  REGION 1..1127: note = Description of Unknown: Cas Enzyme sequence
MARILGLDLGTNSIGWALIDDVQNKILAIGSRIFPMGVENLGDGDGEISKNASRTGARGIRRQFFRRRLRKKVLLKALSENNMCPMVASDFENWKKTKQFPSEKLAEWFAINPYELRHKALNEKLSLEEIGRIFYHLIQRRGFLSNSRKGGSDDGAIFKGNAKEGKIGITETQESIQDKTLGSYLFEIYPKDNQPFQDGLERIRNRYTTRKMYVDEFELIWNKQSQFHSELTNELKTLFGGRKLDGYAEDGILFHQRPLRSQKHLVGNCSFEPTKTKCPISAIPFEQFRVWQWVNTVEYNGKKISQEEKEKIVEFLYVNEKPDFKRIRKIIGKESAEFKFNYKDDDKIVGAHTISHLSNKKFFGKKWFEFSEKEQEDIWHTLYFFDSKSNLKEYAIEKWNFTEEQANEISKFNTSDKNKKNGFASLSRKAIANILPFLQMGYTYDVAVVLGGIKNVFGTDWEKLPEEKRNFLIDNTEDIVRSKRVGGFIEVIKDILRNDYNISDNQLRKLYHHSATIDVAELLEKLPVGKEADKEIQSLRNPIVITALFELRKLVNELIDDYGKIDEIKVEMARDLKISKMQRNKIRREQKRLEKENDRVKVEVLKYTHLSHDNILKFKLWEECKRTCPYTGLSIPINELFTNKWQIEHIHPWSRSLNDSFANRTLCLGTENNLKGNKTPFEYYGNDEANWSAIKERALKLFSFTKEYPDSYNKFKRFVQQKFDDDFSSRQLNDTRFISKEAKNYLSKICKNVMVSPGQATSNLRQKWGMNNILNDENEKTREDHRHHAIDALVMACTKISYVQELSKWNRYNRKPELRQFPLPWESFRRDAEIAVDTILISHKKVSNDITIRTHTSEKNGKKHKNVGIAARGQLHKETVYGKRKFNGEEAFHIRKPIESLTTEKQLEKVVDTTIRLLIRKRVLELGGFVKGNIPTNTFFIVDENGFKQPQIFLPNKNGESVPILKVRMKENIGKAEQLKDDVNQWVNPRNNHHVLIYKDEKGNLNEEVVTFWTVVERKRTGQAVYQLPVGGKEIVTTLHINDMFLLGLNEDEIHWGKPDYNVLKEHLYRVQKFTSKDYYFRISNASSIQNANQKQQINSFGEGKNGWETHNPIKVKVTVSGKISKL

SEQ ID NO: 5621 - protein, 1074 aa, unidentified
  REGION 1..1074: note = Description of Unknown: Cas Enzyme sequence
MLRLGLDIGTNSIGWCVVEYDAEHHVGTRIVDIGVRIFGSSPQGAGRDPKSGASLAVDRRAARAMRRRRDRYLGRRSAFLDTLVRFGLMPADANEAKLVAERDPYDLRARALNERLEPWEIGRALFHLNQRRGFLSNRKAERRQKDGEDGKIASGAKALDQAMAAAGADTLGQFLAGQSEKRVRLDGESQDYDFYPQRRHIDYEFQRIWAEQAKYHPALLTEEARAALHRILFFQRPLKEPEVGVCTFVNTERRLPKAHPLFQERRLYEEVNQLEITTPGEVPRKLTLDQRDHLILMLRGKKEVLFSTLAGGKGLRLQPGESFNKASETRTALRGNEVYAALAHKDRFGAAGWANMTPERQWAIIEMLLSEENPDTLHAFLTGECGLTEDQARATAKTPLPEGYGRLGETATRLILEELKKEVITYDAAVRRAGWHHSDDRTGEILDRLPYYGELLTRDIPPGSQLASDPPEKRWGKITNPTVHIGLRQLEKLVNAVIAVHGRPDEIVVELARELNLSEKDKEEHNRRIRKTTAEAQARSRKLQEEGIEDTGANRAKLKLWQELAGNPVDRFCPYCGDAGKLIGFRALFSQEVDIDHIIPYSRSLDDSANNKVVAHRSCNRAKGNKTPYEKWGHSPERWEKISAQVAHLHRAKQWRFGPDAMERVARDGDFLARQLTDTQYLSRLARKYLLSLYAEKGEGSGHVYVIPGRMTAMLRRLWGLNSLLPDHNYVENEHSNAPKNRLDHRHHAIDATVTAVTTRSLLQLIARTAGEAEDKDLDRLFEGLEQPWEGFREQLGEALASVTVSHKPDHGRKGKPSRHRDVTAGRLHNDTAYGLTGEVAADGKTPIVVHRVPLTNLKPGDLTNPERIPDASLRDALYAATRDATGKEFEAALRRFRETHPVFHGIRRVRVREPLNVIPIRDKTGRAYKAYKGDANARYDVWCLPNGKWVTSWKDRGGCERSSIISMFDAHQSAEEPRPHPAARKVLSLRQNDLLAIERDGGAPEIVRVVKFSTNGSIALAPANEGGALKARDAAPDDPFHYIYSSGGGLKKLKARQIRIDPLGRIFDPGPRG

SEQ ID NO: 5622 - protein, 1597 aa, unidentified
  REGION 1..1597: note = Description of Unknown: Cas Enzyme sequence
MKIIMKVKGVKFMKKILGLDLGTNSIGGGLIGIPESFDDFGTEGKIEWIGSRIIPVDGDYLQKFESGGQAETKAAARRIKRGSRRLKHRYKLRRSRLITVLKILGWVDESFPDDFKKKMTNDENYKFHIGDYLPFSQDTIEKATELLGVKGKRNKRNNIVIPEDWIIYYLRKKALSEKITLQELTRIIYMMNQRRGFKSSRKDLKEEGVAERKWVEIVRIKSVELKGNEPDKNKKYSYTITPYSDTVKPWEEKWFKKLDWEEKEFTLLITEKTETKKDGTVKITQNKPQKPGPDDWALSLVALDNQIDEQNKLPGEFFWDNLVKDKNYKIRQIAVRREKYKRELETIWNKQIELRKKESNEQELLNENKLAQIAATLYKHNTAKQKDLKENNLLHIISDDIIYYQRELKSQKHSIGECQYEKHKGIDGEFYGVKCASKSSPEFQEYRIWQDIHNIRIFEKEQNKNGLTKIDVDVTEDFIKREIKEKLFELFDSSKEVSEQNIYNTLNIFSANKKLKKDFYRINLFANREKLLGNETKALFRKIFRKYNYEIEGEKYLDDKAVFRKLWHIIYSISSSNLDNSIKGIKTALSKFNLPDEIVEAFTKLPEMKKQYASYSTKAINKLLPLMRCGKYWEWDNIHNEIKKRIEKIIEDGWDFAYDKKTGELIKEREFSNKEQFSSLPGWMACYVAYGRHSEKENTKAYDSNEIKTLNIMRLIPNNSLRNPIVEQVIRETLFLVKDVCNKYGQPDEIHIELGRELKKNREEKIKISERQGINTKENERIKKLLHELMNGFDEYDEKGNIRQVRFNVRPNPESPRDIEKFRIWKDNALVNKSVRISKKNGDKSINFILNKDVDFDNLYSDGKKERTPTNTEIKKYTLWLSQNCASPYTGKIIPLSKLFDKTQYEVEHIIPQSKLKYDAIENLVIAEAAINPAPYKGNMLARNFIKHFSGQELSINNTRYRILTNEEYELHCKNTFKGRKLKNLLTTEVPEDFIERQINDTRYITRKVSELLYPFVKEKEKENVKDNAGLVFTIGSITSDLKREWGLNNVWKEIIKPRFERLEKITEQQVIFSDNENPNKFHFNIPEQPSFNEKRIDHRHHALDALIIAATTREHIRYLNSLNAVDNNQELLKVKRTLVKGKIRDFKLPWKDFTKEAKEKLNETIVTFKNKKSPIDQIISKPTNKYIKWFQKEDGSWEKREVYQKPNKRWMAVRKSMFKEPQGIIWLKEKKEVSVLEAFRIQIERMKVEHDAEKRKTASYVYDQSARQYIKDIIYKIGIDVDESEKLLTEVEKYLKKNCKKVETGKLKENGKPKSKTVYLLGDFEYEKIWIAKFIGYTAKRVKVDNTFTHDKINKMPYAKEENSPLAKLLREHLSSYNNKPNEAFSGEGMEVLTKRAGKPISTVTIMDGNLKDKSQDNIFNKKYMETDAGAIAYFIIYENEITKERTEMYSLATHKAIERKVQGKSLADKKEGCKTIILSPNDLVYVPTEDQLKNIKANEPNPIDWNDKKAISQRIYKLVRSSGKYCYFIPNYISKLILPYDGKIGEIESQNYSEKTIVYPRKDKNGKEIIENKLLIKECCIKINIDRLGNIKPAV

SEQ ID NO: 5623 - protein, 1485 aa, unidentified
  REGION 1..1485: note = Description of Unknown: Cas Enzyme sequence
MKKILGLDLGTNSIGWSLIDSNFEEKEGSILGLGGRIIPISQDILGKFDAGLSISQTAERTKFRGMRRLYQRDNLRRDRLHRVLNILGFLPKHYSETIDFEKHFGQFKKGKEVKLNYFKNGNDKYEFIFKESFYEMVEEFKKVNPELFYENKNGELTKLPFDWTIYYLRKKALSKKITKEELAWILLNFNQKRGYYQLRGEEEENSKDKDKEFVILKVKEVKDSGETIKKSGEILYDVYFENDWKYDRQIVKTENWIEKTKEFIVTSTIKKDGDIKRTFKEVDSEKDWPAIKAKTEKDIYSSGKTVGQYIFESLLENPKQKVRGKLIATIERKFYKEEIIKILKEQIKQHYELQDTNLYKKCVEELYPNNEGHKNNISSKDFEYLFIDDIIFYQRPLKSKKSTIGNCTYEIREYCKNGETILKPLKGIPKSHPLFQEFRLLQWLHNLRIYQNEKVVDGKTKINVDITNDILSSIPEKNEFLNFLKTKGEIEQKHILKYFNLDASNYRWNYQEDKKFPCYETRAEFIRRLKKVDGIDNPLNFLMSKTKIGNSENPMELSIEAQLWHIIYSVKDRELYKKALTTFAEKFNIQIDTFVSAFEKHPPFKNDYGSYSEKALKKLLPIMRFGKDWRENDITSEIKELVTKIQQKLENINYNKELFKEDKNNILSKQIDNETPKQLLKSFVDFKDKNHLENLNTYQACYAVYKRHSEVGEIKYWKTSKDIDKYLIEFKQHSLRNPIVEQVVTETLRVVRDIWNYYGNGEEGFFDEIHIELGREMKNPSDKRKKISEFNLENERTNSRIRTLLTELINDGAKPYSPSHQEILKIYEEGVYQNPEANFNHVSEEDILKIRKQKSPTKSDIQKYKLWLEQGYRSPYSGKIISLSKLFSLGYEVEHIIPQSRYFDDSLNNKVICETCINKNKDRKTAYEYIKEMGGSIVDGITLFNLEQYVAHCKKYFNKNTPKLNNLLSEDIPEGFINRQLNDTRYISKFVKGLLSNIVRTENEQEVTSKNLISVTGAITSKLKQDWGLNEKWNEIIQPRFERMNELTNSNDFGNWDYQKDEKGNNIGKRFFRLQTPDEDLGKLNKKRIDHRHHSLDALIIACINRKHIQYLNSLNNENIKRELQLGLLKRNSNGYFTKQFIEPWGGFISEAKNNLENIIVSFKQNTRVINKTNNKTWQWVEENGQLKKKLVKQEIGDNWAIRKPLHKQTIYGKLNWSAPNGKVITANRVPLSEIKSAKHLEKITDSGIKKILINHLKNYLDDKGNENYELAFNYDGIEELNKNIIQLNFNKFHQPIFKVRLYEEGKKFSVGETGNNESKFVEAEKGTNLFFAIYWNKEKQKREFETIPLNEVIDHQKWRATLPKEERNNTSIIPIRNNRDFLFSLSPNDLVYIPSEEEIENPHNVDFDDLNKEQITRIYKMISSSGNQCFFVKNVVAKSIKDKFEFSSLNKMEKSIDGKMIKEFCWKIEVDRLGKIIRHWNHHD

SEQ ID NO: 5624 - protein, 1013 aa, unidentified
  REGION 1..1013: note = Description of Unknown: Cas Enzyme sequence
MKQHLNYRLGLDMGISSIGWSVVEVADDKSQTPLRVVDMGVRKFNSGREDKTQAPLAAKRRQKRSMRRQRARFLRRQNKLINKLVDLGLMPTSPTERRQLADCTHPQITALALKQATPYHLRAAALDDHLSAYALGRVLFALNQRRGFLSNRKGDKESASKEFYEGINTLKQSLNNHKTLGAYLAWRLDNNLPVLDSRAQSDAIKSNRSGLQTDRSMYETEFDIIRDAQEQSPHHRLTSDDWDALKHIIFHQRPLKEVERGNCQVYGPQGHNFERAYAADPLAQQLRIWQDINNLKIMEPGAKGFRHLTDEERQKIWQLLQTEAQPSLKTKVRLHLGLEAGTVFNLSTAKTGEKLTGLLTDITLSKPEFFGNRWHTFSTEDKSAIIDLVQRTQDLNILINTLMDDWGLTEEAAEKVTDLKLETGTSRFCTRALAEMVQLMSTTCTDKASNRYISTTEAMAELAGGPQYRQEGDIPTTQRLPYYAQALPEVGMHHRHRTAEEERKYGIIGNPSVHIALNQLRHVVNAIIDTYGLPHSIAIELARDMKLSKKERDARDKQNKENAKRRERMVAEAQEARVAVNKDNREDFLRYKLWEELSADPCNRKCPYTGETINISKLFSNDVHIEHILPRSRTLDDSPANLTLATRDANKMKGNETPYEYFKRIGDDVGYQELLERVKDFPRNKQWRFMKDAMERLNDEERWLSSMLNDTRYMSKIAHKYLHLVCKNVQVSPGRLTAKARGQWFGAVEGLEKNRDADHRHHALDALTVALLSRSAIQKSQTVAGLGQDGGDHHYQKLKLPCPMDKDALRAQTQQLMGSMLVSHRIDHGIEGQLHLETAIKHTDKGVQKFIESPADATQLVAIPHKQGDVEHTNYYAHGGIHHIDFWLVKEKDKKGKIKERVEGVPVYAHQAFLPDGKTFQSRPHPAAKFLMRLHKGDVIVLDGKEQPDIPGIICQINPSQSRFVYTSPNKPFDSKGKLDAVGFTSLLKYNTRKAHIDILGRLKVGRMTTKQA

SEQ ID NO: 5625 - protein, 1142 aa, unidentified
  REGION 1..1142: note = Description of Unknown: Cas Enzyme sequence
MTVKPENINKENPITFGLDIGIASVGWAVLGENRIIDLGVRCFDKAETAKEGESLNLSRRMARLMRRRLRRRAWRLTKLVNLLKREGLIEDVNVLKQQPFKGFQTPNLWQLRVNGLDRKLGNEEWARVIYHLCKHRGFHWISKAEAKAADSDKEGGKVKQGLAGTKRLMQEKSYRTAAEMVLAEFPDAQRNKQGEYSKALSRELLCEEMKELFKQQRAFGNAHADEKLEAAILGNSDKKSGLFWAQKPSLSGEALLKMLGKCTFEKNEYRAAKASFTVERHVLLTRINNLRIVEDGKIRGLTADEQRIALWQPYQQAGDFKYKQLGSALVKAGYLVKDGYKFAGLAYPSEVQKAEKAKDPEDTVLVKLPAWQMLKKTLKDAGLESDWQEMADHALNGKPDLLDQIGWVLSVYKEEDEVERELGKLQLSTQVVEALQTVRFDKFSNLSLAALRKIIPHMENGMRYDEACVEAGYHHSLPDLEDDKAKEKYLPSFYAGRDKEGRLIFNEEMDIPRNPVVLRALNQTRKVVNALIHKFGSPHSVHIEMARDLSKPFDERRKIERDQLEYRSRNESDRATFAGHFNIMGRPKGRDFEKWQLYREQQGKCAYSLDPIDLNRLLEKGYVEVDHALPYSRSFDDSKNNRVLVLTRENRNKGNQTPYEYLDGKGNSDRWLQFESFVKTNKAYRQAKQNRLLKKDFGEKETRDFRERNLNDTRYICRFFKNYVEQYLQLHEESDAKRCVVVSGQLTTLLRVRWGLLKVRGDSDRHHALDAAVVAACSHGMVKRMSDYAQRKELGQVRDRIEKVDTKTGEILDHFPSPWPHFRDELLSRLNLDDPAALHAAVERLETYPPEALESIKPLFVSRAPQRRNSGAAHKETIYAQPEALKEKGSVTQKVAVTNLKPADVDKLVDPERNVKLYSYLRKWLEGKEEREKQAKAIEASAGRGKERRELTAEEKSEIEKLRALPRKPDKQGNPTGPIVRTVTMVIGKLSGIPVRGGIAKNDSMLRVDLFRHKTNGKFHLVPVYVHHTVSKLLPNRAIVQSKDEEEWTEMDDNFEFLYSLHPNDLVQISQKKKESIMGYYSGCDRATGNLAVWSHDRNQQVGKDGLIRGIGIKTAQNVEKFNVDVLGNIYPALPETRRELA

SEQ ID NO: 5626 - protein, 1404 aa, unidentified
  REGION 1..1404: note = Description of Unknown: Cas Enzyme sequence
MKIIGLDLGTNSIGWAIRNTALLENEIENFGVITFEKGVGEGKTGEYSYAAERTKNRSLRRRYQAHKYKLWATLEALIKSDYCPLSIEDLDRWRKYKKGAKREYPLHALAFANWIKLDFDEDGKPDYTSPYQIRLELITNKLDFTEQKNRYKLGRALYHIAQHRAFKSSKKVQEGEELSTEDLIGAEKKRAQFIDDLLTKHGAETVGAAFAIEEMQGIRIRQNLHQHVLRKQLQYEVKKMFDFQNLSFADLFGKEVNKSCIFWQRPLRSQKGSIGKCTLEPSKYRCPVSHPSFEAFRAWSFLNTIEYRLQGDCQNQWQKIPFQLRQEIYNEKFFRVSKSDFDFYEIRKFIEKKNEHDKWELNYKDKTNVSACPVSARLQDIFGEGWITVKREYQNDSNKKGKGHYDLEDVWHVLFSFDDEDETRKFALEKLNLTNKEEEKFVHLWYKMPVAYGMLSLNAINKILPFLRKGFIYTEAVLMAKMPEILGSEFWKNNEENIVGYIGQIIEINRTEKKKLATANGLIAKYKALENSLRFAERNYDYQLQKDDLKEVEDACIEAYGLKSWQEKPEEERKIIFSDVAKSYQSFFSDATRGFKKLPHLLDTVKAILADTFQIDAKKLEGLYHPSQIEIYPPAKEKYYEQYNKHLRLLGNPKTDAFKNPMAMRTLFELRKLINYLLITEQIDEETRVVVEVARELNDANMRWAIETYQRRRQEENKDFAIAISELLRTDPDAKADPQNDSDVDKLRLWFEQLKDEEVNDGKGEYSKHEWSNTKSKVYKEVAAAKEMIEKYRLWKEQECQCIYTGRMIGMTDLFSENNTDFEHTLPRSISFDNSLANRTVCDFVYNRSVKKNAIPTSLQNYDTDALINGKLYTAIKPRLEKWQRKVEELKLHIDFWKKKSKAAATKEAKDKAIRQKHLWQFELQYWQNKLSRFTMTEIKSGFKNSQMVDTQLISKYAFHFLKTAFNKVDVQKGSNTAQFRKIYGIQNRGVVKDRSKHSHHAKDAVVLTLIPVAAKRDEILVKAYQHEERMHQQYTELPYKGFKQSFIEDIENIILINNIQKDQALTPGCRRVRVRGKKVYLKDQNGNEREKWAKGDSIRGQLHLDTFYGKIKVVKRADNGKPLKDETGEWMYTDKNEGFGFVLRKEINKDLKVETIVDPYLKQLFIQQMNGRNLDKTLKEDGCIWMLNKKGNKVHAMRHVRTFANDVTEPLAIKHQTYTSGKEYKTHYWAKNGENYAYAFYQGIIKNKIERGYELINLFDAAQSSLADNRNNLDVPKDISFNKKGDQLQLYAILKVNQKVIFYKDSPYELDDLEITDLSKRLYRIIKFEKDGRIVFAHHLDARNDNALKALEVQFGKSIYNGFSAFNYEQPWPRLKLSLGNLNFLIEKKDFELLLDGTINIYK

SEQ ID NO: 5627 - protein, 996 aa, unidentified
  REGION 1..996: note = Description of Unknown: Cas Enzyme sequence
MKGLNENFLNGLVFGFDLGTGSIGYSVRRKTEWIDVGVILCSENTNNLKDRNKNRRMRRTLRSRKQRLLRLKTKLISIGLPSPQNFIDDPVKLRLKAVKGEEVSPEELHCAIFHLLRRRGYQDVPWKSSDKDKEAGEIRDKVNALSNELKERGFRFPCEWLAAVSHNQRRREQHWERNLIIDEFNEIVEKQKERYPNLFEKRDEILYGDTHRYEKNGKQFSVFFKSTESKDSGVFSMHWPRFDNRSPSLDIWKPIDDEGRLLHVARTNNNTYKEFQFEASIINFRVLNSKTRIKIENTPPELIEMIREIWLKPRGKKEGSGMKVSISDLKKIIEKWNKTHPDTELSLIEGQTDLTPISDKGRARYSTPTLRSIRDTLQGGDRVNPPQPILKRKNESTTDAVNRMIAEIPNPLVSDRLSKLLKLLNGLVSKFGKPDLVIVEAVRDIGLGKKNKKKLIKIRDERAKERVDAREDGASSKKEIQRYLLFKELDGVCPYCRRVKISSDILNSDFEVEHIVPYRRSFCNEIFNLTLACRKCNKEKGNRTPYEAWHNTERWIEIEESAKHFSEKGKRLKADLLISPNAEELVESRRALAETSYIARSARGLILTRLEMLTDEGRDPSDQKGYVPYAVTSGALTSGLRHNWGLNAALNFDEPDPDKKLLKNRGDARHHALDAMVIASTLPWAANSSKEKGGWRNIDEFGNELIENPIELTLKTAREQMKKIIPENWDPVGYNSKHYKTTLLSMKKVINDKRETEEWFVSRELLSSLRPKDTKKIYPKELGTYISTAWKFFEKEGGKTGKGDLFPKEFVDSLCFSHFQRWRSKGMPEFSWPEKIKIPIKTVRYFSVKDPDAVLPLKRNADNGPFVKREDFREAWILLKEDGTFDKVIHVPHYRKDPLYPKMKRPNSAIVIQKGQNVILKSSPYPNSPAGAWRVMIIGKIIVKLIPAVLAQNFKSKDEESKTYKLFGMPESGWKATWNNFFKHLELSNYIKSPSE

SEQ ID NO: 5628 - protein, 1407 aa, unidentified
  REGION 1..1407: note = Description of Unknown: Cas Enzyme sequence
MAKILGLDLGTNSIGWAIRNTEVSKENQIVDDGVLIFQKGVGDGKSGEFSLAAERRDHRSKRRLYNAKRYRKWATLKVLIENNMCPLSDVELDKWRKYKKEDGGRNYPTSPDFTSWLRMDFDLDGKLDYTNPYELRCELLEKYNKNDINRLYKIGRAFYHLVQRRGFKTSRKNDKTTYADNILFKKFREKHPDKKDWKPSQIYLYMQSKVDDDKDLRKERIRNNQVILRDENLKEFNAICCSQKIDNSIVDKIYTAIYFVRPLRTQKGLVGKCTLEKGKSRIPISHPLFEEFRAISFVNNLKWRKIGTFESYEQLPISLRKEIFEKLFFRVSKPHFKFDEIIDDFSNKGDYEFNYRNKPNVSACPIISRFKAIFKNEWENPFVVQENKIGIDWSGLSVAYKVKYGKKIGNERKLDFEDLWHLLFDYFQTKDKVEDLEKFLKDVVGWDEKKIKTFSEIDIQQGYGSLSKTAINKILPYLQKGYIYSEAVSFANLNTVLGEKIFEENKDAVIKAISQTIFKVDYEKEKLNIVNGLIQQFFGDGLICQGNDYQLTELDKKDIETKLKNYFGSDNWEKFNPTKKSEYIQFVTEKYLSFIRGTQPNESKASYKPDGNKPKIDYYKLPRLDEAIKQVLKENFEVSDAKLKKLYHPSDIEIYPVAKIDDELKVKQLGDPMPPSKGWKNPMAMRTMHELKKLVNYLLEIGKIDEETKIVVEMARELNDANKRWAIQTYQRKREEQNIEFAKAIIGVAKEKYPNLNENDADNIDKVRLWWEQLENGEEIYKQVKALKEDVQKYRLWKEQECQCMYTGKMINLTDLFDGTQIDFEHTLPVSSSFDNSLANLTVCDSHYNRTIKIDRIPFECGNYEKERNGYSAIEPRLKKWKEKVESLKDRIEENKIKTKRTQDVATKNDYVQKRHLLLFEFDYWNKKVKTFTVKEVPNWWKNSQLVDTQIISKYARAYMKSLFKKVDVQKGNITAEFRKIYGIMGDEKKDRSKHSHHAIDAAVLTLIPGSANREAILKEYYKALEQGDKNYHKLPYVNFHVTHVKDIENNILINHISKDQTLADTKKNVRKRGRIVYLKDKATKQYLKDEKGNRIPMIMQGDSIRGQLHKETFFGAVKAVERNENGFALKDEQGKYIVKQSNGEDEIWIVARKPIGNIDIEKDIIVDEVLKQHIKKQLNDGKQLHEIVDFNSKIIRHIRCRVKAGRGVLSKEKALTIKKHSSVFLSKHIHKQEYLTQNEENYLYLLYEGLNKKNEVTRGYRILNLFDIAELGIENIEQLKNEPEFMTLSKGKGKNIYELKLKAIIKVGQKILMWQKSVDELKDLSIIEKLKRIYKIYKFNEMTTTGLLYLQHHIEARPNDELGDGETLFNPEKYQPRLKLTSDNFNCLIEHKDFKIKPDGEIEWLF

SEQ ID NO: 5629 - protein, 1149 aa, unidentified
  REGION 1..1149: note = Description of Unknown: Cas Enzyme sequence
MKKILGLDLGTNSIGWALVSEADNEKEKSSIIKLGVRVNPLTVDEQQNFEKGKSITTNADRTIKRSMRRSLQRFKLRKENLIEVLKKQKFINNETILSENGNKSTFETYNLRAKSATEEITLEQFSRVLLMINKKRGYKSSRKAKSQDEGQLIDGMEIAKKLYNDNLTPGQFVFQILKEGKKFIPDFYRSDLQAELDKIWSFQKQFNPDILTEEFKKQIIGKGKVNTTKIFLAKYGIYSIDNKGADKKLQSYNWRVDSLTKQLTKEELAFVISDLNGIISNSSGYLGSISDRSKKLYFNKQTVGQYLIAQLKENPHTRLKNQVFYRQDYLDEFNTIWETQAKFHKELTNELKEEIRDIIIFYQRRLKSQKGLISFCEFESKTIEINIDGKKKLKTVGSKVCPKSSPLFQEFKIWQILNNIQVIEKSTGKSKFLEQDEKTTLFKELNFKDKISKNDALKILYKNYKELDFNFKDIEGNKTNTALINAIQKIIELSGHVDYDFAKMNTNDIFEIITPIFDAFKYNIDILKFNSDLEGTSFEKQASYKLWHLLYSYEGDKTNTGNESLIQKISELYGFQKEYAAIIANISFQPDYGSLSTKAIRKILPHLKEGFAFAGRSERENELSACEYAGYRHSKNSLTKEEKDKKVLKDKIDILPKNSLRNPVVEKILNQMINVINAIVETYGKPDEIRIELARELKKSAKEREDLTNAINKSTLDHEKYKTLLQKEFGLSNVSRNDIIRYKLYLELENNGFHTLYSNTYIEPNKLFSKEFDIEHIIPQSRLFDDSFSNKTIESRSANIEKGNETAFDYISNKNGEKGLKDYLKNIEELFNNGKISKTKYNKLKMKGDEIPSDFIARDLRDTQYISKKAKSILEDIVKDVVSTGGSITDRLREDWQLIDVMKELNWDKYDKLGLTEVIENNVGHKINRIKDWTKRNDHRHHAMDALTIAFTKRSHIQYLNNLNARSDKSSSIYGIEQKELYRDKNNKLRFKPPIPLDDFRAEAKKQLENTLVSIKAKNKVATININNTKKQCGYNKKKQLTPRGQLHLETIYGSIQQYVTKEEKVGTNFNIKLIKRVANKKCREALLKRLIEFDNDPKKAFTGKNSLDKNPLYLDSLQTNKVPEKVKTVTTETIYTIRKDINPDLKLD

SEQ ID NO: 5630 - protein, 987 aa, unidentified
  REGION 1..987: note = Description of Unknown: Cas Enzyme sequence
MVSIKGSGLILGLDIGPNSIGWALIKTEKGRPRALPAIGARVFEAGLDNLETDGKGKSRNMNRREARGRRRLLERAGMRRKHLIHILQRSRLFPEGNFDAPDNRHNILAELDAKIDSPYKLRARALDEKLMPFELGRVFYHLSQRRGFLSNRKSASKKESDEKGMKKKISELQAKIDNSGSRTLGEYFSKIDPREERIRQRYTARKMYESEFEEIWKSQLHWYSDILTNILKKEIHHALFHQRPLKSQSHLIGECELEKGRKRAPWALLDAQRFRYLQKVNDLKIVDEWGRFISEIAAEQRQKLIEELENEGDLKFAKIKKLLGLPNSAKFNLEAGGEEKIPGNRTAVKIIKIFGWERWQEFTEKQRQAIVEDWLSIINDETLKKRGMNHWGLDKEAAEKFGDMKLEEGYCSFSRQAIAKLLPHLKNGVSLQTAIKECYPERSARKQEAKDILPPLDSEELPALRNPIVSRALTEVRRVVNAIINRYGKPAEIHIELGRELRQTPKQREQTWKKNRANEKERTTAAELILKEANIGNPSRNDILKVILAQECDWKCPYSGKPINITSLVGEFPQFDIEHIIPFDRCLDDSYMNKTLCDANENRNLKHNRTPYEAYHGTDKWDNIVTGIKAFKGSAAREKLRRFLMEPQEVDKMLDDFTSRQLNDMRWTAKWAKKYLGLLYGGIDADGIDASGKRRVMAIPSGQITAHMRNALDLNGILGDGPGKTRDDHRHHAVDAIVVALIDQTFVKMLSDCAKRATIARRRLLDKLPPPWDEFNDQIRELINNTVVSHRVSKRVRGALHEETFYGIPRKDEKGKQYVHKRIPIEKLKNIEDIVDPAIRNCIKQKLAEIGKEPKEAFKDPLNHPVRMAGDKELRIHRVRIRQNAGQIFPVGQGSRIRYVETDRNHHIAIYEMKDKKGNIKWDGEVVNLYEAYQRVKDKKPIVNRNLGEGKEFLFSLAGGEIIELDNSDNTRSLYVIRTVPQSKQLY

SEQ ID NO: 5631 - protein, 978 aa, unidentified
  REGION 1..978: note = Description of Unknown: Cas Enzyme sequence
KYKNDFNQYSPEIERTTKKSKALVKDFILENRDTLLKGNWPEWAAAQLLFGRHTAAEPDKIAENYHDIQPLGKEETLRNPVVEQIVNETLQLVKSIWKQYDAKPSEIRVELARELKNNAEEREKMFKGIKEAERLNKEAAYEIMLLEYKRGDKKISPKNECIADGCNSSCRSFTRIPTPNEITKYKIWKEQGFVSPYTGNPIPLCKLFDGSEYNKEHIIPKQRFFDNSNSNLVIAEKAVNDAKDNRTAWEFIEHCKGGNAGGFQIRTLENFERYVRKQFHGRKQKNLLLKEIPEDFVERQKKDTQYIAIKVKEKLAGIVGLQNVTTTSGGITDYLREHWKLNNIFKELSIERYKKMALLTTENEKEWVDKDKHNNWILKEWSKRLDHRHHAIDALVIACTSQGQITQLNTLNQILQTNVEERKDQLKIEEGETPMDAFLKLTKEEKQKILGGFESMRMFDEPWDGFIAEARKNIESIVVSHKPKQRILIQNREDKKTGKRLDELMLKVRSKLHQETIYGKKIDPETKNISIKSAFELINYIVKPEDKSLIQTRLNSYNNDIEETQESLKKENEGPITDFKGNQIKKVEIHFDTKDVYRYPLEKLGMKKSIRSFIEDNVVGNENKSWLFDHLHRYCFKQLIEDEEGNAFNDKVEIKNQIEKFVNRENLINNEDLEKFYESINDKTVKEKLNKCLNGKIAFSVDGIEELNKFRKIYKTKKGKGLPPINAIKVLYATSASESSLQEIDRNGQKDYVKTGDNYCFTVLQKGKERAFQTITFFDAVKWVLEQFKKDKINNITFAKRYEDRLNYVEEIIKKQIENDNPNTEVLFLLQPDELVYLPVDDEVFNPPSYLDKEKNKEFWFGKENSRYKRIYRVVKTDKTYCHFTPHHYAYPIWYKPLSTEEKDEIKIERDRELPKTGLQEYDSQKNCSPFVFDDTYIQHLLVFKKIKELNKQSKELKGDDAIQKKEESKKLSDSIKD

SEQ ID NO: 5632 - protein, 1127 aa, unidentified
  REGION 1..1127: note = Description of Unknown: Cas Enzyme sequence
VDIMESRYTLGLDIGIASVGWCLLGENRIIDLGVRAFDKAETAKEGDPLNLTRRMARLARHRLAQRAWRLKKLTRELKRHGLIDDTRFFQPTNPVTTSPWQLRVQGLDRKLETDEWARVIYHLCKHRGFHWVSRADKKKSEGDAKGEGGRVTAALNDTSKRIDGYRSAAEMVIHEFLKPAQTDNGLPLLDKIGQPIPSGAARNKRGEYTKALSRVLLGDELKQLFAEQCRLGNPLASESLETAILGNGDRKSGLFWMQKPPLSGAALLKMLGKCTFEKGEFRAPKASFTAERHVWLTRLNNLRIVVDGETRPLDAEERAIALPLPYKQAKELTYKQLHSALVKSGRLPETFEFAGLRPTKDGKDPKSERLVKLPAWQELRATLKAAGLETEWESLAGAAGRGQPQILDEIARVLSIYKDDDEARAELNKLALPNREAMVEALLDIRFDKFHALSLMALYKIVPRMEAGLRYDEAVAAIPEYGHHSQLHKPGEGASRTLPPLYAGRNPDGRMRFAEDEDIPRNPVVLRALNQARKVVNAIVRRYGSPMAVNIEMARDLSRPLDERNKIRKEQEDYRARNEKDKAFFAEEFGQAPKGGEFEKFRLYREQLGKCAYSQEGIVIERLLEAGYVEIDHALPYSRSFDDSKNNKVLVLAKENRDKGNRTPYEYLGGEENSFRWQQFVAFVESTKSYRLAKRSRLLRKDFGAKEAEDFKERNLNDTRYICKFFKNYVERHLKLADGSEAQRCVVLSGQMTAFLRARWGINKIRSESDRHHALDAAVVAACTHGMVKRLADYSRTKELAQVHTGFVDTTTGEIVDPAIFRQLKQHFPEPWPHFRHELEARLKIDNPALLREEMTHLGTYDTTALDEIRPLFVSRAPQRRNGGAAHKDTIYGQPEKLRENGSVTQKVPLTSLTLKDLDKLIDPHRNARLYAAIRERLEAHGGKGDKAFPPDNPLRKPARAGKPTGPVVRTVTMLIDKLSGIPVRGGIAKNDSMLRVDVFTKAGKFHLVPVYVHHKVAGLPNRAIVAFKDEAEWTLIDDSFAWCFSLYPNDLVQITLKSESHLGYYAGVDRSTGGVSLWAHDRNHSVGKEGLIRGIGVKTALSVEKLHVDTLGNIHPAKSEPRRGLA

SEQ ID NO: 5633 - protein, 1049 aa, unidentified
  REGION 1..1049: note = Description of Unknown: Cas Enzyme sequence
PDQQRVLALHVRTFDKAETAKEGESLNKIRRDSRLTRRRIRRRAHRLLRLTRLMKRVGLIADTSPEGFAIPGTSPWLLRAEGLDRLLEPKEWASVLYHLVKHRGFQSNRKSEGKADEKVGQMLSGVGRNQTLLKETSYRTVGELAARHEAFSDSKRNKGGSYTHTFARSDLDSELRVLFERQRALGNCCADQAFQDGVRELLIAQRPTLSGSNLLKMVGRCTFEKSEFRAPKAGYRAERFVWLSKLNNLKIVGGSDPRPLTDGERSIIINLPFTQAKVTFKQVRRALDLSAHERFNLLSYRADPTGKDKDPEDAPFFEAKSFHTLRKAYEGAGLKKEWQRDALDADKLDHLAYAMTCYKDDAESREWLMERAIEAPIIEAVLAESFDRFIHLSTKALKAILPYMEAGQRYDEAAKSSGYNHGQPDVDVGKQSALPPPDRQTIGNPVVYRALNQARKLVNAIVTEYGPPAAVHIELARDLSKPHDERREIEKGQKEFQVLKQRLTTAFEETFCRTPGGQDLLKYRLFREQLDQCPYCQKALAVDRLFEIGYSQIDHALPYSRSFDDSMNNKVVVHVACNQDKGNRTPCEFLDGATNSERWQRFVAWVQTTKAIRQAKRNRLLRVNFGTDEANEFRDRNLNDTRYICREFKRMIETHLRWHPDSSADNRCVVVSGQLTSLLRARWGLVKVRDEGDLHHAMDAAVIAAASRSLVQRMANYSRRKELDAVRNRYVDPETGEIIDIASVRQMELDFPKPWPHFREELLGRLSSQPKLHLRGVPGYDDQAREGIRPIRVSRAPTRRGLGAAHQETIRSVRGNSQSAVKTPLRDLKIKDLKDIVGFERDTALIDAIRSRLEAFGGDGRKAFDDKQPPLHKPSRDPAKAPVIRSVKLLATQKSGIPIRGGIANNGAMLRADVFTKGGRFHVVPVYAADAARADLPNRAVVAFKPEEEWTLMDESYQFLFSLYPNDWVTIRLSNEVREGYYVGLNRSTGGIDLWLHDRNQAQGKKGMLEGNGIKTALAVEKYHVDFLGKLHRVHKEERQPVNIQRTKG

SEQ ID NO: 5634 - protein, 1137 aa, unidentified
  REGION 1..1137: note = Description of Unknown: Cas Enzyme sequence
MSNTLGLHIGITSVGWALMDTDSKSIKGMGVHVFPHGSKNFDSGRREISNRTQRRMQRIIRLRYARKRTRKIKLLHILSEHGLCPVGQKELEHWRQTKEFPMGVLRSWLNLNPYALRVKALEEEISLMELGRILYHMTQRRGFPLSERSMEGASNTLFKGYPRANRPGISHLQPHLRNQYLGQYLAKLYPLPYQSYQHTENRIRNRFISRAMYQEEIDRIWTVQKQFHPSLSATLKTQLIGGTVNGQKVSGAVFFQRPLKSQKDKVGRCMYEPKKTKCCVSSLTYQQLLAYRWTNTILKDGHPLNPIDRDRVARYFLTHRKFSFQAIIDLLGDSNSFYNKRTDEIIIGSFVYSELTRSDYFGTDWFGFDEKTQEDIWHVLYFFNDKKKVAEYAEIHWGFGTQQAHRISRISIDKRYAPISRKAARNIVYFLKHGVTYDLAVVLAGVKNALHKHWNAIAEKDVRFIISRVIDLYHTHPMFGFTQKLQEFLMEYLQLTDFQISKLYGKSARILDTNTHSTFEFSKESDDEVYRFHNPPLITSLFQTRRVINALVKQYGPIAHLNVQLNPKLKVNKYQRYFYKLDARRISHNHARYIREIGAMRENITPANILKFELWEECKHTCPFSGEEIPLERLFTQEFKIVYIHPWSRSLNDATINKTLCVARLHEKLKNLTPYEYFKEYRAYEWDEVVERAAKLFANSKEFPASYKKFRRFVKRYYRRNILKHHLQDPSFMSQELRCFFTQVCPDVTVALNHSTKHLMEQWRLDKILSKDGTVSDYRTAALKAYVTAVRDTEILAELTQWDRYRNAPRKIFPEPYPDFRDQVEYHLKSIYVSHAQSKRITVRRKVFNPVSKDRHLGVAVRGMLHKETVYSLRKAPGEKVYSYHIRKSVESFQTETQVGKIVDPYVKKAVLRAISAVGGFKEGRVPTNALVQTDENGFNVPRLFIPNKKGGDAVPVWKIRIKETFNGAVQLKPDLNKYVNPKNNHHILVYKDGEGEYQESVVSLWEAVRRKTQGEPLYQIPDPSGTYISSLHNNDLFLLGISDLEDDLSKESRSFLAQHLYRLQKMSSKFYEFRLAYHDNLSKVSPPEFLRITNFGKYKTGWLTVNPIKVTVDFAGEISRAPYPKAVINPNPSMLH

SEQ ID NO: 5635 - protein, 1150 aa, unidentified
  REGION 1..1150: note = Description of Unknown: Cas Enzyme sequence
MPQLKKKINKTLGITLNYNCVSWALTDDQRANPILSMGVRVFPTTINHLGSGINEESQLAVRTKHRNMRRSLVRKKYRKFQLLRVLIANKMCPCSIKSMEYWKTTGIFPQEELASWFALDPYQLRVKALNKKISLHELGRICYHFSQRRGKLFSKISSNDSSDSVFNYGDSKTKRLGLAATLPYCKNDKRLGQHLYQFQHQKHAPYKQKEERIRNRYLDRFMYVKEFHHIYDCQQQYHTSLSESLREELGGQSGSENNGKTGILFYQRNLKFINKWSEKCPYEPNKKGVPLSNPLYEYFEIFKWINNIRCNGSALTEKQRAKVLDVTLRFHQFSFKKVRKALDMEDESIHFNVGSDDRIKLAYVLVNLGKPQIFGPSFFSLSLDEQIDVWHAIYFFDDKELLQKHAMNKWGLSPFQSEKLCKLELKKGYARISAKATRNISYFLELGIPYSQAVFLAGIKRASGESWNKISFQDEVSCIKELLSVFEGNKKHDTSTFIKNLMEGKFKVTSFDTNLFGQYLNANAPKKEYGLQMDHRSDQHILSQFNPIVQKPVFELRKVVNAIQGEYGEVDQIKVYVRPELKASRSARKNHFLSRKKRNSQYQYHHAAVNQAGKNPTHLNVLKHLFWEEANRSCPYTGNPIYLNQLFSEEVSIVHILPWSRFFNDWNTNKTICFTSFKHNILHKTPCEYFTQIDQSTWEKVKTRLLAQFMGSKKFANLNKFKQFTASSNATDVISKEQNDCHHVSKAIKELLLESCSSVQTTLGHTTHSLREKWYLDSFDNFLENEPLSDYRRHGVDALITAVKTTELLKELAKWNRYEQSPSGTFPLPWENFKNDVEYMFYGMPISFSKPKKSFSVSITKSIVNGKKYSQRSDSARGQLHKELFYGKRKSPYSGENNYHIRKSIAQIDTAKHVKKIVDQAVRHRIYDMIDRHGGFENGKVPKEALTYQDEKGVIHSKVTMPNRRGDDVPVHKVRVSETIKNAFQLYDGINKHVNSRNNHHVLIYKDLQGEYKEEVVTFWTAVKRNRKGENVYQLPEDGLKMITSLHINDCFLMGLSDKEFANLDKLSLRYIMEHLYRVQRISTKYYEFRQVYDAAIYDTAFPSYIRILNFGYRKTGWKTFNPKKVHISTLGRIQKYNELLKIKQLQGQF

SEQ ID NO: 5636 - protein, 1324 aa, unidentified
  REGION 1..1324: note = Description of Unknown: Cas Enzyme sequence
NQKRGYYQLRGEEEEDNPYKLVEYHSLKIIDVKADEKPNSKGETWYSLELENGWIYRRSSKISLNDWKGKTRDFIVTTDLNDDGTIKKDKEGIDRRSFRAPNENDWTLLKKKTEVEIDHSHKYVGEYIFEALLDNPVQKIRGKLVRTIERKYYKEEIIAILKKQIELQPELFTEEKYNDCIRELYKSNKEHSFILSKRNFIHLLVEDILFYQRPLRSQKSAINNCTLEKRIYKDRETGKSIETGIKTISKSHPLYQEFRIWQWLYNLKIYSKADDKDLTATLIENIDDKVKLFEYLHNRKDIEQKPLIEFLIKSKRLKAIYKSDALRWNYVEDKKYPCNETGTMIRTRLEKANVPIDFLSKEKEKALWHIIYSVTDKIEFEKALNTFAEKNKLNDKDAFVESFRKFPPFKSEYGQFSEKAIIKMLSLMRLGKYWNWENINSKTKERISKLMTGEWDENIRDRVREKALNLRNEVDFQGLPLWLAQYIIYDRHSEAEILGKWQSVADLQQYLDEFKQHSLRNPIVEQVITETLRVIKDIWEQFGNGAPDFFSEIHVELGREMKNTAEDRKKLTNIVTENENTNLRIKALLTELQNNTDGKLQVDDVKPYSPIQQDILKIYEEGVLNSGIPIEDDIKKISKTGTPTQSELQRYKLWLEQKYCSPYTGKAIPLGKLFTKEYEIEHIIPKSRYYDDGFNNKVICEAAVNREKDKFLGMEFIKKCHGKIIEIGFGKTVRVLEVAEYETFIKEHYPNNRTKRNNLLLEDIPEKMIERQMNDTRYISKVIFSLLSNLVRENKDDDSFNSKNVVPCNGKITTTLKQDWGLNDIWNQIILPRFERMNKITKTESFTTYNEHQTKLPAIPLVLSKGYQKKRLDHRHHAMDALVIACATRDHVNLLNNKHANTDNVRYDLQYKLRLTEPWLDKNGKNQAKFTEFKKPWNTFTVDTRKALQNIIVSFKQNQRVINKATNHYTKYQDGKKIEIGQQGINWAIRKPLHKESVYAKVSLRKIKLIKLNEALKDWKTIVDKSLKKEIHNLSVRYGKFDSEVINKYFKDMKYLFNDVDISKVEVYYFDDNNAAIRKSLDTSFNEKYIRESVTDTGIQKILLNYLSTKENNPGIAFTPEGIEELNKDIAKYNDGHHHQPILKVRVYESLGNKFPVGNRGNRKDKYVEAAKGTNLFFAIYVDETGKRSFETVPLNIVLERLKQGLSEVPEKNEKDHKLLFFLSPNDLVYVPTVEENETGQAIHNCSLNEEQQKRIYKMVSCTGNQCMFIPHNVATSIVNKLEFSPLNKMERAITIEKDKGEMIKDVCIKLKVNRLGKITNLIG

SEQ ID NO: 5637 - protein, 985 aa, unidentified
  REGION 1..985: note = Description of Unknown: Cas Enzyme sequence
MSKIVLGLDLGITSIGWALVNVDDKNIENNKIIDSGVRIFTIAEHPKDGKSLALPRREARSARRTTKRKAQKLRAIKRLLLRNKILTQNDLDTLFIANKGQKDVWDLRREALYRELDNKELSRVMIHLAKHRGYYSNRKSDEVTDNEGKAVLSGIGHNKTILESSKFLTAGEYISTKKKKRNGKDSEGKLNYENSVARSMLVDEIEIIFGKQKEFGNSFVSDELLESYKELAFEQRPLKSVAGMVANCPFEVDEKRASKSSYSFEYFRALQKLKNLRVIDETGYEMPLIFEQIAQVIYKAKKTAKFTYKSFKKLFPQYKEMKVKGLTYHDHKTGEIKDPEGVKFLDFSAFQKIQKAIQNADNLYWNTIENDYEVLDAIATVLTTEKDDKESIKQLQEIVQNEKVCEDLVGISFSGFGHLSNKALRKIIPYLEDGEDYDKACDKAGYDFKAIFKGEKTLFLPPLSEQENLEMTNPVVKRAIAQMRLVYNAIARKHGEIDSIHVEFTRDIKKSHEDRRKIEKAQGEFRETKENARIDATDKLGHEPNAKELLKFRLWEEQKHHCMYSGKYISPDVLCDPYATEVDHILPYSRSMDDSLNNKVVCLTKENQDKGSKTPFEYMGSDENSSRWLQFVGRVEDLDKRKQAKKNRLLKTNFDESSEIAFKDRNKNDTSYISKFIKNYMEAHIAFKESKGKRHIFTMNGMLTSQLRYKWGVGDKNRENHLHHAEDAIILAFSTQSMVQKLSSVSAKREGYIYESKEKKSKALRFVTPLEDFGMRVKESLGEIFVSHMPRRKVGGAAHKETIYSDKTLSMKKENGKVEVLKGGSVINNVRLKHGIALNDGMPRVDLFQNKKTNKYYLVPIYVSDFVKDKLPNKAIVAHNKPWIEMDDEYEFKFSFYKRDLIEVKTKKTAKKESIQILGYYDSTHSGTAQIFIKSHDGNREEVLGSQNLVFIKKYQVDPLGNYVEVKSEKRQGSIKEGRLRKSKS

SEQ ID NO: 5638 - protein, 1042 aa, unidentified
  REGION 1..1042: note = Description of Unknown: Cas Enzyme sequence
MKTNIGHPFSGGSFKAFKQGIVFGFDMGTNSLGFAVRQNKNWLETGVVTFLDKVGNLEKRRAYRQMRRRTAARKYRRDWLKQQLEKHGFTLPNNTDKFEHPVILRNNAVRGQKLDSAELHIALQHLFKKRGYEYEVPWANVQEDIKGKKDEEITGEKVTAERLEKEGFDYPCEKLFNILQKMAKLKKEGTPEDRIIGFNFERKLIEKEYRRIIETQKKYYPQFDNIVETSKDKITLEDWLLYGNCQIIKVGVNKIPVYDKKTEKDRGVLGIRFAHIYNRALGLDIDSPLDDEGRVLHRIKKSKDIYKRFQFEVAIRNFRVIDAKGNKVIPPKEILEKIREEFNKSKNKQGRNLSVSKLEKILKGTEYKLVEGQNDLNAKSPGDRSSFSSVTLKKWAEITRQGSVPYDNPQPLLRRGGENWETASKRYLNDMAFPLGKHRLEYYIRLLDGLIKKYGNPEFVVIETIRELTLGDKARKEIIKKQADNKLLRDKARDFWAEAGIANPGNPRIRLKRLVEENGWHCPYCQKKIEESEVINDEIELEHIVPQSEVVCNEIFNLTAAHRNCNKKKGEMTPYEAFAHTDKWSYIFKHAQDHYMRKTPKRIETTLKFRLFTEPNARELLRDKYNSPLTQTAYITKAARALSLIRMNWLTADGREPTIEKGNPASMKFMSTNGPTTALLRRNWGINDVLWDLYPESDANIKSKKVRLDVRNHAIDAMVIACTFPPVARFMSSSQAEGYWIQDKDGKPQAINSFDINYDTVKNELDKIKVIPYVPNKRHASHYDSTLLGKRKIIISSKTKQKEEVRFYKRVPVVGSHLKEKQIENGDIYPQALGEYIKTAWRKFKSENENCVFEKTKEQFFNKLCFSHFQRWRALGENMEVENFKWPVKVKIPIRNVRIQSQKNEDAVMEIRPKTYVARTGYKGLAIYKTLEGKRIGIYVPYWKTDAIYEQECKKIPKDSKLLIVLRTNMAIKLKKAITDKKNWAWEEFKIVGLGGPRKNPQINLMPLIFIAKGNEIELVLGAEHTSNLKITLNDLLDNLLI

SEQ ID NO: 5639 - protein, 1123 aa, unidentified
  REGION 1..1123: note = Description of Unknown: Cas Enzyme sequence
MCRLLLLYLRGRAGSNPAGGIPTIYCKENILINYRLGLDVGTNSLGWCVLQIDKDKQPVSMLDWGVRIFDDGREPAKKDIPGESSAVQRRVARGMRRRYDRLIMRRKNTIKQLVKFGLFPEDKNARKELEKLNPLQLRNDAIEKKLTPYETGRALFHLQQRRGFKSNRKDAQKDGNNELAGMKGAIADLEQILESQYTLGQFLYKQNIERKPIRFRSKVNEKGKAEYNFYPSRQMAEDEFKSIWETQQKHNPTIFTEDARKAIHKAIFHQRPLKPQPKGKCSIFSTDTRMDWALPSAQKFRIIKEVNNLAFTAPYSMRGQKLNGEQRNKLYTELSLKNHLTFTQIKKALGSSEYQFNLEVPGRDKIEGDRTAKIMRDEKRFGKEWDKLTLEQQDDIISKIIIDDEKHPDYMDDETLENWLCENYKITHEQANKVVNAPLPDGCASFGKTVISAILPKMEEGMLEYEAIAACGWNHSNDNTGEIYDILPYYGEILEKHVVKNEKSSDPMVRKYGRIGNPTVHIALNQIRRLMNKLKERYGCWPQEIVIEMARNLKNGTKEISKIVKEIDKNTKQREKWKEEIEACKSGAKATKDDYVKMKLWTELATDPTQRKCVYTGKTISQSMLFSGNQVQVDHILPKSRTLDNTSANLVLVTSEGNQIKKNRTPYEAFKNRDDECSYEKVLERSNSLPKSKRWRFFEDAMEIFDSKAKTIVRKSSIDGGEIVIDTCLEPFAARQLNDTSYIAKIGKKYLAYACENGESSVIATPGTLTGLLRKSWGLNDLISTDGEKNRNDHRHHAIDALIVALTTRSMVQRVSTAAAREEKERIKIEKILGEQKPWAGFEWEGLQKRLDEIVVSHKPDHGSPAQKGGGTSGRMHEDTYYGYAGEGKKKGTIAIVVRKPLSSITKFSDLDSVRDLALQDALKNFIGDRDDIANTLQEFSSAETINGEPNIWKGIQRIRMLSERTSNVLVNVQKKPDGSPSKIAVGGNNYKADIYRTKEGKKAGKWQIEFIKTFDINKSNFIPNWKKEFPDAEFIMSLYKGDVVAYEDNGQLVIRKIIILPNSGQISLIPCNLSKSETKTPPSIKVGGMEERRFRKLYIEIDGSVYDPLGILTTKPKEYDAA

SEQ ID NO: 5640 - protein, 1076 aa, unidentified
  REGION 1..1076: note = Description of Unknown: Cas Enzyme sequence
MALNTLQPYTLGLDIGMASVGAALLTEQRILALHVRTFDKAETAKEGDPLNKTRREARLTRRRIRRRAHRLLRLVRLFKRAGLIAETRPEAFALPGVSPWDLRAEGLDRLLASTEWATVLYHIVKHRGFQSTRKSEAKDDEKAGQMLSGVTANQTRCQQKGWRTMGEMAARDEVFAVAKRNKGGAYTHTFARADLVAELKLLFKQQASFGNPYVSAEFENWVEQLLLARRPALSGDALLRLVGKCPFETAEYRAPKASYSAERFVWLTKLNNLRISEIGVQRSLTQGERQILLDQPYVLAKLTYKQARQKLSLAETAKFTVLTYRGDKDPETATFFEAKAYHELRKVYVKAGLEKQWQRDALDPARLNRLAWALTCYKTDDDIRVHLAEHSVEPEIAEAVLGESFDKFIGLSLKALGKILPFMEQGQRYDEAVQSAGYAHHSQLNHDTAKNRYLPPPDKEQIRNPVVYRSLNQARKLVNAIVRKYGPPAAIHIELARDLSKPMDERRKIKTEQDKFQALKQKLADEFIHDEEREPKRDELMQLRLFHEQLSQCPYCGKEIIRGRMFNNSDVYVQIDHALPYSRSYDDSQNNKVLVHTKCNQDKGNRTPYEYLDGTSDSPQWQQFEAWVLSNKAYRRAKRDRLLRKHYGEDEAKEFKKRNLNDTRYICKEFKRMVETHFKWHDDAEGQERCVVVSGQFTSLLRARWGLIKVRENGDLHHALDAAVIAAANRSLVKRMAIYSKRNELAQVRDRYLDPETGEILDIAAMRQVEEHFPAPWPHFRSELLAWLSPEPAHGLDGLAHYPTEELEQLRPVRVSRAPTRRGLGAAHQETIRSLGRERRLLADGQSAIRTPLTSLKLKDLDNIVGAEDPRNAAWIAALRERLEQFKGDSAKAFAANQPPLTKPSAPGKNAPAIRSVKLLATQKSGIPIRKGIANNGSMLRVDVFSKGSKFYAVPIYVADAARKELPNRAVVAFKPESEWPEMDERDFAFSLYPNDWLTIKLKSETIAGYFAGLDRSTGAVSIWAHDRNQVVGKDGQWRGIGMKTALAVEKYHVDLLGNLHRVHTETRQPIHRKGR

SEQ ID NO: 5641 - protein, 1027 aa, unidentified
  REGION 1..1027: note = Description of Unknown: Cas Enzyme sequence
MATIWGFDLGTTSIGFAVVRTTPGAEAIERLGVRIFPEGVTEKEKMPRNRVRREKRLVRRQVRRRRWRRRHLRTLLADAGFLPPEEAKPVERSSLMAQDPYVLRAAGLQSALTAHELGRAIIHLAKRRGFVGSRKFAPSEADRVKEEGEIKAKISALRQAMGDRTLGAFLATVSAPERRRDRAIGRDMVEAEFDALLAAQRPYHAALQDPDFVARLRHIVFFQRPTFFRRSTIGYCELEPTQQRALKADWRVQQFELLQLVNALRLERGNQRGLDAQERAKAIAFLSVRADATWQQLKKHLGLSGETFTHERGAKKVKGNATEAALVKAIGPEWSVLAPDLKDRIRCEIAERLHHVEYRCTHDGTRFEIRDAVAIATERAALADYAERNWGLSRAAAQAVAAIENLPERYGRHSLAAIDRLMPYLEAGLPYMTARDLAYPDHRESRAPLGRLPEPNDRTLSPMTAGLRNPTVMRTLHELQKVVNNLLAAHGRPDLIRVELARDLKRTATERRKIESEIRQRERRRKAAAEALRESGRPVTRETIERWMLWMDQGCRCAYTGEAIGEADLFGNTDGAQVDHIFPLSRSLDDSYANKVICTREANRLKRNKTPAEAFDTDTLQAIVSRLSEVKTFPVAKLKRIQKAGLEASGSEDFTNRQLTDTQFIARAARAYLAQLFGGGDEGMRRVQVSPGRATAHLRREWGLSVRTLIDGDGVEDSADGDEGRKARDDHRHHAIDALVVALTGPGEVHALSRAYADAERTGRRAQVPLPWPNLRADAARALGEMVVSYRVQRKLSGGLHEDTILGKTREGTEDRPVYVKRKPVAELTAGDVKAIRDATVRKAVESAIEAAGNIKKAAENGIYLPRKDGTPGPIIRRVRLLIPRASGVMPVHARKNMHAELGPGTSHHIAIYRRDDGAISYEVVTKREAAVRVLRGEAPVRRTHPEFGRLIMSLCQNDMIARTDEHGRTEFAVVRKFYGNGQIFFRPHWVAGEAGSEKSQRPGPFISSGWRKVTVDPIGRVRPAHD

SEQ ID NO: 5642 - protein, 1378 aa, unidentified
  REGION 1..1378: note = Description of Unknown: Cas Enzyme sequence
MKKILGLDLGTNSIGWALVNEGENENEKSSIIKLGVRVNPLTVDEQTNFEKGKSITTNADRTLKRSMRRNLQRFKLRKEDLIEILEKTGFISEETLLSESGNKTTFETYRLRAKATTEEISLEQFARVLLMINKKRGYKSSRKAKSQDEGQLIDGMGIAKKLYEEDITPSQLVYQLLKDGKKFNPDFYRSDLQTEYDKIWNFQKQFHSEILTDEFKKQIAGKGKVNTTKIFLAKYGIYTADNKSADKRLQAYKWRVDGLSKELSKEELAFVISDLTGTISNSSGYLGAISDRSKELYFNKQTVGQYLMAQLDENPHTKLKNQVFYRQDYLDEFNTIWETQAKYHKELTVELKGEIRDVTIFFQRRLKSQKGLISFCEFESKQIEVEIEGIKKNKTVGSKVCPKSSPLFQEFKIWQILNNIQVIDKSGAKQSLEQDEKEILFAELSIKDKLSKTDALKLLYKNHKELDLNFKDIEGNRTQTTLFKAYQRIIELSGHGEYDFTKLPAAESKEIVSSVFNGLGYNTDILSFNSNLEGKEFENQPLYQFWHLLYSFEGDDSTSGNEKLLNKISELYGFEREYAKILANINFEPDYGSLSTKAIRKILPYLKDGNEFSLACAYAGYKHSKDSLTKEELENKILKDKLDILPKNSLRNPVVEKILNQMINVINTTIDVYGKPDEIKIELARELKKSAKEREDTTKSINDATAEHEKHRITLRKDFGLTNVSRNDIVRYKLYLELKDNGFHTLYSDTYISPTKLFSKEFDIEHIIPQSRLFDDSFSNKTLEKREANIEKANDTAYDYISKKTDEVNLSDYLKRIENLYKAGNISKSKYNKLKMKGEDIPSDFINRDLRDTQYIAKRAKSILEELVKDVVSTSGSITDRLRQDWQLVDVMQELNWEKYDKLGLTEIIENREGHKIYRIKDWTKRNDHRHHAMDALTIAFTKRSHIQYLNNLNARSDKGGSIYGIEMKELYRDDKGKLKFKAPIPLKEFRAEAKKQLENTLISIKAKNKVATININTTDKKNGVNKKKQLTPRGQLHLETVYGSIQQYATKEEKVNANFTEEQILKVAKKAYREALLNRLKEFDNDPKKAFTGKNSLDKNPIYLDIEKTQKVPEKVKTVASETVYTIRKDISPDLKIEKVIDCRIKTILETRLMEFGGDAKKAFSNLDDNPIWLNEEKGISIKRVTITGISNAVSLHEKKDKNGKLMLDKNGNPQPVDFVNTGNNHHVAIYMDENGNLQENVVSFFEATTRINQGLSIIDKEYKSQDGWKFLFSMKQNEYFVFPNEETGFNPNEIDLLSYDNYNLISQNLFRVQKLSTKNYVFNHHLETTAVTGETLKNKKQLLNITHRFIQSLAPIKDIVKVRINHIGQIVSVGEY

SEQ ID NO: 5643 - protein, 943 aa, unidentified
  REGION 1..943: note = Description of Unknown: Cas Enzyme sequence
KLSPKDILKELGYKSGFNEYKINLRNEKFMEGNRTLTAIRKVFEKHKIKRDDLLQFELLISNSRLYPETGELLSQVDASFEKESLYGLWHLIYSVDSPDELVRILINKYGLSEPVAKDLSRIDFLKQGYGNMSAKALRNILPFLMNGEQFSDACVSAGYNHSNSINKAENELRPLLDKLEIYPKNSLRQPVVEKIINQVVNLLNDIIDPLNGLITKEERLAKDQFEIKVELARDLRQSAEERNKAYLNNLKIDKYNKEIVDILKRELGFKRVSQNDVIRYKLWREFGQVSPYEPNKVISLKAAFNLEEGVLYEIEHIIPKSRIFDDSYSNKTLCPRALNSGINGKNQDTAYDFMKRQGEDNFLQYVEFLKIQLNRKDGISKSKYNKLLMSGDKIPEDFIERQMQETRYISREVHSLLQKVCRNVYSTTGAVTSKLRKLWGWDEILMNLHIDEYRAQEQTEIIEINRCGQISHKERIKDWTKRLDHRHHAIDALCIACTTQSMIQRINTLNAEYTRKETDNNVNKYNDKLSSLERYLIQNKPFKTHQVEDATSKIIVSFKKGKRVGALSSNKVNGKIVKTLIPRGELHKSHFYGQIKQYEKAELSPSFDRFDDIADESVKKKLFLYLSKFTVDRVKLSPEEQFINQRKIGFSKRELTKFLSEGGFNKVTLYKSKFVFHYKLDSSFKLEHVESIVDNKVKEIIRNRLILSNNNSTDAFGDLDKSPIYYDDKRNIQIRGVRRVIRSIDLNPLYDKSNIFVSTNNNHHISIYKDKNGDLKENIVTFWEAFERKKMGLPVVVKSPSDLWTHIIDSDIETNSIIENLPQDGWEYVTSMQQNEMFVFGICLDDLKKYIEDSNYQLISKHLYRVQKIAKNDYCFRLHTETKIDDKNGALSIKLGNLIRIRSLSSMSGIKVVVNKLGRIRLDADYDKENVIFWQSCLFELKK

SEQ ID NO: 5644 - protein, 1143 aa, unidentified
  REGION 1..1143: note = Description of Unknown: Cas Enzyme sequence
MDLPHNISSENTHYMHPDSKSIAGNLETVWGFDLGVGSIGWTVTRQQRSAIADFEAAELLDIGVRIFPAGSEGSENEWASGREKSPAEPRRIARSMRRQRERRRRRLAALARELQQLGLLPEGAIHTSIERDLFFKKLDADLRPPATAPTIEQHTWLHRLFAAGIESARLTPHQIGRVLYHAAQLRGFQSNAKERAKAKQDSQKAGAVYAGIQETRALLRSPDDSLIGALARLNPEADGERIRTRYTSRQDRRSDVERLLAAQAVHHPDILTDTHRSSLVERIFHQRPLKSSDHLVGRCALYPKEETRAYVALPSLQRLRILQQVTNLEFTPPDGDRMPRPLDGVQRAIVRDYLCEHESLSFTQLRKLLGFPPKPQKIPSSDPAQPLALVQPPFHEFNLERENPTAKLIGDRTHCALAPLLGEIWTALDLAGRDELVATILDADDEEEAKEELIARYGLDDEKTQEVVERALETDRGRFCARAARELCKHLDTPDPIPTRLSTVLKFLRGNTSPAERAADKGLDFLPPYLPTHPGVEAFCDSRNELRNPSVMRVLRELRLVVNALIRKHGKPDRIRIEFARELKNPAKKRQEIAKRQREREGERERARKMLVELGHRSSEAAVTSTDIEKWLLGEECAWHCPYSGQPIPPALVFGNSGAVQIEHIIPRSISFDNSFANKTLALAEWNIRKNNRTPHAAFSSSPEWPEILRRVASFVGPGARGKLVRFQWDEKEIELRYGGFTARHLQETAWVARLAKDYLALLFGAEETDAIDATGTRRIETISGVATGLLRQAWGFSEILLRSPSLPKLPPDSDNRPKSGAADKLRVDHRHHAIDALVVALTTPSTIASLSSALASEYDLRRIRLPLPSTDFETRLREKAETIVVSHRVNRRVAGPLHKATYYQAPRPDGRRFQRVALQDLKAADFENIVDARIRATVLDTWNKRPTSQNDPAKFFGTPENLPRLPNGVTVKRVTIPIKDVSTVPIGPRWQLHVLTGGNFCVVVVECPPKSPKGKPRWEFRSITLLDAARAIANRPEENRRSALSPAQMLQGDDALKPGERVVFTIRSSETLRLTEDGQDRVVLITGVSKKEVEAVQLNDARTKADRDKFKERIRISPSVLKEANAQKIVIGPLGEIYPACD

SEQ ID NO: 5645 - protein, 1138 aa, unidentified
  REGION 1..1138: note = Description of Unknown: Cas Enzyme sequence
MGGSEVGTVPVTWRLGVDVGERSIGLAAVSYEEDKPKEILAAVSWIHDGGVGDERSGASRLALRGMARRARRLRRFRRARLRDLDMLLSELGWTPLPDKNVSPVDAWLARKRLAEEYVVDETERRRLLGYAVSHMARHRGWRNPWTTIKDLKNLPQPSDSWERTRESLEARYSVSLEPGTVGQWAGYLLQRAPGIRLNPTQQSAGRRAELSNATAFETRLRQEDVLWELRCIADVQGLPEDVVSNVIDAVFCQKRPSVPAERIGRDPLDPSQLRASRACLEFQEYRIVAAVANLRIRDGSGSRPLSLEERNAVIEALLAQTERSLTWSDIALEILKLPNESDLTSVPEEDGPSSLAYSQFAPFDETSARIAEFIAKNRRKIPTFAQWWQEQDRTSRSDLVAALADNSIAGEEEQELLVHLPDAELEALEGLALPSGRVAYSRLTLSGLTRVMRDDGVDVHNARKTCFGVDDNWRPPLPALHEATGHPVVDRNLAILRKFLSSATMRWGPPQSIVVELARGASESRERQAEEEAARRAHRKANDRIRAELRASGLSDPSPADLVRARLLELYDCHCMYCGAPISWENSELDHIVPRTDGGSNRHENLAITCGACNKEKGRRPFASWAETSNRVQLRDVIDRVQKLKYSGNMYWTRDEFSRYKKSVVARLKRRTSDPEVIQSIESTGYAAVALRDRLLSYGEKNGVAQVAVFRGGVTAEARRWLDISIERLFSRVAIFAQSTSTKRLDRRHHAVDAVVLTTLTPGVAKTLADARSRRVSAEFWRRPSDVNRHSTEEPQSPAYRQWKESCSGLGDLLISTAARDSIAVAAPLRLRPTGALHEETLRAFSEHTVGAAWKGAELRRIVEPEVYAAFLALTDPGGRFLKVSPSEDVLPADENRHIVLSDRVLGPRDRVKLFPDDRGSIRVRGGAAYIASFHHARVFRWGSSHSPSFALLRVSLADLAVAGLLRDGVDVFTAELPPWTPAWRYASIALVKAVESGDAKQVGWLVPGDELDFGPEGVTTAAGDLSMFLKYFPERHWVVTGFEDDKRINLKPAFLSAEQAEVLRTERSDRPDTLTEAGEILAQFFPRCWRATVAKVLCHPGLTVIRRTALGQPRWRRGHLPYSWRPWSADPWSGGTP

SEQ ID NO: 5646 - protein, 1076 aa, unidentified
  REGION 1..1076: note = Description of Unknown: Cas Enzyme sequence
MSISSDGDFILGIDLGSNSLGWALIARDNGEPKGLLRAGVRVFDAATEGDRESGQEESRNKARREARLHRRQLWRRARRLKKVFGLLQQFGLLPPGQGSTPEERQKLLNDLDQRILASPWFAGKRASGRYPEPEQTMPYILRAAALDEPLEPYFLGRALFHLAQRRGFLSNRLQATKKDEDLGVVKQGIAELRRKITDSGARTLGEYFATLSPAEQRIRGRWTHREMFRSEFETLWNSQARHHPGLLTDERKKQLSKAIFYQRPLRFDPDVIGLCQLEPGERRAPAHLLISQRFRLLQTVNNLRILPPGGTEVGLTPEQRAKLINSLERQGDLTFAGVRKLLGLSKAYAFNLERGGEKSIKGNRTFADFYAVFGERWLKMQDHERDQAVEYVYSFEKPDKLKEAAQKRWGLDQASAEQLAEIRLEPDYMNLSRRAMEKVLPLLEEGVTFAEARKRLYPEQFEAKEPEPLLPPVERALTEIRNPAVMRSLSELRKVVNAIIRQHGKPAEIHIELARDLRKTKKQRQGISERMRENERARKDAAKRILDEAGIQNPSPDDIRKVLLADECRWECPYTGKAISMRKLVGHDPEFQVEHIIPFSRSLDNTFVNLTLCHVEENAVKSNRTPYEAYSGDPDRYAVILGRVRNFTGNRGIVAEKLRRFQMQPGEVEAMLGDFSERQLRDTAYASKLAKQYLALLYGGLSDEAHSQRVFASPGQVTAYLRNEWMLNRILNDGPSSEGGTVPKARTDHRHHAVDAVAIALTSPATVKQLSDAAQRAPLEHRRRFASLPAPWPEFVDSVRDVIDSIVVSHRVSKKVSGALHEETNYSPPKPVAPASSPAKKGRRSETAAAMRSEVRVRKWLHQLTKPEVEDIADEAVKQKVLARLGDGDPKKVFSNLENLPYFETQDGRRIPIKRVRINKAVPTFPLGDGKAARHVTSESNHHLEIFAELDEEGNEVEWDGVVVSMAEAYRRKKEGLPIVQRDFGTNRRFKFSLAPGEVIECTNEAAESKLMVVRSISQFTTGQIQVGLVPISDARKKADIIKAGAFVRPGPNTLRQMHARKVVVSPLGEVSSAGD

SEQ ID NO: 5647 - protein, 1047 aa, unidentified
  REGION 1..1047: note = Description of Unknown: Cas Enzyme sequence
MTNAVPTYRLGLDLGANSLGWFIVWLDPQGRAVGLGPGGARIYPDGRDPQSKTSNAVDRRAARGMRRRRDRYLKRRSRVLSLLIEHGLMPSAEAERKALESLDPYELRARALDEALPPWHVGRALFHLNQRRGFLSNRKTQKGDNEAGAIKAAAGKLEAAMSEAGARTLGEFLHWRHQERKSVRARNRSDTAKAEYDFYPTRQMVEAEFNAIWDKQAAYNPTMTPEARAAIATDINGIFYQRPLRTPQVGKCAFEPARAADDEEGFRCPWAHPLAQRFRIWQEVRNLGLAKEQGDKLALALFQTSKLSFDKARTLLELSPEFRFNLESEKRKELLGDKTAAKLSHKTLFGKTWRGFSLPRQIEIVTRLLYEEDERQLARWLGEAASLDAAAAERVAACILPDGHCRLGLRAIRKIMPFMEAGLKYHDAARAAGYDHALLPTGEVSSTGYLPYYGEWLQDDVLGTGDPRDGSDKRWGRYPNPTVHIGLGQLRRVVNRLIREYGPPAEIAVEMTRSFKLSPAQLAELEREQAENQRRNDARREQLRQLGAPDNARNVLKLRLWEELNLRDPLDRCCPYSGEKIGVHELLSDAVDIDHLIPFSACWDDSAANKTVCMRYANRAKRNATPFEAFGHSPIIDGRAYNWAEIISRASRLPDNKRWRFQPDARDRFEAMGGFQARQLNETGWLARSAKRYLGAVTDPYKISVLPGKLTALIRAKWGLNDLLPDHNFSDAKNRKDHRHHAIDALVAALTDRALLLQMSRAYDDERQRIEVPPPWDSLRDDLDRALKAMIVSHKPDHGAGGQLHEDTAYGPVKKPEAEGANLVYRKPFQGLNENEIDRIRDPRLRALVLAHVAKRKAAGEDLKSALRSFAQRTDLPGMPGGIRHVRLLKPERQEYLVPVRDDTGKAYKYYSAGENAYVEIFETPDGKWRGEAVSVFRANQRDSKPDWPRAYPGARLVMRVHKGDTLALEVEGRREIMVVHRLDASANRFKLAPHNEAGNLDRRHDDTDDPFRWVMARYSTLKRRRAERVRVDEMGRVWRVRPQDKV

SEQ ID NO: 5648 - protein, 1058 aa, unidentified
  REGION 1..1058: note = Description of Unknown: Cas Enzyme sequence
MINHNRPYRLGLDVGSNSLGWFMVWLDQENKPAGLGPGGVRIYPDGRDPQSKTSNAVGRRVARSARRRRDRYLRRRDNLMALLVQYGLMPKDGAARKALEALDPYELRAKALDEALPAYHVGRALFHLNQRRGFLSNRKTEKEDNEAGAIREAAGKLAQKMEETGARTLGEFLFRRHRQRKGVRARNRSTGSKAEYDFYPTRPMALAEFDAIWRVQASHHAAMTVEACEAIRHAIFDQHPLKPPLPGKCALDPAYDKDDAEGFRCPWAHPLAQRFRIWQEVRNLAIAETGKEPKRLSKEQSDKVALALLQNAKLSFDKIRGLLGLPPEARFNLESEKRKELLGDETAAKLSGKAFFGKTWRSFSLAQQITVVTRLLDEQDLERLVAWLTTEAGLDQQAARRTAAAFLPDGHCRLGLRAIKKILPFMQDGMIYPEAAKRSGYDHALLPSGEVSPTGYLPYYGEWLQDDVLGSGEPHDPKEQRWGRFPNPTVHIGLGQLRRVVNALIREYGPPTEIAIEMTRAFKLSPKQLTEVEREQADNQRKSDARRAELQKLGYPDNTRNLLKMRLWEELNPHDPLDRCCPYTGEKIPVHLLLSDEVDIDHLIPFQDSWDDSTANKIVCMRYANRAKRKMTPYEAFGSSPQSDGYHYDWEQISARAAGLPYNKRWRFRPDARERFGEVDGFLARQLNETGWLARVAKQYLGAVTNPYKINVVPGKLTAMIRAKWGLNNLLPDHNYSDAKNRKDHRHHAIDAMVVAMTDRSLLQRMTSAYDEERGRIEVPKPWDSLREDLALRLKAMTVSHKPDHGLAAQLHEDTAYGAVKDPEAEDGNLVYRKAFPLLNEQEIERIRDRRLRDLVKAHVAAEKRAGKDLKTALQSFAMRQDIPGLPHGVRHVRLIKPEKPDYLVTIRDKAGRPYKAYSAGENAYVEVFATPDGKWRGEPVSIFKANQRDNAPDWPRQYPDGRLMMRVFKGDPVALDINGERKVMVVHRLDASANRFKLAAHNEAGNLDRRHADGADPFRWLMASYSTLKTMKAERVRIDELGRVWRVCPQQGAPALR

SEQ ID NO: 5649 - protein, 1154 aa, unidentified
  REGION 1..1154: note = Description of Unknown: Cas Enzyme sequence
MSTTLGLDIGTNSIGWALIEDEKRIIDRGIEIFPEGINRDSSGKEESKNTQRRISRHARRRRFRYLLRREKLINILSQNGMMPIFRSELLTEDERKNSTKYLYGLRKKGLEGPLSLEEFGRILFMLNKRRGFKSTKQEKQLFEELQEEEIKSKKKMKRNNKNEFPEDDPRNYLHQVRTTTEQRIASGSKTIGEWFASFFIESENNRHNPWHEPLKQIRRRKVAREEYENEFELLWQEQSKHNPETLNKMWTEKNKDGKIVWKGTLKDAIGLRTIFYQRKLRSQKHLVGHCKHEPKKRTTVKSSFLFQEYRLWEKLHAIRITNRIQTGEKLSLFQMQTLISYLSKTQKLKLNNEVGLKKFVEILDLPPDTEVNDVDSLPGNTTDVYFCKALGSAKYVELKKQWENEEEKITRKERKENQSSLQKLFHALLYTNDENWLKKFAADLGFGEKEAEAYASIDLPKGYCSFSSSALRKVIPFLRQGLEPARALKVAMPASFNEKHRNTNFDLATFPKLNNNELRNPVVQQAVAETLRTVKTITKKHGIPDTIRVELLRALKQPKAKREKIRKQQQERNDLRDTYETILRKQPSIDRITPDVIKKYELWLEMGCEKEDYNGFAEFARSTKKEEKEKYELWLECNRRCPYSGKMISLKKLFSQHIHVDHIFPYSKSMDDSYINKTVCWDFANEAKGDRTPFEYLGATDWERFKRDIKNFPTPKKVRFLTEHVPDGFRNSQETDSAYIALQVREKLAAFFPNVETTKGPATAHLRKIWGLNKVLSKLDSPNYKNRNDHRHHAIDALVVALSTNRINDLVATYSKFDALGRLTKDVNKKVDAPWRDFYLDVEAAINTIIVSRRINKRLFIPKPNWTRAYSSPLGSNEQREWPIALRGSLHKENPFGAINPPDNHPFAQKPGIYYVTRKKISEITDTEKIVDHVIREIIEERIEKYGSLKKAIAENPDDPIFMIPVKKKPNKEYKFKVPIKHVRVFVKDQNAIEPFQRRENRQIKPLRREAKLDYLQSGENIVFAIYENEKTGEREFETVSIIDASRRFNTEEPVVKPYLDEKRLIMTLRRDELVAFYQQSPEEIRLDDPEFIKENIYYVVKMDRGRICFRLHYLAPDKNNDKSPLYLQKTSAYLNLIKIVFDSSSEPKLVSET

SEQ ID NO: 5650 - protein, 1075 aa, unidentified
  REGION 1..1075: note = Description of Unknown: Cas Enzyme sequence
VIRLGLNIGTTSIGWCLYDGNRIRDIGVRVFPDGRDPKSRASLGVARRDARVMRRQRDRYVRRRSAMLDALVDTGLMPADNQDAKALAGLDPYALRAAALDGPLSPNHLGRALFHLNQRRGFKPNRKAERKFGDSKEGYKNADGAKALDAAMEAAGARTYGEFLYKRGGNPNDQNAIPAKRVRVREAGDGYDFYPERRHLEAEFDAIWVTQAPHYPALLTDAVRDRLRRIIFFQRPLKGPKVGGCTFFDQEPRLLRAHPLFQERRLYEEVNQLEITKAGAPLRKLTLDQRDKIIIKLKSAKTASFSALAKLIKLADGESFNKTSETGTGLVGDVIAASFGDKKCFGARWAHFDAGTQWSIIEAVAEEQDSVRLCDWLMATHGVNAEQAEAIGRVRLTEGHGRLGETASQLILAELKKDVVTYDKAAEAALGKSHSDFRAGEKRDKLPYYGEILSREIAPGSFDPTDDEEPRWGKIGNPTVHIGLNQLRRLVNAIIKVHGRPDEIVVELTRDLKLGGKAKLENKNRVGANCRAAEARSRRLLESNQRDSGTNRALLQLWDDLNPDDPLDRRCPFCGQQIGQHELFNDETQIAHIIPYSRSFDDCAANKVIAHRSCKREKGNKTPWEAWGNTERWAIIADQMLRLPETKQWRFAPGAMERFEKEADFLARQLTDTHYLSRMMQTYLSSLYPERPMDRLPGEGVEGVYVIPGRMTEMLRRLWGLNELLPDHNYVENRHSGAPRNRLDHRHHAIDAAVVAVTDFDMLNRLAEAAGHAEDQNHDELFVDLPKPWETFREDLRTSLNRVVVSHKSDHGSKGKRPNGKYTTSARLHNDTAFGFTGFTSDSGLPIVVHRIPLRSLKPTDIADPSRIPDSALRRALQLATKGLSGKDVTNALVQFSKSDSVFKGIRHVRVREVLDVIAIRDAAGCAYKAYKGDANARFDVWRMPDGKWVSRWKDRHGRQKSGVVSMFEAHQSDAAERRPHPAAKRMLSLRQNDIVAVEPNGHDRKIMRVVKFSSRGEIVLAEHQEGGPLKARNATADDIDPFKYYYASASRLQEDKVRQVRIDELGCIFDPGPR

SEQ ID NO: 5651 - protein, 1298 aa, unidentified
  REGION 1..1298: note = Description of Unknown: Cas Enzyme sequence
MAKTLGLDLGTNSIGWAIIENEKNEILNSGVRIFPEGIEPDTMNKGDKEQSKNATRREARQSRRQYFRVRTRKIKLLDALINLKMCPLSAEELKQWKRYNKSEGKSSRQFPQTPDFINWLKQNPYELRARALKEDITLQELGRIFYHLIQRRGFLSNRKSKNDGKIFKGKKNMVGIDETKDQIQNSTLGNFLYSIYPKENKPYKTIKDKNGKELRVRARYTLRQMYIDEFNKIWEKQAKHLNLNNKKTEIKKVRFYTGTTNAKRNKDKIEYLQNKFGKEKVSIDKTTRKITTSEETPLKEFFGGEIWEEDGELRYRSQQSLLFYQRPLRSQKGLLSKCSLESRKFYDKKKGTWIVVGPTPCPLSHPDFELFRAYQFINNIEYGTKHKLNDKQRKTVLNLMNKNNSNFDFVNIPKELKLTNEHFNYDNKFKAPCNYTISKLKKLFKPDVWEKSKNDIWHCCYFYNDNDLLIKKLHKDFDLKEKDFTKIEKINLKDGPSNISLKAIRNILPFLVKGYQFSDATILGGVRNAFRKTVDKKQIDRWEYFASEHKKIEDAIENIIKEKGNKEGEAIGKIKDYLSNPKNGLGFNKNDKSFKKLYHHSQETEQIELRDKLQKVENLRNPIVQQGINELRRLINSLLEHYRKEDPEFKFDEIKVELARDLRSGKKARQDMSFRMNENNKKNNEARQKLTEYGLQHSRENIHKFLLFKEIEEKNGTVVCPYTNKTIGINDLLGSENKFQIEHIIPKSISLNDSFSNKTLCDAKFNGLKGNKTPYQFFLNNKDADLWHANSWEEIEQRAFKLLPYYKAKLFTSKNQELDVNGFIERQLNDTRYISKKAKEILSEICDKVRVMPGNLTSELRHLWGLNNALQPVKNINLENAQFDENKLKEHYLIVDPDDNAIDILPIYNKKPELKNNETTIIGKIKNNEFSSTLLNEKFETFDLADGNYWTIIKLSDSPVKTIKKFTNKPSITENEIILRGKIEKNKFSHDTFASKISVTEDDGYYWAKFDVTNIKFEEPKKKDRPQKTGKQILLFGEVKNGVFKSYIYEQNTELDDGKYWAIIDVDLNSISCLNVKNKIPTLDQNEILISGSVNNEGIFSSDIDAEHTFKTNLLRGKYYAIFKIIENPKNFALIKNKKPKLENGQKLVEGNVWVDGNTGEIKFDPKKNRDDHRHHAIDAITIALTKQSYLQKLSTYNANKEEKKRGNKYKKPTFEKPWENFFNDVKNATAEIIISHKQNNPVLTKINKTFFKNGKKYKSNGFAARGQLHEESIFGKRKAPKSEEAYHIRKSLDTLKT

SEQ ID NO: 5652 - protein, 1505 aa, unidentified
  REGION 1..1505: note = Description of Unknown: Cas Enzyme sequence
MAKTLGLDLGTNSIGWAVVEKENIFSEKNGEIQRDEKFTLFDKGVHIFQEGIKYEKGNEKSRAAERTKFRSARRLKFRRKLRKYETLKVLIHNKMCPLQLNELENWRMFKNSETGKYESFKNYPKNKEFIGWLRTDEERKYNPYYLRDLASRKIVSKLEMGRAFYHIAQRRGFLSNRLVNTDEGLIEQHEHFIKDIIKDANSKSKLNTDLNEYFKALDIIGKNNKELEPEEQKLKKLYNAFLKIFEVSESTIQKTKDDLIIRLERKENLGVVNKDIFDLSEKIKENGCITLGQYFYKLYESDRNNPNFKIRKHYTARIKHYLHEFDIICRKQKLNGIDLTEKDYGKRYSGVVKELYRAIFFQRPLKSQKGLVGKCSLEKNKTRCPISHPNFEEYRMLCFINNIKIKTPEDKKLSPLTTKEKEKIKPKFYRKSKEYFDFVDLKKTLGISSYFNFKDNTTVSSCPTSAALKNIFGDNWQDKLFNNYSDKVIRYKDKTKTKIIKEEIKSRNDVINDIWHVLFSFDSIEKLKIFALEKLNLDEETAIKFSQIKLKKEYASLSLKAINKIIPYLKQGLIYSHAVFMANIKNVVDENIWAKQENKDFIINGIADLIANHQIENRIYNVVNGLIKKCIDCDYYYSKEAIHLYTKDIEKNVKEIFGKNAWERKENKQKILSDTIRLFEQQFKKNSGKGKFITIKTINEKVNDFILGDNGNGEVFCTDTQRMQKLFHPSDIEIFKRPKRTNQGKLLLGSPAVSSIKNPMAMRTLHQLKKLINTLINNEIIDENTTIRIELARGLNDANRRKAIQRWQEERKEERYKYKIEIVELYKSEYNKKIEPTEDDILRYQLWKEQKHKEIYEATGNNIGICDIVGSDPKYDIEHTIPRSISNDNSQMNKTLCSKIFNRDTKKNKIPFELPNHNEILPRIEHWKEKYNHFNQLFEIRKRPKGIETKEQKDKRIQEKHYFKMKADYWEGKYNRFIMEEVPKSFKNSQLVDTGIITKYAMAYLKSVFGKVFSVKGKMVDVFRKAWGLHESYIDEQGRVFYEEKNRDTYIHHCVDAITIACMSKNKYDNISHAWYQEEIGKKNDARKAIENSKPWSTYSQDVKNIVNEVLVTHYTPYNVSKQSKKKVRKRGAIQYHLEFEKDKNGKRISKKDKKGNLIFKLDKKGQKIPIYQQGETVRNSLHLETYYGAINSINNDETNKNKKVVKAENIRYVTRDFIKNLSDSDLKKIVDKRIREIVIEARKKEKVFKDEIESIEKQIKQANKDEEKDLINERNRIKDLIKNDLYVIPPKKGKNKGTPIRKVRLFSKIKNPIHLKKHKDFSQSKKHDYKRYIYVSNEENIKVAVFRNESDGKFSYSDYPINPLELSKEKKHKESFNKTYKGKNFFCMLKKGDLVLFFEKHPDEININDYSEISKRLYKVIEIPTGGRIKFKLHNEARNDKKIKEDFIKQYGVNFEKTLVSGMKKFDLEKMYPKLNISPINFNFIPLNKGVYKISITGKIEKTK

SEQ ID NO: 5653 - protein, 1127 aa, unidentified
  REGION 1..1127: note = Description of Unknown: Cas Enzyme sequence
MAKTLGLDLGTNSIGWAVVDDEQNKILGSGVRIFPEGVKADTIGQGDKEESKNAARRNFRQARRQNFRTRLRRIKLLEILIKLGMCPLDIKNLKKWKNYDKKKGNAGRKFPDSTEFINWLRQNPYELRSKAILENISLEELGRIFYHLIQRRGFLSNRKGTAEGKIFTGKDNMTGIDETENQIKNTTLGHFLNTIKPAEKKSYQSITDENGKELRVRARYTLRDMYVEEFEKIWQRQASHLGLDKKTFPQKKVRFLKGSTNSKRNKKKIKQLINKYGNENVVIENNTITTIDEIELKELFGGKIWEEEGNIKFKSNESVLFYQRPLRSQKGLLAKCSLESRPFFDKKNNKWIETGPTPCPLSHPDYEEYRARQFINNIEYGRKQKLDINQAQQILDLNNKKDKAFNFELIPKTLKISYEKFNYDNDSKVVGNYTTAKLKPLFNDEIWNQHKEDIWHCFYFYEDNDKLIKKLQSDYGLKESDGEKIKKIKLKEGYSSISLKAIRNILPFLRKDFYCLENRNIKNSEAVFLGGVKNCFGKEKWENFKNFHDDIINDTLSILRENNKEGEAIEKIKKYLSDPENKYGFEINDSRFTHLYHHSQSVVKKEKTEKLSEVENLRNPIVQQGINELRRLVNLLIDEYSKETPDFKFDRINVEMGRNLKMGKKQRQEAGYRINENNKKNEAARQKLNEYGLRHSRENIQKYLLFEEIQQKNGTVICPYSGKTININDLLGTGNKFQIEHIIPRSVSLDDSFANKSICDAKFNALKGNKTPYEFYELKKDENLWNAKSWNEIEQRAYKLLPYKKAKRFTTKKKDWDKSEFIERQLNDTRYISKKAKEILSEICDDVRVLPGSLTSELRRLWGLNNVLQPLKTLNFNKENLDENKIEPNWLVSDNNKALGFYPILNKKPPIKENETTIIGFVKKGVFSSKYFKLKIETPELPDGEYWAKLKLAAKPNNMVKMYSDKPESTENEIILRGKIEKEKFINDTISKNIPAKKENAYYWAKFKITNSKFEEPEKGAQPKKKAYQIILFGEVEDGVFKSYIYESSCKEADGKYWAILDIDFGTAEYFQTKNKEPDSNENNIIIEGSINNEGRFSSEIDTEHIFQSGLSAGKYWAEFEIIEKTN

SEQ ID NO: 5654 - protein, 1103 aa, unidentified
  REGION 1..1103: note = Description of Unknown: Cas Enzyme sequence
MSGKPVEQLTFGFDIGIASVGWCVLGEKRIVDLGVRCFDSAETAKEGKSLNHDRRTARLTRRRLRRRAWRLIKLARLLKREGLIGCVQSIRQPAKESLWQLRVDGLDRKLSPEEWARVLYHLCKHRGFYWISRAEDKKAEEDSKGEGGKAKKGLQDTRRRKSEKNYRSAAEMVLKEFPDAQRNKRGEYSKALSRLLLAEELALLFEQQREYGNPYATPEFESRIAGCGDRKSGLFWEQNPALSGAGLLKMLGRCTFEKSEYRAPKASYTAERHVWLTKLVNLKIIVDGVTRRLQPEEVKAVLSLPYEYKSALTYKQLHSALVKKDLLPESFVFSGLTGKKDKNPFDQTLVAMPAWQAIRKALEKAGLNTEWRSITNNPELFDQIAWTLSVFKDGDEVERELRKLSLPGEEKMIEALSEISFDKFHNLSLKALRKIIPYMESGLRYDEACEKVGYHHSQLFKVGEGQHKYLPPFYSGRDKDGRMVFNDNENIPRNPVVLRSLNQARKVLNALVNRYGSPSALHIEMARDLSRPMDERRKIKKAQEEFKEKNDIVREKFVETFGFNPKAHQFEKYMFYEEQHCKCAYSLKPLDLDRVLREQGYAEVDHALPYSRSYDNSKNNKVLALISENRNKGNRTPYEYLTSFTGGENGDRWRNFVACVVGNKSYRLAKRSRLLRKNFGKDESQEFRERNLNDTRYICKFFKGYVERYLQLAEGSDSKRCVVLSGQLTAFLRARWGLVKERGGSDRHHALDAAVVAACSHSLVKRLSDYYSRRKELEQAREVIDAETGEVIDSELLSKLEQHFPQPWEYFREELLLRLNTDDPVLLKNEAERYGYKPEALENLRPLFVSRAPKRRSSGAAHKETVYSQPERLKGKRSVTKKVPLASLTLEDMDNLVDPDRNEKLYAAIRNRLEANGDKAFPADNPLHKPDRDGNPTGPVVRTVKVVINKLSGIPVRGGIAENATMLRVDVFRHKNDKKYHLVPVYVHHAVAKKLPNRAIVHSKDEDDWTLISEGNFDFCFSLYPNDLVKVSLKKEVHIGYYAGCDRATGAISLWAHDRNRIIGKDGLIRVGVKTAALCMEKFHVDTLGNIYPAPPETRRGLA

SEQ ID NO: 5655 - protein, 1456 aa, unidentified
  REGION 1..1456: note = Description of Unknown: Cas Enzyme sequence
MSKKILGLDLGTNSIGWALVNEAENSGEKSSIIQLGVRVNPLTVDEQQNFEKGKSITTNADRTLRRSMRRNLQRYKLRRENLIEILKEHDFITDETFLSENGNRTTFETYRLRAKAATEEITLGQFARVLLAINKKRGYKSSRKAKGQDEGQLIDGMEIAKKMYDENLTVGQFCLQLLKNGKKRLPDFYRSDLQAEFDKIWTKQKEFYPEILTNELKEELKGKKREAVWAICEKHFVWKEKSVEWDNDEGKSTEIEKEHKLVGIKRQGKKEEQNKENLQWRVRGLSEKLSLEQLVIVLQDISTKINASSGYLGAISDRSKELFFNKIKKADGNDRAQTVGEYQMAVLDKNPNASLKNMVFYRQDYLDEFNTLWETQSKFHAELTDELKHEIRDVVIFYQRRLKSQKGLISFCEFESRETEVEIDGKKKTKKVGSRVIPRSSPLFQEFKIWQTLNNVEVFGKGKKSKKQKGASLFDEIEDPLEYGGRRELYQEEKELLAAELSVKKELKKTDVLKLFFDNDKELDLNFTVIQGNITQAALLGAYGKIIEESGHYVDVEKKPAKEILKSIKEIFNNLGYNSDILHFDSDKELDKQPMYQLWHLLYSFEGDNSNTGNEKLINKIAEQFGFDKNSASILAGVAFQDDYGSLSAKAIRKILPHLKEGFSYGGRKDRPNEPSACEMAGYRHSKSSLTKEEIENKILKDRLEILTKNSLRNPVVEKILNQMVNVVNGIIDVYGKPDEIRIELARELKKNAKEREELTKSITDTTKLHEEYRKVLSQPPFNLPYASRNDIIRYKLYKELEKNGYKTLYSNTYISPAAVFSGDFDIEHIIPQSRLFDDSFSNKTLETRDVNLKKGNSTAYDFVNSEYGKNGLDEYLNRIESFYKQGIVSRAKYNKLKMQEKDISQGFIDRDIRDTQYIAKYAKTMLGDLVKFVVSTTGSITDRLRNDWQLVDVMKELNWDKYDTLGLTYYEENKEGKKLKRIKDWTKRNDHRHHAMDALTVAFTKHSIIQYLNNLNARSDKSSSVYGIEQNELYRNDKGKLLFKPPFNLNEFRAEARKHLENTLISIKAKNKVVTQNINSTGKKGSKNRKIQQTPRGQLHNETIYGSQKQYAVKEETINAKFDEAKILTVSKLIYREALLKRLRENGNDPNKAFAGKNSLAKKPLYIDEMRNIKVPEKVKTVSFETVYTIRKPIDKDLSVDKVVDAKIKEILKKRLNEYGNDPKKAFSNLDENPIWLNEEKEISIKRVTISGISNAEALHDKRDKRGNYILDDNGNKQPVDFVNTGNNHHVAVYRAPVLDKEGKPVFDENNNPKYELQEKVVSFYEAVTRANTGSPTIDKEYKRDEGWEFLFSMKQNEYFVFPNEKTGFDPKEIDLMNPDNYCLISPNLFRVQKIASKNYMFRHHLETKVSFETKEMEKQLRGIAWELYQSTEKLKNIIKVRVNHIGQIVKIGEY

SEQ ID NO: 5656 - protein, 1707 aa, unidentified
  REGION 1..1707: note = Description of Unknown: Cas Enzyme sequence
MKKILGLDLGTNSIGWALVEIDHEKGIVRIIGLGSRILTMDAGEIATFNSGGKLPSTAAQRTDKRSPRRLNERFLIRRDRLHCVLNLLQCLPEHYKLSIEFENEQGKRSGKFKKGMEEKFAYIKDENGKSHFLFMSSYKEMESEFERIHPELFYKRNGKQTKIPYDWTLYYLRKKALQNKNNKLTKEELAWITLSFNQKRGYEKVIGQDEKEQREGELRETFTGKVKDVTKIEGKDEYEIILVDYNDENRELYRYFEESKIQITLKNDLKEVEIVSKYDEDGNINNTTIEYIINEIKENLLVVDIKNTNKKNKENFIFEVELETGWIKEQQSKFTPKWKDARRDFIIKTKYDLKGQIKGRSINIPKEEDWTLMKLKTETSIASFNTKNGTIGVAPFIYYNLLQNPNQKIKNGLVTVIERKFYEEELEAIYNSQEKYHPELKNRDLYKQAIELLYPNNENHRKVLSNLEFKELIGADILFYQRDLKSKKSLISDCEYETENHVFIDTKTGREYKRPLKAIHKSNPLYQEFRLWQFIKRLKIYKLEETVNGEILLNQDVSPQLLTFKIKEELFDFLNNKENITQTQLLKHLGKLHNLTISSSNYKWNFPIYNDEDKKVEHKEVCNPTRYNFILRTKRIKGFDWKKFLSSENEYLLWHLFYSVKKKDEFIKGLSSLIDKLLQKCDLSLVYKTDLVKNFSSFGGYANNYGTYSEKAIKKLLPFMRIGRYWNLDDVENILTARTTEVEEKAEKMLDKVIEKENICGEITDFQGLWLSSACYLAYGRYSEVGDVQFWHSPYDIENYIQNKFKQHSLNNPVVEKILRETLHVVKDIWMYYGEKVGEDELNRPMYKKLFDEIHIELGREMKKNNKQKERADKRNKENRKTNERIIELLKELKCEYGNIQEKSPFQQAKLKLLEEDLLSSIEYDKDSKVYTNANNNYPPFQITKKEIKEIVSQDVSKIKKSDIERYRLWLDQRYQSPYTGKMISLSDLFDREKYEIEHIFPQERVTLNALSNKVICETEVNKAKKAYTAYEFILMAKSKPVFCTAHNGEVNILSADAYEKLVKRNFTDKKKQEILLSKNIPDEFSNSQGSNSQYIAKMAMKLMSNIVREKDEDTFRSKHVLATNGTITSILKQHWQLNETWNEIIAPRYIRLNELTKSNLFGDYQLINGHKVFINNNQISQQINKNFDSKRIDHRHHALDALIIALTTENHVNYLNNIFSQDDANKLQTRKAIKFQLTNSKKGFNDEKEWYFLPPAQTKNSEGIIKYKYEYKNEQNDVFKDIAKIALENTIATFKQKDRIIRQRWNKYLHDNEVKKEDNLKNKEKYAVRQSLHKETFYGKVNLSYQTKIISLKDALENNYDIVETCFAKQITHMRTQMPIKDIVATLSNPSVQVYEKYVASRFGNELESFVNISSDKIMGVIKSITDTGIQIILLNHLSETLNRRKTEIEEDSTLEDKNKLLENLEKNLPSYAFSYDGIKTMNAAIAMQKNSLTSNGKPHKPIYKVRLSDAMGTKFQLSEEGQKSTKYVVTDGDSNAFCGVYENPKKERKFFIPTLRESIESFKQGFSPCPSNYPNKPEYKLLFILRPKDLVYVPSKEEITVDINHFTPEQYNRIYKFRDANENEKGGIQVNFMPANFATMIYKQSKSDEKIMLNSGKELKGEITLTSDKDKTQNLLEDTNVQIRSVCIKLNIDRLGNIKPLTKFS

SEQ ID NO: 5657 - protein, 1534 aa, unidentified
  REGION 1..1534: note = Description of Unknown: Cas Enzyme sequence
VSKKILGLDLGTNSIGWALVEQDFEAKSGKILGLGCRIIPMSQEIIGNFDKGNSVSQTAERTDYRGVRRLRERCLLRRERLHRVLNILGFLPEHYATQIDFEKRLGQFVDDSEPKLPWKKRDDNGYEFIFQNSFDKMLADFAQNQPQLVSNDKKVPYDWTIYYLRKKALQQKIEKEELAWIILHFNQKRGYYQLRGEEEEENPNKSVEFHSLKIVDVVADEQPNSKGDIWYSLHLENGWIYRRSSKTPLLDWKDKVRDFIVTADLNDDGTVKTDKEGTEKRSFRAPSEDDWTLLKKKTEADIDKSQKTVGAYIYETLLQKPTQKIRGKLVRTIERKFYKEELVAILEKQIELQPDLFTEDLYNDCVRELYRNNEAHQIVLSKKDFVHLFVNDIIFYQRPLRSQKSSIGNCPLESRPLKNENDEPQLDADGKQIVKIFKAAPKSNPYYQEFRVWQWLYNLKIIQNDNEKDVTAEFLKDSDDWASLFEFLMQQKEVNHKNILQYFLTPILEEKYPNAKANALKKELEKEIAKYRWNYVFDDSKEKLDEKSKAYPCNETGYEIRKRLARVENIPTDFLTPEIEQKLWHIIYSVTDKIEFEKALKKFACKHSLDEVSFVENFKKFPPFKSEYGSFSEKALKKLLPLMRSGKYWNWDAIDADTKIRIEKIISGEYDEKIKERVREKAINLKCETDFQGLQLWLAQYIVYDRHSEAGDADKWDSVDDLEKYLVDFKQHSLRNPIVEQVIMETLRVVKDIWKYYGKGAKNFFNEIHVELGREMKNTAEDRKKITNIVSENENTNLRIKALLAELKNDGNVENVRPYSPVQQEILKIYEDGILNSDIDIPDDILKISKTAQPTQSELLRYKLWLEQKYCSPYTGQMIPLGRLFTEEYQIEHIIPQARYFDDSFNNKVICEAAVNQLKGKQLGFEFIKNHHGQTVEIGFGKSPVKIFEESSYKEFVQKNYAKNRGKRIKLLMEDIPEKMIERQLNDTRYISKFISSVLSNIVREEKDDDGVNSKNVLPGNGKITTALKQDWGLNDIWNDLILPRFERMNQLSGNTAFTAWNEQHQKFLPTVPLELSKGFQKKRIDHRHHAMDALVIACATRDHINLLNNQSAKSEVSRYDLQNKLRHKEKKSWIDSKENRQVEGYVFKEFVKPWNSFTQDVKTNLENIIISFKQNLRVINKATNRHEKWIEKNGRKIKGLVQQEGINWAIRKPLHKETVFAKISLQKTKKVRLSEALKNWEMLADKVLKQEIKRLIAQYGGVYKDDVIHKYFKDRKYLFNDVDVSKVEIYYFETDNAAVRKSLDTSFTEKTIKESITDSGIQKVLLNHLRAKNNKPELAFSPEGIEEMNKNIVQLNDGKFHQPIYKVRVYEPVGNKFQIGNIGNKRNKYVEAAKGTNLFFAIYVDENGNRSYETVPLNVVIERLKQGLKEVPDTNEKGHSLLFHLSPNDLVYVPTEEDANQVHPNFKDLSRIYKIVSFTGNRLYAVPYYVAKSIVDKVEYTQLNKVESEVETGLSIKHRCIKINVDRLGKNSC

SEQ ID NO: 5658 - protein, 1196 aa, unidentified
  REGION 1..1196: note = Description of Unknown: Cas Enzyme sequence
MKKYLGIDIGTESIGWALTDENYGLLSYKKHPMWGVHLFDPAENCDIRRKNRGVRRASRRRKWRISILQELFDAEITKVDENFFARIKYYQEGLFTEGDKAYFKKFPTIHHLIKYLQGANAKPDIRWVYLACSYYMKHRGHFYSNIDAEAGFDEILNLKDTFDDLLEDVKNRFDIGIEYENISDVEDALRQDGKNKTKSALKQILSVNGADGDDLLKRFIELISNSKVNLADLFPNNECDEKINIKDEDFDGEKIEKIRMQLGDDFELLEKAKRVADWMVLRLILKDETSINAQRLALYETVKADRKLRGAALTEFMKARHKENRVIPYQLQWADFRIVLDKISRFYPELDTEKIGLLFKHKIPYYVGPLKKGEFGWLEKNVDEKIYPWNFEKVIDIEKTHEAFIRRMTAKCTYLAGEDVLARESLLYAKFIVLNQLNTITIDGNRIDNELKKRLFNAMYIEQNGTVSISKIKKWLGKENLVNNNTVIRGVDTILEGNLKAYHNFKIFLDEGKLGQPEAEEIINRITVFGSEKSELTKWMGQAFSNLSQDDIKRILRFSYAKYGRFSRKLLEGVLCDEMSIIQMMWETNNNFMELLSDKFGYKEKIDKINQEKINPELDLNEWLDEYYVSNRVKRSIFRSIDIIDELIELKGKPDKIFIEMARGEEDKKRTASRKKELENLLAGNIELLSELSGYEESDLRQKKLFLYFSQKGRCMYTGKKISLTSLMSSNWDIDHIWPRAYVKDDSIRKNLVLVDKTANGEKGDLYPVFPKWQSERRVFWEELKSQGLISDEKYARLIRSADFSEDEKVNFINRQLVETRQTTKILAQLLKDKYDIRPIYVKAGLVTEFRHIYDYHKCREINDYHHAKDAYLNIVCGNVHDLVFTNVRALMRSASKFSVKPEVLYSKRDWLKNNWQKNTHDIIRHTMQSNRIKYTEFAYEKKGDLWGKTLGRVPRKLEKSPKSDKDKFELSTRFFALVSYQKKNKEQTRLVPIYNYRFEEFVKDKTHYFKEIYPKLNEKFSGDEVEFIRIVKIKSIVMKDGVRYRVTGNTGMSHTYQFILANEQEEYLRKLCKAIEKNDYRGLTAEDNMCLFKAFKNKLEKSIYSQISSLRLQLQWFDEEKFKMLKIDQQAAYLKNALNLFTANKILANLTLIDEKASKTAGQMIMPTKSDFDYVIDQSPTGFYEKKYKIKRGDT

SEQ ID NO: 5659 - protein, 1488 aa, unidentified
  REGION 1..1488: note = Description of Unknown: Cas Enzyme sequence
MAKILGIDSGTNSIGWVIREPDKDFREEYYKSFQPDKYEKIKNEVSILDNEIVDNGVLIFQKGVGDGKSGEFSLAAERRKNRGKRRLYNAKRYRKWELLKVLIENGMCPLTMEELRLWSIGHWQQVEIKIVDKETGEVTKGKRWKNKGRIYPINNYNFQQWLAFDPSIFGHKGISDNGKPIRKNPYDLRCELIEKEEPNEYLKKLKIGRALYHLIQRRGFKSSRKSGQSSYAKNEDIEKIKTENPDFQIAMLAKEKLDRGERFRASGVIQRGYFEDEFRKICEVQKLSKELTEKLHKAIYFVRPLRSQKGLVGNCTLEKGKPRIPISHPKFEEFRALSFINNIKWREKDQKEFVAIPMYLKKKILEELFFKKNNRGKVNKDCDFKFDEIIKKYSQNGLYEFNYKNLPNVSTCPIIAALMNVFDNEWTEKFISEEDTYGINWDGLKIKYKTQDYKSLGRKLKRKIKNGKTTYIAAELQKEKELKVDEIWHLLFDYIQTKDKQEDLEKFCKEVFGFDDNKTKSFSEIDITQGYGSLSYKAICKILPFLQNGFIYSEAVLFANLKKVLGEKFEENKEQAKKIIAKAIIDVGKTKETLNIVNGLIKKFFGENEFPKPVGLANETVIEQYKNGVNTYLPYYFGNNDWNKKTDSEKANLENTVWQLYQKFLNGEQTKEEKSTEKAIIDFYKLPRLDEAIKQCLKDKFNVSDNVLKHLYHPSDIEMYPISKTEKEVTINGYKTTVKLLESPQPPSKGWKNPMAMRTLHELRHLLNYLLKTGKIDKDTKIVVEMARELNDANKRWAIQTYQKYREEENIEFAKAIVGVVKEKYPNLNENDIENVNKVRLWWEQVENNEEVYKQIKTLKEDVEKYRLWKEQECICIYTGKMINITNLFDGTQTQIMHTFPASISFDSSLANLTVGDAYYNNEIQGNKIPTQLPNYSQNVIVNGKTYTAIEPRLKKWKDKVERLKKLIDENKKRTKKTKDPEIKKGLIQRRHLLQFDYDYWNKKLETFTLTEIPAKWKNSQLVDTQIISKYARAYLKTVFEKVDVQKGSVTDIFKKIYQIKGDEQKDRSKHSHHAIDAAILTLIPGSAKRDAILEEYFKAEENHRKFHTKPYEEYKTSHLLDIEKNIGITHIEHDNTITNTKKKVRKRGYVIYLKDKNTKQHILDENGKPIPMILQGDTIRGQINEESFLGAINPPLYENNRVIKENGKWKTRKDKNNNPEIWIVKRLPIDSVNFEKDIIIDEKLKEYLKQQILEGTAILELRDFQNNIIRHIRCRVKTGRGFQTREKTIELKKHSHQSNKIYKQNALSKTADNYLCLFYQKEINNGEEISEYQRQARVISLFHFSDLGFNSLKDIWNDNDWNIYKNENIEIPLFKIIKRGTKVLFFDKDKKELNQLTDIQIKRRMYIIYKFNESLVNQKYYYYVYFKNQIDARPNPEIDKLCEDNFNPQKYQAGLKLKPENMNCLFEGIDFEIKPDGMIIFKENVHN

SEQ ID NO: 5660 - protein, 1399 aa, unidentified
  REGION 1..1399: note = Description of Unknown: Cas Enzyme sequence
EQGQAQTKNANRRIARGTRKLNKRYKQRRNKLIYILQQLDMLPEQIKLSEPFTNPLKLDRASILPIDKKQKQYSALDLLELRVKALSEQISPKELGKIIYLFNQLRGYSGGGNEPDKEDTDDENTDNEEKKKNESYVAFGKMISISEPEIITYKGKELKKYKAKIETEDGVLDGETFLDILKEGESLELLVNIRTTKKGEETITFKLPNKTNWRKKMENLEKELTELSQKEGREIYLSEYFLSILKENKWAKIRNNVILRSRYQSEFDAIWKEQSKHYPFLYNCTQEKLSEILNFIFPGTKDSQKKYRQTGLEKGLCHIIRNQVIYYQRELKDQSDLISDCRFEKGEKAVSKSHPIFQEYKIWEQINKLTINTKIENGTNRKGEIRYKYVDKPIPTTLKEWIFDELQEKKEMSFSVILNKLKKEHNLKDGIDFLNGMNPKAKVRGNETKLILKKILGNELWEKLGMTDIARQIELWNILYNAKGNEYDIDSKRTSKVFNFLKNYYDEIQNIEQTAIQISKTKFSRNYAALSLTATEKILPLVRCGKYFDDKFSETLNEKIIYLLNENVSDPFEKAVQEYLENNLDVLVYGGIMNAYATILAYGKHTAKEYAENERIDNYQKITRLKQGELRNPLVEQLINETLMVVKDIWKNEDYGKPDEIRIELARELKNNAERRSKICKSNSDNQKANDEVKNLLIELKQEVTLANIEKYKLWSSQENFEEKFVKQYKDPSKSEIEKMRLWREQGHVSPYTGQPIPLSSLFNKGLYDKDHIIPQSRYFDDSFANKIIAETAVNREKSNKTAMEYFEAGSSIPSVFSKEKFVNHVNTYFRDAKRKNLLATKVPEDPVARQMKETQYISVRVKEELNKIVGNDNVKTTTGGVTDYLRNQWGLTDKFKQLLKLRYENVQPKLAKSEYKEYTDSVEKKMKEYEKLNIPFADFVLSEENFIQSFNQNFLQKKNNKLIIKGWSKRIDHRHHAIDALTIACTEPAHIKRLNDLNKELQTWLDNHKKEILPDFEGSPAELLDEILNLDEQKQKAIFTQIEKFKSIDMPWIGFPEDAEKAIQEIVVSQKPKDKLLIQPDSNGKLQIKIRGQLHEGTLYGKSQGVETYRIPLLKLAGKKFATEKTIDKIANEYLKAEIKQHLKDFENKKDEAFSAEGILVLNKKIEEKKRKSEWKRKGKKKKIGETAPHTPITSIKIFYRDPQKIKTKKGQEETEDALQKMDRSKAFNDSLYVATGGNYLFAVMEKDDKRIFDLISFYDAVNLLKDEFNKATNKKEFNKESVFKNYFEEKNKAKLKFTLKQGDPVYMPPNDEEVIIDKDSSLYESFWKDKTERSKNIHYVTKYSGNRIYFIKHNIANPILNKQEFGSQNAYEKVGDLSIKEHCIKLKIDRLGNIIKS

SEQ ID NO: 5661 - protein, 1155 aa, unidentified
  REGION 1..1155: note = Description of Unknown: Cas Enzyme sequence
MMPDENLKSLPKMQLWELRSKAVTENISKQELGRLLLWLNQKRGYKSSRSDANLDKKDTEYVVAVKSRFEKIKDLNFTIGQFFCNELKKDEYFRVKENIFPREAYVEEFDKICDRQKAHLNLTDELIGKIRNEIIYYQRPLKSQKGLVSVCEFEGFWTKNKEEKELFVGPKVAPKSSPLFQIAKIWENVNNIKLSSKRGETIELTIEEKRKVFEHLDNNEKLTATDLFKILGKNRKDFTVTKQLEKGIQGNITKNAIAKILDENEAYKKLLNLDLNIVETTDFGYLYSKKTGEVLGEKHLKYIDSKVENEPFYQLWHTIYSINDTQGCSNALQKRFAIDAETAEKLAAIDFSKFAFGNKSAKTIRKILPYLMEGDMYSEAMSYAGYDHSNSLTNDENLQRKLLDKLKPIEKNSLRQPIVEKILNQMINVVNAIIEKYGKPDEIRIELARELKQSKEERNEDDRRNNKRQRENEVIATRLAEYGLRATRNNIIKWRLFEEIDNQDKKLNAICIYCGQPISLTEAIKGAEVDIEHIIPKSKLFDDSQSNKTLAHRRCNATKSDMTAYDFMKTKSQQEFEAYVERVNTLFSNKIINKAKRDKLLMSEDDIPDNFIDRQLRESQYIAKKSREILQTICYNVWSTSGTVTAELRHLWGWDDVTMNLQMPKYKELGLTEIVEWESEHGKNKHSKEVIKDWTKRDDHRHHAIDALTIACTKQGFIQRFNTLSANKTREDMQQEIEQRSEQYKEKLSLLEKYIVSQTPLSVSEVENAVSQILISFKSGKKVAVKGTRKTGKRGNKKVVQTDIIVPRGSLSEESVYGKIKTIEKNKPVKYLFENSHLIFKPYIKSLVEKRLAKYENDVKKALTSLKKEPIYLDKEKSKLLEYATCFKDEFVIKYTVDTNFNKTDKVVDEQVKHILQTRLQKFGNKPKEAFKDVQRDEKSLKWYEDEGLERPIHSVRCFTGLSAVVPVKKDEQGNEIGFVKPGNNHHIAVYYDKDGNKSENVCTFWHAVERKKYGIPVVIKNTNEIWDKILEQSEDTYPQSFLEQLPPANLELALSMQQNEMFILGLTNDEIKDAIEKGDYKLISERLYRVQKMSFKPSSGQIDIMFRHHLETKLVDDANSKISKRYLNVQSLKALFALNPFKVKIDRLGNIKPL

SEQ ID NO: 5662 - protein, 1090 aa, unidentified
  REGION 1..1090: note = Description of Unknown: Cas Enzyme sequence
MWRLSLDMGTNSIGWTVLELTKPKSDKETPKVSKIIDMGVRVFPDGREAKTGTPLNEARRNARQMRRQRDRKIRRKRAMLNFLINNKLMPKEQDEQLAVARLDPYQLRADALERKLEPFELGRIMMQFSIRRGFKSGRKLQAESTAEQEGMLGGIQSLESELKGLTLGQWLCKQRENGNSVRFSPKIEKSKIIYSFYPSREMYETEFAAIREKQEKIYKKINWDRLHWLIFFQRPLKRPERGRCQFYTEEDRGYKAFASAHRFRILQDINNLKYYNDENRLEEIPPELKLKLFEALNTQKSLSFDRIRKLLGENYTGSFNLEDSKRDKLKGNEISVDFRKPEFFGPTWDKLDIEKQDEIIEKLIIEDEENVVRDFLQTFNLTEEQIQKISGYNFPTGTMMLCSRFMIDCSEIMLKDWIRYDEAVKRMDLHHSKKEQREIQRSLPYYGKVLIGQVSGAKGENYEGNDEEKYGYIANPTVHIALNQLRKLVNALIRRFGNPDQIIMEVTRELKWSKTKKEEVFREQAKNQKDNERVKKELSDLGLLQISNEYVKKYKLWEELALEGIARRCPYCGKTISAKQLMTGAVEIEHILPYSRTLLNSRDNLTVAHRECNQVKKNQSPFEAFGNSPKGFDWSRIMELTAKLPFNKRRKFYPDAMVRFHEDDEDAFLKRQLTDTAYLARASKDYLSAVCDSNAIWVSPGRLTAMLRGIWGFNTLLNRGHDTWFKNRSDHRHHALDALVIGLCDRGIIAEAARINSGRGYDDIDAPPCPIQRQDIEKHLKSIIVSYKPDHGKEGKLYAETALAKHSYLEQINPTDLEEKEISRIVPKNIQNDIALIVQKEGFRKAKVLIQKKYKFLNVFKDKWVTRAPLASLSERDLPNISDPVIREEVLKYVKKHPIKSGEKLQDVLTRFSQVKHIYSIRYFPKDQVPVSIDSCENKAYMPNDYYRVDVWRIPQQKGKYKYEGVFVSRPDAMRQRSYGEDVGCLKKPHPAAKLIMSLYKNDVLELSKETVREFCRIAGFSTTQNKIDIRPLYASDTIASWKKDTNVYLSSAFWPMDIEGQYFKSINALFNEYEIKLLKITVDGRLLYR

SEQ ID NO: 5663 - protein, 1168 aa, unidentified
  REGION 1..1168: note = Description of Unknown: Cas Enzyme sequence
MKREWYLGLDIGSASVGFAATDTQYNILTKGGKLQCGARLFKEAQDASTRRGFRSSRRRFARRKVRIDLLQSLFNSHIAEKDASFFIRLNESNRHDEDKTVSWKYPLFNDPNFTDRDYYKNFPTIYHLRKHLLENEVDDIRLLYLACHHLIKYRGHFLFSRFDTGTDNSGYSEILAFFGVTSIESLSENKSIAGALKSNKIDLAKTLAHYFDDDKDALNEFKESLAEIKDELKEYKFSSEQFEECHGKASEILNESQIEYILMLKNLYDRIRLDGILGKHKTIADAMVARYDEHKADLELLKAFIKEHLPSEYDSIFRENGVYSNYVGSNMTHKTKSKSHHQFCKMPITTITHDEFLAAIAKIIDKASVQEGYAELKAKIDNKTLCKIHNTQDNSIYPHQLQEMELFAILQKQSHFDLDIDKIRKLLTFRIPYYVGVLSEKHSDRFAWIVKNEGFEGRRVLPWNFDEVVDTASSGERFITRMTSKCTYLRSEDVIPKQSLLYQKYMLLNDLNNLKINGNRISQELKLFLLGGICQTEMSLTKAKIKKFLIDHSKIAKSDTVGKENENDTAFNSSLSSLIRFRDILGDSFDLQMCEKIIMWHTVFGDEKELVEQRIKEEYGTQLSDETIEKLSKLTFNGWGRFSEKFLNGITTTDKTTGEPALTIMWLLENAVTKNNTAPNLNEILNSDSYTPKFVDTVVLENPCGDVTLDYDGLVADLYCSPIVKRSIWQAILICKELTKINGCPPTKVFIEVTRGEDKNKSGKKTSSRRKQIEELLNKAVETGQDLTQLMSDFNSKTDEREFRSDRLYLYFTQLGKCMYCGKSIDVNALPYKNYDIDHIYPQSKIKDDSLTNRVLVCRNCNINKKNIYPIVDSVRSKMDSFWKCLLAKKLINSKKHDRLKATQPLTDEQINGFINRQLVSTNQAVKETANVLGLLFDDDTKIVYSKARNVSEFRHNYELIKCREINNLHHAHDAYLNIVVGNVWDSVYGQYWKTNFVFNEDRAIDKLFQTDRDDIWQVSFIQKIKDYLLLGNRNKKYLDKFPVTTRPYEVKGAFYDQTIHPAGKGQFELKAGLSTDKYGGYKSGVTAYNCVIEYDEKISKAQLEKNIVAKRLLGFFSVPVRYAHLKGDDLFEAIVELNALKNKNPILVISKLRMYNIFEIDGIRYYM

SEQ ID NO: 5664 - protein, 1244 aa, unidentified
  REGION 1..1244: note = Description of Unknown: Cas Enzyme sequence
MKRILGLDLGTNSIGWALVAHDFDEKIGAILGMGSRIIPMNQEVIGNFDKGNSVSQTAERTGYRGIRRLRERHLLRRERLHRVLNVLGFLPAHYTTQIDFEMRLGQFFDETEPKIAWEEIWNKQKNKNDYEFVFQKSFIEMVEDFKKKHPELFYKKSNGEETKIPYDWTIYYLRQKALTEKIEKEELAWIILNFNQKRGYYQLRGEEEEENPNKLVAFHSLKIVNVVADEKPNSKGDTWYSLHLENGWTYRRSSKTPLFDWKDKTKDFIVTTDLNDDGTVKTDKEGNERRSFRAPSEDDWTLLKKKTEADIDKSQKTVGTYIYESLLQNPTQKIRGKLVRTIERKFYKTELEQILKKQIELQPELFTEDLYNDCVRELYKNNEAHQTVLSKRNCFVHLFVNDIIFYQRPLKSQKSAIGNCSLEFRKYKDKEGNEIIDYLQAIPKSNPLYQEFRLWQWLFNLKIYRKDNDADVTAQFFTSNDDKTKLFDFLNNRKEIDQKALLKYFRLTEKTHRWNYVEDKVYPCNETGTQINTRLAKVENLPAGFLTPEVEQRLWHIIYSVTDKNEFEKALKTFAEKYHLDAVSFVENFKKFPPFKSEYGSFSEKAIKKLLPLMRLGKFWRWERIDAKTKERIEKIISGEYDAEIKNRVREKAIKLTGENDFQGLQLWLAQYIVYDRHSEASIADKWKTVADLEKYMEEFKQHSLRNPIVEQVIMETLRVVRDIWKKHGDFSEIHVELGREMKNTADERKRLSSSVTENENTNLRIKALIMELKESSDVENVRPYSPIQQEILKLYEEYALRNEEKYAGIDATTGKDKFIPDPIPEDILKISKTAQPSKAELQRYKLWLEQKYRSPYTGQMIPLCKLFTEEYQIEHIIPKARYFDDSLSNKVICESAVNQLKDRQLGLEFIKKHHGEIVEAGFGKHVKLFEEDGYQEFVNEHYAKNRSKRAKLLLEDIPEKMIERQLNDTRYISKFISSVLSNIVRDETKDDGVNSKNVLPGNGKITATLKQDWGLNDVWNDLILPRFERMNALTDSNVFTAWNEQHQKFLPTVPLELSKGFQKKRIDHRHHAMDALVIACATCDHINLLNNQSAKSETSRYDLQNKLRNKEKETYINRQTNKQITRDVFKEFEKPWDNFTVEARNELGKIVVSFKQNVRVINKTTNKYQAYANSKKTVKSQGKGDSWAIRKPLHKDTVYAKVSLRKIKKVRLSEALKDWKMIVDKEFKNEIKRIIAQYGKFDA

SEQ ID NO: 5665 - protein, 990 aa, unidentified
  REGION 1..990: note = Description of Unknown: Cas Enzyme sequence
MKVFGFDLGIASIGWAAIEMNEKPIKDGLPMTGKILGCGVRCFDEAKSAADRRMARCARRRLRHRAQRMKNIRALLREYKLINMLEPDGKRVKTNDLYQPMTPRGSNVWRLRAKTAFERILTPEQAGRVLYHLAKHRGYDDITWPIKEKIKSDKNQDSKNKDDEKAIAAISDNKIRLSAARATNPTITMAQIIYSQKDTSGRMTNHVHHKHLNSGKAIKNDAPTYKNSIPRTEIKFEAEQIFASQQARGSIIFTDELFNKWYDIAFHQLKYNESKSPLYKSVESMVGTCIFEKGRPCAPKESPTAEKFVALTRINNLRFIGRDELNENERAQLFELLQNRASGLTYTQLRKELKLSDDILFAGLLYGKMKKNKDGEEESIDPESDKFYEMKGMAKLKSAFGGKNAKMPDDKTLDRIMTVVATKKSPEKIINALKNIEIPDEIKENLAQMSSSKFVNLSLAALYNIVPKMAVGMTYNDACEKCNYDFKKSGDSFIDEKDDVGADFLKRIDMKKLGSRITSPVVKRTLSQFRKVYNAMIPVYGVPDKINIEVGREMKLSEEERNKRRIEQSKNRKANLDSGGLRIKLLNELTPPRCIYCGKKLYAENLDYYQVDHILPFSRSWDNSQSNKVLCCNECNQNKGNRTPWEWKQGADWNEFESRVNSLVLDKRKKANLLNKTFTSTDEFMNRNACDNSTISKYVEKYLKDGTNVKKIQTRSGGITAYLRRQWGLVKNRDDSDRHHAQDAVVIACSTQEMVSFLNWWSGLAGKEALDNRKVFAAPWDGFWNEVQAKIFKNDDFIVSRPYRAKASGPLHLDTIVKKTEEIKDDVLQIRKGIAKGKGDRFRFDIFKKDGKYAAAVIYPSDLIHTEKDFIPNGYSKDDFIMTLHKDDYIRITTDKTGTQEGYIAAFTTSNSFELYDKVNRRSFSIPDASVVVPDDVLLIDGKEWKVIGWNEDKKQIELQNDKDSKFIDGCLQISAAEKRKLDADENAKI

SEQ ID NO: 5666 - protein, 1019 aa, unidentified
  REGION 1..1019: note = Description of Unknown: Cas Enzyme sequence
TRRAIKLHRLLMNHGFLPADCDLTSSESRDASFKKLDRELTERFISPENRVLAHLLPYHLRTKTLDEKLPPHAFGRAIYHLAQRRGFLSNRKAVTSEDVEKEEGVVKAGIHSLEQAMEEAGARTLGEYFCTLDPEESRIRQRWTARSMYEDEFEKIWTAQAKFHKKTMTDELKEAIHRAIFFQRPLKSQKDKIGKCEIFPEKRLRRAPKACLEFQTFRCWQKILDLEYWLDDGVPQQLTRDQQDALAEMLETAKEISFAQVKKLLGFKANAKVSFNLEAGGNTKLPGNSTYARLSKIIPDRWQEMSADERASLISEILQFEREDALAKRLMKVFGFSVTEAEALAAVPLESGYGNFSKYAMKRILEKMLETRQRLNAVLDQYFEVKKANTEPTDFLPPLEKAVGAVRNPVVTRSLTEVRKVVNAIIRRYGKPEFIRIEMARDMKKSRKQREADSADMRRREKKRDDAKTRIIKEMGIQEPKGGDILKVLLAEECNWTCPFTGKTITMRNLLGASPEFDIEHILPFSRSLDNSFINKTLCHVHENRHVKKGRTPYEAYLADEQKYHEILTRVKNFQSEGKSKFPNPKLRRFMMDSIPEDFSSRMLNDTRYICRLATDYLGTLFGGQIEISDEDADAQGTRRIHVCTGTATAWLRDEWDLNAILNDGGDEKTRTDHRHHAVDAVAIAFCTPTIVRYFASSAELAERNNDRRRFVKDMIPTPRDDFFKTVNAAIQRIHVSYRSSHKVSGALHEETNYGKPQTVFDEKTGKPAEVRHLRKPLENMSEGEIASIVDPTVRQLAQEKLAAFGLPFAKGIKLFADPQNLPYRMVPAPDGSVRYVPIRKARIRKTLSVREIGKNASTRYIATGGNQHMEVVASFDTKGNEKWEGIIVTRFDAYQRRKDKKPVIQRDHGSGKQFKFSLTQNEFLLFDPGDGSTLQGILKTPAEVRQQIIQQALKDGVLILKRVFKISDQRLGWGDHTDARPAKDVTSSSGNQPFINPLRGKVQKVTVDYLGNIHPANN

SEQ ID NO: 5667 - protein, 1029 aa, unidentified
  REGION 1..1029: note = Description of Unknown: Cas Enzyme sequence
MKKIFGLDLGTNSIGAASINVPENIADFGKEGNIEWLGSRIIPMDGFVSTKTGKAFKESPTDSFSRGVGISKNAARRMKRGSRRLKQRYILRRTRLIKVLKILGWLDESFPENFKDEIKNNENFKFRISDFLPCGETTIEEAKGFLGTKNNKGEIKLPEDWIVYYLRKKGLTEKLSFAELARVIYMMNQRRGFKSSRKDLKDESTEEKKWVEILKIKSVEQETFEPNKSKNFKFKVIPYNEKIQPWTVEKKKKPEWEEKEFTFLITEKYKRQEDGSLKFDKQLTPQLPKEDDWNLCVTAQDNKIGDKFPGEYFFDGLVESVKNKTDFKIRQYAVYRKKYKAELDTIWRKQLELNEDLRKVNNDKNLLKKLAEILYPKQTELGKPKLKEILSHDLLHLISDDIIYYQRELKSQKKSKSECKYEKKKGIDGEYYGLKCAPKSSPEFQEFRIWQDIHNIKVLKREGTETKILKNGETKEFVIVDIDVTTDFVNDTVKEKLFEIFDFAKEISQNQIIDIINFENPENKISDKTHRINMFFDGKEKLLGNETKDYFRKLFKKCDYEIEGEKTLSNKENFYRLWQISYSISLNDEEKSKHAIAKALSEKINKRGKEKKITFDFPQNVVEAIANAPEIESAKKYASYSAKAINKLLPLMRCGKYWNENLIDNDIKQKTESIKSRLDAINNNSKKIQSISDDEIPQQILTSFINRKNYLSGLKTYQACYLVYDRHSERTDFTKYSAPKEFDIMKLLPNNSLRNPVVEQVVREAMFVVKDLWQKYGQPDEIHIEMSRDLKKNAKEREKATKNSTNNFEERKRIKALLKELMNEEFEQYINDGDEKDENDEYKIKKVKNAFEVKPNPDSPIDIDKFRLWKNASGLNDSDLDKRIKDEKVPKEQEIKKYALWMSQKCVSPYTGKIIPLSKLFTDEYEKEHILPRGLIKYDSNENLVIAEAGVNKAKGRELAAIFMANKNGGTCEYGGQTHKLLEYDRYVEHCKRIFKGKKLKNLLATEISDDFISRQINDTRYISRKISK

SEQ ID NO: 5668 - protein, 908 aa, unidentified
  REGION 1..908: note = Description of Unknown: Cas Enzyme sequence
YRRSSKTPLFDWKDKIRDFIVTTDFNDDGTVKTDKEGNERRSFRAPSEDDWTLLKKKTEADIDKSQKTVGTYIYESLLQNPTQKIRGKLVRTIERKFYKTELEQILKKQIELQPELFTEELYNDCVRELYRNNEAHQTTLSKRNCFVHLFVNDIIFYQRPLKSQKSSIGNCSLEFRKYKDKQGNEIKDYLQAIPKSNPLYQEFRLWQWLFNLKIYRKDDDFDVTEQFITSNDDREKLFDFLNSRKEIDQKALLKYFKLTEKTHRWNFVEDKKYPCNETKTMILTRIEKVENLPANFLTPKIEQKLWHIIYSVTDKKEFEKALKTFADKHNLDKISFVENFKKFPPFKSEYGSFSEKAIKKLLPLMRLGKYWSWELIDAKTKERIEKIITGEYDAEIKNRVREKAINLTNENDFRGLQLWLVQYIVYDRHSEAGITDKWKTVADLEKYIEEFKQHSLRNPIVEQVIMETLRVVRDIWKKHGDFSEIHIELGREMKNTAEERKRLTNSVTENENTNLRIKALIMELKESSDVENVRPYSPIQQEILKIYEEGVINSNIEIPEDIVKISKTAQPSKSELQRYKLWLEQKYRSPYTGQMIPLGKLFTEEYQIEHIIPKSRYFDDSLSNKVICESAINQLKDKQLGLEFIKNHHGQIVETGFGKSVPIFEEDSYQEFVKEHYAKNRSKRTKLLLEDIPEKMIERQLNDTRYISKFISSVLSNIVREETKDDGMNSKNVLPGSGKITTTLKQDWGLNDVWNDLILPRFERMNALTDSNVFTAWNEQHQKFLPTVPLELSKGFQKKRIDHRHHAMDALVIACATRDHINLLNNQSAKSEVSRYDLQNKLRNKEKIETIGKDVFKEFKKPWDDFTVDARNELEKIVVSFKQNVRVINKTTNKYQAYANGKKIVKSQ

SEQ ID NO: 5669 - protein, 1333 aa, unidentified
  REGION 1..1333: note = Description of Unknown: Cas Enzyme sequence
MAKEWYLGLDIGAGSVGFAATDTQYNILTKSGKLQCGARLFKEAEDASTRRGFRSSRRRFARRKVRIDLLQGLFDSAIAEKDNAFFIRLNESNRHDGDKSTTWSYPLFNDVNFTDSDYYEKFPTIYHLRKHLLENKVDDVRLLYLACHHLVKYRGHFLFSRFDVDDSSCRDELLKELNDLPVSASLEDESVVNALKGNKVISTQKNMFKNDFAKDELDEFKEALKGINEELKNYKFSHEQFEECHELASATLKLNESQNEYILKLKKLYDFDRAKKILGTHATIPEAMVELYDKHKADLRLLKDFIKKHLPCEYDGVFRENGIYSNYVGSNITHGKPTVSHCGICKTAITTINHEEFLAEIAKIIAKASDKDGYAELQAKIDSKSLCKIHNTQDNAYIPHQLQAEELRAILQKQSHFGLDSDKIVSLLTFRIPYYVGPLQGGGEFAWIVKNAGFESERILPWNFDEVVDKAANGERFIGRMTAKCTYLKSEDVIPKQSLLYQRYMLLNDLNNLKINGNRISQELKLFLFNAICQEETSLTKAKIKKHLIAHGKINKSDEVGKENENDTAFNSSLSSLIRFKGILGNDLNLQMCENIIKWHTVFGDEKSPVKQRIQTEYGTRFTPEQIDKLSKMTFKGWARFSAKFLTEITTTDKATGETALTIMTLLEETTLNLMEILNSDSYTPKFIDTVSSENAGGEVKLDYDGLVKDLYCSPIVKRSIWQAILICKELAKINGCPPQKVFIEVTRAEDVTKKGKKTSSRRKQIEELLNKAVKTGQDLTQLVCDFNGKTDEREFRSDRLYLYFTQLGKCMYSGEPIALSDLNTDNYDIDHIYPQSKIKDDSLTNRVLVKRSANADKTDTYPIADSVRYKMKPFWVSLKSKGLINAEKYSRLTCSQELSYDLIGGFINRQLVSTNQAVKETANALGLLFGDDTEIVYSKARNVTDFRNNHELIKCREVNNLHHAHDAYLNVVVGNVWDSVYGHWKTNFTFNEDRAIDRLFQVEREGIWKRDYITKIKDYLLLGNDNKKYLDKFPVTTRPYEVKGAFYDQTIHPARKGQFELKAGLSTDKYGGYKSGYNAYNCVIEYDGKGKSKGTRLRGVFPVPVRFVGMDEEALLCQIASVHKLQTLNPTLVIPKILMFSVLEIDGVRYHMRSGDLQCSVTTEWYPDKEIVQIVRNIFRYKQLVADRQLTADKDTFGDIVFATRERNKHNKESKAITREGNLMLFDAIIAQVKKPFYANYTFAKKVADGRISREKFEGLTTFEQMEQLASLLNLITMNGVFTNALKIGGVKNETCKYIANTTLSGDVCLITQSVTGLFESRVVVNKKEPLS

SEQ ID NO: 5670 - protein, 935 aa, unidentified
  REGION 1..935: note = Description of Unknown: Cas Enzyme sequence
MAYYLGLDLGVQSIGWAMIPVEGEHSPAMRLGVRCFDSGTGTESEIEQGKDESRNLKRRAARSVRRNQWRRKRRTLKLFNLLRNHGLLPMGQGIQDTPIDRQELINELDKELAGKLSLHDDRVSAHLLPYKLRAMALDEQLEPFALGRIFLHLSQRRGFLSNKKAPSKEGEDEKGLKKDISDLSKEIKEKGFRTLGEYFASLDPEEKRIRQRWTGRDMFRDELKAICDSQDKYYHDLLNKKVVVDSWKDNPNAWKNNISKMKRKKLLSNEHVHTQEMTLREALEHALFFQRPLKSQKHLIGKCQLERGKRRAQLASLEAQQFRYWQKILDLQYRNMGGFMVPLSPEQQNLLAEELENNAKLTYAQMRTILGFKQPRQSKEEKEEYKMAGIKYKPPLAFNFEVDEDDSDKGLKGNTTSSRIAAIIPDRWNVMPDKEKELLVSEILQFEHEDALARRLEKVFQFDSNTASQLAAVQLERDYASLSQQAIRKILPLMIEKRIPFATARKEIYGEQFDEDHKEPLDFLPPLLKSKEDPRNPVVTRALTELRKVVNALIRKYGKPETIRVELARDMKKGRQVREEITKVQNENEKERKLAHDFLKESRFETSETNILKYRLWIECNRICPYSGRPISARQLFGESPVFQIEHIRPFSKTLDDSYANKTLCYYEHNQIKGNRIPSQAFTDPQTWHEIITRVKQFQGKFDEEKLERFQEKTIPDDQMPARLLVDTGHISKSATEYLGLLFGKEQKSKIQVLSGGVTSWLRQLWGLNGKGIYGKNVIPELPENTEKPWKKRPRKSRTDHRHHAVDAFVIALCEPRYVQLLAMAAEKASNEVYAEAPPDDSLETLGQKIYERGLNDKFVKYYFQDRPFDWRQVRTIVENINVSFRANRKVSGGFHKETNYSKPQIVMEDERRHIRKLLGSMTLEEIDRIVDDAV

SEQ ID NO: 5671 - protein, 1357 aa, unidentified
  REGION 1..1357: note = Description of Unknown: Cas Enzyme sequence
MAKEWYLGLDIGAASVGFAATDTQYNILTKSGKLQCGARLFKEAEDASTRRGFRSSRRRFARRKVRIDLLQSLFDSAIAEKDDAFFIRLNESNLRADDKSASWRYPLFNDAGFSDKDYYEKFPTIYHLRKHLLENEVDDVRLIYLACHHLVKYRGHFLFSRFDVNDSSCRDELLKELNDLPVSASLEDDAVVNALKGNKVISTQKNMFKDDFEKDELDEFKEALKEINEELKNYKFSHEQFEECHELASATLKLNESQSEYILKLKKLYDFDRATKILGEGNNYIAEAMVERYDEHKVDLKLLKDFIRKHLPYEYDGVFRENGIYSNYVGSNITHGKSNVSHCGICKTAITTINHEEFLAEIAKIIAKASDKDGCAELQAKIDNKSLGKIHNTQDNAYIPHQLQAEELRAILQKQSHFGLDSDKIVSLLTFRIPYYIGPLQGGGKFAWIVKNEGFEGERVLPWNFDEVVNKAASGERFIGRMTAKCTYLTSEDVIPKQSLLYQRYMLLNDLNNLKINGNRIQQELKLFLFNTICQEEMSLTKAKIKKHLIAHGKIDKSDEVGKENENDTAFNSSLSSLIRFKGILGDGLDLQMCENIIKWHTVFGDEKSPVKQRIEAEYGEKLNHDKQLIDKLSKMTFKGWARFSAKFLNGITTTDKRTGETALTIMTLLEETTLNLMELLNSDFVDTVASENAGGEAKLDYDGLVKDLYCSPIVKRSIWQAILICKELAKINKYPPQKVFIETTRAEDVTKKAQKTKSRQEQVRELLKSCGKICENLDGLLEELNGKKGQHLRQDRLFLYFTQLGKCMYSGNPISLSDLNTDNYDIDHIYPQSKIKDDSLTNRVLVKRSANADKTDTYPIAASVRKNMTPFWTNLKNKKLISVEKYERLIRCTELTDDECNAFINRQLVSTAQAAKATKEALEVLFSEVDENDKKKTNVYFTKARDVNDFRYKIAPELIKKGYEFIKCREVNNLHHAHDAYLAIVVGNVWHSVYTLEWFKRQRSSNGNEEKLLIKLFCKNREGIWKRDYITKIKDYLFDNKKYLDKFPVTTRPYEAKGAFCKKTMLPQGKGQHKIHENLEISKYGGFANADKNEGGGTAYNCVIEYDEIGTRGKKQPTGKRIKKVFPVNKKYALKYKDDFNSLLTKIAEDNALLNPMLVIPKILMFSVLEIDGVRYHMRAADIQGSVTIEWYPDKEIVRIVRTICKFDKLEKELFPDKSAERKEMLLTTENIKFTAHDSITREGNLELFDAIIEQLGKPFYASLTFVKNLSNGKIPNPRERFIELPTFEQGKQLVNLLNAITMNGQSVNAKNIGGSDNETIKYSPNTSNCNIYLITQSVTGLFESKVVVNKKEPLS

SEQ ID NO: 5672 - protein, 1078 aa, unidentified
  REGION 1..1078: note = Description of Unknown: Cas Enzyme sequence
VRYSLGLDIGIASVGWCIVDLDREKIADLGVRTFPVAENPKDGSSLASARREARSVRRRLSRRRWRLEDIRKLLIDYGLFSSKEELMKIFCSCRETPYELRAKGLDEKLNLQEWARILLHIAKYRGFKSNRKSERKEGETGRLISGVEENSDLLSREGYRTAGEMLHKDPKFELYKRNKSGDYKNTLLRQLLLDEIQKLFESQRELGNQYAASGMESIYTEIFARQKAFSSAEDLISKVGYCTFEKDKKRAPKACYTAEYFRLLQSLNNLRIINEGKERILSSSERESLLERALAKDKLTYADVRKALDLPIGHIFNMSYKIKSKADKKTKGKGAENGINTAEINEKDGIAESEKKTFVEMKCFHEIRKKISKTDKSLWEKISSDSEILDNIAYVLTVNKDDESVENALSRYIENKNAISELLDLSYSKFQHLSLTAMRKIIPFLEDGMKYNEACEKAGYCHYNPNLMDDKSKLLPPLEQDEIRNPVVTRALAQLRKVVNAIIRKYGSPEEAHIELARDLSKPFDERRQIKKGQEENHAERERSKRDITETFNIESPSGGDILKFRLFREQNGFCAYSQKPFDRYRIFEPNYAEIDHIIPYSRSFNDGYVNKVLVLCDENRNKGNRTPFEYMSGSHERWETFAGWVKSTIRNNTKRQNLLKESFDENEMRDRNLNDTRYITAFVADWIRNTLEFSESVKKSKVVCVNGRFTANLRARWGLSTLKDRGESDVHHALDAAIVAVVTPAMNKRVAEYSQQKEMNKVRIDDNTGKRKRDPFPEPWQGFRHELKVLLSANPQEELLKNELPNYTDEEKASIKPIFVSRMPTRKATGQAHAETVRSVKPREYGKELRGCVSKIRLVNLTASELENMVGKDRDRPLYEALKKRLEEYGNDAKKAFAEDFYKPASPGKIAPVVRSIKVYDNTLSGIEIRGGKAANGEMVRVDVYTKSKKFFLVPHYVNDIARKKVKKLAIAANKDETEWDKIDDSYKFCFSLFKNDLVKVIDSKGKEIFGYYLGTHRGTSAITITANDNSWQMSGVGVKTSKLFEKYVVSPLGEYHRVESEKPPAGKNELENSSDS

SEQ ID NO: 5673 - protein, 1217 aa, unidentified
  REGION 1..1217: note = Description of Unknown: Cas Enzyme sequence
MGGVNRCGDREGDGCSLALGGIGVIDIGWGGRRLALKAGAPRTGLLQISGWLRSTGVGAGETGPMRQKMGSCGRFNERRYPVSASIHNGTNLSHYMEQHMADKVVVGIDVGENSVGLAAVLVDESGTPTKIHRLMSVLHDGGKDGMASGQTASVSRKASGGAARRVRRLLRNRRRRALKLRAELEERGYPLTEPSALETYEEWDTRLELLHGGYIEDDVERRRKLAIAIQHMSNHRGWANAWVPLDQYLWKEEPTESFTAAVDLIRKDAESPTGRFALEGVSDLNYQADLASALEDVDVLVYQADLASLGLSQDERIRPRRPSRKHSYPNPGDIRPVRLEQGHLLGKQRREDVVREWRQICRVQRVSDTEFADLARIAFAQERPSVPAENVGKDWLPGYRDRFRASIASLEHQEFQIRQTVANLRIRENLQAKDSRRLSVEEQNLIVDTLMAVTDRDKAPTWREIAEDFLNISHLRLIHADQEGSASGKAPIMRSVIAVLELKPKSHPVRQWWEKASPEDRSAFVRWFADPVRGENSSKADEIFIPLFESLDEDQVAKAQVMKFPSGRSAHCVETLRLMNAEMSRTGDSYVEVRNQLFSEDGENLIPERPTLDVVADHPTLQRILPTVRRFLQGVERELGHIDRVTIEHVRNAFLGFAAKREAAARMAKNRRDRENAAEQIRASDIYGGVAPTSEQIRRVQIFERQNGECLYCGAAQKFSGIELDHIVPRRSGGNSTLANLAAVCRDCNSAKDGQPFPKFAESGKRPGVSLDVTLQRVDALNQGQLDKKVFGWLKQEMKRRLKQRESDELIDERALATTAYAATDMRDRIMGTYDLGPGSVPVYSGRIVQLARRASGIDKKIELRPGLDSKSRFDRRHHAIDAVVAAMLNQSIAQTLAQREDLYRAARDGIQDVAWRELNSKGDDWKSYTGVSRKARVSYGEWRNFSGFEVGQRRDFAKWKSDMEVLAQLIKEELAHDQVVVTHPIRVSAHHSALHEDGRAPHARKELGSTWSPEQRALIVDDRVYEALSGRLAPSDALVEDAERTLRLPSGIMLTATDDIFLFPDTAARIALPRQSSAKLGQSAHHARLYRWDDAKGKRQAGIVRVFASDLYDLEGVTFDAQGRISGDILRLPLRESSRAVRRAGDKLRAAFWAGTAEHEHHSKYLNTGLKQWPHQQHPHHATCLNTGLKQWPHQQHQYHSTCLNTGLKQWPHQQH

SEQ ID NO: 5674 - protein, 1088 aa, unidentified
  REGION 1..1088: note = Description of Unknown: Cas Enzyme sequence
MWRLALDLGTNSIGWTALKLELDNKKKPKLMKIIDMGVRIYSDGREAKTGTPLNEARRNARQMRRQRDRKIRRRKAMLKFLVDNKLMPFDRDEQHAITRFDPYMLRAAALERKLNPFELGRIMMQFSIRRGFKSGRKGQESENAAEREGMLGGIKSLESELQGLSLGQWIYKQREAGESVRFKARLEKAKAIYSFYPSREMYEDEFTAIRNKQEKHFKEINWDRLHWIIFFQRPLKRPERGRCQFYTEKDRGYRAFASAHRFRILQEINNLRYYNEKNIEEKIPSELKKKLFDALNSQKSLTFNKIRKQLGENYSGSFNLEDSKRSELKGNETSVDFYKPDFFGKVWDGLEIRTQDEIIEKLMTEDDENILRDFLKTFELNDEQIKNILGYNFPVGTTMLSSQFMIDCSEIMLKEWLPYHEAVKQMGLHHSEKEKREIQRSLPYYGKILVGQVSGAKGESFEGNDEKKYGYIANPTVHIALNQLRKLVNALIRRFGNPDQIIMEVARDLKQSKARKDEIFKEQAKNQKDNERVKKELTDLGLLKISSEDIKKYKLWEELASEGIARLCPYCGKTISAKQLITGAVEIDHILPYSRTLLNARDNLTVAHRECNQVKKNQSPFEAFGKSPKGFDWNRITELTSKLPFRKRQKFYPDAMVRFHEEDGGFIERQITDTAYLSKASKDYLSAICDSTAIWVSPGRLTALLRGFWGLNTLLNRGHDTWFKNRSDHRHHALDALVIGLCDRHTISEAARINSGRGYNEINAPSCPIKRQEIEEQLKTIIISYKQDHGKEGKLYAETALAKHSYLEQINPADLEEKEINRIVPKTIQSDITLLVQKEGFRKAKILIKGKYEYLRVFRDKWVTRAPLMSLSERDLPNISDPLIRAKVLEFIEFHPLKSGEKLQDLLAQFCEKNKIYTVRYFPKDQVPVRINDNVNKAYMPSDYYKVDIWRIPLKEGKYKYEGVFVSRPEAMRQSMQGNTIYVRRHDHSAAKLIMSLCKNDIIVMSSKTEREFCRIAGFSTTQNKIDIRPLYASDSIAAWKKDTHINLCSSFWPSEIEGNFFKSINVLFNEYEVKLVKITVDGRPIYR

SEQ ID NO: 5675 - protein, 1362 aa, unidentified
  REGION 1..1362: note = Description of Unknown: Cas Enzyme sequence
MFSQRNNPYCELLQNRTTNVQHFLRKQKKVLILPATLKYITFMKRILGLDLGTNSIGWALVEQDFESKSGKILGMGSRIIPMSQDILGNFDAGNSVSQTADRTGFRGTRRLRERHLLRRERLHRVLNVLGFLPEHYANQIDFEKRLGQFIDETEPKLAWNEVRNEQKSRNESVFVFQNSFNEMIADFIKNGQNIKIPYDWTIYYLRKKALTEKITKEELAWIILNFNQKRGYYQLRGEDEEENPNKLVAFHSLKIINVVADDKPNSKGDLWYSLHLENGWVYRRSSKTPLFDWKDKVRDFIVTTDLNDDGTVKTDKEGCEKRSFRAPGEDDWTLLKKKTEADIDKSKKTVGTYIYETLLQNPTQKIRGKLVRTIERKFYKDELIAILKKQIELQPELFTEDLYNDCIRELYRNNEEHQLALSKRDFVHLFVNDIIFYQRPLRSQKASIGNCTLEHRKYKDKDGNEVKEYLKAIPKSNPLYQEFRLWQWLFNLKIYKKDDDTDVTEQFITSIVENEKLFDFLNNRKEIDQKALLKYFKLTDKTHRWNYVDKPYPCNETGTQIKTRLAKVENLPAEFLTPEIEQQLWHIIYSVTDKNEFEKALKTFANKRHLDENSFVENFKKFPPFKSDFGSFSEKAIKKMLPLIRLGKYWNFDIIDSNTKERIEKLQTAEFDENIRDRVREKVNKEKLDKNEDFQGLPLWLAQYIVYDRHSEADISDKWKTVADLEKYLADFKQHSLRNPIVEQVITETLRVVRDIWKKHGDFSEIHIELGREMKNTAEERKRITNVVTENENTNLRIKALIMELKENSDGKLLVEDVRPYSPIQQEALKIYEAGVLNSNIEIDDDILKISKTAQPSKSELQRYKLWLEQKYRSPYTGQMIPLGKLFTEEYQIEHIIPKARYFDDSLNNKVICEAAVNQLKDKQLGFEFIKNHYSEKVDCGMGKKVEIFSEEAYQTFVKEHYAKNRTKRNNLLLEDIPEKMIERQLNDTRYISKFISARLSNIVREETNDDGVNSKNLISCSGKITSELKQDWGLNDVWNDLILPRFERMNELTNTENFTSKNQRGHTIPTIPLELSKGFQKKRIDHRHHAMDALVIACATRDHVNLLNNQSAKSEISRYDLQNKLRKKEKEIYFDKKENKQTTRDIFKEFKKPWDNFTVDARNELEKIVISFKQNLRVINKKTNKYQTYENGKKVIKSQEKGDSWAIRKPLHKDTVFAKVSLRKIKTVRLSEALKDWKMMVDKELKQEIKQLITMYGDFKIDTINKYFKDRKYLFNEIDISKVEIYYFETENAASRKSLDTTFSENKIKNEVTDTGIQIILLNHLSKYHGKKDEKGKDIAPEGIAFTPEGIEEMNKNIIFL

SEQ ID NO: 5676 - protein, 1088 aa, unidentified
  REGION 1..1088: note = Description of Unknown: Cas Enzyme sequence
MYRLALDLGTNSIGWTVLELDKKAKPPAPTGKIIDMGVRIYTDGREAKTGTPLNEARRDARQMRRQRDRKIRRKKAMLNFLVNNKLMASDHEEQKAIALLDPYTLRAAALERKLKPYELGRIMMQFSIRRGFKSGRKGQEAENAAEREGMLGGIQSLESELQGLSLGQWLCKQRAEGEPVRFVARLERSKALYSFYPSRQMYEAEFAAIRSKQEKHFKDINWNRLYCLIFFQRPLKRPERGRCQFYTEEDRGYKTFASAHRFRILQDINNLRYYNEKNIEEKIPSELKMKLFESLNNQKSLSFDRVRKTLGEDYTGSFNLEDSKRDKLKGNEISVDFRKPELFGQLWDKLDIKKQDEIIEKLMIEDDEKTICDYLKTFGLNDEQTKNLSGYNLPVGTTMMSSRFMIECSDVMLNKWIPYYDAVKDMGLHHSDKGKREIQRSLPYYGKILVGQVSGAQGESIDGNDEKKYGYIANPTVHIALNQLRKLVNALIRRYGNPDQIIMEVNRELKQSKARKDEIFREQAKNQRENERINKELTDLALLQISRDYRIKYKLWEELAPDGMTRRCPYCGKVISAKQLVTGSVEIDHILPYSRTLLNTHDNLTVAHRECNQAKKNQSPFEAFGSSPKGFDWNGIIECTAKLPFRKRQKFYPDAMVRFHEEEEGFIERQITDTAYLSRASKDYLSAICDSNNIWVSPGRLTAMLRGFWGFNTMLNRGHDTWYKNRSDHRHHALDALVIGLCDRRIIAEAARINSKKGYSEIDAPPCPVKRQDIEERLKSIVVSYKPDHGKEGKLYAETALAKRSYLEQINPKELEEKEIKRIVPKTIQEDIVLLVQKKGFRKAKTLIQKNYKFLRVFRDKWVTRAPLISLSDRDLPNISDPLMRAEVLEFVKAHPLQSGQKLQDILALFGEKKKIYSVRYFPKDQVPVPIEDNVNKAYMPGDYYKVDIWRIPQQKGKCKYEGVFISRPEAVKQSMIDNSAVSLRKPHPAAKLVMSLCKDDIIVLIKNEEREFCRIAGFSATRNNIDIRPLYASDTIAAWKKDTHINLCSAFWPSDIERQFFKSINALFNEYEIKLAKITVDGRIIYR

SEQ ID NO: 5677 - protein, 1093 aa, unidentified
  REGION 1..1093: note = Description of Unknown: Cas Enzyme sequence
MYRLALDLGTNSIGWTVLELESDNKAKSPTLTGKIIDMVVRIYTDGREAKTGTPLNEARRDARQMRRQRDRKIRRRKAMLKFLVDNKLMPFDREEQQAVARLDPYALRAAALERKLKPLELGRIMMQLSIRRGFKSGRKTQEAENTAEREGMLGGIQSLESELRGLTLGQWLHRQREAGHSARFRARLEKAKAIYSFYPSREMYENEFAEIRNKQEKHFKEINWDRLHWLIFFQRPLKRPERGRCQFYTEEDRGYKAFVSAHRFRILQEINNLRYYNEKNMEEQIPAELKLKLFEALNSQKSLSFDRIRKLLGENYTGSFNLEDSKRDKLKGNETSVDFRKPEFFGQVWDELEVRKQDEIIEKLMIEDDENVIRDLLKTLELSDEQIKKISGYNLPVGTTMLSSRFMIDCSEIMLKEGLPYHEAVKQMGLHHSEKEKREIRRSLPYYGKILVGQVSGAKGESFEGSDEERYGRIANPTVHIALNQLRKLVNALVRRYGNPDQIIMEVTRELKQSKARKDEIFREQAKNQKANERINKELTDLGLLKISSEDIKKYKLWEELAPEGITRRCPYCGQTISANQLITGAVEIDHILPYSRTLLNARENLTVAHRKCNQAKRNQSPFEAFGNSPKGFDWNRIMELTAKLPFKKRRKFYPDAMVRFHEEEGGFIDRQLSDTAYLSKAGKDYLSAICDSKAIWVSPGRLTAMLRGFWGFNTLLNRGHDTWFKNRSDHRHHALDALVIGLCDRRIIAEAARINSGKGYGEINVPPCPINIKKKRQDIEGRLKSIMISYKSDHGTEGKLYAETALAKHPYLEQISPADLEEKEINRIVPKTIKEDIALLVQKEGFKKAKALIKSKYKYLRVFRDKWVTRTPLVDLSERDLPNISDPVIRADVLEFVKSHPIQQGQKLQDVLAQFCEKKKIFSVRYFPKDQVPVRIEDNPNKAYMPGDYYKVDIWRIPQQKGKYKYEGVFISRPEAMRQSLLKDTVPLQKPHSSAKLIMSLCKNDIIILSNKMEKEFCRIAGFSTTQNKIDIRPLYASNTIASWKKDTHISLCSSFWPSDIEGQYFKSINALFNEYEIKLVKITVDGRPIYR

SEQ ID NO: 5678 - protein, 1267 aa, unidentified
  REGION 1..1267: note = Description of Unknown: Cas Enzyme sequence
MKKILGLDLGTNSIGWALIENDFDTKQGKILGLGSRIIPISQDILGNFDVGNSVSQTAERTNYRGIRRLRERHLLRRERLHRVLNVLGFLPEHYANQIDFEKRLGQFSNETEPKLAWNNKDFIFQKSFNEMVEDFRANGQDIKIPYDWTIYYLRKKALSQKIEKEELAWLLLNFNQKRGYYQLRGEEEEENPNKLVEFHSLKIVEVVADEKPNSKGDTWYSLHLENGWIYRRSSKTPLFDWKDKVRDFIVTTDLNDDGTVKTDKEGGEKRSFRAPSEDDWTLLKKKTEADIDKSQKTVGTYIYETLLQNPTQKIRGKLVRTIERKFYKDELIAILKKQIELQPAFFTEDLYSDCVRELYRSNEEHQLVLSKRNFEHLFVNDIIFYQRPLRSQKSSIADCPLESRALKNNNKEPLLDAEGRQIFKIFKTIPKSNPLYQEFRLWQWLFNLKIYKKDDDTDTTNDYLKNREDYENLFDFLNSRKEIEQKALLKYFKLAEKSYRWNYVEDKKYPCNETKTMISTRLAKVKNIPANFLTPEIEQKLWHIIYSVTDKNEFEKALKTFAVKQNLDETSFVDSFKKFPPFKSEYGSFSEKAIKKLLPLMRLGKYWNWEMIDAKTKDRINKILTGEYDETIKNRVREKAINLTSENDFQGLQLWLAQYIIYDRHSEANVAGKWNTVADLEKYLEDFKQHSLRNPIVEQVITETLRVVRDIWKKYGDFSEIHIELGREMKNTADERKRLTNIVTENENTNLRIKALIMELKDSVDVENVRPYSPIQQEILKIYEEGVINSNIEIPEDIVKISKTAQPSKSELQRYKLWLEQKYRSPYTGQIIPLGKLFTEEYQIEHIIPKARYFDDSLSNKVICEAAVNQLKDKYLGLEFIKNFHGQVVDLGFGKSVKILDENAYQDFVKEHYAKNRAKRTRLLLEDIPEKMIERQMNDTRYISKFISQLLSNIVRADKDDDGVNSKNVLPGNGKITTTLKQDWGLNDIWNDLILPRFERLNTLTNSTSFTAWNEQYQKFLPTVPLEFSKGFQKKRIDHRHHAMDALVIACATRDHINLLNNQSAKSEISRYDLQNKLRNKEKNEIIGKDIFKEFKKPWDNFTVDARNELEKTLISFKQNLRIINKTKFAGLTYKESKEKSNNKNWAIRKPLHEETISGIIDLPWVKVGKGEIITATRKTLDKSFNKDKIKKITDTGIQKILINYLESKNNDTELAFSPEGIEDMNKNIISLNEGKFHQPIFKVRVYEKGKGRFILGNTGNKKSKYV

SEQ ID NO: 5679 - protein, 1136 aa, unidentified
  REGION 1..1136: note = Description of Unknown: Cas Enzyme sequence
MANADRAARERYVLGLDLGSNSIGWAAVRVADDDRKDNEPVPVGVLDMGSRVFEAGVEGNIEQGREESRTVARRNARLLRRQHDRAARRIDIIGLRLQQKGLLPSLNEEHPLGHDDEQKRFPIDRNDQARSERTSQRHETLNRLDAELWEEAKRINAENPSPLPEADLRQRLPYFLRAMALDPDRCLSSYAIGRALFHLAQRRGFLSNRRTDRKAGKEEELGEVKKTIEVLKVKMKELGCRTLAEYFLRLPGEERIRGPKHWTARAMYEEEFDLIWKAQARRDPARFTDDFRKRLHRAIFRQRPLKSAAGLVGECPWEKGRRRAPWACLDAQRFRMLQQVNNIRVLGREQPELSPAERKVLVVRLEEGGDLPFKEAAKLLGLKKGEKLNFNEEKGGETKFVGNRTAKKLIDVFGLERWQSMSAVEHDAVVEDWRKTVKDETLERRGTKAWGLDREQAQKFAGLSLEDGYTGLSLRAIAKLLPEMGKGIPYMEAAKKVYGDRLPADVMDLLPRVDKAIPGLRNPAVARTLTELRKVVNALVRRYGKPESIRIELARELRKGRKSRETAWKRNREQEKRRQAAGKSVLDEMGNQNPTRADIEKILLWEECGKQCPYTGRPISMGALFDGSFEIEHIVPLSISLDNSYLNKTLCERQANRDKGKQTPYEAFGNNEQRWHEITLRLKKFPGGLANHKVRLFLSKDKPEFDEFCRRQLTDTAYAAKEAQAYLGLLYGADANRRIQAARGGVTAFLRDEWGLRGLVNNWPLNRKPAEVIEENLKSPGKGRADHRHHAVDALVVALTTRRAMHILSEAAVRAQREGRRWFGGYVELPWAGFSEDVREATDKIVVSRRVSRKVSGPLHEQTYWGPGPKSETPGKKRKRSKTTPNTETPGDAKKVDNDRPYHLRMPVHKLSAKDIKNDEVIVDKAVRQAIRDAFGRLPKADLKLFENPDCAPYLTTKDGRRTPIRKVRIRKVRIHKTQKLLAIAEGERRRYAVGGNNHHVEVLAKLNKNGGETGRTWRCVSMFEAYRRLKENISVVCRSHGPGFKFLFSLAPGESVMLTDDNGVDRPFVIRGTSEKKLDFTGNLDARPKKYIEKVNKGKNDAKDIVVIQSDGALKKRNVRKVVITPLGEIREAHD

SEQ ID NO: 5680 - protein, 1089 aa, unidentified
  REGION 1..1089: note = Description of Unknown: Cas Enzyme sequence
MWRLALDLGTNSIGWTALGLKIDKKTKSPVLTGKIIDMGVRIYTDGREAKTGTPLNEVRRNARQMRRQRDRKIRRKKAMLKFLVHNNLMPSGRGEQQAIARLDPYALRAAALERKLKPFELGRIMMQFSIRRGFKSGRKGQEAENTAEREGMLGGIQSLVSELQGLMLGQWLHKRQEAGEFVRFRARLEKAKAIYSFYPSREMYEAEFAAIRKRQEKHFKEINWDRLNWLIFFQRPLKRPERGRCQFYNEEDRGYKAFASAHRHRILQQINDLRYYNEKNMEEEIPPELKKKLFDALNSQKSLSFDRIRKLFGEAYTGSFNFEDSKQDKLKGNETSVDFRKSEFFGPTWDGLEIRQQDEIIEKLMIEDDENVIGDFLKTFELSDEQMKNILGYNLPVGTTMLSSRFMIECSEFMMKEWLPYHEAVKQMGLHHSEKEKREIQHSLPYYGKILVGQVSGAKGERFEGGDEERYGRIANPTVHIALNQLRKLVNALIRHYGNPDQIIMEINRELKQSQARKDEIFREQAKNQKTNERVKNELTELGLLQIGSEDIKKYRLWEELAPEGIARRCPYCGKTISAKQSITGTVEIDHILPYSRTLLNTRDNLIVAHRACNQAKRNQSPFEAFGNSPKGFDWNRITELTAKLPFRKRRKFYPDAMVRFHEEEGGFIDRQITDTAYLSKAAKDYLSAICDNKAIWVSSGRLTARLRGFWGFNTLLNRGHDTWFKNRSDHRHHALDALVIGLCERRIIAEAARVNSGKVYGEIEAPPCPIKRERIEERLKSIIISYKPDHGKEGKLYAETALAKHSYLEQISPVDFQENEINRIVPKAIQKDIALLVQKEGFKKAKALIQNNYKYLRVFRDKWVTRAPLISLSERDLPNISDPIIRAELMEFIIANPVQSGQKLQDILTQFSKKKEIYSVRYFPKDQVPVRIEDNPNKAYMPGDYYKVDIWRIPQQKGKYKFEGVFVSRPEAMRQLTLDDTVPLRKPHPAAKLIMSLCKNDIIVLFNKTEREFCRIAGFTTTKNGIDIRPLYASDTIAAWKKDTHINLCSSFWPSDIEGNYFKSINVLFNEYEIKLAKITVDGKPIYR

SEQ ID NO: 5681 - protein, 1045 aa, unidentified
  REGION 1..1045: note = Description of Unknown: Cas Enzyme sequence
IEVFPANEKNKKRKPNARRLEQEEKELLFTELSVKEKLSKDKILSLLDLQEFDMNFNSIDGNKTQYELFKSYKKIIELSENEIGDDFTVETIKEIFEKLKINTDILCFDSQNPLDEEPLYKLYHLLYSFEGDKSNSGDENLINKLKELYGFEKEYARILTGVEFQSDYGSLSAKAIRKILPLMKMGQDYATACSNIYERHSASSLKKEELEKKVYKNQLDILPKNSLRNPVVEKILNQMINVVNSIIADPQLGKPDEIRIELARDLKKSADERFLLSDNVKGNTEEIEKIHKILKEDFYITNPSRNDVIRYKLYKELLVNNAAHTLYSNTYISPAELFSKNFDIEHIIPQSRLFDNSFSNKTLELKSVNIEKGNKTAIDYVKEKYGESGLTDYLNRIISIFGTKTTKKVLTNKATGNKSVKFETKTFDTLQKDYIKSLKKKQKEEWDNLCENDKKLRIINKYFSNKLKKLVITENELPEGFIERDLGTTQYITKEAKKMLGNLVKFVVCTTGSITDRLREDWQLVDVMKEINFPKYEQLGLVENEERIDYETGEVRYVKKIKDWTKRNDHRHHAMDALTVAFTKRQFIQYLNNLNARRADENMTVSNTEKEEQDNFAITTEDVILNTRDVLGIEKNYLYRDKRNKLRFNPPMPLNEFRAEAKKHLENTLISIKAKNKVVTQNINNTKKSGGKNKKIQQTPRGQLHNETIYGSQQQYVVKEEKVGTTFDEAKILTVSKPVYREALLKRLQENENDPKKAFGGKNAPAKNPIFIDDAKIEQLPEKVKTVIFETLYTIRKEISPDLKLDKVIDKGVQTILQNRLNEFNGDAKKAFSNLDENPVWLNKEKGIAIKRVTISGVSNAQALHDKRDKDGNLILDESGKKQAVDFVNTGNNHHVAVYRDENGNLQENVVSFFEAVTRRNLGQPIIEKDYKKSEGWQFLFSMKQNEYFVFPNEKTGFNPNEIDLLNPENYALISPNLFRVQKISTKNYVFNHHLETMAVTGETLKNKKQLSKTTYHFIQSLPPIENIVKVRVNHIGQIVSVGEY

SEQ ID NO: 5682 - protein, 1433 aa, unidentified
  REGION 1..1433: note = Description of Unknown: Cas Enzyme sequence
MKKILGLDLGTNSIGWALVNEAETENEKSSIIKLGVRVNPLTVDEQQNFEKGKSITTNADRTLKRCMRRNLQRYKLRRENLIEILKEKEFITNETILSENGNRTTFETYRLRAKAATEEITLEQFARVLLMINKKRGYKSSRKAKNTEEGVLIDGMEIAKKLYNENLTPGQYCLQILQSGKKQLPDFYRSDLQEEFDKIFEKQLSFYPEILSFELKEELRDKKRDAVWAICAKAFKEKDFELVGTKRQGNTTEQKVENYAWRAKGITEKLDLEQLVVVLQQINIQLNSSSGYLGAISDRSKELYFKKQTVGQYQMAVLNDNPSASLRNMVFYRQDYLHEFNTIWEKQAEFHPELTKDLKHEIRDVVIFCQRRLKSQKGLISYCEFESRKIEVEFEGKKKAIIVGNRVIPRSSPLFQEFKIWQVLNNIEVFGKGKKSKKLKVAMLFSETEDPLEYGGRRELYQEEKELLAAELSIKKELKKADVLKLLFDNAKELDLNFPSIQGNLTQAVLFNAYKQIIELTGHEIDVEKNAASGTLKSVEEIFNALGINTDILHFDSDKKLDQQPMYNLWHLLYSFEGDESKTGNEKLTNKIAEHFGFEKEYAAILANVTFQDDYGSLSTKAIRKILPCLKAGHKYDIACDYAGYRHSASSLSKEELDNKVHKERLEILPKNSLRNPVVEKILNQMINVINSIIEAYGKPDEIRIELARELKKNAKEREELTKSIAETTRLHEQHRDILSKSPFNLSFISRNDIIRYKLYEELKDNGYKTLYSNTYISPSAVFSGDFDIEHIIPQSRLFDDSFSNKTLELRSINIEKGNKTAYDFIKEKYGETGSVNSLDNYLTRIESLYKSGVMKRAKYNKLKMQEKDIPDGFIERDIRDTQYIAKYAKTMLGDLVKFVVSTTGSVTDRLREDWQLVDVMKELNWEKYHQLGLTEDFINEEGHKIRKIKDWTKRNDHRHHAMDALTVAFTKRQFIQYLNNLNARRTNEELGISNAEKENHNQFAITTDDIKLNTRDVLGIEKKELYRNAKGKLLFKPPFALDEFRAEAKRHLENTLISIKAKNKVVTQNINTTKKPGGVNKKIQLTPRGQLHNETIYGSQKKYVVKEEAVNAKFDAEKIATVSKPAYRFVLLQRLQQFDNDPKKVFTGSNALSKKPIWLDELHTKQLPEKVKTVCFETVYTIRKDVSPDLKLDKVVDKNVRERLDARLKEFNGNAKQAFSNLEENPIWLNKTKGIAIKRVTITGISNGEPLHNKKNKEGKLILDENGRKQPVDFISTSNNHHVAIYRDAEGNLQENVVSFYEAVSRKNLGLPVIDKEYKASEGWQFLYSMKQNEYFVFPNAETGFNPNEVNLLDPDNYYLISPNLFRVQKLSTKNYVFNHHLETKAVTGELLKNSKLLSGVTYYFIQSLPPIKDIVKVRVNHIGQIVSVGEY

SEQ ID NO: 5683 - protein, 913 aa, unidentified
  REGION 1..913: note = Description of Unknown: Cas Enzyme sequence
ELINSKDNNLNFSEIPKKLKIEYEKWNYDDEQKVAGNYTTKHLSTLFSKEIYEANKEEIWHCFHFFEDSDILIEKLKNDFGLAEKDNEKVEKIGLKEGYSSVSLKAIKNILPYLQRGLQMSDATILGGVRNAFGERWEYFKDAHEQLEKDILNINHDKSNKEGEAIEKIKNYLANPENKFGFSKNDKSFIKLYHHCQEIEEKVLKDKLDAVENLRNPIVQQGINETRRLVNQLIDEYGKFDRIQVELGREVKNSKKGRQEQTRRIYENTDNNDKARKLLTEYGLKHDRENIQKVLLYKEMQEKGVTTICPYTNKSINISDVLGRENKIQIEHIIPKSVSLDDSFANKTLCDAKFNGLKGNLTPYQFYLKNGDSKLWGGATSWEDIEQRAYKVLPYSKAKRFTSKIKVEDADVKSSFIERQLNDMRYISRKTKEIMSQVCEDVRVLPGGLTAELRHLWGLNSILQPVMLVDLPNYKLEEGKTIPHYVVMDEDNKPVLTIPIYNDKPKLGSNETTITGNVEKGKFKTIEKYVKLIAETPELANGEYWLNLKLSEPKKIIRIFKERPSSTENEIVLRGKVEKEKFKNDGVGLITAKGLDNGTYWAKFTITNKKFEAPKKDKQPKKIGKQVLLFGEVKEGFFKSYIYSCETNELDGKYWLLLDIDTENASFERAINERPTVSDTKIIIEGSINDEGVFVSEIDAQHQFRTNEKPGKYWFVFDILNELTDFNAIEQPKPFLQEKQALIEGNIWVDKYTGEIKFDPKKNRDDHRHHAIDALVIALSKQSYFQQLSAYNAARDAKKKGLTFEKEQLDFPDPWTGFHTDAKKEAEKILIAHKQNRKVLTEVRKKITKNGKTFISVGNAVRGQLHKENVYGQRQAPFETTKGYHMRKKVVDLKDNQLDKIVDLEIRKIIINA

SEQ ID NO: 5684 - protein, 950 aa, unidentified
  REGION 1..950: note = Description of Unknown: Cas Enzyme sequence
MPISYKLAFDIGHSSIGWAVLTSDGKLGTNPEILGCGSVIFPKDDCLASQRRDHRRTRRNIRSTRQRISRMRKLLLHLEVLSEVELDAVGHSAPHYLAAQALFSESPTLDWTKLWHVLRWYAHNRGYDGNSRWSRQDDDSDDTVKEKAALDLMSKHGIDTKTGSMAETICAELGINPLDKKISSAKPYKTLNAAFPRAIVRSEVLRILMKHLGHLPKLDQNFIDTLIAPNSGNDKQAWATIPVPSIKLPRRYFGGLLFGQLIPRFDNRIIASCPISGQKVPNKASRDYLEFRWAMLLANIRVNGTSLSAEQRRAIDAIMRKSGRLTPTELRKAVEDISGSKDNNIAASFEIHPDSKDALELDPALAYADSAATNKRNSLYPFWQHLPETIRARAIGRWKKGRRVDLMWMLAQFESEHLNPSKFTAVINSAFAVDQKKTKPNYPTRDHFLRRLFAPKSLSGRAPYSRSVMKQVSEFVLSTDRHPTEAGKSDLPAGPIYRSKEVLAAQRDKPINELTNNHLIRQRLDILLRLTSDIISNYCEGDPRQISDIVVEVASDLREFSGLTAKEMAASLSKRLAHFKSAVKYLEDNAPELEINGSLIRKTRIAMDLDWHCPFTGKPFDPYQLKSMEREHIIPYSDRPTNSLDSLVLTFDWVNKLKGKRTAMQFINDMAEDDRFLTPKNYKSFVDKLKVANKYTYPDDYRRQTSRKRLLLVETFEQKDHGFTQGALTKTSHLNRLSARQLEKKFVDPETNEPTVQIVSIPGQVTAETRKSWNLLHTLDNACPECIDKTKTEIRDITHLHHALDAATLALTHHYLPGTLHGQAENEKGAIWRAMLKRNKTLSEIQLLTRTGQFIRCTKKSSNGEPTNQPDARLVDISNKIKNSLATRLAEIRVVQHIPADQSGAHLELNPWRVDAIDGDPEDPTTLVSIRQTVSTVEKGKRIKKQKEHQ

SEQ ID NO: 5685 - protein, 1091 aa, unidentified
  REGION 1..1091: note = Description of Unknown: Cas Enzyme sequence
ETAKEGESLNLARRTARLLRRRLRRRAWRLTKLARLLKREGLIADANFFKKQIPFTQSLWQLRVEALDRRLTGEEWARVIYHLCKHRGFHWISRAEAKAADSDNEGGRVKRGLAGTKRLMQEKSYRTAAEMVIHEFPDAQRNKSGDYSKALSRELLEEEAKKLFQHQRELGNPHASAELETAILGNGEKKSGLFWAQKPALAGKDLLKMLGHCTFEKEEYRAPKASFTAERHVWLTRLNNLRIVVDGKMRPLNEQERHIALPLPYIQASDLTYKQLRSALVKAGLSDSFRFVGLSYPSKRQEDTEKAKDPETEKLIKLPAWQTLRKTLKDAGLEMEWQQISVAALDGKPELLDQIAWVLSVYKDDAEVEAELRKLDLPNKAKMVDALLDVRFDKFSNLSLKALRQIVPFMELGQRYDEAVANIPEYGHHSQLHIVGAGEHKYLPPFYSGRDKDGRMVFNEDMDIPRNPVVLRALNQARKVVNALIKEYGSPHEVHIEMARDLSRPLDERREIKKLQNEYRDNNEKHKAEFASTFNIIGAVKGKEFEKYQLYREQQGKCAYSQQPLAPNGDIQRIFDAGATEIDHALPYSRSFDDSKNNRVLVLTRENRNKGNMTPYEYLDGKNNSERWRLFVAFVESNKSYREAKRNRLLKKDFGEDESKDFMERNLNDTRYICRFFKNYVEQYLQLHEDSEAKRCVVLSGQMTSFLRARWGLVKVRGDSDRHHALDAAVVAACSHGMVKRLSDYSRRKELEQVREGFVDMDTGEILNPAMFEQIEKHFPNPWPHFRNEVEARLKLDDPVLLREELQRLGTYTEEALQAVHPLFVSRAPQRRNSGAAHKDTIYAQPERLKAQGGVTQKVALTSLTLKDMDKLVDPHRNEKLYAAIRARLEQHGGKGDKAFPASNPLHKPDSAGNPTGPIVRGVTMEIDKLSGIPIRGGIAKNDTMLRVDVFTKAGKFHLVPVYVYHAVAKELPNRAIVAFKDEAEWTLIDHSFNFCFSLHPNDFMKVQQKGKPAILGYYSSCHRGTGNINLWAHDRNQAVGKDGMIEGIGVKTALSIEKFNVDVLGNIYPAPPEERCLYPAQRSGAEHDLA

SEQ ID NO: 5686 - protein, 1166 aa, unidentified
  REGION 1..1166: note = Description of Unknown: Cas Enzyme sequence
GRIIKGKKMTGKQNNLGPLTFGLDIGIASVGWAVLGENRIVDLGARCFDKAETAKEGESLNLARRSARLLRRRLRRRAWRLTKLARLLKREGLIADANLFKNKIEKNSPIPKSSWQLRVDALDRQLTAEEWARVIYHLCKHRGFHWISRAEEKAAESDSKSEGGRVKQGLAGTKKLMAEKNYRTAAEMIMKEFFTLRIDEDGKPALTKNTGELILDGTARNKQGDYSKALSRVLLNDEFVLLFQRQRELCNPHTSTEFQEKILGTGDKRSGLFWAQNPALAGNDLLKMLGHCTLEKNEYRAPKASFTAERHVWLTRLNNLRIVIDGATRSLTEAERREALPMPYKQAGDLTYKQLRSVLTKAGYLPESFKFTGLLYPPGLKANEKAKDPESVALVKIPAWHELRKTLEKKGLANEWQKLSTEALEGNPKLLDDIAWVLSVYKDDIEVEAELRKLPLHSADKLVDVLLDIRFDKFSNLSLKALRQIVPLMEQGQRYDEAVANIPEYGHHSQLHKVGTGEHKYLPPFYSGRDKDGRMVFNDDMDIPRNPVVLRALNQTRKVVNALIRKYGSPHEVHIEMARDLSRPLDERREVEKLQKEYRDNNEKYKAEFASTFNIVGAVKGRELEKYQLYREQQGKCAYSIEPIDLHRLFETGYVEIDHALPYSRSFDDSKNNRVLVLARENRNKGNRTPFEYLDGHDNSERWRQFVAYVEGNKAYRLAKRSRLLRKDFGEKESKDFRERNLNDTRYICKFFKNYVEQYLQLHEDSEAKRCVVLSGQMTSFLRARWGWVKVRGDSDRHHALDAAVVAACSHGMVKRLSDYSRRKELEQVRDGFVDVDTGEILNPAMFEQIEKHFPNPWPHFRNEVEARLKLDDPALLREEMRCLGTYTEEALQAVHPLFVSRAPQRRNSGAAHKDTIYAQPERLKAQGGVTQKVALTSLTLKDMDKLVDPHRNEKLYAAIRARLEQHGGKGDKAFPASNPLHKPDSAGNPTGPIVRGVTMEIDKLSGIPIRGGIAKNDTMLRVDVFTKAGKFHLVPVYVYHAVAKELPNRAIVAFKDEAEWTLIDHSFNFCFSLHPNDFMKVQQKGKPAILGYYSSCHRGTGNINLWAHDRNQAVGKDGMIEGIGVKTALSIEKFNVDVLGNIYPAPPEERCLYPAQRSGAEHDLA

SEQ ID NO: 5687 - protein, 1062 aa, unidentified
  REGION 1..1062: note = Description of Unknown: Cas Enzyme sequence
AIEKVDPLTLGRAIYHLAQRRGFKSGRKDQPEESEETNTSKAKELGEIKGNIARISAELKKSGLTLGQYFFNEIKAGRKVRKQHTGRVEHYEKEWAKIAAVQELDKTLAKKIAATLFSQRPLREQSHLVGKCPLEPKRKRAQIGHPEFEAFRALSFVNNIRVLDGETRVPLSSEQRAVAADCFIRKSPFKFKDIAKKLRKQFKALTDARFNYDDDNPSLSPSKVTADLKGILPDDADLQKAFDALTFFDDNEKLTTWAQNKIGLSEEDSARFVIILIPEGRAGYSLHAIRKINRFLRKGVELSEAIFLAKLPDVISDFDASEDDIIANVHGHNELYRENKRTAYHDTRTENRIGVLSLEKRLRSWLAEDYGIGNDTFGTLYFRDTKADSSYASVKPGGHVLPPVNLGMIRNPLVQRSMTMLRKLVNELRRNGTIDAETRIHIELARDVNSRNDRMAIQEWQKENEKERADAQAKLLEHNIAKPAEDLILKYVLWTEQPEHCCLYCGKSLGVDDLVNGSDIEHTLPRSRSGDDSQANKTVACVNCNRNIKKGKMPSELPNHAEILLRLRPWEEKIRDLKTLKEKQAKIAKGISKENPEARSKARKKMLTTKLKLKYWEDKYCRFTKKPDDVTPSFMNRQLVDTGIMTRHAVALLKTVYSDVYPVNGQAVAFARKLWKVQGEDEIKDRSDHTHHAKDAMVIAALSRDRFQKICAELKADDERKNPKFNVAPPFPDFAQTVFTTTQGILVKHVTRHNELKQTYYKKPRRLSGLTKGKDGKPVTRAPAAGSTVRGQLHEETFYGKIKRPDQTEPVCVIRKALASCREKDVAAIVDDVIRKCVQDKLEQLGGDFKKAIVQDVFAMTSGVPIRKVRVFVTPHTSLNEIRRHTATPSMHDYKRPVYACTAAGSNLGIAVYKVALHAQPEFVIEKLFDVIRHAVPPPPNDSELQGHILRGAMALARSEYGGLPPLSKNGSALPHPKTLVYKVRKFDKNGITLWFHREARAEKVLEADLKAAQKNSGGSSSVDYEHPPEVLHRTLRKAWASFLFEGIHFKMGLDGRIEWIN

SEQ ID NO: 5688 - protein, 1130 aa, unidentified
  REGION 1..1130: note = Description of Unknown: Cas Enzyme sequence
TADRTKARSTRKLYQRDNLRRERLHRVLNIINFLPEHYSKEIDFETQKGQFINYSEPKLPYFKNSDGKFEFLFKDSFNEMVEEFKKNKPQLFENGKKIPYDWTLYYLRKKALTQKITKVELAWLILNFNQKRGYYQLSEDEEITDDKIKEFVKLKVKDVIDSGEVIKANGTKLYNVFFENGWQYDRPIAKIDDWIGKTKEFIVTQTPTKNGEIKYSFKVVDSEKDWIAIKKKSEQDILKCGKTVGTYIYETLLQNPSQKIRGKLVKTIERKFYKEELKKILEKQINEHPELKDNKLYKASIFELYPNNEAHRRNIENRDFLYLFMDDIIFYQRPLKTKTHLISDCSLEYRIRKDTQEKIHLKCIAKSNPLFQEFRLWQFLTNLKIYKRENDADVTLTYLQDENKWIELFEWLNDREKITQKQLLSYFKLKEDKFRWNYVEDKEYPCNETKAKFLIRLKKLDINSSFLTTEATYHLWHILYSVTDPNERNSIDAKGNFKGAVSKYALKHDLNKEFIESFAKFPAYKRDYGSFSEKAIKKLLPLIRKGKYWNWDNFDDSTKERIDKLLTAEFDEKIRDRVREKSIHLQKNEDFKGLPLWLASYIVYDKHSEASDTNKWNTSQDITDYLNPKLKGSFKQHSLRNPIVEQVLTETLRVVKDIWEEHGKGEEGFFDEIHIELGREMKNDKKTRERITKQVTENENTNQRIKAILSELLNDGVDVRPYSPSQQEILKIYEEGVCQNPTSNYSEIKEDEIIKIRKNINPTKSEIQRYKLWLEQGYISPYTGKTIMLSELFTYKYQIEHIFPQSRYFDDSLTNKIICESEVNQLKDNKTAYEFISEYQGTKVDLGGGQTVTIFSLSAYEQHIKTYFSTNKTKRDNLLSADIPESFINRQLNDSRYISKVVKNLLSKIVRDNDEQEVTSKHIIPITGIITSKMKQDWGLNDVWNDIITPRFKRMNELTNSNDFGDINPNTNKFLPKVPDIISKGFSKKRIDHRHHALDALVIACITRDHVNYITSINTERKNYSLVTKLRNIVEVEKTIKNSSGLQTIEKRKVAKQFLKPWESFTAEATNKLKTTIVSFKQNTRVINKTKNKYQKWVKDENGQLKKKIVPQTNGDNWAIRRSLHQETIH

SEQ ID NO: 5689 - protein, 1154 aa, unidentified
  REGION 1..1154: note = Description of Unknown: Cas Enzyme sequence
DDRAVAVENRGDHVFSDTPPIRFIGEDVLEVARLRTQHIARQVVERKVRLVEVEDSLIILSQRGDVDGQWQLISTGDEKLEREFPAPGDSTCYTSCLLRIKLLRGEKLEDWQIYKALRSAIQKRGYGRVPWAAREVKKKDLTEEELQKELEKQEKDLAKKDPMYRAAIEAWPHFKQTHDPRFHYPCYYDAEKQKLWNPETPDVLKFVVDHLAESTRQVRFDREDVEKEIAELARQAAKQIPALASAFAKWQTQGWTVPHRETKKPQTFAVRATDIGAFLVHGPAGEPTDDAKMDFAQFIAFREEAGIHVGSHDDWMGATGQKTPRFDNRIVNDCAVMTGMKVCKVDVRFDSKTGKPWPDSLLPAEVTFLMKLKNTLVQEGYSQRKLSPQELRSLFAQACKKLDAIKPDTKNRSEKATKCFSITQAAWGKEKGIKELSLRPLPGHEEVKPPKFEGRSRYSRPALKLIRALILSGQAPSLFLKRLESREAALLDEIGMDIYDADPTPVVAGQKQKHALARPYLLMSHLKFLRDLAATNDTWEGIYIPEQKMDALEAKHRDEDGQVDAASAIKELIASNNDPIVRHRLEVFASRLAELESVHGAPSEVVLEFVRTDFMGEDAKRDLAKFQKDREKARQEARSVMMENHIDDRSAPLKYELLLQQRDLCLYCGDNISMDQIAEDKVDIDHIVPRSKGGPDAMVNYVLAHRKCNAMNQGKGDQTPFEWLHGKPGWDAYVDRVNKCATTLRNKKVQLLLREDARTLVERYTALAETAWISKLAKKIVSLHFGWKNGVDDSGDLRVTVVSGGLTGRIRRKYKLNGILNPNAESEEEAEKKNRKDHRHHALDAMVISQLPNWMGDKKKEKFFRFEEPIAKNPRGFFASEIERVMPEALAYEQATLADTTYARRWEDAQGKVKVIVQRTPLIDLAMKPNARGEANYDLTYLEKNITTIRELKVKKDGKLVDGPLVMALKDLLNTRPSQHEWEDFCAEYRKPRKDGSNGPRVIQVTVLAGEPTEYREMSKDRTGAWRKGGGNHQGQIIYHHTDGNPKVHPVYVHASIPQEIKKLKDAGYLVQGFFQSGCIVKTMQVVTAAEYSHVIRNEKDEKRRVAATAPLPPCLMTLRNIITKDMVAELTLADNTRIVARIDVWVKAGITRI

SEQ ID NO: 5690 - protein, 1014 aa, unidentified
  REGION 1..1014: note = Description of Unknown: Cas Enzyme sequence
VKSLGIDLGIASCGWALIETDVEQGRIIACGARTFDAPETDKERTPTNQLRRQFRGMRRVMRRRRQRMAQLRLLFQQNGLLTDAKRDALRFPGLDPWQLRVAALDRSLTPEELAVTLGHIARHRGFRSNKKNQGNEAGDDGRVLKAAAANQEILSKYRSVAEMFDKDDRFARRKRNRDGEYTQSVNRIDLEHEARLIFSRQRALGSAHADAHLQEKFAELAFNQNPLADSEDKVGFCSFETKDRRAAKRAYSFEVFRFLSRLNALRIGDARQERALTEAELAAAMEGFGSQRGMTFARLRKLISLPDGDAFRDVPRDEEGSRDVVNRSAGNGCMQGSATLRAALGEHNWKTLLQRPEKLDEIAFIITFRATPESIEKGLFEAGLHPDMLHAIMAAVEKGSFAAFTGAGHVSAKACRAIILGLQRGLVYSEACAAAGYDHAARPVTEIASINNPVARRALGEALKQVKAIIAVHGKPDRIHIEMARDVGKSKEERDKITSGIEKRNKERDKLRASFAETVGAEPSGAEDMLRFELWTEQKGRCIYTDQAIPPGAIRAKDNSVQVDHILPWSRFGDDSFINKTLCFAKANQEKKGRTPFEWLKDDSKRWAEFVAAVEGNKGMKGRKKRNYLLRDAQAVEERFRSRNLNDTRYACRILMEHLARLYPDDKRYVLSRPGALTDRLRRGWGLQDLKKVLEPDGEKRKHDDRHHALDAIIVAATSESALQLLTRAFKESEDRGSHRDFADFPPPWPGFIEDVRRHFREILVSRAERGRARGEAHAATISQLKQTDDGPVIYERKAVDKLTLKDLERVKDPDRNAALIAAMRAWIEAGKPKNAPPLSPKGDPIRKIRLTTTDKPAVPVRGGNAERGEMVRVDVFRKPNKRGILEYFLVPIYPHQVADEKEWPSPPNRAARGATAEENWPEITAEHEFVFSIGPRTFLEVEKRNGTIIDGYFMGMDRFTAAIHLSAPYSTRVLVRGIGVLGLKRFEKFRIDRLGNRHAVSQEKRTWHGVVCT

SEQ ID NO: 5691 - protein, 1030 aa, unidentified
  REGION 1..1030: note = Description of Unknown: Cas Enzyme sequence
MSNRVLGLDLGSDFLGWALLEETNGSVKSIVDIGNRIFTRAVEDKVPTPKNVKRRNMRLGRRVIQRRSRRKQRMLNYLVSLELLPKGIQGHTQPEITLNELGDPYELRVKALDRQLTPHEFGRILLHFVARRGFLSTKKQAAGDLIDDPDTIIFLNKLDNESADSKEEGSFKADIKEVYASINASGSRTLGEYLHKLAQGQCKRNRQHEGGHLRTERKMYQDELALIWIEQEQYFSHLPTDFMSKDQGILQIIFYQRPLKLKNNKVGTCSLEPKNYRAAMARLESQQFRYLQDINNLQYFKPNTGQWLRISHEDKKTLISYFEHNPRVTITALKKQLGLKRLNKTNLEAKNLKGNVTACEIRSLIGEQWDNYEEEKQADLVEDLLSIKKKSALKTRLISHWGMSKAKAFELCLLEFEPGHGSLSLKAQKKLLPFLKQGLIYSRNDHATGELGALQAAGYLDAEKEQQDFDKLGVPVKTSSPIFNRALHELRRVVNAIIKQYGKPDIIRIEMARDLEMNTKRYKENEFQHLKKRKENEKAVDAYKKLALGKFPSHNDKIKYRLFADQGHSCAYSNKTIMLSQVFTTQVEIGYILPFKESLDDSYMNKVLCFVSENRTKGDRTPKDAWSGDDDKWLQITQAINRWKGLDSKVKRFYQTEADLQKSDFIALQLNDTRYIAKIALAYLQQLGCDVSVTNGYLVSQIRHQWGFNDLIRETDQKKRTDHRHHAIDAVVIAATSRQMYKKAVTQIERNKLNIERPYESIKDELAGQLQKTIVSYTSQKKLSGGLHEETGAGYIEKHGGLVYRKNLAPDFTLRNANSIVDETVKELVLAHLLKHGDDPKSAFAEGSFVYHKDNKTPIKRVRVLQSKTTKEKLEKSKFGIQDKSGKIFKYMSYGNMHHVEVVRNINTGKYQGVFITMMEASHRAKGIRSKLNPKGEKQAIIKRDHGSEWVFLMALHINDIVSIDGGEGQFFYRVQKLDSGSNRLVLRAHQASTLQDTKDELFLSISQDNFKRYSLKTHQINAIGIITDD

SEQ ID NO: 5692 - protein, 1709 aa, unidentified
  REGION 1..1709: note = Description of Unknown: Cas Enzyme sequence
MFSQRNNPYCELLSDTNVEKYFFNWFTVFRILMKNILFTFIQFKNSIIMTKNILGLDLGTNSIGWALVEVDHEKKTLKILGLGSRIIPMDGQEFSKFNAGQKVESASGKRTILHRARITKERYLLRRDRLHLVLNLLDALPQHYKIDIDFEKNGKKCGQFKEGKEPKMAYLSTKNAENKYEFYFEDAFNEMIEDLQKVNPEINNKKKKRVPKDWTIYFLRNKAMKEKISLEELAWVLLSYNQKRGTDFAEIENEDEKSDEIKEQLDLKVINVESKNDADGNYFEITLNDSESFKYKEYSTEQLTFVDDVKEVSKILKLDGAGNISPEKTIYQINDLYNLTLSSIEHNAIDDKKAKHKYDFIYTNGWKTEKKKEKFDVTYQKLQKQIQDEQKVITELFVISNKYDFKGKPDSIIPSIKLPDFNSEGSKDWTLLKKKTEKEIIKSEKSLSGWIYDVLKNDAITGERTKIIGGLFQTIDRKFYREELSQILKTQEKFHTNTLDNKEVFEKCVKLLYPHNEEHSKALLENKNALTNLLVEDILLYQRPLKSKKSEISDCKYEVDHYKEDVNTPTGEITDIPVYKKAVSASHPLFQEFRIWDKIHNIKLIQLESKDAEGKSETNVDITSQYFRPEDYHALFNHFNHRSTVAIDDFLTFCKDRFKLDIGKKGERKILWNYPVEDEFKGNETRKSFEIRFKRCGFEDFDEFMTQQKEIDLWHYLYSVSSTERKKVSETTDSTNPKFGKTNIFNFFTKYLKDENISDEIIDKLCRDFENYPKFPSNYASYSIKALNKLLPMMRVGENFLTSEKLDEKWQEKYPERAKTILSKINEIDWSSDSIDLSKIILNNVNVKAGEIAFPKGLFNTFKKFEKIQDFQFLNLTQASYFIYGRHSELSQAKYWNSPDKIREEIMSELKHHSLNNPTAEKVLKETMKVVADIWEYYGKSQKKFFTEIHLEVARELQKSNKEKKEITDRQKNSRAENNRLRNILEEFLSNSPYNAKKENQDHFERLKIVEDGAKLRSYSDKDFYTTNKDKFSKNDIEAILKKQKITKADFEKYKLWIEQGYKSPYTGDIISLTDLFNGNKYNVDHIFSRASITNDSLNNKVVCEAVINRFKSHRTGRGFIAQFGGKTHTIFDNKLNKNVTINLISEDDYVSLVNNQFKDSKRMILLAKEVPSGFTESQLNNSKYIARKAMELLSHIVREDGEFEFRSKNVIPVTGGITDRLKKEWKVNQIWTELLTPRFERLNKIHNSEDFGSYNISKSGHQYFDINTKAILEKNDKFDLKRLDHRHHALDALIIALCTENHVQYFNNINSGITNKKKGKMEAIQKQRAGIKRQIMYSEQDKEDPKEKVWRYMLPGSFRKKESINNEKDSVVDLVWENNFTTKDSKDYRKTILECLQNCVVSFKNDFKIVSKSSNKYESYYDDEGNLRLDKNGKPQKDFISQKNENQKHWIVRKSLHTDNPSAEITLNFDRLKLVGNLGKADLIIDEKIRDAVNEILGMFDGKIGEVKKYLIQNPILIDNREIEYADFKISNIKYRKRQPISSLSVRTGTGALPNLEAVINRINKVADIVLRNDLLQHLKMNDNDIDKAFSIEGINEFNANRKIPVFRLPISESASLKFKIGNKKSNNHKWVETGGNFHFRITKKDNSRDYETIPLRTALEMEKNILLRKQVDDNKDEIVLSPNDLVYVPLNNDEIVDFNNLTIQQIK

SEQ ID NO: 5693 - protein, 995 aa, unidentified
  REGION 1..995: note = Description of Unknown: Cas Enzyme sequence
MKKILGLDLGTNSIGWALTTQDFELKKGKINGLGSRIIPMSQDILGKFDSGQSHSQTAERTGYRGVRRLIQRNLLRRERLHRVLNILNFLPEHYANAIDFEKHFGQFKESQEIKLNYKKTIEGKHEFLFMDSFQEMANEFLEKKQNTKIPLDWTLYYLRKKALTKKISKEELAWVLLNFNQKRGYYQLRGEEEEENDTKKKEYYSFKVKQVIATEDKNSKGIWYHVILENNWIYKRQSKESLENWVGKIKEFIVTTQLENDGSEKLDKEGNIRRSFSAVDSEKDWIAIKKKTEQDIKESSKTVGEYIYETLLSNPKSNPKPKIRGKLVKTIERKFYKEELQKILKTQTTFHPELQDKNLYKACVNELYPRNEAHQNNIKNNDFEYLFLDDIIFYQRPLKSKKSTISNCPYETRIYFKDGIKQNPQPLKCISKSHPLFQEFRLWQFLRNLKIYQKENNEKGKLDVDITTAFFQDEVDWVHLFEFLNAKKEVEQKHIIEYLVSLKKIEKQNKTNYRWNYVEDKKYPANETRATFLSRLKKIENLQVDEFLSKEVEYYLWHIIYSVKDKQQYETALKTFARKNNIEEISFVENFKKHPPFKNEYGAYSEKTIKKLLPLMRMGTFWNEDEIPELVKDRISTIQERLESIDYDKEVFEKDKNDRLKTIVDDEIPKQFVKSFLSFKNKNPLTGLNTYQACYAVYGRHSEVGIIKNWNSPTDITAYLDEFKQHSLRNPIVEQVVTETLRVVRDIWQHFGNGEKDFFNEIHVELGRKMKNSNEKRKRMSDRNTENENTNTRIKSLLEELKSESNDDIRPYSSSHQEILKIYEEGVYQNPEVSYQKLTEDDIIKIKKNTTPSKAEISRYKLWLEQGYISPYTKEIIPLSNLFSIDYQIEHIIPQSRYFDNSLSNKIICESEVNQLKDNRTAYEFLKDENGRIVSLSNGNSVKLLNIEQYENHCTQYFKNNRTKLKNLLSEDIPEGFINRQLNDSRYISKLIKSL

SEQ ID NO: 5694 - protein, 1042 aa, unidentified
  REGION 1..1042: note = Description of Unknown: Cas Enzyme sequence
MRLGLDIGTNSIGWWLYKTAPNKGIIEHIAGGVRIFSDGRNPKSGQSLTVARREARSSRRMRDRYLRRRTVLMEKLSTGGLMPENPAERKALELLNPYELRDKGLSEKLPLSHLGRAIFHLNQRRGFKSNRKTDANDNEGGKIKEGAARLEIAMMADNSKTYGQFLNKRLKKDSSNPIRTRLGVVKSEDGKESSGYNFYPTRDLFEREFETLWDAQVQYYPEILTDDLHDEIQRIIFFQRPLKEQKVGNCFFEEESRLAKAHPLFQELRLYQTINALRVKESNITDRPLFIEERDALILFARKKKKATFAGMRRALKLRPDQTFTLERGNRKDIDGDEIEVAFCKAYGSNWASMALDQKWLIIQTIQNAEDNELLVAKLQSDYDLDAETAEEMAKVRLPDGYGRLGETASRKILKELIRDVVLYSTAASDIYSSHSDDSTGEVFEHLPYYGEVLQRHIIPGSFDVKQHDPDKNTAEYWGRITNPTVHIGLNQLRLLVNDILDIYGKPNKIVVELARDLKNSDAQKIQINTNIKKATEAAQKRSEKLEELGIKNTGDARMRLRLWEESHHDATKRCCPYCCKPIGVKNALDGTQMQIDHILPYSRTLDDSPSNKVLCHAVCNQQKRNKTPFEVWGSNPELWEKISANMKNLPDNKSWRFGPDAMDKFEGDRHFESRQLVDTQYLSRIARTYLSKLYPEKGSAPVQVVPGQLTEMLRRKWGLNEFLHDAELAGKEKNRQDHRHHAIDAAVIAATDAGLLQRVSKSAARNVDQGRSVLKNIEPPFGGFRDGLKSVLESITISHKQDHGSVGTTQKTSGQLHNDTAYGLLEGGLVVTRKPFDTLKPNDISKIRDVNLRNILSKKLEGLVGKDHENELKRFSEIDPHYKGIRRVRMVEKLNTIPIKDKDGKSYKGYKGDSNHCVEVWRLPDGTWKSIVLTTFEANSKGLGSTRPHPTAKLIMRLYSKDQVAIEHPKLGSARLIIAKIGKNNIVLYQNNEANVDARHRDKNDPFKYVNVGLGTIKKYRLRKFGVDRLGRITDPGPFNN

SEQ ID NO: 5695 - protein, 1064 aa, unidentified
  REGION 1..1064: note = Description of Unknown: Cas Enzyme sequence
MPRKIGIFIDVNTIGWTLIDQPTHDIVAMGTHVFSPGSENFGMGRREISKKFNKRIFRLRRVRYARIRVRKIYLLKILIQNQMCPLDIDDLKSWSTKKVKPTKNFDEWMSLDPYDLRAKAVNDQISLFELGRILYQISIHRGYRFGERNSKLVESVLKEGAPEEGKVGFAEMRSLTREETLGEYLNSIKPVEGTSYRRTSSRLRNRICTIQMYFNEIHEIWKVQQNFFHILSDGLRDSLIGSPEDPDPSGALFYQRPLKSQKHKVGYCIFESKKTRACLSSFEYQEVEAYKFINSIEFSGQPLNEIQRSEVLGYFFTNYRIKFKDIKRLLNLEYSQEFNYKDDEGFKGSFIHSELSKTKFFGRSWFQLEEKKRQDIWHALYFFNSSYRLEAYASEKLNFSDHSSFSFSKIRMDKNYAPISKRACNNILFFLRLGIPYSLAVILGGVKNSLSKSWKSISEDQIKDLIFIVEDTHLQSSSSEFVVNLKKNLIKSGFDSIEEHKLYGSVAKKKEDNTILNKFPVDPASNKQIFQLKNTILIQSIFELRKLLNKVIETHGSIDEISCELSVDIKVSRMQRFLHRMDQRRNQTNRERYIRILGDRKENITPMNILKYELWEECKGTCPYTGIEISLDKLWTEEININYINPWSHSLNDSVFNKTLCYSFFQDILKERNPYEYFNEEDPDAWESIKKRTAKLFSSTSLHPTSYGKFKRFIKKYNLRNLNVSQFNDSNSLSRSVHSYLAQICNQVNVSPGNTTSSLIEEWLLTSLLEKDQIDKDLRYPAIKGYVNAVKTEEHILELSKRNKYFRNAKKTKFPFPALNHLTHLDYHINSILVSHKRDSRVISKQTRVLEHNGVKVLNRGWSVRGMLHKETIFGKRTPPGMSEGLHVRKPLQSIKILSQIDKIVDPVIRELVREAVKSDSNGSSQISFSTFFSKASDGSLIPKLFLPNTKGGDPVPIKKVRIREQYTKDVNVKEGVNQHVIPRNNHHVIIYLDKEQNFQEEVVSFWSATKRKKDGGRVVQLPNPESDTLINTLRINDMFLMGTNDLEQDLNLESRSYLKSHLY

SEQ ID NO: 5696 - protein, 1432 aa, unidentified
  REGION 1..1432: note = Description of Unknown: Cas Enzyme sequence
MKTILGLDIGSNSIGWALIEQDINNKTGKILGMGSRIIPFDSDLIKNFEAGRSASLAAERRKFRQMRRLKSRYKLRRERLIKVFKVLGWFPENFPEKFDKLNHFNINEYVPFSQESIEEAKKVFNVDNLPIDWTIYYLRDKALKQKITLSELARIIYHFNQRRGFLSTRKTEEIDTFKQGDEEQNDKSKEILYEYLKVEEIIDTNEKVGNKNKFKLIATSPDNIKYEGSITRKDLPKDWIGKTILFEIKKTTLKSGEVKIEFNRVLESDWKKQITALEKEIVSSGLYVGQYHFKNLLADPNYRVKEKVVSRKFYQEEFKAIWKKQAEYHPELNDTSKIPLIAETLYPHNIQKQRELSKLNLLEIIKDDIIYYQRPLKSQKKLISECRFEKKNYIDDLGRQPGYKVAPKSSPLFQEFRIWQDIHNLRVYLKEKKLDDGSRIFDVEETNFLLDTKGKEKLFDLFDSKTNIKIDDILSALSKPDYPVSKKTHRINFPDDREFKGNETKAKFRNAFKKFNYNEGEELLQDRNKLFELWHIFYSIDDEKVISSVLQKKFGFSQELANYISQLEPFKKEYAAYSSKAIKKLLPLMRCGKYWNQEDISDDAIERINKIISGELISEFTERVREEISKRNFMTIQDFQGLPVYLATYIVYGLHSERENYEKYDNPDEIKVDKLIPNNSLRSPIVEQVIRETLKVVQDVWKQFKQPDEIHIELARELKNNAKIREQLTKAMSENQKERKRIVEILKHIKNANPNSEKDIEKLRLWEETATPEHKKAMPKISTNPTSEEIEKYLLWGEQNHISPYTGKVIPLSKLFTQEYEVEHIIPRSRYFDNSFANKTIAEASVNKFKGDLTAYEFISMYGGTIVPGTKIKLFTLEEFKQHIDGIFKGKKKGYFLKQEIPKDFINRQLQETRYITRKLGELLYPIAKDDVVFTTGQITAELKENWGLIRVWKEILKPRFERLEKILGEKIITINKETNEIIFNIEYDKRIDHRHHALDALVIAATTREHIRYLNSLNAANQEDLIKIKYQLVKKGIREFRLPWPSFTKEAKEHLNSVIVSFKKKNRLVQRGYNKYQKWVFENGKWVKKFVLQDRSKLIAIRKSLFKEPLGIIHLASYKDVPLTEAIRLQFEYLTNFKNHLQPRIADKNLRHKVNQLIKNCSFDLNETLNYLKQNPLKDNKGNELKKITILYFEEYAAKRVNIDESFDLTKIDKIPYANHPNNRIVKILKEHFSEYGNKTSEAFKGEGLEKLYKKFGIVIRKVTRTENVGNKINLNDKLLEIDKGGNVFFIIYQNIHDPYDRIVTEESSISLLDVIDAYIQGKKISDLGENKPGYKKIILSPNDLVYVPDDGEVIESIDWNNRKALSNKIYKVVSFSGRQIFFVPHFIAKPIIETKELGSNNKSERDWKGKMIRDRLIKLNVDRLGNVYPE

SEQ ID NO: 5697 - protein, 1043 aa, unidentified
  REGION 1..1043: note = Description of Unknown: Cas Enzyme sequence
MGKIFAFDLGTGSLGSCVREDKEIKDLSVELLPNDFATLKEARERRRQIRTRIAHKKREEWWKEQAQKAGIEVLETGHLENGIFIKPDDRISRQFPENGDGTIYNSSLLRIAILQGKKLKGWQIFKAVWSAIQHRGYDSNLPWIRESKRNIDEDENAERISKDEKENQEAVKKYNDTLKDVFGDKKEYYYPCYYEAYKMGIWAPNDPNNLNKKFSNNPNPARNKDGKVDLVIPRDLIEKEIKDMLVKIGENYPYIKENLDFILYGPGKSKYAAYKSKEYRKYLGKDWEWQGLLSQKTPRFDNRLISKCVLIPRLNVCKAKDELNKEVVFLMKLKDVRYYKIDGGEEKYLTNEEIKNVYEKFKDKLKITERQWTKYLKENLKGVPNPSQLVVESPKIGGRSRFCRPALRIIKEIILSGKSPHLLYKELVENNKNTDPKKGLVKEDYSFLLKMPEKWENFHIPDNRIEESKLDETERKNLIEEIFFKISNPVVKHRLKIFYDKLVEYKNKFGEPEKVIIEFVRNPNEGFYGEIRKKKIIAEQNKNRKESDLAFKEAQESKLKGREAVLKMKLYREQGEFDLYDGKTIETNKIDDYEIDHIVPREDGGPDSYINKVLTSRNNNNNKGKRTPYEWLSKSDNWEEYFERVKKLPKDSKKKKDLLVSANAKELVEKYTQLAETAYIAKLSQKICHLFFGWEQGTEGSKRKVIVANGGLTAKMRNVYGLNRILHTGLSDEEYKELCKSGEIDKKNRDNPRHHALDSMVLSMLPEIKMNDRKKDFFPIWFNPDYCREKLEQCFPKNIRYEKPKLAETIYGLREIIDDKGNKKYIFVSRLVGDVKNIEGYYDIKTAKKYLDKIFSDKIRKDFKEKLDSNPSNEEWKSFLDNYFAGGKPKKILLKVSDEYTYDKIKDFLDGKVKNCGEFIKGRLPGQYLKQKKEAYGYFIYKNEKEKWIRDVIYAFDSVFNKMKEIKSKYKEAYFFRSEMLVEVQKDFNIKLKRQDVIIPKGKYYLKSIRHDNYCEIKTIDSSKEFLINIKYIMEDGLMKPIS

SEQ ID NO: 5698 - protein, 1032 aa, unidentified
  REGION 1..1032: note = Description of Unknown: Cas Enzyme sequence
MAQVEGDVKNRMRKYILGIDLGVNSLGAALIDSENQAIVWTGVRIFSGPFEGDYSSGIEESRARQRRTKRQLRRQIDRRRRRLQRVFTLLQRFGLLPSGERRTVLPALDAELRKRYPETETLPYFLRGRALDVKLEPFEIGRCLYHLAQRRGFQGRTAFADPEEKSGGKFGDEMKGLWNEICSSGARTLGEFLARQPAREVRLRGRHTHRLMYEQEFNLIWDAQKQHHPEILTPEHKALLFQALFFQRPLKSVTHLIGDCSLERGEKRAPCWTLQVQRFRVLSAVNNLRVVEPSGKIRPLEPQERELLAAESLRREQLKFSTIRRILKLDKDCRFTVEEGGEDCIPGNATSARIYKVMGDEWLKWPQDRQEALVAILGDTSRYPTDDDLVKELVTALGLPPENATRLCAVALPTGYASISLNAIAKVTPRLEKGMTFAEARRILWPEDFTEKPPLALLPPVCDTDLKRELRNPAVLRALSELRKVVNAVIREFGKPVSIHIELSRDLKRNRKERQQESERMRSRERARSQARTALAPYYGENVPNREIEKYLLWEECGHRCPYTGEVVALSDLFGPYPRFEVEHIIPFDRCLDDSFQNKTLCEINKNREKGKRTPWEAFGHTPEWPSMVERVRAFGNSAKLRRFIIRETEAERLLEEFSSRQLNDARYASRLAARYLGLLYGIQGSDNRRIIVCAGAVTAYLRQEWDLNRILSAQPVKSREDHRHHAVDALAVALATPAQIKALAECASRAPQVGRRRFAPLPDPWPGFRDQARRAILGTLVSHRPQRKLKAALHEDTYYSPPVERDGKLSVRCRKPVNSLSANEINAIVDPTVRETVRKAWEEVGRDSKKLLNNWPLLQTRRGDLVPIKRVRYYKTQQVQPIAAEDPARTRYVIPGGNHHMEIWAVLDRSTGKPIKWASETISVLEAHRRYRQGSPIIQRDHGPDTRFCFSLSEGDLVKTRRSERDSERIWYVRSVKADGRVVMSPATDARKKEDISKSGELWQVSVNPLMRLGAAKVVVTPLGKVIYAHD

SEQ ID NO: 5699 - protein, 1139 aa, unidentified
  REGION 1..1139: note = Description of Unknown: Cas Enzyme sequence
MSNLLGLSLDVGAIGWTLIDSDSKRVKDMGTYVFPIGSENYGSGNREVSKNSLRTLNRSKRMGYSRKRRRKNFLIKLLVAHEMCPLKKSHIHKEAFKSCFQRKEFVDWMKLNPYQLRAKAVNEEISLHELGRIYYHILIRRGFPFGKRNTDSKTNTLFTGIPHFNRLGIRDLERKKKEETLGQYFNSLLPPENVSYKKAEERIRNRFVNREMYIEEAHIIWNKQTTFHTELNEELRNKLIGSPEGNSVSIGAVFFQKPLRSQKHKVGKCTFEPNKSRCAISNLVYQDLLAYKWINTIKKDGGCLSHEESEKIYRFFMANSRFKFSEIKQLLGAVNLQFNKKNSDVIYGSSLNSRLSREDLFGMDWFDLPFSKRKDIWHALYFFNNSDQLQIHAQQKWGLGELAAQKIAKLEVNKRYAPISEKAAKNILYFLKRGVSYQLSIVLGGVKNSLSSVWDNIEETDIQFIINRVVSLYRQNVRSGFLPKLKEFLIDEMQFSDFQIKKLYGLQVQNSDFTVSKKFPYGAKEDKEINDFKNPLLKNTLFQARKIINSVVDKYGTIDEIKVELNTNLKTNKFQRYIYRLDQKRVANNRYRYINRIGSLSENITQLNLLKMELWEECNGICPYSGEPIPLETLFTDNIKVVYIHPWSKSLNDSSVNKTLCYSYFAERLDENSPYEFFSDNPEQWEKVVDRAADLFSNSINYPANQKKFRKFVKRYYQRNYIKNQLDDPNFVSREVACLLSKVCVRVSISSDYTTDHMIHAFSLDKIIDPTHEKFRYRDHRNYGLKSYIVAIRDNDYLKELSIRNKYSTLNNAPLFPIPHDDFRNEVNYFINNMLVAHKKQYRFYSTRKVNYKSGDQIVSNRGFAPRGSLHRDSMYGKRTPPNLKTAYHIRKPLESIRTMGQVEKIVDVNVKNAVLKVLKNANLSDENTFSPQQVFFKNYVNGSKKTKVFLPNKNGDPVPVNKVRIREALNSAVKLKKDIDQYVNLRKNHHVLIYRDENQDLNEEVVSFWEAIKRIESGASLYQLPNDDCEMVTALHINDMFLMGVNDLKEPVEDLTKDNLVKHLYRVQKLSSRFYEFRQAHNNQLDATEYPNYIRINNFGSRKTGWSTYQPLKVEISPIGDLVVAEERYLYNTQKLIL

SEQ ID NO: 5700 - protein, 1359 aa, unidentified
  REGION 1..1359: note = Description of Unknown: Cas Enzyme sequence
MKKILGLDLGTTSIGWAYVLEAENENESSQIKGLGVRVNPLTTDEKGDFEKGKSISVNADRTLKRSMRRNLNRYQDRRKSLIKSLKKSGLLNEGVALNEDGKDTTHSTYQLRSKAAKERVEKDELCRIFLMINKKRGYKSSRKLKTDDGQEIDGMSIAKRLYDDNITPGQYCLNQLINNKRVLPDFYRSDLKSELNKIWGFQKKFYPELLKDELYDEVEGKNKGQTWKILERPWSIEGILRTGSRKEKQLEIFQWRNSALSSKMGLENLAIIIQEINGQISGSSGYLGEISDRSKALYFNNQTVGEYLYEQLRKDSRARLKNQVFYRQDYLDEFEKIWETQKRHYNELTEELKLEIRDTIIFYQRKLKSQKGLISFCEFEQKEVSLIIEGKEKKKIIGARVVPKSSLLFQEYKIWKNLNDIVLTDISNGEKIIFDLETKRMLFEELNIRGNLKSQEILKLIGEKPKDWEINFKEIEGNRTNQALYEAYMKILEVEGHDFEEYQPQGTELKEIVRDYFNSAGINPEILNFDGEISGLEFEKQPSFQLWHVLYSFEEDPMKTNSVEKLHKKLVEKFGFSMEHAKILSNVVFQEDYSNLSSKAIRKIFPYIKDNQYDKACQLAGYNHSNSMTKEENDKRTLTNQLELLPKNSLRNPVVEKILNQMVNVVNAIISDPLLGKPDEIRLELARELKKSAKERAEMTSQIGSAKKLNDKYRQTLKDEFGIKNPTRNDIIRYKLYLELKPLGFKTLYSQTYISREKIFDGEFDIEHIIPKSRLFDDSYSNKTLESRSINIEKGNDTAADFIVEKYGQDEMDAYKERVIRLNKEKENPISRGKMNKLLMTGSEIPDGFIERDLRNTQYISKKAQEMLLKSFRVVDTTTGVITDKLREDWGLTEVMRELNIDKYRSLGLTKNIEKKNGSIKEVIQDWSKRNDHRHHAMDALTVAFTTHGHVQYLNYMNARKDETHKKHGVIYALENKLFQSAKKGRKSFIPPMDNFRDQCKLKLDAILISHKAKNKVVTRNINKIKVKGKVHSKIELTPRGQLHKETIYGKILKRQSKEVKIGGSFNYDIISKVANVKFREAIFKRYEENGGDAKKAFSGVNSLLKKPIYTNQKLKVPEKVLLTWYEDEYVIRKEVNPTNFSNLKQIEKIVDRGIKRKMIRRLAEFNGNAKEAFSDLDKNPIWLDKRNGVFIKSVRIKGVNNAGSLHEKNDHHGESILDSKGAKQNVDFVQFGNNHHVAIYQDSEGKLYEMVVSFFEAVRRTHAKEPVIDKSYNEHMGWKFLFTMKQNEMFIFPSEDFNPKEIDIMNPINYPEISKNIFRVQKVAPGDYSFRHHLETQLIDNSKSKGFTWKRLGLSGIN

SEQ ID NO: 5701 - protein, 1058 aa, unidentified
  REGION 1..1058: note = Description of Unknown: Cas Enzyme sequence
MSKVIGLEVGIASVGWAVLDTDKQKIIDAGVRVFTKAEAPKTGSSLAEPRRLARSTRKRLRRRQHRLERLKDLFVALGLIARARREAAFISTKHAPSPWQLREEGLIRVLNPEELARALFHIARRRGFKSNRKSELGDKDVGKLLAGVEENTRLLKQGRYATVGEMFSKAPRFAAKKRNHSAFYGHTVARELLIREVEILFERQRDFGNSAAAKALEEDYLAIFSSQRSYDDGDQINRMRGFCTFESKQLRAAKLSYSAECFVLASKCSNLSFGEEGKARQHLSLEQRRQLTALALQLSKLNYKQLRQKLDIPEASRFVGLNYTRAAKQGKDPEEQVFAELKGFHALKKAIEKKCGKTAWTNLAAKPTELDTIAEILTCWKTDDNRQRELSASGVSQMFIDAVIPLNIFSQFINLSTTAIHRLLPLMEQGMQYHEACRQIYHGYGKPGRGQKQQLLPLIPFDDIRNPVIFRALTQTRKLINGIIRKYGSADRVHIELSEELTKSFQQRKRIESGKGQFRREKERAQEQFAAVYGQLPNGHELHKFRLHQAQKGRCPYSGQAIDSQRLIELGYVEIDHILPWSRTFDDSLNNKVLVLGAENQQKGNQTPYEYIANQDPASPNWQRFRAEVAQYPQAKRWRLLKQNLDQKEVEAFRQRNGTDSSYIAGYLKRFIEQHLKIAGGNKHPVQTCNGTLSNYLKVRWGLLKDLSESDRYHGIDALVVAGLTPSLIEQLAEASREQELWLTDGLQARDKIHLPQPWEGFSQAVRDYVENDIFVSRMPCRKLTGAAHQETVRSAKHIDKGYAVVKTPLANLTLQNLENLHDKDRNLALYSALKDRLADYKGNGKKAFEEPFYMPPGVKKPKLEKTSPQVKSVKLRTSMNDGVPINKGIAAHDSMIRTDVFVRNGQYYLVPIYVADRVKAELPNRAITQRKAKSDWLEMDDNYQFCFSLYRNDLIEIKHKTKGKLLSYYAGCHSSTGAINITLPDRSLPSCGNSWISDTKLAKMQEKGDREIQGIGVKTGLEYFHKYEVDLLGAISRVRCGGDRLGLANPSEHPDKG

SEQ ID NO: 5702 - protein, 1004 aa, unidentified
  REGION 1..1004: note = Description of Unknown: Cas Enzyme sequence
MLTRRLGLDLGTNSIGWCLLDLDSHGDPVSIFRTGVRIFSSGRESDGKSLKSVRREAKSARRRRDRFKQRQIKLINELVRSGLMPCDGNERQELAKKDPYDIRKRALDKAVTPFEMGRAIFHINQRRGFKSNRKSGDSEAGVVNQSIIELRDKLADNGARTIGEFLADRHGSLDENNKYKLNTKGNTVRARRLGTGTAALYEFYPNRAMLEQEFDELWKKQVEYDASLYNEEAKERIKEVVFFQRKLKPQEVGRCTFFPEEHRIAKAMPSFQRFRIYQDVHNLMWIDDQGSSHRMTNSYSTTENLFEYMEKNQKITFEKVTSILKRENEDYNPAGYNLQADKKKELLGNQTSAVMRNEKKGIGKSWDTFSLEEQDELIRILLIDEGEDDEVSVTLATTFSLTQSQIDKCLLVKAHLPSGYASLSRKAIDRILEVLAGTGLLYSEAVEQAGLAEKNMDQKGQENRLEYYAKALEGVGMGRQEDERSDKEKRAGKPYTDEQKYGTLSNVTVHIALNQIRAVVNELIRLHGKPDEVVIEVARDLPKSEKQLAENNTYQRKNRANNERISKILTEHRISVNGDNIRRYKLWEELSSDPMSRACPYSGVIIRLSDLFSSRVEVDHILPRSVTLDDSMANKTLCSLEANRYKSNKSPFEAFGSSADGYLWTDIVARSKHLPKSKSWRFWKNAMQRFDEEGGFLASQLNDTRYISKIAKAYLSTCLEGPIWVVTGRLTALLRHKWGLNSVLKGHNSEENAAPKKNRDDHRHHAIDAAVIGLTSRSMVLKAAKAAKRAEDQGLSAAFEGQFDPWPSFREDVKAQIKDIIVSHRPRMKSQGPLHNATALGLVEYNENQASSVVHRVPVSFLTKESRVAKIKDPTIRLALLNETSGMKDKAFEEAVQNWFSNENPRIKSLRIIETVSVVPVADQSGKIYKSYEPGGNAYIEIYADLSTGKWKSEIVTRFDANQKSFVPRWRRENQTARAVMCLRINDLLKLSDDGEIYRVQKMS

SEQ ID NO: 5703 - protein, 1067 aa, unidentified
  REGION 1..1067: note = Description of Unknown: Cas Enzyme sequence
VRYRLALDLGSTSLGWAVLSLGPEGAPRAVVKAGVRIFPDGRNPKDGSSLAVTRRAARAMRRRRDRLLRRKARVVQALVDLGFFPSEIAGQKALEGLNPYALRAKGLDSSLTPHEFGRAVFHLNQRRGFLSNRKTDKKDSDSGAMKTAMSAMRAALSPTGADGKARTVGEFLFRRFTDPNKQPQERTVRARYRQARIEKDGGGARIDKSYDLYVDRAMMQAEFNALWAKQAEFDPARYTTEAKRKLDHRLWHQRPLRPVRPGRCTLIPDEERAPLALPSQQRFRILQEVNNLAWLDENLQDRRLSLQQRDALVSALERGNKSFDAAVPKLLELTGSVKFNLADAKRSDLKGNITSIRLAKKDLFGEAWYRFDSSKQDEIALRLLQEESEMALVAWLQAETGVDEARAEAIANTTLPDGYGSLSRKALALVLPELCAGVVSFADAAKAAGFHHSRLSENAEVPGRTVEIEHVMPDTGEIKHFHVFRELPYYGEFLQRHVGFADPDAGPDDPLEKQFGRIANPTVHIALNQVRQVVNALIRHYGHPKEVIIEVARELKQNQEQRQEDQRRQAEQQKRNARLRNSAAELLDCAPEQVKHGDIQRLILWEELSFDAANRRCPYSGVQISAQMVLGPEVEIEHILPFSQTLDDSLNNKTLAVRQANRIKRNRTPWGAHDDFAAQGWDYTGILARAELMPRHKRYRFAVDGYQKWLKGGEDKDGKGFLARALNDTRYMCRVAREYLGLICPQDTRVIPGQMTALLRAKFGLNHVLGLSGEKNRNDHRHHAVDACVVAVTDQGMLQAFAKASAAARERQVHRLVEEVPLPWLTYPDHVRRAVQNIWVSYKPDHGHQGAMHNDTAYSLLGEGRVRFHKVIDGRRTRLDDNLKVIEFANQQANARHGKLPNGEPRPYKGYKGDSNYCIEIFRGDGGRWDWEVVSTFEAYQRVAQVERELRRTGNMDVRTVCRSAVNALRDPSRSLSGKPLILRLMIGDYLRAQFKGKLRLLSVKKIKSNGGIFVAEHHEANVRQREDDKDVSLVYGSFSANSLRKAKGRQVTVSPAGELSDPGFKD

SEQ ID NO: 5704 - protein, 1078 aa, unidentified
  REGION 1..1078: note = Description of Unknown: Cas Enzyme sequence
MKAKGKIQQVATGNKLQLAFDVGHSSIGWAVLQPTGKEASRDLSINILGCGAVTYRADDCLASARRAYRRQRRHIRSTRQRIARLKILLAKLAVLDDAQLNKPGCAWPWLLAARVLAGGKLLTWPELWDVLRWYAHNRGYDGNRRWSAAESEAQDEDSEKEANARSLTGHHKTQSMAATFCAMSGLNPLGNKKSANLPGDKRPKGQNAAFPREIVEREVREVLQKHFTKLPKVDANLERTLIGKDNQDKLAWQAIPCPELKLPKRYQGGLLFGQLVPRFDNRIISTCPISGEKVPSRNCPEFLNFRWAMQLANVQVARFGEQKLSPLSAAERKDLDEQMRAAGAMTADQFKKAVRSLTSAIRDNLDTMLMHPDAKEALLLDPVQKLVCSDELAPFWQLLPERLQKRLRGKWRHGKVFTLAQIRSQMEALGDVSAFDAELQTQLDTRNTKTKKKDKQVTREELLGKHFPTKPLKLDGRAAFARHLLKKAYEEVLAGLHPKEKGGCLFLSEEIRKKQQEREIAEQTNNHLVRHRLLILERLVGDIVKEYGGGDNEQISKATIEVNRDLREMSGKTAKEKAQDLGLRIANHHAVSDKLEKALEEEGGRIPITAGLIRKARIADDLGWKCPYTGKDYDPKELVSRHVDKDHIVPRSQRPSDSLDSLVITYGAINKWKGNRTAWQFVEQEQGKFVPDMPNLSIMSLTRYKQFIEGLETYKGHDDDKKRKKRRKDLLLLPKYEEKEFVPRDLTQTSQLVRLGAQVLRKVLPHLSQNDVVSLPGSVTGTVRKAWKVLGCLSLANPQVLDEEGNVKTKTEIRDITHLHHALDACVLGLTSHFIPNNGQVWELIIKRNPNDTEKKQLTALGVFGFSKDNRFELRDLDDRLKEQLRQRLAERRVVQHVPARMDGLRVEQNTWRVVEVKDGEATIKQSIRQPDGSRSDKETSEKATKLLGLEPGKLSANKGVLIIPDNFGVALDPQPTIIPFHKVWTRLNELKKVNGPKKPRVLRNGQLIRVPEGRYKGVWRVFSAKNNATGMAVDIGWPDVTRLRNKTEGHCINVLLKSLMKSNLQVLKSPLTGVSSA

SEQ ID NO: 5705 - protein, 970 aa, unidentified
  REGION 1..970: note = Description of Unknown: Cas Enzyme sequence
MKLRLGLDIGTNSIGWALFNLDENNDPNEIFRSGVRIFDDGRDPLSFSSLKATRREKRSARRGRDRFLVRQKQLIEELINIGLMPQDETSRKSLAFKNPYIIRKEALDNDIDPFDIGRAIFHINQRRGFKSSRKTDSNEGGVVKESIAVLEQNLMKTGSRTIGEFLANRNEKRETVRARRLGSKSSDLYELYPNRYMLEQEVDLIWKAQNHYNASIFTEVNLTKIKDIIFYQRPLKAQEVGRCTFLPDEYRIAKAQPSFQRFRIFQELHNLSWIDRSGVAHPVVNDKILIDRLAEELNSKKKITFKQMRAIISKLGIVNHHVEFNLESDIRDHLLGNQTSDIMRSKKGIGEQWDTFSNEDQDNLISLLLDHTIDDEEAKELLASKFKIPEDKIETVLDIRLPDGHGSLSKKAIDQILPIMVDNGLNYYDAVHEAGLEIANLFDNKVLAKNLDYYGKALSGHVMNASGKLEDSDEKRYGIITNPTVHIALNQIRLLINEIIRLHGKPEQVVIELARDLPMGADGKKQLKRHQEDNQKKNEDIRIELKNLGVIDNRANRQKYQLWQRLGNNPSDRSCPFTGNIITISDLFSDRVEVEHLLPFSITLDDSMANKTICYRQANRDKSNRSPHEAFGSSPDGYDFEAILERSKNLPKANQWRFLPDAMEISEKEGGFLARQLNDTRYIGRYTSQYIESIIPKNNIWVVTGRLTALLRGHWGLNSILHGYNSEADKTDKKKSRDDHRNHAVDAIVVGMTSRSLLQKISSAAKKAEAKYIQRVLDERTDPWTGFRDDVIDEINKIIVSHRPRKKIQGQLHNDTAYGLIKLNDNGPSLVVHKIPVSSFTKVEHVEKIRDNLLRSQLLDVTNGLSGKDFADKLEAWSFEKGIRSIRIVESISVIPIKDKEGNNYKAYKGDSNAYMEIYKDPISEKWKDEVVSKYDANSKNYIPNWRRDYPTLNLIERLYINDCFALEEE

SEQ ID NO: 5706 - protein, 1026 aa, unidentified
  REGION 1..1026: note = Description of Unknown: Cas Enzyme sequence
MSKTILGIDLGSNSLGWALLSADDDGKPTDIIDTGVRIFPKAVEEKTPTPKNVKRRTSRLARRTIQRRARRKKKLMNYLVSLSLLPKTLLTDLQPEGILNSLGDPYLLRKKALDQDLSSHELGRVLLHLVQRRGFLSNKKTLLGRDMLDDPDVLAVLGEDDLDESDGAEETAFKADISLLRAEIRENGCRTLGEYLAKRPLHECKRNRLDEHIRTDRQMYLEELSLIFERQTKCHKALTEEVRGHIEHIIFYQRPLNLNKDRVGKCSLEPSKKRAAMARLEYQRFRYLQDVNNLSYFDPNTEEQIKLTEADKQKLYAFFETKESPTFPQIRKLIGLDKSCEMNLETQVKKMRGNTTAVKIQKCYTGWSDLSADKQEMFVEDLISIKKKSALKQRLMSYWKMTGVEAVQVCLLELEPGYGSLSLKALRKLLPHLEAGLIYSDSRQAAGYGYEVEEVEAQDTLGLPPEIPNPIVSKGLGELRRVVNALIAEYGKPDVIRIEMARDLEMNTKRYKSFMAQQSKNTKSNDKASDAYKKIAQEHPKLQLSSYPSREQKIRYRLWLDQSHMCPYSCKQISLSALFSADIEVDHILPYSQSLNDSYMNKVVCFAKENQIKGQKTPKDAFGASTDKWEQITQAISRWPRELSSKRDAFYRTEGELLERDFIGNQLTDTRYISKEAGTYLKSLGSDVTFTRGAMTSWLRHQWEFNDLLGITAEKERTDHRHHAIDAVVTACIDLSLYRSLVAQSNDLERSKSNLTMKDLYVTPPIIEFKDKLAQKLDSLIVSHVPQRKIAGALHEETGVGFIEGIGTVYRQRLDSDFDAKKADKIIDVTVRAIVLGQLNKHGGDPKKAFGDNNKVYHSDGKTLIKRVRVVQSKTTLKKLEENKFATRDRNGKAFKWHAYGNTHHVEILKNIKTGKYKGDFVTVAEAALRCRSKNTPIINKDHGEEWEYQMSLHVNDLVQLTVADDTEIYRIQKLNMVNAIVSLRLHTAATIRISAEGIEKSAGTLVKDYKMAPVLINSIGKLMND

SEQ ID NO: 5707 - protein, 1245 aa, unidentified
  REGION 1..1245: note = Description of Unknown: Cas Enzyme sequence
MPVILGLDIGSNSVGSAWVNTDEWQIHLGVSVFPAGVDEQENKRGAPKNQARREKRSQRRNIARRAGRKRHLRRLLTQAGLLPDKPANLQALFDTNPWQLRREGLSRPLTPHEFGRVLVHLNQRRGAVGIETDPEDPEEGKVKEGIDRLNALLRERGSQTFGQLMADLMDERRQHDPETGVAWHEPVRNRQYRIDETQQLYADRPRIQQEFSTLWDRQKTLGGPLAAILTDDLRKQLDDKDEDQTWRHRGILFGQRRTYWDTGTLGRCDLEPTERCLPLADMYAQEFRVIETVNNIRIARRGEAERTLTTEERHKVIDALRQQKTGSTATVRKALDIHKKAVKEFYSLNLERDEGREINTDWFYREIVHGVFGEPRWIQMDERGRESVNRAILKFDPDTKEHEPRLRAGAAQWWGLDAEAVDRFIAAWKSRPKLEKRLKLSRRAIRNLLPYMNAFDEENQRWPTQIEAREAFARDPNATDRTTGQPATPSQQERYALGAKPVTSADRRYIRKHEEPIPPAPMLSNPVVRKAIHEVRRHLIAWWRRFGRAPDRIVIEYVRSATQPEKVRNETLARNRRREGIRKRIIEQFDLATLSRNQQSRAVERVLLCRQQGGICAYTGDPISEKTAAEGRDVETDHIVPKSRSQDNGLNNKVLVTREANRGKGNQTLSEWMSPQQFADMEQRLQHLDKGQGADDYFSKKDCGRKWENLHREAPTTENFLNSQFTDTAYAAKQVGQWLREVLYDGERDGQRHVLTTKGSYTSILRNDWGLSESDLDRQWHEITEPDENEGDNQSRRARKEKNKNRADHLHHAIDAVCIAFAPDELQQLAWSAQKQEIARAQLGYWPRRKALPPPWPPLPDNPTDEQFQEAVATFRQQVLAAAQQVTVSHRPVKRKITGRFHEETAYGPVAGRLPRHRTEDASTLFTNRIQATALTPNHLRVPAGWDDLSAQLDNHQSTLTEKRTIRKQLAGMPDPSPAKSGIVRDRALRDRIRKCLRAHGVNPDSFGKDDIKSLVCNGKLTMAAGIPIKSVILLRTNNDPVMIPRKRWDHLSDQIVHDTDPRTARVYIGGNNHHIEIRQNIKTGKWTGRVVTTFEAAKRNAARLRALKQAGVPTPEKWRELPHGERMRLKPVIAEINRRFPIIDRSDSETERFVMSLSEGELIYARRKDRPAEATDAVGYFVVCKLDKPARIHFAPHWDARRASEQDRWDVAPTGFKECQIEPGHPPVKVRVGPLGQITILQKD

SEQ ID NO: 5708 - protein, 907 aa, unidentified
  REGION 1..907: note = Description of Unknown: Cas Enzyme sequence
RALYHLAQRRGYLSNRKSGKQDEDKGTVEPAINELRERMAAGGVRTLGEFLSRVDPVNERRIRQRCTARDMYLDEFEAIWEAQRPHHRGLLSDALKKQIADAIFNQRPLKSQKGLIGGCDLVPGKKRAPKALLISQRFRMLQKVNDLEVIYSDESHRHLTGEERARVLEEMEQHAKLTFKGIARLLKLPKGVEFNFERGGEKDLPGNKTAAALRAVFGDRWDSFSREQQDAVVGEVMGIEKAETLERRGRDAWDLDHEAAAAFGKVHLESGYMALSREAMRTVLPLMEQGIPYATARDQAFEGNWARNVLDHLPGVSEACNTIRNPVVMRTLTETRRVVNAIIRKYGKPDCVRIELAREMKKSREDRRKMTADNQKRRKANDALRQKIIDTTGDPRVTGRDILKARLWEECRGTCPYTQKTIPFHELFRHDSPWDIEHIIPFSRCLDDSYFNKTLCYHEENRNVKQNRTPREAYEHSGRWDDLLACVARFEGDAAREKLRRFQMKADDLLEFEEFSARQLNDTKFASREAQRYLSWLYGPEAQSRIQVSRGQITSYLRGAWRLNSILGDGGEKERADHRHHAVDAIAIALTDRATVKALSDAAASQFRERGRTHGFEKRVTEPWSGFLEDVQRAIDRVVVSHRPSRKVSGSFHDDTIYSPPRTDREGKPYVMVRKPLDKFKAADIQNIADPTVRDIVWQHFRDHGEDPRAAFSNPANHPRIPIKDGPRAGQTIPIHKVRLKYTRDVIPIGHGPSERYVWTRGNSHIEIFEVRDKDGNVKKWEGRVVTLLDAYQRRKQRQPIVNRHGDDNRRFLFSLTQGDIVELDVELGNGDTARELYLVRGVAFHAGGILQCTHVLDARKKKDIPMTSSAEERTRFLYRPVVNSLNRLNCRKVSVSPLGEVYPAND

SEQ ID NO: 5709 - protein, 1049 aa, unidentified
  REGION 1..1049: note = Description of Unknown: Cas Enzyme sequence
VKYSIGLDIGVASVGWCLINNDKKRIEDLGVRVFTAAEQPKTGSSLAEPRRLKRGLRRRLKRTRQRMAGVKALFVKYGLIEAESLEQIYVPHGGWLSPWQLRFESLERKLSGEEFARVLTQLCKRRGYKSMRLDEGTDDDEGKVKGSISDNRALMEQKGYRTAGEMFWKDEKFSKSKRNHEDYNNVVSREMLLDEIKILFEKQRLLGNGYAQKRFEKEFTDLFIWQKPVDEGEKLIEKVGACELIPAEKRAPSRCWTAEKFTILQKINNIMIYDAGEKLPLTAEQREAVYEKCLSRQSPVTYADIRKLLGLEEHARFNMVRYDKDDLSAESKDKLPQLTGYHALKKAINNADEKYWDDIAADEDKLNSIAYALTYWKSKEGVLQQLQLLGLPENIIEALKEIRFDKQKHLSIKAMQLINPYLEQGLDYSAACQAAGMHHSVKARKEKQKKLPPIPAEEIRNPVVIRALSQTRKVINAIIDRYGSPEDITIELARDISKNFKDRKDIERNQGKNREKNDAAKNQMLSEFGINASGNDIRKYRLWLEQESRCIYSGKYIDPRRMLVEKGYADIEHIIPYSKSFNSSYMNEALALAEENHKKGNRIPYEYFGHDEARWNEFSEKVNSLNIPYSKKRNLLIKSFDSRAEEAMKERHLNDTRYISRFITNFIKENLITTGEGKDNVTTINGQATAYLRARWGLNKDRKESDRHHAMDAAVAAVATRSMLQRIARFLSWKSFYYDEDNEKYIDKETGEMYNPKKIPEPWDRFARELEARISDSPREYIEQNDLPGYRNEDLGFVRPIFVSRSPRKKISGSAHAETIRKLKGNDEIGRILTTKRVRLEELNLTKLEKMSGKDTDPQLYRLLKNRLDQYNDNPKKAFAEPVYKLLKDGSPGPDVKKIQVDDDPASGGVLVNGGLADNGSMTRIDIFLKDKKYYIVPVYVAQTVYRELPDKAITAHKPESEWIQMDDTFEFEFSLYPGDLLKIEDKKKTLFGYYTGCNRATGSIDLDAHDRSTKFVSIGIRNASKITKYCVDPLGYITPVSKEKRHGF

SEQ ID NO: 5710 - protein, 1391 aa, unidentified
  REGION 1..1391: note = Description of Unknown: Cas Enzyme sequence
MKKILGLDLGTNSIGWAVVNEAEKEGEKSSIMKLGVRVNPLTVDEKSNFEKGKSITTNADRTLKRSARRNLQRYKLRRENLIEILKENKFISDDSILSEYGNKTTFETYRLRAKAAKNEVSLEELARVLLMINKKRGYKSSRKAKSNDEGQLIDGMDVAKKLYEKDLTPGQYVFDLLKSGKKYTPDFYRSDLEAEFDRVFDKQMSFYPEFLSLELKEELRGKKRDAVWAICAKHFKEKGYDLVGVKKQKAAEQKIENYSWRAKALSEKMDLEQFVIIIQQINIELNKSSGYLGAISDRSKELFFNHQTVGEYLMAGLSKDPHYSLRNKVFYRQDYLDEFETIWQIQAKYHKELTSELKKELRDVIIFYQRPLKSQKGLISFCEFENRKIEVEIEGVKKIKTVGLRVCPKSSPVFQEFRIWQNLNNLRVINKNTNESFPIDEECKKVLFAELNLKEKLSKTEVLKLLNTPKNHDLNYKEVEGNRTQAKLFKEYERIIEMTGHGEPDFSKMKASKIIEMTTSVFEALGYKTDFLAFNSHLEGKEFEKQPYYALWHLLYSFEGDDSKTGNEKLIQKISDLCGFEKNYASMLAGVTFEDDYGSLSTKAIRKILPHLKDGLEYSVACEYAGYRHSKRSLTKEELEKKEYKDKLNLLPRNSLRNPVVEKILNQMINVVNTVVDTYGKPDEIRIELARELKKSAKEREEMTKNISKTTADHEGYRKILQEKFGLINPSRNDLVRYKLYLELSENGYKTLYSNTYIPQEKLFSKEFDIEHIIPQAKIFDDSFSIKTIEVRQVNIEKSNSTAYDFVKEKYGEEEAIAYTNRIEDLLKKGVLSKTKYRKLLMKESEIPSGFIERDLRDSQYIAKKAREILEDLVKFVVPTTGSITDRLREDWQLIDVMQELNWDKYEKLGLTEVYKDKDGRSIRRIKDWTKRNDHRHHAMDALTIAFTKRSFIQYLNNLNARIGKSVDENIDLANYDLRNINPKDRTSVIYAIEKLELYRDRNGHLRFNPPIPLDEFRAEAKQQLENTLISIKAKNKVVTRNINITKGKNGSLNKKIQLTPRGQLHNETIYGSMQRPVSKEEKVDSKFTIEKIATVTSPKYRDALLARLSQFEGDSKKAFTGKNSLEKNPIYLNELHTEQVPLKVKTMTYETIYTIRKAVAPDLSLEKVIDENIRKVLEKRLIEYGNDPKKAFVNLDEKPIWLNEEKGIAIKRVTITGVSNAIALHKKSDQNGKSQPVDFVSTANNHHVAIYRDKDGNLQENVISFFEATTRVNLGLPIIDKDYRSADGWTFLFTMKQNEYFVFPNKETGFDPNEIDLLDPNNYSLISPNLFRVQKFTIKDYVFRHHLETMIDDKNNLKGITWKRGGLSSITEIVKVRTNHIGQIVSVGEY

SEQ ID NO: 5711 - protein, 939 aa, unidentified
  REGION 1..939: note = Description of Unknown: Cas Enzyme sequence
MSLPPESAKSSGTVWSFDLGTGSLGEAIVENNIVKHLASPIIESTLASTKDARERRRAWRTRKAHRAREEWLDELWDKEGLESKRPKPRQVGKIGEADKPVTGEAARKIKGPWQQVQDPDYRIEREFAPSGKRPQKDEAPKDNTLYTSCLLRIKLLQGGDGMEPWQVYKALRAALQSRGQQTVPWANKEADREGKSIEAIEAKERQELAKKDPAYQQAMGAWDKFAKEDEAHWEALPNGKEREDYLYPCYYDAWKMGLWSPDKPDKFKTLHTFSAESTRQVVFPGEKVEAELLKLAENAAKKIPALENAAKAIIQSFIDKRVKKLNKRREKEKKDPLNKEEIEALPRAENFAELFVYGPAGKPSQEDPNKPVRALALSDPAKCKALALRPGTDFDWKAAIGQKIPRFENRIISRCALFPRLKACKVAPRIDKYGGVRPESLLAAQVIFLLQAKNLKVIEKDQLRFLKKEEIAELLKKVEKSPQATPASILERYKLTKTEWKKWCKKEELDGTPSIPVKQIKGKSGDVIKATALDGRCRYSRPALSLLKYLLLNAEDGDENNPNALLEKVANGEVKVPQAKAQSPQGSSENAAVAGATKDSLAFVVVETLPEKQKGHPAPVQEDSSGGGGFSRPLSGPPDILKSEIQNLIGRLWKPQKDDNGNEIPYAPHQLTIPDLTLDDVATEGEEKLPHAETQSREEGKGDEQVTQEAGKSFDRYKTLVDALVEVVRAWTKNSTDFTDIDTAAEAYWEHRKRITDLIGEQNNPIVRDRLTRFWGRLCRMQHPEQDEILAKKMKLIRQKTTEQLRSEKGKSKQEADKDLIATLQRRLAALQRRLAALQDLHPGMGLSAPDFVTLEFAREDNNFLYGAKRKKRIKDFQNAQEKKREAAKKELGDQSSETNITKYLLWEEQGKKDLYSGEGLGCTNYLECEIDHIVPRSI

SEQ ID NO: 5712 - protein, 1402 aa, unidentified
  REGION 1..1402: note = Description of Unknown: Cas Enzyme sequence
MSHTCLSSVAIDLGAINTGIYLFQMVDGELSSADKKGVLIRLDPDKIKLSQVTRRARRHQRRCYARRKLAKRLLKIILEHKFNAPYDKLPNSTVEFINGLMNRRGYTFLGFDELDVDEINILDNNMLGEWLPDFFAGSTVAATEQLQMITSDLQQCEKLGKSLEHLLKTAKDKTGILGSLDKEIKKPVLSALNKMHEAISSTLKSERDGHYHRREYFENIHNDIHDFSDVLKPFYQLSKLNSEALFRLVGHISNLQLRVLRKYFNDEKMKNCSDYWCDTRFKKYFQRYVRAWHARKDAKIAENRRNIIAALAENDVIDFWLGHHPELTIPPFEDQNNRRPPVCHSLIFDQGKLDQYYRHWRQVTAELIKLVDKDYAVTDANAHIALQRILDQSSALDYYSIRGLVENRNESRLKSEVYDARRQELQQKVGNNAAEEFLGLAKQYFYESSLAASGDWHEEIDAGLLKKCGKHPPRKEKQLDKILSSILRIDMDSAMLDSFRSFFSNHKYKGNSTCRSVAEKAAKAQKEYGASLKAILEQGNNSELNKLMEQITLAASALESFLENNMSANGKKHEYQGKLADLFIFAQMYNLLYQDIQGFSSNCRNCTLENAWRSLRSEADNSIANGRRLPADSVRPFDGVLARSVELIASAAARAKVSQLLQLPEYISEVDITTGIETNSFEFSSELSEVKKKQLGKRADSKLEALAIQQIEFNQAKFDRIKSDSCGICPYTGEKLTGFGHIDHIIPRSYTRDRFRAVFNSEANLIYCSVAGNNRKGDREYTLDDLNDNYLKAVFNSADREWITGHISEEVSRLLNSNTRITSLNSLTFDQRKCIRHAMFIPALRNELLSELNQQNRVRVNGTQKYFLSVLRRKIESAIKAKRPQLALNFRSERVASSVIAAYRNALSQFAPENAKKMPQPAFSHIIDAAMLFAAQSAGGFKNPTNNLAPAEDPAYLKQLLPEEFEITSLNKRPVYRANAWHQPLFKDTIYGAHFLPFIVTCEGQSGFGYDRQNCVYISKDEDKVFAAIRPFLRKPSPELNEIKKQAINSKDSIVLTFNKSRIFELLHKVAKYEASESMNYQADLFEAILYQSQKTSLQSAMFDQSGKKMLTREDILKDNRFVTKIELPARLGSNKDFVLPFKFAWLKLLEQDFIKTCFGRKLENEDLAQLDQKIRTYFLEKTKHDKTSQRMAQRKHARARRVFSLPVKPGAAGAVFAIKRKTPAGQIWQLLASEQAYEGFRTDKSSFGAEAKILLAQLSASKNAFALGARYSARTANVSVDYMDSWKKIPLNGELATKLISLELCPGQATRRYARITMRGNLFMQAIYPCLSTGNDSENHSLLLLPEYKFTREKKENFKKELPGLGCPRTFVRIEKAGKEITFTYEADGVSSAIAGRYFSV

SEQ ID NO: 5713 - protein, 1354 aa, unidentified
  REGION 1..1354: note = Description of Unknown: Cas Enzyme sequence
MKNEKNYYLGLDIGTNSVGYATCDDQYNLLKFHGEPAWGVTVFDEASLSAERRNFRTARRRLDRRQQRVLLVQELFAKEISKSDPDFFKRIQSAHLFRDEAGWGYTLFNDKDYTDKDYHEKYPTIHHLIYELMTSNKPHDARLVYLACAWLVAHRGHFLSNIDKENIDSVKDFTKVYDEFRDYFISNEYSMPWDCDSVVEIGDILKKKLGVTAKSKELVALLYEGKKPSKEPTEDFPFSRDAIVRLLSGGSVKCKDIFANDEYEDFGSVSLGQEEEKFDELEANIGEDYSLIAALRNLYDWSVLVDVLGDASCISESKIAVYEQHKSDLALLKHIIRKYVPEKYDDVFRTLGKDNYPGYTHHTDEKRDKKWNTVNGEAFNKFVSGIIKNITPDSEDTAAFDDMKARLELHAFMPKQKTTDNRVIPHQLYWYELNALLKNAELYLPFLAQKDEDNLTPSQKILSVFLFRIPYFVGPLNKHSDFAWIQRKAEGKIYPWNFEEKVDLDASEEEFIKRMTNTCTYLPGEPVLPKDSLLYHEYTVLNEINNIKINGNNISVELKQRIYNELFMTNKKVTKKKLVDFLVSVGALEKGNTEALTGIDININSNLAPQIAFRRLIDSGTLSINDVERIIERASYAEDKTRLGKWLASNYPHISEADRKYITGIKLKDFGRLSRKFLTEIYGVVCNDTGEAMSIIEALRNTQNNLMELLSSDLGYIDTIENIKRDYYSEHPITLSDRLDEMYVSNAVKRPIYRTLAILDDVTKAFGAPQKIFVEMTRGARPDQKGQRTKTRKQQILDLYDNCGQDVKVLKAQLEAMGDYADNKLQSDKLFLYYLQLGKCMYTGTALELEKLGTKEYDIDHIYPQSFVKDDSIINNMVLVLSSANGAKGDTYPIVENIRTRMYSFWTMLNKAKLISDEKYHRLTRATAFTEEEKYQFINRQMTETSQSTKAIATLLKERLPETEIVYCKAKLTSDFRQEFDLLKSRTFNDLHHAVDAYLNIVCGNVYNMRFTKRWFNINERYSVKPKTLFTRPVICNGVTVWDGENMLAKVKATAVKNNAHFTKFAFFKKGGLFDQMPVPAAAGLTPLKKGMPTEKYGGYNKAGAMFYIPVGYTIGKKSDTLIMSVELLHGQRFLDDAEFAKEYSFKRLKHILGKDVDSVKFPMGMRPWKVNTVLSLDGFRVCISGISGGGKRLIAQSCIQFSDNKFWQYYLKKLEMLVEKVAKKPNHIYDEKYDNVSVEKNLELYRLYIHKLQNNIYKKRLNNPVETLIKGEEKFSNLSAVEQAKALLNIHQIFGRLASGIDLTAIGGVARAAETRISVTVSNWKKNYSDVRIIDSSVSGLWQKKSDNLLEIL

SEQ ID NO: 5714 - protein, 1373 aa, unidentified
  REGION 1..1373: note = Description of Unknown: Cas Enzyme sequence
MEKDYYIGLDMGTGSVGFAVTDTNYEILKSHGKAQWGVRLFDTADTAADRRFSRVNRRRLERRRQRILLLQEVFAPEIVKVDPAFFSRLNDSFFLPEDKKENQPNTLFNDPNYSDTEFHKQYPTIYHLRHELMVNNKPHDIRLVYLAIAHILKYRGHFLYSDTKDFKLGKQYDSVFSDLSNVVSQALEITIPGSFGNPFHEILTEKNLRNSEKQLALLELLQSNDKVAKTLTRLLTGYEVKFSDLFGEQYKNVTPAKVKLSKIEDEDLDQIEIVLSEEHFALIQSASNFYNLIRLETLLQGAESLSQTKIDTYEKHGNDLKKLKYIFKDYLTKDDYKRFFSHSEKGLHNYVAYSGHFVTNRKKQPVLQKCDHEKFLEYLKKLLNSLPDTTKTSGEVAAVLTEIDNGTFMPKITDRDNSLIPHQLHHIELKKILENASTYLDFLNQEGVEGYTKSQMIELLSDFRIPYYVGPLNPAHSIDKQASSSSHHAWVTRISDEPVRPWNFHRVIDVEQSATDFIANLTNKCTYLIGEDVLPKESPTYAKYSILNILNSVNVKGNCLDTQLKQAIFQHFFIDPERIGKPTKKNIAAFIQAKTGQQVTEADITGMDLEIPGDMKAEKAIEKIAPGKLTLGEKETIVRLITVFPDSFVMLKSRLERELGNKLNDDEISQLARLKFSGWGRLSYKLLNEIEAPNEKAEFKTIIDMMWEESVNLMQIMSVRFLFQAIVQNLNDDLLGSNQSFGYHIVDNYPISPPVKRMVWQTLRIIKEIIKVNHGQAPAKIFMEVAREEGEKVRTKSRKSQLLELYKDIKKQTGRLYSELENRSEAELRSKKLFLYFTQMGRCMYTGEPISIDSLNNKGSDGNDIYDIDHIFPRSLTKDDSLLNNLVLVKSKANRDKGDKYPISAVIRNSQNGLWFQLKESGLITEEKYRRLTGQNPLGEEELAGFINRQLVETRQAAKAAANLIKQFLPETHLVYVKAGHVVDFRYNQSDFKFPKVRGMNDLHHAKDAYLNIVVGNVFDSKFTQNPLNFIRSKEGRNYNLARMYDFPVKSPSGEVAWLPGLDGSLATVRKMVTRNNILVTYQTHHQHSGRNGGIFNQTILPKGKGQIPIKTTDPRLNTQEGINKYGAYTDETGATFFLVQHTVNKKICKSLFSLGLGWYLRNPLTEEALLQYCTEDLGLKEARILVKDVPYNTILTVDGYPLRILAKTGTSIKMANNCQPIFSAEQEQTIKQVFIRLSKEGQEEDDALVENAALQADFLLLYDGFTQKLTEPPFSRLSSYIRQASNLKDGREKFKALTLKAQAKVLNQVLILFLCDHQLSDISLISSLKNGKAQNTQVGMIRIPQNLPWESKEFEIIYQSVTGLFEKRIKVS

SEQ ID NO: 5715 - protein, 1242 aa, unidentified
  REGION 1..1242: note = Description of Unknown: Cas Enzyme sequence
MSLPPESAKSSGTVWSFDLGTGSLGEALVENNIVKHLASPIIESTLASTKDARERRRAWRTRKAHRAREEWLDELWDKEGLESKRPKPRQVGKIGEADKPVTGEAARKIKGPWQQVQDPDYRIEREFAPSGKRPQKDEAPKDNTLYTSCLLRIKLLQGGDGMEPWQVYKALRAALQSRGQQTVPWANKEADREGKSIEAIEAKERQELAKKDPAYQQAMGAWDKFAKEDEAHWEALPNGKEREDYLYPCYYDAWKMGLWSPDKPDKFKTLHTFSAESTRQVVFPGEKVEAELLKLAENAAKKIPALENAAKAIIQSFIDKRVKKLNKRREKEKKDPLNKEEIEALPRAENFAELFVYGPAGKPSQEDPNKPVRALALSDPAKCKALALRPGTDFDWKAAIGQKIPRFENRIISRCALFPRLKACKVAPRFDRDGEVRPESLLAAQVIFLLQAKNLKVIENAQLRFLMKEEIAELLKKVEKSPQATPASILERYKLTKTEWKKWCKKEELDGTPSIPVKQTKGKSGDVIKATALDGRCRYSRPALSLLKYLLLNAEDGDENNPNALLEKVANGEVKVPQAKAQSPQGSSENAAVAGATKDSLAFVVVETLPEKQKGHPAPVQEDSSGGGGFSRPLSGPPDILKSEIQNLIGRLWKPQKDDSGNEIPYAPHQLTIPDLTLDDVATEGEGKLPHAETQSREERKGDEQVTQEAGKSFDRYKTLVDALVEVVRAWPEPPTGAAIDDAPEPIDKAAEDYCAHRKRITDLIGEQNNPIVRDRLTRFWGRLCRMQHPVQDTALAVNVKSIREQTVDAKRNETDKEKLATLQRRLAALQDLHPGMGLSAPDFVTLEFAREDKNSLYGAKRKKRIKDFQTYQENKRKEAKKALGANATEINITKYLLWEEQGKKDLYSGEGLGCTNYLECEIDHIVPRSIGGPDAFYNLTLTSNDNNKKKANRTPWRWFQECKTTDEWDAYTKRVTDSSTLSKRKKELLLSERAEQLVEQTHDLNDTAWIARIAQKVVRLHFGWPHESTADAKQRIRTVNGGLTARIRRRYALDALLDETRRSDVWAVIKEMKILEEKLETPRNEHVPNEQEVGSKKNDLKDNRQQLRELADECAKNRADRRHHALDALVLSFIPNWAGDATKEDFFRFPESIGDRPAIVEWNKKEVNAQSTKIEKARNALEAFRKKGQLNKAEEEKREDLEQQWFEADKARRKLLLPPNIANVWIWFAKQILDDHELKAL

SEQ ID NO: 5716 - protein, 1026 aa, unidentified
  REGION 1..1026: note = Description of Unknown: Cas Enzyme sequence
MSKTILGLDLGSNSLGWALLSGGDEGAPGSIIDLGVRIFPKAVEDKTPTPKNQKRRNSRLARRTIQRRSRRKSRLLNHLIKLNLLPAELHGNAQPEGILNSLGDPYMLRAKALDHDLLPHELGRVILHFAQRRGFLSNKKTLLGSDMLDDPDVIAVLRDDGQDDTDSSEETAFKADISLLRAEIKSGGFRTLGEYLASKPVHECKRNRHDEHIRTDRRMYIEELALIFARQSTCNPALSEDVQSEIEEIIFFQRPLKLKKDRVGKCSLEPSKKRSAIARLEYQRFRYLQDINNLQYFCQNTDQWIKLNDLDKEKLGMLFEASAKLTFARIGKELGLSRGTTFNLDSGVKNLKGNTTSSAIRGALPSWDDLAAEVQFSLVEDLISIKKKSALKRRLMSHWGFSGEVALGLCLVELEPEYGQVSLKAIGKLMPHLISGMIFSDARKAGGYGYEIKKVVAQDKLGLPPELPNPIVSKGLSELRRVVNAIIAEHGKPDIIRIEMARDLEMNTKKYKNFISQQAKNTKSNDRAVEAFRDAQTSPTGSRYPSRDQKIKYRLWLDQRQCCAYSGTTINLAKLFTAEIEIDHIVPYSRSLNDSYMNKVVCFAKENQVKGQKTPKDAFGADEDKWNQITQALRHLPRELSSKRDAFYKTDADLSEHDFIGSQLTDTRYMSKVAGDYLKSLGSEITFTRGIMTSWLRRQWQLNDLIGRTAEKERTDHRHHAIDAVVTACIDRSIYRSLVEISRDLERSGSSLTMDDVYIDPPVPAIREELDTHLRDMIVSHVPQRKITGALHEDTGVGFVNNVGTVYRKRLDQDFDTKKAQNIVDPVVKALVQEHLAGHGGDAKKAFAPGFKLAHVGGGTLIKRVRVVQAKTTLDALERDKFGIKDRSGKLFKWHAYGNLHHVEVLRSGSTGKYRSEFVTAAEAAARARGVGRPSAPIIQTEHGEDWELLFALHINELVQVLVDGDTRIYRVQQLERDGARLSLRCHTAASLIDKGQLIRKSINVLISDYQLRPLNLNVLGKCVDD

SEQ ID NO: 5717 - protein, 942 aa, unidentified
  REGION 1..942: note = Description of Unknown: Cas Enzyme sequence
GMLPRFGTDDWQELMSLDPYELRAEGMTRRLELMEAGRALYHLAQRRGFKSARKTIEGVSGDDEETGVVKEGISELKQELGGKTLGQHLFQQEEKRGRYLGRDMVMEEFEGLWDAQSKHHPSVMTQELKEEMKGLIFTQRPIFWRSVSLGTCRLEPESRLCLKSTWLGQQFLMLQELNSLRLQGENESLPADEVNLLQEQLLLEGGLTWGQCRKLLKETWRQQGTPLRSKFNFEIGGKKKLQGNAVESLLQKALGSAWEDCPHKEKLRQELPELLWELDYRVVGKGKTEKILIRSDEETHDLRKDLLETLKSDFGLKSTVANQLITEPLPPGWLSHSLKAVSRLVPHLERGKLYSEACDAAYPGHREVTGEGLGFLPSNQSHLKEIRNPSVRRALNELRKVVNNLIRTYGKPDRIRVELARDLKRPASKREEYQNRMKQNESARDTAAGKIRDMGHVVNKLAIDKWILWKECDERCPYTDEPISASALFQEGRFDIEHILPYSRTLDNGFMNKTLCQREFNLLKGNRVPYEPIVQQYGEEGWKSFAQRIRKSRLPDAKKHRLLTQRLEDVHEDDFSERQLRDTAYIAKEARDFLMKLFIKQEKRAMPVESSNGMITAQLRHLWGMNTLLGTSGGKNREDHRHHAVDALVVALVRRAMVKRMSDLSQYWAMGTRHQFPMPWETFRTEAQQSINNIIVSHKVQAKVQGKLHAELVYGKVKLAPAATGGKYEQFSRRVKLADLSKSQIKAIQNDTLEVAWDSGGRIKTLLQDHLSKHKDFKKELPFMKTKSGGKRMVKSIKLIENMQPSLMAELQSEGRTWAKKNENHHMVVFEDGDGKVRFEVVSRFDAMKRHSSKLPVVNRYGPPGYHFKMSLLNRDSLLIQTGDEKEEVYVIQSIWDSGVLVLMKHTESIGEPLRKTLGALLRGGMTKTGIDPIGNRMQKND

SEQ ID NO: 5718 - protein, 1048 aa, unidentified
  REGION 1..1048: note = Description of Unknown: Cas Enzyme sequence
GQFAFDTLKKDKKAIPDFYRSDLNDEFDKIWSYQSKFYPEVLNDRNKDLFEGKAKNQTSAIFYKVLKIESVELVGKMNEKKFQRYELRSKAINEQLTLGELVEVFSDIKGNINNSSGYLGAISDRSKELFFNKVTVGEYLYKQVLENPHTRLKGQVFYRQDYLDEFEIIWEQQAKFHPVLTPELKKEIRDIIIFYQRRLKSQKGLLSTCEFESFTRNIIVDGKTKTQRFGPKVIPKSSPLFQDFKIWSQLNNVQILDVFGKSKVRDYLELEEMNLLYDELKFTDKLSTTEINRILGFQVKYKYNFEYLEGNRTMAAFIDSFQKIIEISGHDEANLTRMSGVNKMEVIADILSTLGINTSILSYSSEIVGKDQINQPFYQLWHLLYSYEGDNSKSGIESLLKILETKYGFEKEYANILSNTKLQDDYSSLSSKAIQKILPYLKEGQKYDKACSIAGYNHSNSQTSAQLDAKVLKDKLSILSKNSLRNPVVEKILNQMINVVNSVIETYGKPDEIRVEMARELKKGAKERETMTKSMNDANRNHDAIRTILQNEFGIKNVSRNDLIRYKLYEELKDNGYHTLYSNKYISKEMLFNGEVDIEHIIPQARLFDDSFSNKTLELRQVNIKKGNLTAVDFVTEEYGEEGLEQYEERVNALFNKAEKRTKFKKLMWKEQDIPDNFINRDLNDTQYIAKKAKEILEEIVRTVGTTTGSITNRLRDDWQLVDVMKEINKPKYEALGLVEEIENRHGHKITRIKDWTKRNDHRHHAMDAITIAFTKPSYIQYLNNLNAKSDKNGVIYAIQNKETYFDKDNKRRFKPPMPLDVFRAKAKEHLENTLISFKAKNKVTTKNKNTISKSGGKSTVISETPRGQLHLETIYGSSYKYETKIEKVNASFDASKIEKVAKKKYREALQQRLNANDGDPKKAFSGKNSLDKNPIYLNPLHTDFVPDSVKIVWKELQFTIRKSISPDLKIDKVVDAKTRALLQKRLDEFGGDPKKAFINLEENPIYLNKEKGIVLKSVTITGVSNAIALHNKKDHFGKDILDADGNP

SEQ ID NO: 5719 - protein, 1088 aa, unidentified
  REGION 1..1088: note = Description of Unknown: Cas Enzyme sequence
MGYKIGLDIGITSVGWAVLELNNEDEPKRIIDLGTRIFDAAENPKDGSSLAKPRRDARGARRRLRRHRHRIERIKQLIKNSNLLTSSELESLYDNVKKDIYEIRVKALDSEIDRFDFARLLIHLAQRRGFKSNKKSDANDKEAGSLLSAVEANKKLMAEKGYRTIGEMLYKDEKFKDHKRNKGDDYSHTVDRKSMEDEIKLIFKSQRQFGNPFATQEFEKKYLDIYLSQRSFDEGPGGNSPYGGSQIEKMIGNCTFEDGEKRAAKACFSFEYFTLLQKVNSIRLNTPKGIIPLNKEQRDLVINLAFTTPDLKYAAIRKKLDLSDDETFVGLSGKDIEETEKKTKLGCMKAYHEIRKALDKVSKGRIKALSHEQLDDIGLIMTKYKSDENIRNGLLNAGIDKVDVEALLLLPGFSKFGHLSLKACRKLIPFLEQGLTYDKACEAAGYDFKAHSDNNKRPLLPQSAPELEDITNPVVRRAISQTIKVINAIIRKYGSPSFISVELAREMSKDFTERKKLEKLMKENQEYNERIAAYLKDELKIISPTGQDIVKYKLWKEQDGICPYSLTTLEINRLFEPGYCDVDHIIPYSISFDDSYKNKVLVKSNENRQKGNRLPLEYLSGERKEKFIVWVNNNVKDTEKKLRLLKEKITEEDINKFKERNLNDTKYISRFMLNYINDYLQFADSSAGRKKRVTAVNGAVTSFVRKRWGIAKIREDGDLHHAADAAVIACITDGMIQKISRYSKYHENYYYDHDLDKNTGELLEKFPMPYPTFRKELEIRLSNSPSEYLKEIILPNYEGIDPDDIKPVFVSRMPKRKAKGAAHKDTLKSPKALSEGYTIVKRPLNMLKLDKDGEIEGYYNPSSDLLLYNALKERLKEFNGKADKAFAGEFRKPTSSGKPGPIVKKVKIMEKSSLVVGLNKGRCVADNDSMIRIDVFYVENDGYYFVPIYVADTLKPTLPNKAVIAFKPADEWKEMNDKDFIFSLYPNDLIKIKTKSKQKFSLVNPGSTLDKELLSNEFFAYYISANITIGTISIINHDNTYQIKSLGIKTLESIEKYQVDVLGNYSKVKREKRQYFRGCCDCHTEIFL

SEQ ID NO: 5720 - protein, 1375 aa, unidentified
  REGION 1..1375: note = Description of Unknown: Cas Enzyme sequence
MEKILGIDLGTNSIGATLREGKEFQWYGVYTFKKGVGEGKAGEYSYAAERTSNRASRRLYNARRYRIWATLDFLIKNEFCPLTIEKLDKWRKYSKENGRVFPVDEIEFQSWKKMDFNNDGLPDYSSPYQLRRELIENSLDLSDKVNRFKIGRALFHIAQRRGFKSSRKNGVNEKVAIFKGSTETGTVGRNEYEQLLIDKKSLGAAFAFLEDSGIRVRNRYTLRSDYEKEVDLICQVQELDQEEFKEKIKKAIFFQRALRSQKGLVGKCTLEPQKPRCSISHPKFEEFRAWSFLNNIKYFESETGKMESLPLELKRALFEDKFFLKGKNDFKFSQLNKHLQKITNKKWKLNFKDETTVPACPVSARLRSVFGKDWQNISIKKTIEKFGQTKSISYDIEDVWHILFSYEDEELLEDFFKANFQLSADQIDEVKLLWNSFPGGYASLSLKAINNILPFLREGLIYSESVLLSKIPEVIGKERFFQNEKFIKNRIRSVIELNRKEKKVIAITNKLISDYHLSDFKQGFRNPSYILDQDDFNDIEKAIIDSFGDQSWESEKEKEFYKLQVKSLYQEFFTTNNRSHFRSPHLLDQIKGILEDEFHIETRELSKLYHPSQIEIYSPAKRDDDGNIYLPGPETGAFKNPMAYKTLFELRRIINHLIEQGKIDEDTRIVVEIARDLNDANKRWAIETYQRNRESENREIAFAISQLVKDPEFNGDADPGNQTDREKLRLWTEQIKDPNEFWKTVLATRDDVKKYRLWKEQGCKCLYTGKPISFTKLFDSNVIQFEHTIPRSKSFDNSLENLTICYTYYNNNIKKNKLPVDLPNYIIDTIEGKAIKPQLVDWEKRVEALYNQIEAAKSRSKSAMDKTQKDDAIRKKHMLQMEFYYWKNKLDRFSRADVPAGFKNSQLNDTQIISKYAFHYLKTVFNRVDVQKGSVTALFRNIYGIQPKDEKKDRGRHFHHAIDAAVLTLIPKAAEREAILKKYFEDCENYQTKNYPLLPFLGFKHQLLEEIKEKILINNVPNKDQAFSLGKKVVRKRGRIVWLRNMEGNLVFDENGNKIPKINQGDSVRGQLHLDTFYGKIKVAKRDESGAPSRDEEGNFIFCKSNGKDEMWVVGRKPIADIKIDKDEIVDPYLKRHIESQLSDGVALSEIKDFNGKTIRRVRVRVKAGRGFLDADKVTELKEQTYKSKYDYKNMYYTNSGDNYAFGYYKGLNQRKIVPINLLEASKVGKLIGSYKLDDLFEQVLDLGSGKSQEKVSLYHVFQVGQKVLIYYNDRTELSGLNKQEFSARLYFVKKLADANAQRILFQHHLESRNDQQLLIDFPKEVFGTKGKDGFSSFSKDFIIPRLLLTPSNYNFLIEAKDFRMTLSGEIEFMT

SEQ ID NO: 5721 - protein, 926 aa, unidentified
  REGION 1..926: note = Description of Unknown: Cas Enzyme sequence
KCRFMPDCSVIPASHPLFELFRAWQEVNNLKIYFGIMKEPIEVSLELKEALIKELGELQPTKAGGRTKLRMSANEIKKFLVRYFKKGTTRDYELNLEELNGLTTIIEFRALFNKAGVENTAIFSWNPHLKGQAFDKQALLRLWHDLYSIEDQDDLIGALMKHLEIDHEQATILSEKRLTEKHGSLSSRAIRKILPYMQEGLRYDEACLKAGFRHSNFENREEKMARELLEQLPQLKKGELRNPVVEKILNQLVNVVNAILVHPEMGRPDEIHIELSREITATAKQRAQMTKNINDSKKENEKIREELLELGLSKVNRKDIIKYKLAEQCNWISVYSGKCFNRQQVFVEQGQFDVDHIIPQSIRFDDSQSNKVLSETHINKDKDNQTAWDYISNKGPAALEAFEERLKELEKNPKNRVRIANLKLKKEEISDDFINRQLGETQYISSQAFERLSKVCKELIPSIGIITAHLRNEWGLSHLIRDLNYEKYKALDQIEFSENAEGERITSIKDWTKRDDHRHHALDALVVALTTRGMVKQLNDQSQIHQEESSSKPKTIDLRNKPSWRKIKAPVNEIRPKVEEALENILISFKSGKRATSISRSYYKSKEGILSNQIIIPRGPLHLETVYGRNKRYLAQAVPLSKIEDAQLIRDEKSSKLWQERLDFYNGNKKKAFSTAELVKNPFIIDDKEILELACWEEKFVQRVELNEKIDPAQIVDKGIRRKVEERIEESGNKALMKGNLEETPIFLDKAKRIPIKKLKVFARPTNLYPLRVDENNKPKDFVNLSNNHHVALYQKQDKTYIVSAVSLMEAVMRKQAGQSIIKTDHEEGFRFISSFQQNELFLFAERGLDFIGVIAEMSPLLFRVQSAAVSKAGGPDIVFRHHLETDIKRKEGFARRRISSVMNFPSHKIRLNVLGEMVSIETIHY

SEQ ID NO: 5722 - protein, 1037 aa, unidentified
  REGION 1..1037: note = Description of Unknown: Cas Enzyme sequence
MRYRLALDLGSTSIGWAMIRLDSQGTPCAVIRAGVRIFSDGRRPKDKASLAVDRRAARAMRRRRDRMLRRKARLTRQLIQFGFFPQDADSRKKLVDLNPLELRARALDEPLTGAEFARALFHLNQRRGFKSNRRTDKKDSDATPLKQAITDTRKFLLGDGAAPQARTVGEYLWHRMRHGQPVRARYRELRLTTPQGQTRIDKRYDLYIDRAMVEEEFDALWKAQAHLKPALFTETARAALKDTLLFQRRLRPVEPGRCTLLPKYPRAPLALPSTQRFRIYQEVNNLRIVDALLSERPLTLAERDTLVHALERRAKVSFDSMRKLLKLSGDSRFNLEDVKRSELKGNLTTVMLAKEPFFGDRWFSLTLAQQDTVVARLVEEESEAALVAVLERDWQCETDAAQRIAELSLPDGYGSLSQQALERVLPHLADAVVSFADAARLAGFHHSQLEANAAVPGETIALEGVNLDTGELRTWHVFRALPYYGMVLQRHVGFGTGKESDLPEKRHGRIANPTVHIGLNQLRLVVNAIINRYGHPREVVLEVARDLKQSREERDNESRRQADNQKRNERCRHTVASTIGIPAHAVKTADIQKLILWEELSADALDRRCPYSGKQIGVTELLSDAVEIEHILPFSRTLDDSLNNKTVAFRVANRIKGNRTPWEARADFEAQGWSHEEMLVRASRMPRQKSYRFTEHGYQQWLRDDKDFLARALNDTRYLSRVAREYVSLICPQATRVIPGRITALLRGKFGLNDVLGVTGEKNRNDHRHHAVDACVIGVTDQGLLQRFASASASTRQAHLDRLVDDMPLPWPTYRDHVERAVNRIWVSHRPDHSHEGAMHNDTAYGLREGGIAVTHKVVDGKRQKQEQVLSVIAMSEPTQLARHGVLPDGSPKPYKGYKGDSNYCIEIVRGDNGKWQGEVVSTFEAYQAVKRAGTTEVLRRKDKSLRGRPLVMRLLINDVIRYNGEDALKTVRVVKISSNGQVTVAPLHESNVANRNNDPNDGFVLTSKSAGRLQTAAGRLVSVSPIGDLRDVRFCD

SEQ ID NO: 5723 - protein, 1044 aa, unidentified
  REGION 1..1044: note = Description of Unknown: Cas Enzyme sequence
MAYNLGIDIGIASIGFAAVDLETQTILTSNVHIFEKAENPKTGASLAEPRRAARGQRRAINRRAKRKRAIRRLLRDHQFTNIHAIDIPLTEKHSEFYPGRFDANSSQQDKNTTVSVWDFRKDALERKLTEEEFGRVLFHIAKRRGYQSNRKGSEVNDVEGKKALSAAKDLQEAMARSGQATIGAYLATKDKKRNGDGTYENFVERNLLRHEVKKIFDAQRAFGFEKATPELEQQFLDIAFFQRPLQSSAHLIGFCSLEPEKRRAPKFAYTAELFVLWSKLNNLRIKNTNSEERSLTQHEKETLAARAHALAKITYVQIRKELELSDQERFNISYRKVKETDKTWDDIKDATEKKEFIILSGYHNIKDALAIPSEMDWRTWLNANRETMDEIARVLSVLEDASQIEAELSKLPLNQTQIQRLANITHFKKTLDLSLKALRKIEPYLLQGLTYDKACAAAGYDHSKKTSKSLTLLPPFDDIRNPVVNRALAQARKVINAVIRKHGKPKTIIIELARDVGKNFQDRAAIEKEQKKNEERRNDAKRHIAELLEIKPENVSGEDILRYRLWTEQKCLCPYSGVYISRDMLRDPLATQIDHIIPYSRSWNDSYMNKVLCLTSENQSKGNATPREYFTRIGYDIDILISFANGLPRKKAENLLIENFDEDKAKEWKDRALNDTRYIARALKNHIEQSLDLGPGNRVQTRNGLLTFNLRGAWGFAAKNRDNDRHHALDAIVLACSTQSMVQEFSNWNKYEARRKHPTERTYPPKPWESFREDALRVIDTIFVSRMPQRGITGAAHQDTIRSIRTLPNGDKQIIQRVKLKGLTLPILEKLVDKERNIALYTLLKERLEAHGGKADKAFAEPVFMPVKDANTTKAPRINSVRIITNEKSGIEINHGLASNGDMVRADVFRQDGKFHLVPIYAHHFTKSALPNRAVVAFKPEDQWTPVDDSNFLFSLHKNDYVVLQDKKQQIEGYYAGLNRATGAINVRTHDSDPNFGKDGVLEGLGVKLLQDFQKYSVDFFGTKTRIEKEKRLGLADDSDPERG

SEQ ID NO: 5724 - protein, 1243 aa, unidentified
  REGION 1..1243: note = Description of Unknown: Cas Enzyme sequence
MEKTLGLDLGTTSIGWALVHESDNGNSSIEKVGVRVIPLTTDEESDFQKGKSTTLNANRTSKRGARRNLHRYKLRRKALKNILLKHAVLSEDTKLTDETSNSHHNIWELRAKAANEPIALDELARVFFAINKKRGYKSNRKAKDEGDGQAVDGMALAKKLYEEDLTPGKLMLQRIKTDKKGTPDFYRSDLQNEFDQIWKKQLQYYSALLTPELKQNLFEKSTNQTYKICEEAFKLEGLKRTIKGKDLTLENYQWRVNGLSEQLDLEQLTIVFQEINKQINASSGYLGKISDRSKELYFKNLTVGQYLYNQIKDNHHSRLKNQVFYRQDYLDEFERIWETQAKHHSVLTHELKEHIRDIIIFYQRRLKSQKGLISVCELEGKEVEINKDGKVKRKIIGPKVCPKSSPLFQEFKIWQKLNDLEFKNVLTKEKSSPDLELKQILFRELNIKEKLSESQILKFTDLKAKDGWEINFKNGLDGNETNKALYAQFKEIALHSGHNVDWSKLNGTETKEGIQKVFTELGINAQILEFDTDLDGHAFTQQPAYQFWHLLYSYEGDDSKTGNEKLIQKLDEHFGFKEEYAKLLTKVVFKDDYGSLSTKAMLKIIPHLKAGHDYTESSALVGYKHSNYLTKEENENRDLENRLELLPKNSLRNPVVEKILNQLVNVVNAIIDAYGKPNEIRIELARELKKSAKERADMTSSINKATAEHEKIRKTLKSIAPFNAGVRITRNDIIKYRLWEELKNNGYKTLYTNTHIPKEKLFSKEFDVEHIIPKARLFDDSFSNKTLSARDFNLKKGNKTGIDAVAEYLGEEKKEAYLARIEKLYADKQISKSKYIKLKMTESEIPDGFIDRDLRNSQYIAKKATDLLFRICRKVNTTSGGVTDKLRQDWGLINVMKELNFEKYEKLGLVEYEQTKDGKTVSKIKDWTKRNDHRHHIMDAITVAFTRPSHVQYFNYLSARHDENHKLHNSIQGIEDKETTPINGKRIIKPPIPLEVFRTEAKKHLESTLVSFKAKNKVTTRNKNKTKSRRKRHVQDTLTPRGQLHKETVYGKKKRFVAKIENVGASFDYEKIQTVAHAKTRLALLQRLETFEGNPKKAFTGQNALAKNPIWLDQSQTEKVPEKVKCVTIEEFYTIRKEVSPDLKIEKVIDRGAQAVLQARLDEFGGDKKKAFSNLEENPIWLNREKGIQLKRVTITGVSNAEPLHHKKDHFGNDILDEFGNKIPADFVSTGNNHHVAIYRDKD

SEQ ID NO: 5725 - protein, 1351 aa, unidentified
  REGION 1..1351: note = Description of Unknown: Cas Enzyme sequence
MKILGLDLGTNSIGWAVVNEAENERESSSIIRLGVRVNPLTVDEQNNFEKGKPITTNADRTLKRSMRRNLQRYKLRRANLVSLLKTQGWITDETLLSEQGNNSTFETYRLRAEAATKEITLEQFARVLLMLNKKRGYKSSRKMKHDEDGSFVNNLDIARELYDSGLTPGQYAYNLLKDGKKYIPDFYRSDLQEELDKIWAYQYEYHENILTHSLRSAIIDQSKTGTTKIFLKTHGIFTADIKGNRNERNKQLFELRCGALERALTAEELATVIAEVNGQINSSSGYLGAISDRSKALFINHQTVGQYLMQQLDRDPNKSLKNQPFYRQDYLDEFEQLWETQAHYHPELTAALKHEIRDIIIFYQRRLKSQKWLVANCPFEHRKVCPKSSPLFQHFRIWQVLNNVTVTVDNKTYVLNEEQKSILSKELLYKEKISKRDALKMLFVKAKGVDMNFASLEGDRTMSNLLKAAQEIVSISGHGDYDFGKMPADDIHNIIRSVFGGLGFATDWLNLDTDADDLEQESQMRLWHLIYSFEGDNSTTGDTKLVERLMSLLNLPQEYARLFANVHLEDDYCGISSKALKRILPFMKAGHIYSEACALAGYKHSEQSLTREENKNRPLKDHLEQLPKNSLRNPVVEKILNQMVNVVNSIIDTYGRPDEIRIELARELKNNALGRQAIFEAINRNTKESERIQQILKKEFGLTHVSRNDIIRYRLYQELSGNGYKTLYSNIYIPQEKLFSKEIDIEHIIPQARLFDDSFSNKTLEYRDVNIKKSNTTAIDFVRNEYGENEVEQYKKRVNDLLKSGAISQAKAKKLKMTEAEIPNDFIERDLRNTQYISRKAQEMLRDVARVVTATTGSVTDRLRQDWQLVDVMQELNWDKYERQGLTTVINGRDGQQIRRITDWTKRNDHRHHAMDALTIAFTKPAYISYLNHLNARSEDDIRSIERRFLERDANGHLRFISPIAHNFRSEAKRHLEMILVSIKAKNKVVTRNNNTTKTKGGRRNRIQLTPRGQLHDATVYGSILLPHTKTIAVDGKMTAEIIGQVQNPVFRQALSQRLEACGNDPKKAFTGKNSLEKAPVWIDQAHTEHVPAEVTIQRLEPQHTIRRAVNKDLNINKVLDKGIQHILQARLDAYGGDAAKAFANLDNNPIWLNQEKGIAIKRVTTAENISGEPLHHKHDKEGRPILDTNGKPMPSDFVRLMNNHHVAIFQDADGNLQEHIVSFYEAVARVTELGLPVIDKEYNKDKGWQFLFTLKQNEYFVFPNPAQGFNPDEIDLTDERNYSRISPNLYRVQKMSSKYYVFRHHLETTVEDKKELQGITWKRIQSLNNLKGIVKVRIDHIGRIVQIGEY

SEQ ID NO: 5726 - protein, 1154 aa, unidentified
  REGION 1..1154: note = Description of Unknown: Cas Enzyme sequence
MKKKILGLDLGVGSIGWALIETEDNQPKQILGIGSRIVPISKDDNDQFSKGQAITKNADRTQRRTARKGYNRYQMRRTLLTQVLRNNNMLPERLDENIIDLWKLRSDAATEGHQLTLPQIGRVLYHINQKRGYKHSKADDNGDSKQTKYVEAVNQRYKEIQEAKQTIGQHFYLELLRSKIERANGPYYTYRIKDKVFPRAAYIAEFDQIIKVQRVYYPDVLTDELIDTLRNHIIFYQRPLKSCKHLVSICEFEARPYKTKEGKIVYSGPKCAPRTSPLAQLCAMWETANNITLTNRNNEKYDFTLEQRRQIVDFLCHNKEMKVTHLQKILGIGKNDGWYGGKVIGKGIKGNATLNQLREALQGKYDQWLEMPIKHIDVVDATTGEVFWAVSPEVEETPLFRLWHAVYSLQNADELAKTLREKFQITDESVIEALCKIDFVKPGYANKSHKFIRRLLPYLMEGMMYSEACERININHSNSMTREEREQRPLSARIQLLQKNQLRQPVVEKVLNQMINIVNSIKDQYGEIDEARVELARELKQSRDERESAYRAMGQNEKRNKEIAAKIAEFGIRPSRSRIQKYKMWEESLHQCFYCGKTIDLAEFLNGADVEIEHIIPRSILFDDSFSNKVCACRHCNQEKGNQTAMEYMETKPVGELEAYKLRVDEAFTAKRISKTKRDHLLWRKADIPTDFIERQLRQSQYIAVKAVEILQDGIRQVWTSGGSVTDFLRHQWGYDEILHTLNLPRYHRVEGLTEFVEYEHAGQKHTEERIKNWTKRIDHRHHAIDALTVALTQQGYIQRLNTLEASHDFMEKQVKEAGTHYNEKKSILEKWINEQPHFSVEEVTNAVDGILVSFRAGKRVTTPARRAIYKGGKRVIVQRGIEVPRGALTEETIYGKQGDKYIVKYALDHPSMKPENLVDPTIRAIVQKRIAERGKDAFKEPLYSAEGMIIRSVRCYANVTDNSVVPIKYNGEGQPIGYAKKGNNHHVAIYIDKSGKAQESVVSFWDAVERKRYGVPVVITNPHEVWDNLLNTEFPQEFLAKLPNDDWQYLFSMQENEMFILGMEEDEFNDAIERQDYITLNKHLYRIQKIRSGEYTFRYHTETKVDDKYEGVANGINTSFQLRALVSIRGFSSLFAQHPHKVKVDILGHIHKV

SEQ ID NO: 5727 - protein, 1007 aa, unidentified
  REGION 1..1007: note = Description of Unknown: Cas Enzyme sequence
MNKIFAFDMGKASIGFCAREDNEIKSLGSVIIDVNHADSADNRARYRVHKTIEAHRAREKWFDELWLENGLPEFSKKDDFFKKEFASACDETIYNSTLLRCALIQGRKLETWQIYKALSSAIQRRGYDSSIAWADSEDDEENRKAAEKYTQKDGIELIISDEYKYPCFYDALLLGLWEENNPYEFKRSIGLNPEKVRTAGRTAPRELVIKELTKLWDEAKKQLPQLKKVSAEEFLYGNYREAYGSYKNPEWMHLRGTKADWQGVLGQKIPRFDNRIISKCRLMPKRNVCSADTIENISLVLLMQLKNFRYTNAFSFETGLRLSPVEIKQIYENKLSGWIESLNKYRKGELKKPSFTITKKDIEDVIGKKTIKDNMEKFSADISGRSSFCRRACRIMIDIITSGIEPLELDIEKYIDKEGSKNPVTKEEIKTMLEKTGAWNELHISDNRYEQKELAETADKESDLLIGSITNPVVRNRLQIFKNLLADLIKENGAPDKVIFEFARDSAENSMFGKIKTESYINTVKNNEKENELIKKALEDSQSYSETNFLKYKLAKIQDFRCIYSGEKIGISDFDACQIDHIFPRTAGGNDALYNKVICFNKENQDKAGRTPYEWLYNNKERWSEFTNRVQSLKKSLGKKKAELLTLPPDKCAEKIKSYNGLAETAQIARIASAITHYMCGWGMQTKGDNRHVFVENGSITAKIRKSYKLNSILGDDEKKNRSNPKHHAVDAVCISYAMDYKFNEQTHKYSAEGLKRDYVQQKIDEFMPFPYTHKKPLKKAVQPLETIYGKRKIGDEYFITSRTDITDLKQDIKAVRNIIDTVIKEDLTAKLESNMPSADWKNMLADYIHPKKKTKVKKVLITVSEGSLDIDENGRERIGEYSDFGTKGTNGQFKHSKAHRGQILYFDNKGAVKVQPVYSNKSLKEVREELQDKNCRLYKGGEMFYSGCLVQIPNDFKAAEKTYSKGIYKLRTVRLDGVIKLENNIGQEINTSAKNLAEAGFYKKKD

SEQ ID NO: 5728 - protein, 916 aa, unidentified
  REGION 1..916: note = Description of Unknown: Cas Enzyme sequence
MERILGIDTGTNSLGWAIIDKENGVANLVEKGTNIFPEGVKIEKGIESSKAAERTGHRSVRKHYWRRKVRKIRLLTILSQNHLCPPLDHHTLRLWRLKKVYPDNELFMDWQRTDDNANVNPYRFRYMCLTQKLDLDNMTQRYILGRALYHLNQRRGFLSNRKEATKESEGAVKEGISNLTSDMEAASCEYLGEYFFHLYQEGKKIRNHYTARKEHYLKEFHAICAKQELDQELVRKLERAIFDQRPLKSQKGQVGTCTFEKGKSRCPSSHPLYEDFRMYSFINNIKVRVHTAYENSERGLTDDEKKQIIPLFKRKSKKTFPFEDIAKKLAGKGNYCYYKSDEDKPYKFNYELDTQVSGSPVNAQLEEIFGENWLDSVCEVYTLANDKNRSQIMDDIWHVLFFYDDDEKLKGFAMNRLQLKEEQAEKFCKISMPNDYAALSLKAIRKILPYLRDYGLIYSEAVFLANLIEVLPNHIWNIKEMREAAIENVIELMHSFDKNNLDGLTLEQCVKGFLQDRYNVSTETLKKLYHPSMIDVYPRQRPNDEGVFQLGSPRINSVKNPMAMHSLFRLRKVVNLLLKERKINPDTKIHIEFSRDLNDANRRSAIQAWQRDNEKERERCRKALSEHIDNPTDTDILKYQLWEEQNHKCIYTGEEIGINDFLGANPLYDIEHTIPRSAGGDSTKMNLTLCSNRFNRDVKRTKLPSQLPDHDAILERIKGWKDNYEVLDKQIRKLKGSRGSTKEEKDRIIKTKHLLSLRRDYWRGKYQRFIMKEVPEGFSRRQVTDISVISRYARMYLKSVFKQVYIVKGIATSDFRKMWGIQEEYTKKERVNHVHHCIDAITIACIDKVEYDKLAQYYHESDEYRWGKGEKPVFEKPWPSFVSDIKQIQDELLIAHYSKDNMPKQAKRYVRDSKGG

SEQ ID NO: 5729 - protein, 1372 aa, unidentified
  REGION 1..1372: note = Description of Unknown: Cas Enzyme sequence
MKRILGLDLGTSSVGWAVVDQAENDNEKSQIIKMGVRIVPLDTQEKDDFEKGKSITTTAVRNQKHGMRINLQRYKQRRAHLVSLLRREHFITDDTLLYEDGNNSTFETYRLRARAASEEISLEQLARVLLMINKKRGYKSNRKADKQEDGQLIDGMAVARKLYDEHMTPGQFVNETLLQGKRYVPTFYQSDLRAEFNTIWNFQSQFYPDVLDDELKDKVIGKNKKSTAQTFYAAKNVSAAENKDRKTRLQVAYRWRAEAVTQQLPIEQVVAVLSDINGDINNSSGYLGKISDHSKELYFNKLTVGQYLMQQLDKDPHFRIKNRVFYRQDYLNEFNTIWETQCRFHPELTDELKEEMRDTIIFYQRRLKSKKGLISYCEFEGKEITVTVNGKTKKVMTGPRVCPKSSPLFQEFKIWQELNHMFKNVPLSGDQRMILYKELSVNKELSKSSVLKLLGLKDKEHALNFKSLQGNNTQVQLMNAYKQILDWSGHDVEKFDKLDYDTKMSFIKSVFGAIGAKTDFLEFDPNNLDNYLEQPAYRLWHLLYSYESDNSETGDDKLKKHLKELTGLSDEYVTALASVQFEQDYGSLSAKAIKHILPHLLSGKVYSEACEAAGYRHSAQSLTREELENRPLEAALEVLPKNSLRNPVVEKILNQMIHVVNAAMEEYGVERDGVKRFDEIHLEMARTLKQTKDQRENASRIIEERTRENDRFVKELQEQFGIAHPSRNDIIRYRLYLELKDNGFHTLYSNTYIPREELFSKRFEVEHIIPQAKLFDDSQSNKTLETHEANLEKGNKTAMDYVLEKYGEVGAEQYRQRIAFLYDRNNKNHTNKKYKNLLTTEADIPKDFLNRDLGNTQYIASKARDILMQVTRTVVPTIGAITARLREDWKLIDMMKELNWSKYKALGQTEEYRNRDGHQVRIIKNWTKRNDHRHHAMDALTVAFTRWEHVQYLNNMNAQEGDAHNSNAWMLRSKLMKDGKFLPPMPLDQFRADAFEHMKGILVSIKAKNKVATPSVNRISGSDVRQVTQTPRTQLHKEKFYGARQRYVTTIKKVDGKFDAETISKVARKDYREALMRRLDECGGNAKKAFTGKNSLSKMPIYCDALHTKQVPESVKLSWLETYFVIREAVGPSITIDNVLDRRVRDILQERLGAYGGDANKAFSNLEENPIWLNQEKGISIKRVTIKARLAEPVPLHHKLNRDGSRLEDSEGNTKPVDFVNTSNNHHIAIYEDADGNWHERIVPYFEAIARINNEMPVVDRHYNESEGWKFKFTMKQNEYFVFPDKETKFLPNEIDLMDKDNYSTIAPHLFRVQSLSQKDYIFRHQFESSVTAGKSLPQGMAYIRIRKEDNLKGIVKVRINHVGEIVHVGEY

SEQ ID NO: 5730 - protein, 1226 aa, unidentified
  REGION 1..1226: note = Description of Unknown: Cas Enzyme sequence
MKKRILGLDTGTNSLGWAVVDKDENNNYTLIDRGVLLFQEGVKIEKGIEKSKASERTGHKALRKQYFRRRLRKISVLKVLVANNLCPYVSDEDLHEWHVHKRYPKNDDFMLWQRTNENELKNPYYYRHLCLTTELDLDNIEDRYILGRALYHLAQRRGFLSNRLDNSQDDGDSGKVKKGITDLSEEMQEAGCDYLGEYFFQLYSNEANRVRLRTRYTDREEHYKKEFYAICDKQHLDKALVDSLEKALYFQRPLKSQRQGVGNCTFEPNKKRCALSHPAYEEFRMLSVINNIKIKGPHDIDLRSLNDEEVKSILPLFYRKKQIQSNNFEFEDIAKKIAGANKYAYIKDDVDKPYKFNYRMSQGISGCPVTTQLRDIFGDNWKAAIAESYTKMETKLGMKSADQAVNDIWNVLYSFSSQEKLKEFAITQLQLDEESAIKFSKIKIPSGYAALSLKAVNKILPFLRNGYIYSHAVLLANIPTIVGKDVWKNTDQRDFIVNQLTDLIVNFNPKDESMQGTLNFCIQDFLMNNYDLPSGAAAKLYHPSMIDTYQDAKCNADGIYKLGSPRTNAIRNPMAMRSLHELRKLINVLLSKRIIDNKTEVHVEYARELSDANRRKAIADYQKNLDNQRKKYREEIIHFYEEEGYSLEPTETDILKFQLWEEQEHKCLYTGRQIGLADFLGKNPKFDIEHTIPRSAGGDSTRENMTLCESRFNREVKKAQLPSQLANHEDILARISMWKEKVEKLSRDIDKAHTFTGMAKGAKDGTLQKRHRLIMERDYWYGKYKRFVMSEVPEGFSRRQGAGIGLISKYAGLYLKSLFHDPNDRNKSNVFVIKGKTTSEFRKMWGLQSEYEKKSRDNHVHHCIDAITLACIGKYDSQLMSRYYHDVEAFEAGFGKKPQFPKPWPTFTEDVLNIQKELLVVNDTPDNMPKHAKRNAKLSNGKKIVLQGDCARGSLHNDTYYGAIEHDGEIRYVVRKQLSSFEKESDLETIVDEAVKQTIKDAVAGKNFKEAIKEDIYMNKEKGIRIKKVRCFANAVKNPISIRQHRDVSKKEYKRQFHVTNETNYLMAIYEGEVKGKVKREFEMVQMIDAALFYKNSMDRDSYSTIVPSQKNNCNLKAILKKGTRVLLYEKSSDEIDFSSIKDISKRLYVVSGLSVSTIQKIYKYGMVTLKHHQEARPDSELNPKKGEYKSDEAYRPVIVLSHKQINALVESVDFEVNVLGEIKLK

SEQ ID NO: 5731 - protein, 1542 aa, unidentified
  REGION 1..1542: note = Description of Unknown: Cas Enzyme sequence
MKKILGLDLGTNSIGWAVVNAEEVTRENETSYLKPTSISAAGSRIIPMDEGVLGDFDKGNTKSQTKDRTDKRGTRRLLERYLLRRERLLRVLKLMKFLPEHFASHINEYGKFIDDSEPKIAWRKGHDGKFEFIFKDSFNEMLADFSKNQPQLLAGGKKVPYDWTIYYLRKKALSQRLTKEELAWILLQFNQKRGYYQLRGEEEEEVQDKKFEFMAQKVVRVEATDEKKGDDVWYNVYLENGMIYRRSSRISLDWEGKIKEFIVTTDLEKDGSPKKDKEGNIKRSFRAPKEDDWTLLKKKTEFDIDNSHKTVGSYIYDALLQNPDQKIIGKLVRTVERKYYKDELKQILDIQKTLIPELQDDALCKVCIEELYPNNEAHCNNIAKPDFANLFINDILFYQRPLKSKKSLISDCPYESHFDKNGNEHPIKCIAKSNPLFQEFRLWQFVQNLRIYERETDFDVTGQYLSTGEKYVALFDWLNDRASIKQDTLLNSYFKFKKEKGKDHYPYRWNYVEDKEYPCNETRAEILKGLDKCRVSADFLNKEQEMSLWHILYSVEDKTEIGKALKKYAEKNSLPESFADVFAKIKPFKKEYGSYSEKAIKKLLPLMRIGKYWSADAIDAKTKERIDKIITGEYDEKIKDRVREKAINLTDETHFRGLPIWLACYIVYDRHSEAKEIEKWEKPEDIDKYLKAFKQHSLRNPIVEQVVTETLRTVRDIWKQEGNIDEIHVELGREMKNPADKRKRMTETIQQNENTNLRIKAMLMEFMNPEMGIENVRPYSPSQQDILRIYEENALDNLTKDDKEFEFVSKISKTAQPSKSDIVRYKCWLEQKYRSPYTGEMIPLAKLFTSAYEIEHVIPQSRYFDDSFSNKVICEAEVNKLKDRQLGFEFIKAHKGEKVQLSQGKPVEIFSVEAYEDFVKNHYANNRTKMKKLLMDDIPDGFIERQLNDSRYISKLVKGLLSNIVREKLPNGEYEQEAVSKNLISCNGSITDRLKKDWGMNDVWNSIILPRFRRLNELTGKNVFTAISAEGHEIPAMPLELQKGFNKKRIDHRHHAMDAITIACATRDHVNLLNNEAAHSKKHDKFYRYDLQSKLRRKDDDGHYKEFLKPWTSFTTDAKRALENIIVSFKQNLRVINKTTNRYQHFDESGKKVFDKQKKGDSWAIRKSMHKDTGWGEVNLRFTKEVSLNDALRNPKSIVNKDFKQKVQELFTQGHDAKYIKKYVEDNKDVWSDIDLKKINVYYFTKETNDRYFATRFLSDLVGYMSGIKEYDKAVAKIEGITDTGIQKILKAHLQAKENNPELAFSADGIDEMNRNIVELNGGKPHKPIYKVRRFESGNKYSIGQKGCKAKKFVEADKGTNLFFAVFSSEKLNKETGEMESVRSYLTIPLNVMIDCQKKFGSKWQANIDTYLKECKLVSDEVKLLFILSPNDLVYLPTEDELKDGVTTVNNKRIYKLVDISGITANFVPYHIAQAIFSMTKDDQNKVFKEYRYGIQNEIGIGSRPSKSPNGFDERNVSIKESCLPLKVDRLGNIVELNGKKL

SEQ ID NO: 5732 - protein, 1366 aa, unidentified
  REGION 1..1366: note = Description of Unknown: Cas Enzyme sequence
MKNAKNKNYFLSLDIGTDSVGYAATDENYNLLKFHGEPVWGATVFDAASLNTDRRAFRTARRRLDRRQQRIDLLQELFAKEIGKIDPRFFIRMEESALYPEDKADKYTLFNDNNFSDKDYHDKYRTIHHLIDELMKSSEPHDVRLVYLACAWLVAHRGHFLQNISVEKLSDIKDFDRIYKNFIAYFDSKGFDKPWNKDSVDATKLAETLKKDSGITQKYKALCELIYNGKPPKEISDEFPFSKEGILKLLAGGTYELAKLFDNEDYAELTNKSVSLSMDDDKLAEIAAEIGDDYDLIENLRSIYDWSILVNILAAKNTISEAKIKVYEQHQKDLVFLKHVVKTYIPEKYDEIFRKTDCANYAAYSRHTDEPHGAKWGKNKVDFSDFLKKIVDKITPSEADKTQFEDMKERLQFQKFLPKQKDSDNRVIPNQLYLFELKEILKNASTYLPFLNETDEDGISTKSKIESIFSFRIPYFVGPLNERSDKAWLVRKAEGKILPWNFEKIVDLEASENEFIKKLTNKCSYIPGEDVLPKDSLAYHKFEVLNEINNLKIDGEKISVELKQRIYNEIFMMNKKVTRKKIEQFLVKEGFIEKGREAALTGIDITIKSDLAPQHAFKKLMDSNTLTENEVEEIIQRSTYAEDKSRLSKWLEREFPKINEEDRKYICNIKIKDFGRLSRKFLCELQGINKETGEPCTILGALWNTNCNLMEILANDRFTFTEEIEELRKTYYSEHGDLKLEDRLDEMYISNAVKRPIYRALDIVSEITKAFGKPTKIFIEMARGGSKDKKRERTKSRKDQILELYDKFKNEDVVHLRKQLEEMGVSADNKLQGDKLFLYFMQMGKCMYTGKPIDIANLGSKLYDIDHIYPQSYVKDDSIINNKVLVLSEANGLKGDKYPIEESVRNQMRAFWNLLKEKEFISEEKFKRLTRSTPFTEDEKLGFINRQLTETSQSTKAVATLLKEKFKEKSPKTEIIYCKAGLTSEFRQEFDLLKSRLFNDLHHAVDAYLNIVTGNVYNMKFTKNFNVNTQYSIKTKTLFTHPVICNGKIIWDGDKMLAKVKETASKNNAHFTKFAFFKKGGFFDQMPVPAAEGLIPRKKDLPTEKYGGYNKAGSMFFIPVKYKIGKKQDVMIMSVELLHGKHFLADRDFAQQYSFSRLEQILRKKVNEVSFPLGMRPLKVNTVLSLDGFKICITGSAGGGKCLSAQPIMQFSADKSWQFYLKKLEMFDEKCSKNKTYIYSEEFDKISVEKNIELYDLYRKKLKNSIYSKRINPPTTTLEEGREKFISLGIKEQAKTLLNIHQVFGRMTGGCDLISIGGVGKAAATVNFSATISNWNKNYKDVRIIDSSASGLWEKKSKNLLELLKV

SEQ ID NO: 5733 - protein, 1194 aa, unidentified
  REGION 1..1194: note = Description of Unknown: Cas Enzyme sequence
MRYRLGLDLGVSSIGSAVIQLSDKNEALKIIDAGSRIFEVSEGAEDRRLKRTARKNTIRTKKRLELLAKLLFENGLWSSFDPAGTRKLRAMSPYELRAKSLDEKLSIPEMVGRIILHLAKHRGAGFISAASEMEEEILEAGEKRKKSSPYEIMAQHLKETHSRTLGEFFYNRICESYEKKEPRLRMVRQRDYALSSKAVDYAIPRYLVKDEFNQIWASQARFYPVMNTDGLKEKVYSILFFERPAFPYAIGKCVYFNNEDRLLKAHPFSEYRRIYESVNNIRVLTAKDKRRLTLKERDLVVAELIRGQNAGKKVIKDLLHLPADQKISIDDDKGAPIKAYLYSTDIFKTIPYFSSISERQLCDFIEFLADPRNPDDKSGRLYNEEELISILKSKLGVDDEKKIGELLTKLPKGRAMLGMTATQAILDGLKADVLSQREVTDKLSETDSHYIAEEEIARQNQGKYAQLPYYGKILTTDTAPLPEAQIKNNLTLNEDEKRFGKIANPAVHMILNQLRAVVNDIIRIYGRPYEIGLEVGRDVGLSTKKKKEFENKNKENKNLNDEARDYLQNRHLFINAKNILKYKLAKQQKWKDAYNPSQNISQNLSGCEIEHIIPQAKHGRDTFNNLVLVSATDNRQKSDEYAFDFFQRTKSEAEIAAILKFARDNLKEKSWRFEPDARERFEEAGDEDETTRYMTDTRYVSKMAQRYLRAIVDCSSSEDASEVRILSPRGSYTAQLRTAWNLDGLEYDLSGIDVPRYLPCEPHYVNQETGDIVEGREKPDIDGKWRFYETKKNPEWMKKPRIDHRHHAMDAIVVACLSRSLMQKMARIEKQGGYILKNEFPLPLAGMDAENRKAELSKFRQNVISVLKRVLVSHKPDHSAAGQLHKDTGRTVLGSNPTDKNSKVIVYKKKIKDVLKKKTDLKKLQVSPAVKDEWIPLILEKGKDENMTEREWKRKQKLWNELPKNREKQAELVSLFEDYYPSCLQTLEEKRDTEVENGKKKYEISENMVLTEVLKTLQREKLWEGDTFKCYECSSALIEIPKHGIAYESGNNSCIDFYEKAGKVGWELMNNFEANQSDYVPEWKRQGDKAIWRLQKSDMIELDTPEEWKHYTDRPRCLARVKKFGDGAISIDYLTDARMTSPTDKTLKYMFVETLINRGLSYLVNHHTRKIELTPFGKIKRRHKMLKNGQKKKE

SEQ ID NO: 5734 - protein, 1268 aa, unidentified
  REGION 1..1268: note = Description of Unknown: Cas Enzyme sequence
MKVLGLDIGTNSIGWGIVDERNHKIENCGVYIFPEGVKIEKGNESSKAAERTSFRSARRLKFRRNLRKYETLKVLIKNNMCPLSLEELEKWHKEKIYPKAKAFINWYRTDENANWEPYFLRKKCVEEKCENYEIGRALYHIAQRRGFLSNRKESTEEVDGKVSSEIEKISKEKGDKTLGQYFYELKKSGEKVRGRYTSRKVHYEEEFNKICEVQKISDSLKKDLYNAIFFQRKLKSQKFLVGNCTLETDKPRCPVSHFEFEEFRMLSFINSIRIKRESVDKESPSLFEEMNESYPENGKLTEDEIELIKPLFYRISKPNFEFKDISKKLKGKHEEWDFNYRDDTNVAGCPVSTALKNIFGDEWKNIKIDNYDIYDIWHVLFDFDDDQKLHEFALNKLHLDAETTERFCKIHFQQGYANLSLKAIRKILPFLKKGYVYSHSVFLANIPTMIGKDNYEKNAERIENAVKEITDTLKDKNTLIAIENRCIEKVFKDENHDFRTEEWDRSIVDEMIFETYGKRKFLSLEADIQKTIKNEILEKVSDSLKIANSNNPNDYKYAALRTDDLIESFLREQGFEIKKNKKLYHPSDTEYNFEKPQQRDDGKTYLGSPRTPSVKNPVAMRALYQLRKLINYLIKTGEIDTETRIHVELANEVNDKNWRKAIEDFQKDNEKKNEEARKRIVELCSECGFTIEPTDSDIKKYRLWKEQNETCPYTGKKIGITDLFGQNPKFDFEHTIPRSLSYDDSLENLTLCDSDFNRNIKKQHIPSELANFDEIAKRFAKFYEDKIDECLSIIERNKTRSGYIDPAVKDAKIVKRHKAQLELDYYKGKLRRFMSSDIPSGFKHSQLNDTRIITKFALSYLRSVFQHTYPVKGSMTDTFKRQWGLLDRAESKDRSNYRHHAVDALTIACVDRSKFNLLSEAIRASADGMHLKFEKPWENFDKDVLQAVQYIIPKHFVDDNSLRQSKKVLRERDGKPRLDKNGNKIYIKGDTARGSLHKDTFYGCIMTPPKKGSEPQKIFVQRVACDTLTKDSADKIIDGGIRKTFVDNLESGKQSLADIQEKGILLPYQMNGKAVYVKRVRVMARPTSPIILKQHHNVIDKNPKDYKQNYYVVNDENYLIALYRGKDDKGKDTACSLTLNLLDAIKAKNSGNELYPDNKNGMDLYKVLKIGRIVILQENYDEDIWSLPSELVWKRMYRVAGLGKSGNRVFICLAHITQSGAWQYIPGKFDLNTFIESRRYQDNQFIGLVEGEDFTISPAGEIIRIPQK

SEQ ID NO: 5735 - protein, 1112 aa, unidentified
  REGION 1..1112: note = Description of Unknown: Cas Enzyme sequence
MKYRLGLDLGTNSIGWAIYSLDNENKTQELEDMGVRIFSDGRDPKTKEPLAVARRIARGQRKIIYRRKLRRKATFRLLQEQGLFPKTKEESQKIKFLNPYELRVKALDEKLEAVELARVLFNLSVRRGFKSNRKDTSNEESSNSKSSEKLSQNEMCEELTKAIREANCRTLGEFLWENQKKNHGIRFVPGRMSYYPLRKMYEDEFNAIRSVQEPFYKNIDWEGIYNAIFSQRKLQHQERGRCQYMPEKERTFKALPCAQKLRILQEIRNLNYQNAEGKTLPISKGNELSLFPESGETDLLRLLDTKEKVTFDAFRKALGLSAACTFNLERGGRTFLLGNATAVKMRKKNLFGDLWDSLKLEEQDAIVETLMTADEDGEVYKVLENYNLSDEQKESIVKLSLSSGTTMLCKEVSEQLVHKMESDSAYTYTVAVESLGYKYADQTVEKFDELPYYGKVLTGSTMGINPAADESKPEQKYGKISNPTVHVALNQTRVVVNALIKQYGKPAQIALELSRDLKASRKAKDAIQKKQNENKKRNEITNKNIRDANPNIPYPNRNDRLKYRLWEELGSEGLPRKCLYCGKNISGGELFSKNIEIEHILPYSRTLLDAESNLTVAHASCNAFKKERSPYEAFGSNPKGFNWEEILMRANQLKNPAKRRRFAIDAMETFEKDSGFIARQLTDNAYLSKMAMKYLKSVCDDIWSVNGGMTKLLRDKWEIDSILKRKIDDREIAHFELKEEQIGEYKKNRYDHRHHALDASVIALIDRSLVKEISTLNARSQKNRIEVPPMAVPRLELQEKVKNIVVSFKPDHGAEGKLSKETLLGKIKREELLEISKVEESDIPLIKSDKVRKDFEEKFAETKDIKQVRKEFKDVYPQIKVFREFYVSRTAVMSLKENNIEDIVDAKIRTKLQEFIALHKGEKFEDVLERFSEQSGIKKVRCLNRVQTPIVINGEVPRYLAPEDYFAAIIWQIPPKKEGAKPTFEAQYIRRTEVGKDNKPNAEIIEAWKKQHHPAAKNLGILHKNDYLEFCDDGKWYKCRVAGLQAAANRFDIRPIFSVTDCKDWIIATEENQLEGYWKPQKGQNYISVNVLFGEKEARFITVNPIGRVFRK

SEQ ID NO: 5736 - protein, 1355 aa, unidentified
  REGION 1..1355: note = Description of Unknown: Cas Enzyme sequence
MKNEKYYLGLDIGTDSVGYAVTDENYNIKKFHGEPAWGTHVFEQASLNTERRTFRTARRRLDRRQQRVLLLQELFSKEVEKVDSGFFIRLQESYLFRDETDSHNIFFDDTNYSDKDYFSDYPTIHHLICELMFNDQPHDVRLVYLALAWLVAHRGHFLSNIDRNHIDKIKDFGSVYGQFISYFTDNGYDVPWNCSEIDKIGNVLKKKQGVTAKTKELISVIFGNDKPEKEPKEDFPFNTDALVKLVAGGTVKIRDLYCNEEYDDAGSVSLGLDDEKLGEIMTTIGDDYDLIASARLLYDWALLVDSLGNNSTISEAKVNIYKTHKKDLTDLKYIVKKYIPSMYSEVFRKVDSNLGNYVAYAYHTNDGDTSKLKKKNKEDFSKYILSVLKDVEPEAIDIELIEDIRTRLNLRTFMPKQKDTDNRVIPHQLYWYELNRILKKAETYLPFLVDVDEDGLTVSDKIESIFLFRIPYFVGPLNEKSNHAWLERKAGRIYPWNFEDMVDLDVSEQRFIQRMTNTCSYLPGEPVLPKDSLCYHKFMVLNEINNLRINGERIEVDLKQSIYENLFMKYKKVTRKKLIEFLICNGIIQKGEEELVSGIDIDIKSNLSPQIAFRSLLEREIINEVEAEAIIERSSYAEDKTRLSKWIECHYPQIDEADRKYICNLKLKDFGRLSRKFLCEFEGADRETGEIMTIISAMWNTQCNLMELLSDKYTFQQEVIKYSEDYYSSHSYSLDDRLNDMYLSNAVRRPVYRTIDIVNDIYKAFGEPTKIFVEMTRGSKPEQKGKRTASRKQQILDLYNKCRDEDVRLLKQQLEAMGEYCDNKLQSDKLFLYYMQLGKCLYTEAPIDLNKLGSKEYDIDHIYPQALVKDDSIINNRVLVLSSANGEKSDIYPIKSEIRHNRRAYWDYLRNIGLISEEKHKRLTRATPFTDEEKLGFINRQLTETSQSTKAIATLLKDKFPEAEIVYCKAGLVSDFRQQFGLYKSRTYNDLHHAVDAYLNIVTGNVYDMKFSKRWFSVDSNYSIKTTTLFTHPVVCGGTTVWSGEDMISKVKKIASKNNAHFTKYSYFKKGGLFDQMPVTKGEGLTPLKKNLSTKKYGGYNKAGLMFYLPVRYRAGKKSEIIIMSVELLHGERFLKDSAFAEEYTFARLKHILGKTVDEISYPMGMRPWKVNTVLALDGFRVCIAGVGSGGKCLVAQPAMQFSSDAFWNYYLKKLEMFVEKNDKNKNYIYDQEYDKVSSEKNVELYKLYLDKLENSIYSKRVNAPVVVLENGLEKFSLLGIKEQAAALLNIHQVFGRVSGGCDLSAIGGAKKAAATVNFSSTVSNWRKTYSDVRIIDSSASGLWEKKSENLLEML

SEQ ID NO: 5737 - protein, 1118 aa, unidentified
  REGION 1..1118: note = Description of Unknown: Cas Enzyme sequence
LGVDPGTGSLGLVVRDTETEELMKQVKFASVDIVRSGVIESGQNKYTSFAAERRGYRNARTRYMHRKWRKQETLKLLIDEKIIEGPIKHLLCPLSPEDLERWVRYDKAKGLKREYPVDAVAFAHWLMMDFDGDGKVDGYTSPYQIRKELLERQFDFSNPEDCYKLGRALYHIAQKRGFRSSKGDTISDAELPAEDIPQDEDFDAMEYSEQKKSKKLTEYMAEKVIQDKSVGYALAMLEDEGIRLRDSEYQVVRKQLKDEVKAIFEYQEQLSIDSYLYKRLVSEKKGEGTIFYQQPLRSQRGKVERCSLEPMRKRCKSSHPEFEKYRAWSLINNIKIRLPEDGELHTLPFELRQRLYDEKISKIVSKTFDFASIRRWIEKEYHLSVSLSAKAKTINYYDDHSVAGCPTIGRLQKILGDNWESWTQESDQIRQKKNGTEHHIKYNALTLWHVCTEAENETFVEDFAKNKMHFNDEQIKELVRLHKNASDEYANLSLSALQKINSFLVRGFNNYEATLLANLPSLIGAKLWKEHSEEIEAHLQDIIDSNRKQKRLLNIANKLIADYNSLDEKEQCADRTYKLDDSDFRDIKKAITESIGKVSWERKSQDEKDSITQQVAALYQQFFASEKRTYYKMPTDMERIREYLKVAFEIELGADNQLYTPYDNRYYPQATQTKDGSFQLCSPVKGALRNPAAMRILHLIKRRINALLKDKQLGITAENTRVVVELPREVNDANMRRAIDIYQNRRKKENDIFRALIKEACDDEDERLQKTRLLIEQCPDYVLADFNEKLQKNKAYNEKIEYAATKYKNWLIDECIDLYTGNPIPFASLFDNDSYDIEHTIPRSIVLSDGLENKTITSASFNRKVKGNLLPSQLTNYQTVILPNLQPWKDRVERLEGRVKYWLKETKRAFDEDRKNYCIVQRHLWQMELDYWSSKLERFLITEVTTSFVSKQMSDTRVISKYVFHYLKSFFTRVDMQYGSTTATFRKIYGLPEKDRSNHTHHAIDAAMLAFIPSSAHRDAMLRLFYQIEEEKKAGHASEVNRLKEKLEQEKKLALYGSKYAKAKGAGMINIVNQLKDTMMVNHVVKDQTLTPARKRSSIKKNGERIKIVKTGDCIRGQ

SEQ ID NO: 5738 - protein, 1316 aa, unidentified
  REGION 1..1316: note = Description of Unknown: Cas Enzyme sequence
MKEKVVGIDLGTGSLGILLRNLELGENIIDQLEWFSVTTFNAGTGMSQTGEYTLASDRRSHIQSRRLKEHSRWKRWATLALLIENGMCPMKPESLVKWSIYDKSRNLKREYPIDDQAFDQWIKLDFNGDGQPDYSSPFQLRRELVEQQLDFTHLENKYKLGRAIYHIAVHRGFKSSKGETLAEMEDGGKNADINTDDLEGAMKKSEEKKSKDIVEYMVSHQLRTVGQAYAYLEEEGVRIRNSRYQAVRSQNVEEIDEYFKFQEGLKQYEDLHKRLISTKKGEGTLFYKLPLRSQKGHIGKCTFEKNKRRCPISHPEYERYRAWTFINNIRYKTEAEGLWQELSLDIKNRLYQEVFVSKVRKDFRFEIIRKFLEKQHGLSFENSEKTKTINYKDGTLVAGCPVTARLQNIVDLFDSDLEHFEQKGVKTRDTHTKRAERDKHTVVYHAMDLWNFCFDADEKEDVKAFAHNSLGWDDNATDKLCKLWAAIDQGYTMLSLKAIRNINRMLVYGLKASDAVFLAKIPDITGMSGDSIKELIDLYLGRIKGQVDAETRIARIANILIANYKSLPVKDRFADHNFDYQLKDDDKTAVVECIVANDKDFALLDANEQQEIIGRVTGLYQSFFADIHRDFVKSPRIVDALKEELRKKYSDVDDKKWEKLYHPSLLSDFPRDKENANHLGSPNIGAIRNPTVLRTLNVLRSVINKMIDEGLIDPQETRLVVETTRVNNDINKRWAINKYNEERRDENKAIEKILQEYYPEKDINADDVDAARYVLEQSGQNLYGDDGRYQHLVKKYKLWLEQGCQCLYTGRFINLSNLLNGDMFDVEHTVPRSLSFDSSDKNLTLCDSYYNRHIKKDMIPSQLPNYEQSVMIDGHEYTAIKPRLEIWEDKVERLSKNVIFWKNKARRAQTENYKNTCTRQKLLWQMEYDYWRSKLERFKMKPNDLTDGFRNSQLVDTGIITKYALLYLKTLFRSVDVQNGQSTSAFRKIFGIPEKDRSTHYHHAVDAAILSMIPSSAQRSRMLKLFYEIDEMKRGGHEYSGLQYQLNKEIESCGVGMGAADVDQYIENHVLVDYYKQDRTLQDANSIRGKLHAETFLGAITQWNSDEKKYVKRVELKFKKSSLDSGYKNWEDLESAIVNKQLVKMMKSQFPEGTTFQEACEQGIYMLNKKGEKVNKIRHIRIEVKEKRPLAIKRHTNLSDKDYKQYYYAGMGDLYVMCEYQNQQEKAFQIYSLFSIAENRKFGVEDIPSSIIGKKGNRLTLSRVIKSGDIVLIYKDSPDELYDLDTTELSKRLYRIPNGAFESDGRISLCHHLCAN

SEQ ID NO: 5739 - protein, 1170 aa, unidentified
  REGION 1..1170: note = Description of Unknown: Cas Enzyme sequence
QQLQNKSKTQTTKIFLAKYGIYTAENKGADRRLQQYCWREEALKRQLTREELAYVIADINGAITGSSGYLGEISDRSKELFFNQQTIGQYILQHLDADPHYSLKKQTFYRQDYLDEFDRIWETQARFHHELTPELRKTVRDCIIFYQRPLKSKKAMLDICTFERRQIEVTEEGKTRKKTIGLKVCPKSSPLFQEFKVWQILNNLQVEYEDTSLDLFATTEKRRFLDLEEKELLARELTYKEKLSKREVLTLLFGKAAKKYDLNYKEIEGNRTLTILYRAFLDIVSRSGHNEYDINKLHAQELEEVVGQVFSTLGINSEILHFDSELEGHAFDRQPLYRLWHLLYSYEGDNSKTGNESLIAKLQELCLCEREYAQILANVTFQEDYGSLSSKAMRKILPFMKAGHDYSEACEYAGYRHSERSRTKEELAERTYSDRLELLPRNALRNPVVEKILNQMINVVNAICEEYGKPDEVRIELARELKKNAKEREAMTQAINEANTQNEKYRSTLESEFGIQHVSRNDILRYRLYLELKDNGFKTLYSGTYIPKEKLFSKDFDIEHIIPQARLFDDSFSNKTLEARDINIEKSNATAYDYILNKWGEQRAAEYKNMIDDLYKQGTISKTKHDKLLMREADIPEGFIDRDLRNSQYIAKKAREILEDLVPQVIPTVGSITDRLREDWQLVDVMQELNWDKYDRLGLTETYQDKDGRTIRRIKDWTKRNDHRHHAMDALTIAFTQPAFIQYLNNLNARSDKSGSVYGIEQRCLYRDSHGKLRFRAPMPLDLFRAEARRQLEDILISIKAKNKVMTQNVNKSKAKGGSRKKVQLTPRGQLHNETIYGHTRHRVSEEVRVDGKMTSERARLIAKKVFREAVLARLAQFDNDPKKAFTGKNSPEKNPIWLNGQHAEQVPPKVKLVYFEDYYPIRKPISPDLKVDKVIDAGIRRILLARLEEFNGDPKKAFADLEENPIYLNKEKGITIKSVRIRGVLSAIPLHEAKDHFGRPITDDSGRRRPVDYVQTASTHHIAVYRDATGNLQDVAVSFLEATTRKALGIPVVDTEYNAAEGWHFLFSMKQNEYFIFPDLEHGFDPQTIDLFDPKNKAEISKHLYRVQKMSKTEGGRDYFFRHHLETSVEDNKELKGIAFKRINSLSSLEGIVKVRVNHLGDILPAKEN

SEQ ID NO: 5740 - protein, 1054 aa, unidentified
  REGION 1..1054: note = Description of Unknown: Cas Enzyme sequence
MEQRYILGLDIGIASVGWAALALNDKDEPYRILDMNSRIFPEAEQPKTGESLAAPRRQARGMRRRLRRRRHRLARLRSLLVREGVLSKAALAALYEKPVTDIYAVRCEGLERRLTPEEWTRVLLYFAKHRGFKSNRLAEAGNAEEGQVKEALKANAELLADYRTVGEMLYKDAKFQAHKRNKAAAYQMTVSRNMLLSEIKQLFAAQREQNNEHASEQFEEKYVEVFSSQRNFDEGPGGESPYGGNLIERMIGTCTLERAAGEKRAPKASYSFMRFSLLEKLSHIRITANGATRSLTDEERQQLEQLAWQSPSLTYAHLRKALGLHETERFNDLYYSKDIAETEKKKKFGFTAAYHEVRKALDKLEKDYIKKLSPDELDVIGYAFSVFKNEGNLRSYLLNNGIADEVCSTLLVNLKPFRKFGHISVKACRKLIPYLEQGMTYDAACRAAGYEPSGDNGLKHKFLSGAMEEVREIPNPVVRRAISQTIKVLNALIRRYGSPVEIHVELAREMARNFQDRRDMQHKMEENRKANERIIQELRENGLLQPNGLDIVKWKLYKEQQGICAYSQKPFDVERLLHDGKYAEVDHILPYSRSLDDSYANKVLVMAGENQLKRNRTPLEYMADDEEKLNAFVCWANTSIRDLRKRQNLLRKNFHSEEKEWKDRHLNDTKYISRFVYNLLRQHLEFSPFIGGRKRHVLAVNGSVTAYVRKRLGINKIRANGDLHHAVDAVIIACVTQGMVNIIEQYSKARELWEISAKEPFPEPWPGFRKELEARTSDNPEEELRRVQVKNYTEEELQAVKPIFVSRMPRRKIRAAAHEATIHSAKHLNAGITVVKKKLSELKLTNDKMAIAGYFNPSSDKLLYQALLTRLQAFAGNAKKAFAEPFYKPRADGAPGPLVRSVKIAAKSVLQVDVNQGKGVAANDSMVRVDVFYRAEGKGKGYYLVPVYVADTVKDELPLKAVTQRKDYADWEIMRPKDFLFSLYKDDLLLVRSTKDIEMKFNEKKKEISMLPAIFRTRKVFAYYQGTDSSTASITVCNHDNTYGKRGMGVKTIA

SEQ ID NO: 5741 - protein, 1056 aa, unidentified
  REGION 1..1056: note = Description of Unknown: Cas Enzyme sequence
LFINDILFYQRPLKSKKSLISDCPYESHFDKEGKEHPIKCIAKSNPLFQEFRLWQFIQNLRIYQREKDVAGKLLTDVDITNDILKSEDEYVALFDWLNDRASIKQDSLLKYVLKEKFKKEKGKDQYPYRWNYVEDKEYPCNETRAEILKGLGKCGVDVNFLTKEQEMQLWHILYSVEDKIEIGKALKKYAEKNSLPESFADVFAKIKPFKKEYGSYSEKAIKKLLPLMRMGKYWSADAIDANTKDRISKIITGEYDEKIKNRVREKAINLTDENHFRGLPVWLACYIVYDRHSEAKEIEKWEKPEDIDKYLKDFKQHSLRNPIVEQVVTETLRTVRDIWKQEGNIDEIHVELGREMKNPADKRKKMTETIQQNENTNLRIKAMLMEFMNPEMGIENVRPYSPSQQDILRIYEENALENLTKDDKEFDFVSKISKTAQPSKSDITRYKCWLEQKYRSPYTGEMIPLAKLFTSAYEIEHVIPQSRYFDDSFSNKVICEADVNKLKDHQLGFEFIKSHKGEKVQLSQGKTVEILSVEAYENFVKDHYSSNRTKMKKLLMDDIPDGFIERQLNDSRYISKLVKGLLSNIVREKLPNGEYEQEAVSKNLISCNGSITDRLKKDWGMNDVWNSIILPRFKRLNELTNKITYIELVNEFNRLFELELQNIAQSKGTIKVDSYPDFYKSLDNKERVKVIDNVMKQLPIAESFLSVNNEGHVIPNMPLELQKGFNKKRIDHRHHAMDAIVIACATRDHVNLLNNEAAHSKHNANRYQLQRKLRRFEKAIVDGKEREVAKEFLKPWNSFAIDAKQALENIIVSFKQNLRVINKTTNHYQHFDESGKRVLKRQEKGDSWAIRKSMHKDTVFGEVNLRFTKEVSLNDALKNPKTIVNKEFKHKVQELLAQGRDAKSIKQYVEDNKDVWSDIDIKKIKVYYYTQDIKDENGIVKERYFATRKPLDSSFNKKKIEESVTDTGIQKILLAHLEAKGGDSELAFSPDGIDEMNRNIVVLNNGKFHQPIQKVRVYEKADKFAVGQNGNKSAKFVEAAKGTNLFFAIFSSEKLN

SEQ ID NO: 5742 - protein, 1033 aa, unidentified
  REGION 1..1033: note = Description of Unknown: Cas Enzyme sequence
TRKEADKESEGAVKEGISGLTAAMEEAGCTYLGEYFYQLYNRGERIRSHYTSRKDHYLKEFHAICKKQELPAPLVEKLERAIFTQRPLKSQKGTVGVCTFEKGKARCPVSHPLYEDFRMLSFLNSIKMQTPQDFQLRYLTKEEKSLVIPLFKRKSKKTFLFEDIAKKLAGKNNYCYDGDEAAKPYRFNYQMDVSVAGSVVNAQLEDIFGPDWLDAVCEVYTLADGKSRTDILNDIWHALFFFDDEEKLKGFAKSRLQLDDTQAEKFSKITLPSDYAALSLKAIKKILPYLKDYGLIYSQAVFLANLVEVLPSHVWGIRETREAAIENVINVMLSYDKRTDSRTLEGCIKDYLRERYHVEEQKLKKLYHPSMIDLYPHVQPDEDGVYQLGSPRISSVRNPMAMHSMFRLRKVVNLLLKEGKIDENTVVHIEFSRYLNDANRRKAIQDYQRENERDREACRKKIEEFGRKEVSDTDILKYQLWEEQNHKCLYTGEEIKLADFLGANPKYDIEHTVPQSAGGDSTKANLTLCNSKFNREVKKAQLPSDLANHEEILQRIAAWKETYEELDRRIRRLKGSRASSKEEKDGIIRRRHLLSLQRDYWRGKYQRFTMTQVPEGFSRRQGTDISVISRYARLYLKSVFKHVYIVKGIATSDFRKIWGIQEEYSKKERVNHVHHCIDAITIACIGKSEYDRLAQYYHQDEAHRWGQSIDKAQFPKPWPTFVSDIKNIQNELLIAHYSKDNMKKHTRKRGDKGQVLQGDTARAPLHKDTFYGAILRDGRIKYVARTELSKMSESDVEKIVDDEVRKKVNEAIVEHGSLKNAISAKIWMNKEKGIEIKKVRYYVKQVTPLDIKDHRDLSKHSHKRKLMAWNDSNYMVAIYIGRDKKGKEKREFEEINMMKAADYYKRSNDRLSTGNPLVPQTSFKYGFPLVYQLSIGMMVILYDNSPEEIWEMGIKNIQSRLYKITAMSLTDGRMELVHHQEARPKSDLKAVSGAYGYDGKLKPMLRVRFNQFKALVQGVDFELNDLGEIRRLI

SEQ ID NO: 5743 - protein, 1409 aa, unidentified
  REGION 1..1409: note = Description of Unknown: Cas Enzyme sequence
  MOD_RES 751..753: note = Any amino acid
MKKVLGIDLGSNSTGWAIRNLDLEGNQIEDFGVITFEKGVASEKGNEFPKVQKRTESRGKRRNYQAEKYRKFGILQFLIEKSMCPLSIEDFNNWKTYRKGKKREYPQSEEFLNWIRFDFDGDGKPDFHLFGKDKDESYYVFRAFASNLDYKNVFNKNPQILGRVFYQLAQRRGFKGRDEEEAKTMLTGSEKNGTKGRNDIEEYIEKYKSLGAALYHHQKDFGGRIRQRYNLRKDNEAELKLICDLHNISKDDYSKLWKAIIWQRPLRTQKGLIGTCIYEKGKKRISVSHPLYEEYRTWVFINNLNIIPPVGENKHEYIQTKIYPLFYKSKPDFELIDIDKQLKKDGAKRTSKHHEKTKVLSVKLLKQFQDVFGENWKDILKWDVNGDRSPQPAKKSQVQYTFEDIWHILMTFDGQENLKKFALEKLNLDEEKAIKFSKIKLQQGFATLSLSAIKKILPYLQKGFLYSHAVYMANLYKMLGENVISETLTNHFSEEIFKILKQDSTNRKNAAIVNSLISEMLNDEHRYYISDNRNLDHGEKKSLLKSCIDNYGQASWDQLEEEIKTNIIEYVSTKYLEFLKKSFFDKTNLFVQPERIDEKIFNFLKETYHVSDDMKKYLWHPSEQENYAEAENYLEYSVGKKKYYVQEKNRSGFLTRNHDAEFEGREIKLLGNPEPLSKGFKNPMALKSLHKLKKLVNYLLQTGKIDEETKVVIEIARELNDKNKRKAIEIWQKEREKENDAYRKELAIYRXXXYREQFPNVNLIDEDTLVRKIRLWHEQNKICLYTGKPISFSDLIIGNKYDFEHTIPASISFDNELKNLTIADSGYNRLQKGKKFPTQLVNYDIEQVINGEFYNPIIRNIEFLFGERKVKEKELKGKTEKIVTWKKIEELEKLFDEWKKKASYASTKEYKDFCIVKYHTIKMDLDYLKAKLATFTITEYKAGWRNNQLRDTQIITKYALPYFKTLFKRVSVEKGGVTDIFKKVYKVQSKDSKKDRSVHSHHAQDAAILTLIPNAFHRERIIKAYQNEIDNRTGKTYHEIPMEWDNFSQNYILELKDKVLINNLTDSRTITQTSKTIRKRGKIVYDIDQAGNRKKRVAKGDTIRGQLHGETFYGAIKQPVRDEDNKILFDENKKMILKDEIYLAVRKPLVYKKDANSPGFKSLEEVEKAIVDKDLFKIIKKQVEETDFKTALTEGVYMLDKKGNKVNKIRTIRCFENGLKYTTAIKVHNHSFVSDKEYKKSTLATNGENTYCLFYKSDAGKAMRILSIVDLAEIKLKNVQNLFTEPEFSNFETGKGKNKIHLPLYSVLKSGDKVLFYKDSIHELKDLEKPELSNRMFRMYQFEQDGRIKFRHHLAAGIDTELKKDNPEYSSVNFNEKQIFLRLRQGQWNFAIEGKDFEMYIDGTIKWNF

SEQ ID NO: 5744 - protein, 1079 aa, unidentified
  REGION 1..1079: note = Description of Unknown: Cas Enzyme sequence
LDEEAKIQLSKESYEEELESLLEKSGEEFRDVFLQAKKVYDAILLSDILSTKKQNSKAKLSLGMIERYDSHKKDLEELKQFVKANLPEKTAIFFKDSSKNGYAGYIDGKTTQEDFYKFLKKELNGIAGSERFMEKVDQENFLLKQRTTANGVIPHQVHLTELKAIIERQKPYYPFLEEARDKMIRLLTFRIPYYVGPLAQGEETSSFAWLERKTPEKVTPWNATEVIDYSASAMKFIQRMINYDTYLPTEKVLPKHSILYQKYTIFNELTKVAYKDERGIKHQFSSKEKREIFKELFQKQRKVTVKKLQQFLSANYNIEDAEILGVDKAFNSSYATYHDFLDLAKPNTERVAELLEQPEMNAMFEDIVKILTIFEDREMIRTQLKKYQSVLGDGFFKKLVKKHYTGWGRLSERLINGIRDKKTNKTILDYLIDDDDFPYNRNRNFMQLINDDSLSFKEELANELALAGNQSLLEVVEALPGSPAIKKGIWQTLKIVEELIEIIGYNPKNIVVEMARENQRTNRSKPRLKALEEALKSFDSPLLKEQPVDNQALQKDRLYLYYLQNGKDMYTGEALDIDRLSEYDIDHIIPRSFIVDNSIDNKVLVSSKENRLKMDDVPDQKVVIRMRRYWEKLLRANLISERKFAYLTKLELTPEDKARFIQRQLVETRQITKHVAAILDQYFNQPEESKNKGIRIITLKSSLVSQFRKTFGIHKVREINNHHHAHDAYLNGVVAIALLKKYPKLEPEFVYGNYTKFNLATENKATAKKEFYSNILRFFEKEEYSYDENGEIFWDKARHIPQIKKVISSHQVNIVKKVEVQTGGFYKETVNPKGKPDKLIQRKAGWDVSKYGGFGSPVVAYAVAFIYEKGKARKKAKAIEGITIMKQSLFEQDPIGFLSNKGYSNVTKFIKLSKYTLYELENGRRRMVASHKEAQKANSFILPEKLVTLLYHAQHYDEIAHKESFDYVNDHLSEFREILDQVIDFSNRYTIAAKNTEKIAELFEQNQESTVQSLSQSFINLMQLNAMGAPADFKFFDVIIPRKRYPSLTEIWESTIIYQSITGLRETRTRMATLWDGEQ

SEQ ID NO: 5745 - protein, 251 aa, unidentified
  REGION 1..251: note = Description of Unknown: Cas Enzyme sequence
MAKDYTIGLDIGTNSVGWAVITDEYRLMAKKMSIHGNTEKKKVKKNFWGARLFDEGQTAEARRSKRTTRRRLMRRRYRILELQKIFAEEILKIDTNFFVRLDESFLNPEDKQYTRFPIFPTMAEEKSYYQTYPTIYHLRQKLADSTEKADIRLVYLALAHIIKYRGHFLFEGELDTENTSVEETFKDFLEIYNEQFEQASAFYEGIAVILTEKLSKTKKVEKILQYYPTEKTNGCLAQFLKLIVGNQGSFK

SEQ ID NO: 5746 - protein, 918 aa, unidentified
  REGION 1..918: note = Description of Unknown: Cas Enzyme sequence
MAKIGLDIGSSSLGWFINKNKKGVITFETGMSKGQSGGYTSPTKDRREARSKRNLIRARKYRKWELLKVLLNDYVPLNEVELNEWCHYQKGRRRKFPESEKFLKWLACDFTYQEGEKYKNPYELRVKALDETLSKHELGRALYHLVQRRGYKDIGETDQETEKQILRRGESGFQNALDTNRTIAEALATEFLDKGERARNQYPYREEYKNELELICKSQGFSVATNEKGDYSDVFVKNLWKAIIWQRPLKSQKGNIGKCTLEPSKLRCPVSHPAFEIFRALQFINTIKYFDANNEKQSINKELKDKLFKNVFLKKDSNFIFEDIKEFLNKETKTINKYNYPINPKNNQYETSVAGMPICKSLVSLFGDDIQKALLDIEKFNIGNAPKVINEYSIYDIWHIVFDFDEQHLGKFAVEKLGIENVTRKRKGEDVSISPLVELKRKFLQGYSDVSLKAICKIIPFLKEGYLYNEAVVLAKIPELMGNDWKSSQQIILDILTESNKIYQEKSTIASISNNLIDKHKGQTRAMIDGSEEQVFAYKDFSYLLKDDDIKDVKNACISYFGENSWNKVKDQEQLIQKVGLEYQEYFFDHKRAYRKTDTLTDIFKSLLKEKNITLTGELYHHSNRENLYNKNLEVNFKTGEKYLPKYKDTEIEILPIPFIDSIKNPMFNKSMSIVRKLLNELIINGEIDQETEVTVELARELNDNNLRAAIERYQKERRDNRDKIRKFLQQYNDEENRTINVEDNISLFELWTEQIFEETEDESNNKIQNKNRLDILREKEDVKRYELWTEQKGQCMYTGKMISISQLFSNEIDIEHTIPRSILPDNTSANQTVAFSKYNRDIKGARTPFYCENYSKDTPNGTSISPRLDSWKKLRDYYKIQYETRRRAKGAEDENTKNKRIQDKHYYKLHLNIGTIN

SEQ ID NO: 5747 - protein, 1418 aa, unidentified
  REGION 1..1418: note = Description of Unknown: Cas Enzyme sequence
MTKHILGLDLGTNSIGWAYVKEAQDKTEQSSIEKIGVRVNPLTVDEQTNFEKGKPITTNAGRTLARSARRNLQRYKLRRGNLIKLLKEHNWIDNEAILAENGNHSSFQTYTLRSKAVASPVTLQEFARVLLMINKKRGYKSSRKVNTTEEGQLIDGMDIAKKLYDENLTPGQYIYQVLKAGKKKLPDFYRSDLQNEFDKIWRFQQAFYPEILTETFKETLKNKGQKVTSQIFYTTYQFNTAENKGIRDEKRLQAYKWRNEILSKQLTKEEVAYVLAEINGQIYNSSGYLGAISDRSKELYFNKQTVGEYLYQQLQKNPHTRLKNQVFYRQDYLDEFEKIWETQAQFHKELTKDLKDEIRDVVIFYQRKLKSQKSLVSFCEFEQKEIIVGEKKKTIGLRVASKSSPLFQEFKIWQQLHNIRLRNKETREITNLSQEAKEVLFEELNLKGKFTAAKVLKLIENGKKYEVNYNEIEGNNTNAMLYTKYLDILDMEGYDIKSELKLKLNKEDIALTDLDVPASEIKEMVTRIFEELKIDTGILNFNPELEGKEFEHQKAYQLWHLLYSYEEDNSVSGMELLYKQLQEKFGFKTEHAKILGSVVFTDDYGSLSTKAMRKIYPFIKENDYSDACKLAGYNHSKNSMTKEELANRTLKLRLDIVPKNSLRNPVVEKILNQMVNVVNALIDTENDKLEKAGKERNFRFDEIRVELARELKKNAKEREDLTKEINAAKSKHEAIVKILQKEDGIKNPTRNDVIRYKLYQELKNNGFKNVYTNEYIERKDIFTKKYDIDHIIPQSRLFDDSFSNKTLCPRDVNLDKGNKTAYDYILDKFGQTKVEEFESRVKGLEALGKTEGITKAKYQKLLKKGKDIGDGFIERDLRDSQYIAKKAKTMLFDITQTVTTTSGSITDRLREDWGLVNVMKELNLPKYRAAGLTEEVETKEGTKKEMITDWTKRNDHRHHAMDALTVAFTKKSFIQYLNNLNARREEESDGISNTNNRKSIDTNDLRVSTKDVLGIEAKETSKLKDELGNWKRVFNEPIPNFRHTAKEHLEQILVSHKAKNKVATKNKNKIAGQKVSQEVLTPRGQLHKETVYGKIRQYASKEEKVSAKFDEATIAMVSNPKFRALLLKRLEENGNDPKKAFTGKNALAKNPIYLDDIQQEVLPEKVKLIWLEDNYTIRKEITPELKLDKVIDEGVKRILQKRLEDFNGDAKKAFSDLDVNPIWLNKEKGIAIKRVTISGVSNVEALHIKRNHLGEEIVDENGHSIPVDFVSTGNNHHVAIYEDEKGNLQEKVVSFYEAVARVNQGLPIVDKSLNKHLGWVFKFTLKQNEMFLFPSEDFNPNEIDLFDRKNYKLISRNLFRVQKIATKDYFFRHHLETTVEDNSKLKEITWKRLGVSGVKGILKVRTNHLGEIIHVGEQ

SEQ ID NO: 5748 - protein, 1203 aa, unidentified
  REGION 1..1203: note = Description of Unknown: Cas Enzyme sequence
MTKHILGLDLGTNSIGWALVEIDHENKMVRILGLGSRILTMDAAEIAKFESGAKTESTAAKRTTQRSSRKLNERYLLRRDRLHCVLNLLNALPEHYKLAIEFENEKGKRSGKFKKGTEEKLAYYKDDNGKFQFLFKDAYYQMENDFKKKYPEMFYRKKNGNETKIPYDWTLYYLRHKAVTDKKFELTKEQLAWITLSFNQKRGYEKVIGQDEKAQKEGELRDGFVGKVKSINKIGNEDVYEIILVDNNNEAIELFKYKEETKILITEIGDLKEVEIISKYDEEGTIDTKKTEYIINEVREFTIVDVRNTRRKIKENFVFEIELETGWVKEQQSKFTPKWKDTKRDFIIKTKYDKNGNRILKGTDKGRNINIPKEEDWTLMKLKIETSLTSFNTKNNTKGVASFVYYNLLQNPKQKIKADLITVIERDYYRDELDVIYKNQEKFHPELKNRNLYKQAIQLLYPNNTNHQKTIKELDFNHLIKEDILLYQRDLKSKKSLITDCVYEKENFERTDEKTGKKYKNPLKAIHKANPLYQEFRLWQFIKRLKIIKKENIVNDEIKLNIDVTSQLLTRELKEELYAFLNDKESVTEKDILGFLNKRHKDLDINSESYKWNFASEKEPCNPTRYNFILRTKRIKGFDYRAFLTPENEYSLWHFFYSVKKKDEFNKGLTNIISRILDKSGLSKEFHTELVKNFSSFGGYSNDYGTYSEKAIKKMLPFLRLGKYWNEKDVETILSKANQEVKQKVLDKEEINGELKDFQGLWFSSACYLVYGRYSEVGEVQFWQSPYDIENYLKNEFRQHSLNNPVVEKVLVETLHVVKDIWKYFGEEMGTDGDGKIIYNKLFDRIHIELGREMKKNNKQKEKDDKNNKENRKANERIVGLLRELKRTNSSLQEKSPFQQEKLRILEESLLSSIEYDKDNTEYELSSGKITKKEIKEITTKELSKVSRSDFERYKLWLDQRYQSPYTGKFIKLSDLFDRKKYEIEHIFPQERITLNALYNKVICETEINKEKKALTGYGFIANAKSKKVFCAAHDAQIEIIGISEYEELVNNNFSGKKREILLSKEIPEEFTNSQLNNSQYIAKMAMKLLSNVVREKDEDTFRSKNVLATNGTITTTLKRHWQLNDAWNELISPRFKRLNELTNSNLFGDYREINGHKVFINTVPEEASKNFDPKRIDHRHHALDALVIALTTENHVQYLNNI

SEQ ID NO: 5749 - protein, 1038 aa, unidentified
  REGION 1..1038: note = Description of Unknown: Cas Enzyme sequence
STGWAIRNLDLRDNQIEDFGVITFEKGVASEKGNEFPKVQKRTESRGKRRNYQAEKYRKFGILQFLIEKDMCPLSVEDFNNWKTYRKGKKREYPQSEEFLNWIRFDFDGDGKPDFHLFGKDKNESYYVFRAFAGNKQYKDVFANNPQILGRVFYQLVQRRGFKGRDEEEAKTMLTGSDKNGTKGRNDIEEYLDKHKTLGAALYHYQKDFGGRIRQRYNLRKDSEAELKWICDLHDISNDDYSKLWKAIIWQRPLRTQKGLIGNCIYEKGKKRVAVSHPLYEEYRTWVFINNLNIIPPLDENKKEYIQAKIYPIFYKSKPDFELSEIDKQLKKDGAKRTSKHHEKTKVLSVKLLKQFQDVFGVNWKDILKWDINGERSSQPVKKSHTEYTFEDVWHVLMTFDGQENLKKFALEKLNLDEEKATKFSKIKLQQGFATLSLSAIKKILPYLQKGFLYSHAVYMANLYKMLGENEISETLINHFSDEISKILNLDSTNRKNAAIVNSLISEMLNDENRYYITDERDLDSTENKLVLKSCIDNYGQASWDQLEEEIKTNIIEYVSTKYLEFLKKSFFDKTNLFVQPERIDEKIFNFLKETYHVSDDMKKYLWHPSEQENYAEAENYLEYSIGKKKYYVKEKSKNSFLSRNPEAEFEGREIKLLGNPEPLSKGFKNPMALKSLHRLKNLVNYLLQTGKIDEETRVVIEIARELNDKNKRKAIELWQKEREKENDAYRKELAAYQEEFSNVKLIDENTLIRKIRLWHEQNKICMYTGKPISFSDLIVGSKYDFEHTIPASISFDNELKNLTISDSAYNRLQKGKRFPTQLMNYDSEQVINGMTYKAIINTIEFIFGERTVEYKEEKGKTKKIVKWKKITELEKQFDEWKKKASYASTKDYKDFCIVKYHMIKMDLDYLKSKLATFTITEYKAGWRNNQLRDTQIITKYALPYFKTLFKRVSVEKGGVTDIFKKVYKVQSKDSKKDRSVHSHHAQDAAILTLIPNAFHRERIIKAYESEIDNRTGKTYHELPMDWSDFSERYILEL

SEQ ID NO: 5750 - protein, 1369 aa, unidentified
  REGION 1..1369: note = Description of Unknown: Cas Enzyme sequence
MRILGIDAGTNSLGWSIRDTEVINNQIIDFGVLTFEKGVASEKGNEFPKVKKRTESRGKRNNYRAEKYRKWDLLYFLIENNMCPLSHEELNKWKNYKKGTKRKYPQNDLFLNWLRFDFDGDGKPDFHLIGKNKHDSLFAFRALAVDPNFHSVYKTNPYLLGRIFYQLVQRRGFKGRDEEEAKTMLQGSDKNGTKGRDDIAEFIENHKTLGAALYYYQKETGERIRQRYNLRKDYEAELKLLCQLYDINDEDYQKLWKAIIWQRPLRTQKGLVGYCIYEKNKKRVQVSHPLYEEYRTWAFINNLKIIPPIGVDKQTYIQEKIYPLFFKSSNDFELKTILNQLKKDGGKIDSKFKEKTKVISAKLLKSFQDIFGDNWKELLHWDNINERDSQPSKKQNSSFNYDEIWHVLKTFDSQENLKDFALNKLNLDDEKAEKFSKIKLNQGYATMSLSAIKKILPFLRKGIPYHYAVFLANLYKVLGMETISDKMIDYFIEEFREVEKSNEQTRLLNTVVNSLVLDELNSKYRYSIENDRDLDDSEKKNINAKLIEIFGEKTWLLLSDDEKTASYDYVAKYYKEFLRKSVLSKTNLFMENERIHDQIFNVIAEKYDIPEDKKKFLWHPSEQENYTQAEEYDYFTLNGKPVYIKQIDRENFIKNNKDAEFQGRSLKLLGSPEPVTKGLKNPMALKTMHKMKQLINFLLQEGKIDEDTRIVIEIARELNDANRRKAIEKWNNEREKENLKFSETIIEINKECNTTFNPSDKTLLRKIRLWEEQNKTCLYTGKLIKLCDVLDGNKYDLEHTIPASISFDNELRNLTLTDTEFNRNIKKKQYPSQLYNHVDILNNIQFMKEKIEHLEDLYKEWKNKASYASTKEIKDNCIQRYHFIKMDLDYWSYKYNTFILEEYKSGWKNSQLRDTQIITKYALPYLKTLFKRVSVEKASVVNVFKEVYNVKLLSDKKNRSTHSHHAGDASILTLIPSAFDRERILKLYNEEKDNHTGKIYHEQPKDWKDFSPSYIKEIENVILINNIVENRTTVPTYKVVRKKGKIVWEDKSLDKKRIAQGDTIRGQLHDESLYGAIKLPLRNEENKILFDDNGKMKLTEEPILVIRKDLVYKQNADSPGFKTLEEVEKVIVDKALFEMIKMQVEDAVGFKEALTKGVWMFDKQGNKVNKIRRIRCKGLMKYNTALKVHTHAFTSKFDYKKTTLAKSGENALCLFYKNEDGKAMEILSISDVAQLKFKNDRSYFLEPEYNTKSIGKGKKSKEIPLYAVLRSGQKVLFYKDSIEELKELDNSDLTKRLYKVYQFESDGRMKFRNHMAAGIDTDLKKENKEGASFNFENPSIFLRIRQGEWNFAIDGVDFEMKMDGSLKFK

SEQ ID NO: 5751 - protein, 1406 aa, unidentified
  REGION 1..1406: note = Description of Unknown: Cas Enzyme sequence
MIKNILGLDLGTNSIGWAFVKETVNNTKQSIIEKIGVRVNPLTTDEQTNFEKGKPITTNAGRTLARSSRRNLQRYKLRRDNLIKILKENKWITDETILAENGNQTTFETFRLRALAAEENLNLSDLSRVLLMINKKRGYKSSRKVNNTEDGQLIDGMAIAKKLYEENLTPGQYVHDSLKSGNKRIPDFYRSDLQNELNAIWEYQKQFYSELLTDNLKEELNGKGKIATWTTLKIPFSLENIKREKKRDELKFENYQWRNDALQKQLNLEQLTVVLQEINTQIYNSSGYLGAISDRSKELYFNQQTVGQYQYLQLKNNPHARLKGQVFYRQDYLDEFEKIWEVQAKGREDILTNNLKEDIRDVIIFYQRKLKSHKGLISLCEFEQKEIIINGKKKNVGLRVIPKSSPLFQEFKIWQKLHNVKLKNKETKEVFTLNEQDKSMLFEELNLKGNLAADKVLALLFDKPKEWELNYKELDGNRTNQALYNAYLSILDNEKCDIRGALKLKLNKDEILINDVEIPSFKIKALMESIFEKNNIDSSVLSFNAELEGKEFEQQSSYKLWHLLYAYEEDDSLTGMDTLYRLLMHKFGFELDQAKVIGNIAFQDDYGSLSAKAIRKIFPYIKESEYSKACEYVSIEYNLPNYRYPKNYLSKEEIDKRVLKERLDVLSKNSLRNPVVEKVMNQMINVVNTLIDTENDKLEEKGKPRDFRFDEIRIELARELKKSAKEREELTKQINSAKLAHDKIVKILQTQDGIKFPTRNDIIRYKLYQELKNNGYRDLYTNQYINREDIFTKKYDIDHIIPQSRLFDDSFSNKTLVPRNINLAKGNKTAYDYILDVFGVDKLNEFKNRVKALYNEKEDGISKAKNKKLLMTGNEIGEGFIERDLRDSQYIAKKAKEILFQIAKIVVSTSGSVSDRLREDWGLVSLMKEINLEKYQNSGLTETQKTKDGRLKEVIVGWSKRSDYRHQAMNALTIAFTKCAFIQYLSNLNSRKNKDAEKHETIIEIEKKETHYKVDEKGNKKLVFNEPMPNFRKIAKQHLESVLVSHKAKNKIVTRSINKIKGSDKIQIALTPRGQMHKETVYGKIKQPVIKEEKVSAKFNEETIQKVSNPNYRALLFHRLKINDDDPKKAFAGKNTLSKNPILLEDGSQLPEKVKLTWLEDYYTIRKEVSPDLKLDKIIDEGVKRILQQRLNLFNGDAKKAFSDLDQNPIWLNEQKGIAIKRLTILGVKNAESLHVKKDHLGKEILDNEGNFIPVDFVNTGNNHHVAIYEDEKGNLQEKIVSFYEAVARVNQNLPVVDKQYNQHLGWSFKFTMKQNEMFVFPSDDFNPLEIDLLDKTNQSLISKHLYRVQKIATKDYFFRHHLETKVDDVNELKNITWKREGISGVKNIIKVRTNHLGDIVEVGEY

SEQ ID NO: 5752 - protein, 1119 aa, unidentified
  REGION 1..1119: note = Description of Unknown: Cas Enzyme sequence
KQAEFHVEFNDPFILSECVRELYRNNQQHRQQLESKDLIHLLLDDIIFYQRPLRSQKNGIGKCSLEYKVYKVRDKQGEFVRDEDGHYIEKKAYAQAIAKSNPHYQEFRLLQWINNLEIYQKDTDDRMTDKLIPDTDTYEALFEYLSNRKDIKQDLLIKFLLAKSGLKGKDLAIQSTYLRWNYVEDRAYPCYETRSLIVSRLSKLSHVPEAFLTNEKEYALWHILYSVNDKVEFEKALGSFAEKNQLDTKEFIDAFRRFPPIKSEYASFSERAIKKLLPLMRFGAHWQWQAIDGNTKDRIAKIINGEYDQKIKERVRDKAKYLNKEQDFQMLPVWLAQYIVYDRHSEARDLNKWNSIEDLSQFLDDFKQHSLRNPIVEQVVTETLRVVKDIWNKYGHGCADYFSEIHVELGREMKNPVDERRRMTTMVTENENTNLRIKSLLAELASDNGVDNVRPYSPMQQEILKIYEEGALNSATDIEEDILKISKTAQPSSSDLRRYKLWLEQKYCSPYTGQPIPLNKLFTADYEIEHIIPQSLYFDDSMSNKVICESAVNKLKDNKIGLSFIKAHSGQVVDCGFGRSVKIFELDDYMRFVQNCYSKNRSKRNKLLLEEIPEKMIERQLNDTRFISKYITGLLSNIVRDTSIDTNDEGVNSKNILTGNGKVTARLKQDWGLNDVWNDLILPRFERMNSITNSNSFTVWNENHQKFLPTVPLELSKGFSKKRIDHRHHAMDALVIACATRDHINLLNNESAKSVTRRYDLSRKLRYYEKVSYMDSRSGSQVSREVPKDFLKPWDKFTIDARRQLESMLVSFKQNNRVINKATNYYESYHDDEGNLRLDKNGKAIKALNTKKATNWAIRKPLHKETVSGIVNLPHIKLAKGKILTATRKTLDTSFDIRSIQSITDTGIQKILINYLKSKDNNPDRAFSAEGIEDLNKNITLYNEGKNHQPIKKVRVFESGSKFALGDRGTKSKKYVEAAKGTNLFFGVYAEENGKRNFDTIPLNIVIERQKQGLDAVPEYNEKGHKLLFSLSPNDLVSVRTTDSTDDENVHSADCIYKLVSFSGSQAFFIKHVVSFPIINKGEFSTLNKAERSIEGLMIKDVCVKIYLDRLGHILKREG

SEQ ID NO: 5753 - protein, 1028 aa, unidentified
  REGION 1..1028: note = Description of Unknown: Cas Enzyme sequence
MKTYILKDANQSPASKDSFLTGLVFGFDVGTGSIGYAVRQGSEFKYVGVLICDSEGSDLSKRRDLRRQRRTLRSKKFRRQWFAKELIKLGLPKSETALDDPISLRLRALNGEVLKPEELHAALTHLFKRRGYSKVPWANAEKAAKETAKPKKDDDEGIIKEAVKEMKVKLGDKHPCQFLAEEKIRVGNSPTTNWARKIYWPREVLRDEFLAIVAAQDKNFPQLAEKTDWLLYGDSQSKEKNGETFHVFFKATEARNPGVLGLRWPRFDNRGPALDSLQPVDTQGRPLHVVRKNKEAFGLAQWELALMNFRVLDFKTRQKRDPRTDFPIFIENLRNEWNKKGKVTEARLKKLAEPFKEKFLLIEDQKPLAPETGAGRARYSSPTLELIRKEIGEGRRVDPPQPILRRKGENAEQALNRYLADIKHPVVRHRLALFRGILTQLVKDYGQPNMIVLEAVRSLALGQKAKNELNKRNEQFRKERENARENLSSNNESFSRKAIQRYRLWQEAKGRCPFCLQTIERTDLGHGADIEHLVPRSIVDCNEFYNLTVAHIKCNRELKGDRTPLTAFGGTSQWEGIKANAETCFTGRKLEIFLSPEAEQLIEQKSDLQHTAYIARVIRHISLVQLGWLNDEGRDPTPEKQNPALSFQVTNGQLTSRLRKAWGLNQILHPLPPGKRWDELTDEEQKQFTEKNRGDLRHHSLDAMVICCTLPWLAHRTHGATDQFGHHGWWTQDEKQRSKAANPLFPNEGQMHEVVQKEIEKVVVRHHVSRSNHQQAYATTLYAKKAKDTYVAREVFTSLTPKNLGHIWPERLADYCVAAWKRYADESPDIEGELKRTKNCVPESFTRKLCFSHFQKWRQDDCPEFYWPKEIKIPIRNVRLISVKDDTAVVPFSPGTHAYVKRTGFKEVQVFLAEDEKSFVPVFIPHWKGDKLVCEKPIKQNTKPVVVIRRGMVVEAKKAFSAGQPPGKYRVLVTGQMQIKLLPHHVANKEDAIVSFGFGKKGLQPMWADFMRVLGYELPHPPSVKPQS

SEQ ID NO: 5754 - protein, 987 aa, unidentified
  REGION 1..987: note = Description of Unknown: Cas Enzyme sequence
  MOD_RES 827..830: note = Any amino acid
VLICDSEGSDLSKRRDLRRQRRTLRSRNYRHKWFAKELEKLELPRPKLLTHDPITLRIRALDGEPLAPEELHAALTHLFKRRGYSKVPWANVEAAEKDADKPKKKDDDEGVIKEAVKEIKEKLAGKHSCQFLAEQRTEAGKSPTKHWARKIYWPRESLEAEFRAIVAAQEKHFPKLAEKADWLLFGDTNEVKRNGNTHHVFFNIAESRNPGVLGLRWPRFDNRGPALDSFQPVDEEGRPLHVVRKNKDAFVKAQWELAVMNFRVIDIAIRKLVAPDAKSMARLREIWENSKRKGGKKFKAEETTEEIKPGKDLEISESVLKKWGKEFLNYKLVDGQQPLTPQTGAGRARYSTPTLERILSGERFDPPQPMLRRTGESSDQALNRYLADVKHPLVRHRLVLVRRLLAQLVTQFGKPDTIVVEAVRSLAMGKTKKREHIQRNKENRDERENIRAELKKDNFSSSKNSIKRFRLFKEARARCPFCLCPFCLQEVIFKDAEIEHIVPQSCVDCDEFYNLTVAHRSCNQRKGNKTPYEAFANTPEWEAIRKNAESCFGIGSLKYQLFTSPDAENLVEQKADLQHTAYIARVIRHISLIQLGWLGEDGRDTTGSKDPQKTAWRFQVTNGQLTSRLRKAWGLNQILHPLPTGKRWDELTPEEQNQFAEKNRGDLRHHALDAMVISCTLPWLAHRTHGAKDEFGRHGWWTQDEKQRSKAANPLFPNEGQMHEVVKKEIEKVVVRHHVSRSKHQQAYATTLYSKKAKDTYVAREVFTSLTPKNLGSIWPKEFAIYCEAAWARYSEDSVNIETELKMTKGCLPVNFTNKLCFSHFQXXXXWRADDAPVFSWPKEIKIPIRNVRLISVKDDTAVMPFSSGTHAYVKRTGFKEVHIYPTADKKGFVRVFIPFWKNDKPISDKPIPADAKPIAVIRRGMIIELQKKPGGKHPAGKYRVAKTMQGQIQLIPAHIKNDKQALLAAGFLENGVNFSWDTFINA

SEQ ID NO: 5755 - protein, 1027 aa, unidentified
  REGION 1..1027: note = Description of Unknown: Cas Enzyme sequence
MKKVLGLDLGVASIGWSLIETNKENENGKILKSGVRIFQGNEQRADAAPGESSNADRRTKRSVRRQRDRRTRRKINLYVTLKQKGLAPNKTEWDKWVSINPYTIRAKALDEKVSLHEFGRALYHLNQRRGYKSNRKAGSDKEGAVKEGISKVRNHMAKHNARTIGEYFYEIYDNHLQGDVEHDDFDWRIRDKYTHRKMFKEEFDALWKAQSAYHDVLTEKLGKEIKKIIFHQRKMKSQSHLIGNCELETDKKRIAKAHLLFQEFRVLKNINNLSISDENGFQIKLTDDDRSLFKEIFDKKDKVSWSQLKTTLIKSGTIGNKNAIFNLERGGRKNIEGNRTNAALSNDNAFGDEWFDLEEDFKNHVVDVLIHVDKPEVVKDLALNKWDRTEKQAEYITNKLSLEQRYGSFSEKAIKKLLPYLEKGMEESTAIKEAGYSLFEQNPGKMNQLPMPDQTIKNPVVYHALIELRKVVNGIIREYGMPDVIRVELARDLKAGYEHRQKMTKRMRELEKKNDKAYKALQQAPFDIQYPGYNDIIWYNLWEECEKTCPYTGKSIPAEAFNSGEFQIEHILPFSRSLDNSYANKTLCEADFNRKKGNRTPWECVEAGLMEEDIMLQRIRNLPWNKRNKFTQKEIDEDKFLNRQLSDTRYISKEASAYLKHLSCEGVEVVKGQTTSLLRHLWGLNSVLNKEDPEMKNRDDHRHHAVDAIVVAFTNRSTLKRLSDENKQIGAAEWMNDDESGRAKNDEMKRRLGGRIDLSEPWLTFRNDVEASINNITVSHRVNRKVSGALHEETYYGPTDEPAPKNKEMMVVRKPVHQLSKKDLTLIRDETIRQIVNEEVQKRIDKGESQANAIASLEADPPYIVSPKAKVPIKKVRLLMKKDPQIMHFFKNKDGEENRAALYGNNHHIAIYETKDNNGDKKQVGIVVPMMEAARRVKDGEPIVMKDYRPDHSFLYSLALNDSVVDNESGDILRVQKIASTGQITFRLHTVALKGQSDPGVLRKNPSSLNVEKIKISPSGEIFPAND

SEQ ID NO: 5756 - protein, 1015 aa, unidentified
  REGION 1..1015: note = Description of Unknown: Cas Enzyme sequence
MRRILGLDLGVASIGWALVDEAELDNEKSKIVDEGTGARIFQSNQERAAAGSSKSKNESRREHRSARRMRDRTRRRKRKLKHILKRVQMISQEGQLDDWFKINPYEVRAKGLDEELSKEEFGRALYHMCQRRGFKSNRKDGDQNDGVIKEAIEHLNKAINDKGARTLGEFLYEEKEPPAKKRDRYTHRDQYLDEFEKLWSKQKSFKPEFYRKKLKRDIHDAIFFQRPVGSQSHLIGNCSLEPDKKRVPKGHLLFQKFRILKNVNNLRAFDENLHPIDITEKQKEQIKQKLFETKDLSFSKIRKMFGWNGNAQFNLEQGNAKKLLGHTTSARLSHKKAFGKRWQQFDDEMQDHIVDVLLHVEASKNVEGSKTVFELARERWDCTEEEADYLCTLELETGYGNYSSKALKKLIPELEKDLEESTAIKEAGYDIFTKKEGKYRRLPMPDDIRNPVVYHALIELRKVVNAIIREYGMPDTIRVELARDLKAGTKEREKIQKRQKKNKKINDKANEALKKAPFNVQNPTYEDRLWYKLWEECDGICPYTGNPIAKADFGTGKYQIEHIIPYSRSVDDSYMNKTLCEANENRKKSNRTPFEMYSHDEELWDKKLQYIRNLPYPKRRKFTKQEVELNDFVERQLNDTRYISKQASTFLKHLPADVEVVKGQTTATLRYCWSLNRILHPEGRNQKNRGDHRHHAIDAIVVALTSPGTLQRLSKAHVQEAAKHNKLSMDDPWDSFFDEVEQNVNNIIVSHRVHRKISGALHEESFYGPTDRQAKKDDKQWLVKRKDVHELSKGELGWDKNTQSFKKGSTKFIRDAKIRKIVQNKVMQKMEEGLSFNKAVASLEEDYPQLFHPKLTSVPIKKVRILYKKNKRNFFEFEDNGDGEVTRLAVYGKIHHIAIYNSKDDSNRKDREGVAVPMMEAARRDRNDEPIVLRDDPDMGSFIASFSQDEMIKNNEDDQIYRLKKKSTSKKMTFQKHKSSLKESEDPDILRRMPNTLDAQKITVSPIGKIKPAND

SEQ ID NO: 5757 - protein, 1262 aa, unidentified
  REGION 1..1262: note = Description of Unknown: Cas Enzyme sequence
MGKTILGLDLGTNSIGWALIDIDENSTPTRIIAMGSRIIPLSSNERDQFQKGQAISKNQDRTTARTQRKGYDRKQLKKSDDFKYSLKRALELHNIYPSRELFNLPMLDLWKLRSDAVSKPIKPEQLGRILYMLNQKRGYKSARSEANADKKDTDYVQAVKGRFAQLKDNNKTIGQFFYEGLKNAVEQSQYFRIKEEVYPREAYIEEFDTIINTQKQHHSFLTDDLIHSLRNEIIYYQRKLKSQKGLLSVCEFEGFEKAITDKSGKEKVVFVGPKVAAKSNPLFQLCRIWEVVNNISLKVKNPPDAKYKWGDRIPTVDEKRQIANHLWRSEQLTQADLLKILNLKKDEVYSNKQVSKGIKGNSTYSEIDKIIKDSPLLQFDVDVVPNGKDAYIFDRKTGEILEERQGAIIDKEMEIQPFYQLWHTIYSIKDLEECKKALIKRFAFTEDVAEKLSRIDFDKQGYGNKSVKAIRKTLPYLMQGYNLYESESLAGYVSSSLTKEELTETGKEEKLSLLPKNSLRQPVVEKILNQMINVVNAIIEKHGKPTEIVIEMARELKQSKDERDAADRQNSFNRKVNDKVAAVLRELRLPATKRFIDKYKFISPTRDKSWDTTQIVNQCIYCGESFSLTEALSGDAFDVDHIVPKALLFDDSQTNKVLVHRKCNGNKTNQTAYDYISKKGEAQLNSYLLRVDDWFRRGIISYSKMNRLKVSFEQYQERKKAKKETEADKKLWESFIDRNLRETQYITRKSKEILGKICNKVRVTEGNVTAKLRRLWGWEDILLDLQLPRFQELEQTEVKEWSSEHGRRKHQKEEIANWSKRDDHRHHALDALAIACTAQGFIQRINTLNASDVRNEMNQEVEDARIEFNEKMTLLEKYLVMKKPFETTEVSKAVDEILISFKPGKKVASISKFKAIGKNEDVGVLTPRGALHEQSVYGKIKVKEKNKALKHLFENPGRIIDEGIQKKILDRIALFDGDVKKAVSSLKKSPVYIDEANKVALEVADCFKEEVVIKYKLDSLKAKDVPYIVDEKVRELVQQRLDAHGGKEKEAFKTTLWYNEAKQIPIRTVRCFTGLSAVEGIKKDENGNDIGFVVLGNNHHIALYEDEEGKLVQHSCTFWHAVERKKFKFPVVINDTSVIWSNIIGDELLQSFIDKLPADNLKLKHSLQQNEMFILGLNKEDADKAIAENNKRLISKHLYLVWSIGENQYWFRHHLETKNSELKQTWGAKESKRYYLFKSVGAFLAQNPVKVKVNCLGDISAI

SEQ ID NO: 5758 - protein, 1062 aa, unidentified
  REGION 1..1062: note = Description of Unknown: Cas Enzyme sequence
MRRLGLDIGTNSIGWCLVEYDEDHNDGTAIVDIGVRIFTDGRDPKSGASLAVDRRAARAMRRRRDRYLGRRSAFLDALVRYGLMPADTDEARLVAARDPYALRARAIGERIEPHDIGRALFHLNQRRGFLSNRKAERRSKDNEDGKIKQGEYALDVAMAEAGAETLGQFLAGREKRRVRLNSDNQGYDFYPQRRHIDWEFGRIWEEQAKHHPELLTEEARAAVHRILFFQRSLKEPAVGVCTFVNSETRLPKAHPLFQERRLYEEVNQLEITSPGEAPRKLTTEQRDKLILMLRHKKEVSFATLAGSKGLGLQPGESFNKASETRTTLRGNEVHAALADKKRFGNRWGHLPVDRQWAIVERLMDEEDPEVLQRFLTEECGLDEEEARATAKASLPEGHGRLGETATRRILDELRKEVITYDVAVSRAGWHHSDDRTGEVLDKLPYYGELLSRDIPPGTQLASDPPEKRRGKITNPTVHIGLRQLEKLVNAVIAVHGRPDEIVVELARELNLSEDDKAKHEARIRKDTAAAIARGEKLEAEGIPNNGANRARYKLWEELSGDPIDRFCPYCAEPINIQALFSNFVDVDHIIPYSRSLDDSAGNKVVAHRSCNRDKGNRTPHERWGHDPDRWDRIAAQVSRLHKSKQWRFGPDAMARVEKNGDFLARQLTDTQYLSRLAGKYLRYLYPQKEDGSVYVIPGRMTAMLRRLWGLNTVLSDHNYVDNAHSNAPKNRLDHRHHAIDAAVTAVTTRSLLQGIARTAALAENKDLDRLFEGLEQPWQGFREELGEALGKVTVSHKPDHGRKGRPSRQHDVTSGQLHNETAYGITDQVNRNGDRLVVYRIALANLQPKDLTDPERLTDRSLREALYAATRGLSGAAFQKALADFSTAPGPWKGIRRLRVRKPLQVIPIKDASGRVYKGYQGDSNALYTVWCMPDGKWITHWKDRDGVARSGIVSTFDYHQQDYVEHRPHPAAKKILCLRQNDLIAVERNGAPREIMRVQKYSQSGQVFLIAHNEAGKMVDRDKNPDDPFKFYGPRASSLQAMRARQIRIDPLGRIFDPGPR

SEQ ID NO: 5759 - protein, 1509 aa, unidentified
  REGION 1..1509: note = Description of Unknown: Cas Enzyme sequence
MKNILGLDLGTNSIGWAVVEGEETERGLNLENIGMAGSRIIPMDAAVLGDFAKGTTKSQTSERTSFRGVRRLRERHLLRRERLHRVLQLLGYLPEHYAKCIDFENHPGKFLTDTECKLPWRQTTDGQYEFIFQSSFEEMLVDFAKHQPQLVADGRKIPSDWTIYYLRKKALTEKISNEELAWLILNFNQKRGYYQLRGEDEAEEKNKLVEFYALKVVSVEATDQRKGNDVWYNVHLENGWIYRRSSKMPLDWVGKTKEFIVTTDLDEDGTPKKDKDGNVKRSFKAPTADDWMLVKKKTEADINRSHETVGEYIYDYMLQDPSVKVRGRLVRTIERKYYKDELIAILDKQKAFHPELQSKEWLEKCARLLYPQNEAHYMSLINKDFTYFLVNDIIFYQRPLKSKKSLIGDCPLEKYVYIDASTKEVQQRSIKCIARSNPFFQEFRLWQFINNLRIYEREKEVNGKLTIDVDVTAAFLQNHEDYANLFDWLNERKEIKQDTLLQSYFKIKKIKGQDVLPFRWNYVEDKSYPCNDTRASILGFMEKASVPMELLTKEKEYELWHILYSVEDKYEIVKALTSFNEKNNFGESFVETFKKFPSFPKEYGSYSEKAIKNLLTLMRQGHHWSIDAIDKEKVMPRIDKLMTGECDDSISQRAREQAAARGLNDISQYQGLPLWLVSYVIYNRHSESSNITKWETPQDMTKFINDFRQYSLRNPIVEQIVLETLRTVKDIWEKEGHLDEIHVELGRDMKNPADKRLQLTMQTLENENTNLRIKRLLAELVNPEYEVENVHPFSPSQQDILRIYEEYALNNEELPDDITDILKKLSESDPKKQPSKNEFMRYKLWLEQKYCSPYTGAIIPLGKLFTPSYEIEHIIPQSRYFDDSFSNKVICEAEVNKLKGNQLAYEFIKTHHGEIVPLGFGQKVTVLSVAEYEEFIKRNYSTRNSKPKMKKLLLDDIPEAFIQRQLNDSRYISREIKGLLSNVVREEGEQEEISKNLIATSGAITDRLKSDWGIKDVWNDLILPRFERMNRLTGSNQFTALNENNHPMPVMPLEFQKGFNKKRIDHRHHAMDAIVIACATRNIVNYLNNESASKNAKISRFDLQRILCNKVHTDNNGNYRWQLKKPWETFTQDVHEVLENIIVSFKQNLRIINKATNYYQHYDENGRKIVSSQTKGDSWAVRKPLHKETVFGNVNLRKIKPVKLSEAITMPHRIVDKELKEKVLYLLSMKYDMKKIDRYFKDNANDWKKHELSKVPVYYFSNETNVRFVASRKSLDTSFNAKKITESVTDTGIQKILLNHLSNYNGKADEAFSPDGIDEMNRNLKALNDGKAHQPILKVRVYEPQGNKFVVGVTGNKKSKYVEAAKGTNLFFAVYQGEDGKRSYDSVPLNIAIELQKQGLPPVPEKNESGDNLLFWLSPNDLVYVPTDDEIANGKLSENMDKSRIYKMVSCTESEGHFIPVSVANPILQTIELGSNNKAQRAWTNEMIKDVCIPVEINRLGEIRLKSHS

SEQ ID NO: 5760 - protein, 1487 aa, unidentified
  REGION 1..1487: note = Description of Unknown: Cas Enzyme sequence
MNKILGLDLGTNSIGWLIRNTDSEIKNQIEKFGVAIFAKGVGEGKSGEFSFAAERTKNRSGRRLYQARKYRLWKTLEILIKNDYCPLSFENLDRWRKYDKINAQKGEGGRCYPVNDMLFDAWIKLDFNVDGKPDYISPYQLRAELIEKKLNFDDKNDRYKLGRALYHIAQRRGFKSSRKDAQPSESGEKQDAKSELKKESFFEKSLQEKYGKSLSDFPTIGSALCFIEQQGDRVRLEWIQYTFRKHYKDECTKIFEFQGIGINSDLYKKLIETSRNRYNGSIFFQRPLRSQKGLVGKCTLEPDKYRCPVSHPEFEEFRALSLLNNIQYKAEGEWVCLPDELKKEIYGKLFFRISKANFHFSEIRELIEKKLNQKFDYHKKTINYSDKTNISACPVSAYLKEIFGEDWKNINFKSNRIRKNQDGVGHVISYAIEDVWHILFSFEDEELVTEFAKINLGLDEKKTINFIKAWNNTPVGYAMLSLNAIKKINVFLREGFIYTEAVLLANIPEIIGIDTWKNQENQQLFKSNINKLIKQNRQEKQLLNIVNNLVAQYKSLDYDEQYGYKDPNYTLTDSNKEKILETIIEVYGEKTWSKNVEKKETIVATVNYLYQCIFRNGFETILIGDERYHIIKYNGHTYYKSTENQFYKLPRVIDEIKDFIRINFPDVNEKQIKRLYHPSMIEVYPLSTPDRNDGKLYLPSPKTGAFKNPMAMRTLFELRKLMNYLIRTGQIDEETRIVVETARELNDANKRWAIDAYQRQRQSENKEFADAIRGLLENNDYTTPPNPDSSNDIDKVRIWYEQAERNTVYKGKGDYSQNKWANQTTELLQKLSQTQSQLDKYRLWNEQKCICMYTGKIISISDLFDENKVDFEHTVPRSLSFDNSLANLTVCYANYNRNIKKNQIPTQLPNYEKEALGYPAIKPRLKDWEEKVEHLKANIEFWKGKSKASSNKDYKDEAIRQRHLWQMELDYWQNKLNRFTMKEVTSGFKNSQLVDTQLISKYAYHYLRAAFNTVDVQKGAITADFRKILGIQKIYEKKSREKHSHHAIDAAILTLIPHAAQRDKILTLFYQMLETKSNENHEWLTNNLNREILKLKLPNVTEILDTIDSNILINNVARDRALIPAKKIVRRRDKIVYLRDKNRNLILDENGKPKPMIAQGDCIRGQLHKETFFGAIKEPLRDELSGNPLKEDGQFIYEKERNGNDKITMVVKTLISDFSTEKELNSIIDPRIRYSIQKTINNGLDLGLTFKDAINKDIWLLDKNDNPIKTDKNGKFLCPIRHVRCKVAAGRGFMTKEKSLILKHQTYLSKHEYKQWYYAQNADNYLYLLYEAYTDKGLKRNFRIINYLEASQISIKNAKELFENPYYLYLEKGSKKTTTIYKLSAIIKTGTKVLVKSFNEEELTSFSTDELSKRLYKVYKFNDMNGTGYLYIQHHLEARMDKELGDGDTIIDIKKYQARLKLASDKFDCFIESKDFEIKPDGEIRWL

SEQ ID NO: 5761 - protein, 1527 aa, unidentified
  REGION 1..1527: note = Description of Unknown: Cas Enzyme sequence
MKKILGLDLGTNSIGWALVENNFEEKTGNIIGIGSRIIPIDQRSLGDFDSGNSVSQTADRTGFRGVRRLRERYLLRRERLHSVLNILGYLPDHYSQHIDFEKHFGQFLDETEPKLAYKSNPETGKADFIFKSSFEEMLADFSKRQPQLLTKKNGEPALIPYDWTIYYLRKKSLTRRIEKEELAWLLLHFNQKRGYYQLRGEEEEENDNKLVEFHSLKVVDVVDSGDKKSKDEIWYNVILENGWIYRRTSKTPLDWIGKTKEFIVTTDLNEDGTIKIDKYGKEKRSFRSPKDDDWTLVKKKTEFEIDKSQKTVGAYIYDTLLQNPNQKVKGKLVRTIERKFYKEELRIILEKQKTFHPELLDKQLYTACLEELYKSNENHRSSIAQMDFTNLFLNDIIFYQRPLKSKKSLISNCRYETLSYKDKDGNIISVPLKCIAKSHPLYQEFRLWQFLQNLKIYQREKEVEEKLQFDVDVTSDFLKTEEDWISLYEWLNDRKEIDQKAFLKYPAFNLKKNAEQYRWNYVEDKPYPANETRAQILTRLSKVANVPSGFLTEEIEEHLWHILYSVEDKKEIEKALKTFADKHQLCDDFAENFIKFPPFKKDYGAYSAKAIKKLLTVMRRGKYWRQEAISSETTAHINAITERLVSVAFDRKKIEEITDDEIPKQVLKSFIDCKNPYKGLNTYQACYAVYGRHSEEGEIISWKSPADIERFLRDFKQHSLRNPIVEQVITETLRVVNDIWKYHGKGGENFFDEIHIELGREMKNTAEQRKKMTEKVSENENTNLRIKALLVEMKNDDSIENVRPYSPSQQEILKIYEEGALNSPIEIPEDILKISKNAQPTPSELTRYKLWLQQKYRSPYTGDTIPLTKLFTTAYEIEHIIPQSRYFDDSMSNKVICESEVNKDKDNATAYEYIRNNPGKIIELSYGKTVKLFTVESYEDFVKNNFGKNKGKMKRLLMEDIPETFINRQLNDTRYISKLVKNLLSNIVREDGEEETTSKNVASSNGGITSILKQEWGLNDIWNDIISPRFERLNELTHSNHFGEWTNKDGKQVFQTQVPLELQKGFNKKRIDHRHHAMDALVIACATRNHINYLNNESANSSKRYDLRSSLCFKYKTDANGNYKWMFYKPWEAFTQDAKNKLLTTLISFKQNLRIINKTTNWYQKWQKDENGQLKKVFTKQEKGENWAIRKPMHKDTVAGLVNLRFKKTVSLSVALDQWEMIVDKALKKQIQTLVKEGYEKKQILKFFKDNENKFNEADIAKVEIYYWATDNVASRTTLNETYSSTVIKSITDTGIQKILLKHLEKYNEVKDGKIIEHPELAFSSDGLDQLNENITDLNDGKFHQPIFKVRTYEPKGNKFNVGYTSNKKDKYVEAAKGTNLFFAIYQDQTGKRSYESIPLNIVIERQKQGLSSVPETNEKEEQLLFYLSPNDLVYVPTEEERENPLNVDFKSLTKEQVKNIYKMVSSSGAQCFFVRNDIAASIWNKVEFSALNKMEKSIEGIMIKEVCWKLKPDRLGRIIEVNGSRI

SEQ ID NO: 5762 - protein, 1347 aa, unidentified
  REGION 1..1347: note = Description of Unknown: Cas Enzyme sequence
MTKILGLDLGTNSIGWAVTEKNQNKDFTLIDKGVRIFQEGIKIEKGQESSKAAERTEFRSARRIKYRRKLRKIALLKTLSQNGFCPELTKQELDNWRYQKIYPSETSFLNWQKTDHNGNKNPYYFRALAVEQKLDLSSSNDRYKIGRAFYHIAQRRGFLSNRLNIDKESEGVVATEIEKISEEKGDKTLGQYFYELYQKGEKIRSHYTHREKHYLDEFERICRFQQLPDELVQQLRKDIFYQRPLKSQKGMVGNCPFEKNKPRCPVSHPHFEEFRMYSFINNIQIKSPEDDHLRILTEEERALIIPLFYRKSKEHFNFEEIAKKITPKGVSFFYHRSKNNIPESYLFNYPMRTSVSGCKSISQLRGVFGDDWREGVENKYLLKRQKTGSKSIDELVNDIWHVLFNYNSTERLFGFAKTRLGFNDDEATRFSKISLKKDYASLSLKAINKILPYLKDGLIYSHAVFMAKLEDLIPKKIWEKQENKALLKKEIHRIIQSQNQEKQLADIVNGIIKTHRDDNSTWSENEFWQETLWNDIQKKLTGYLGKTKWENMTEEERSTFEKLIFQRIRVQMSNNLGKGEYLKTKRIDERVKEFISDHFEIDEKTLEKLYHPSATEVYQDALRKKDGKYYLGSPLISSIRNPMAMRSLHQVRKVVNELIKEGTIDRETKINIEMARDLKNANERKALQQWQRLRETEREEYKKQLRKDIKAATGRDIEPGERDILKYQLWEEQNHICLYTGETIAVSEFIGDNPKYDIEHTIPRSLSLDNSQVNLTLCNNEFNRKIKRNKIPYELPNHSEILKRIEYWKEYIAEAQEGIERAVKKSRANSDNKVIKDKAIQQRHFLKYKLDYWKQKYRRFEMNDVPDGFKNSQLVDTGIITKYARLYLKTVFNNVYTVKGQTVSDFRKMWGIQPEYKKKERINHIHHCIDAITMACMTKESYEELAKAYHEWEGEERISVSDMPSVEKPWPTFSEDVKEVENEVLISHYTPDNLPKQSKKKLRVRGRIKLNVKGEPIYQKGDTVRGALHQQTDYGAIKKIVLNKDGEEEVKLFYVVRKKIDSLSASDIKNIVDDNIREIVEKGKIEEEKLKKELETKEKTLKDAENPEEVVVLKDAIETLKTQLKGLFVIPNKDGSSTPIKKVRCIAKTVTNPLHIKKHRDLSKHAYKHYSHFANDGNYMMAIYEGQDKKGNTKRDFILVNNLDAGKFFTGKLKDNPVPEFHPKSGYQLKSLLKTGTMVILWKDRSDEVWLLDSKVLKKRLYKVIKMNKDGRVTFKFHQEARNDEMLRKDFEKLYNLKAPKSLTNGESFVEFENPFPKLLLSPSKFNFITEGIDFKITPSGNLVRLI

SEQ ID NO: 5763 - protein, 1468 aa, unidentified
  REGION 1..1468: note = Description of Unknown: Cas Enzyme sequence
MTKKLGIDLGSSSLGWFIREDNQIINNGVVTFNTGMKKEQGGYSSPTKDRREARSKRRLIQAKKYRKIELLKILVENGYVPLSNEDLDVWSKYKKGHLRKFPETKEFIKWLSCDFSYLENGKKYKNPYKLRVKAIDNKLYKHEFGRVLYHLVQRRGYKDIGESDKETNTQIARRVDSGYKAAIEKANNRTIGEALSNEFLEKNIRARNEYPYRVEYEAEFKTICEAQGFDISQNEKKEYKNEFVRKLRKAILWQRPLKSQKGNIGKCTLELSKQRCPASHPIFEIFRTWSFINTIKTVSETEGYKTVKENIPLKFRQQIFEDVFLNKEKNFKFDVIQKYLDKLFEKKKTYNYLNRSTKKYDSTVSGMPICKGLIKHFGDKVKQELEQLHTYNIGTKEHKILGNYSIYDIWHLIYETDDEHLEDFAINKLGQSNNERTNKKGKIIIENPIVKFKKANFSTSFADLSLKAMCKIIPFLQEGFLYNEAVLLAKIPEQLKSDWKEKKKIIYKLIENVNKKYISQKTIIGIANNLIDKYKSLTYEDRFAHKDFSYKLKDIDFEEIETASVVFFGEKTWIKIDSKNDIIKKVSAYYQSFFADKKRKYIELPTLTSLIEEEFKNTSIEIDGEKLYHHSVRRNMYPEPIYSKKYNKEILEVPLIDSIKNPMFNKSMSVLRKLINQLITQEYVDKYGVIQPYIDEDTEIIVEVARELNDNNKRIAIEHYQKERRDNREKYRQFINEFKDNENRPSLNIEDNIPVFEMWTEQTFEETIDEKGNKVTNSNPHEIRKEKDAIKRYELWSEQKGQCMYTGKMIGIAQLFSSDIEIEHTIPRSLLPDNTMANQTVCYSKYNSDIKNNKIPSACPNYENSTNEGSAIEPRLEKWKKIRDGFKKQYKDRTKPFGNEDEAKKNKRIQDKHYFRMHFEYWKDKVNRFTTEEIKDSWARRQLTDTQMVSKYARKFLKTYFKKVVVQKGSTTADFRKIFGFQNEDKIKSRNKHTHHSIDAAVLTLIPTNSSKRVSMLNAMYMAHENKQKIKRKIPDGFSGFNAQKLIKYIDSNTLIVNYEKDKITEQTYRNIRKRGKLQYLKKNGEYVLDQNGDRILLKAKGTTIRGKLFQETFIGKIRNVERDKKNKPLRNDDNSWKFRKGKEEFLNVVRKPITEAKIGEIVDPDIQKRIQDQLENGVSRTYLKDHQGNIIRHVRVKTSTGKIVKERLNYKSKHDYKNAFYSAAGEIPYAIFITSLVNARVERKMIPVPIHEIAKVFKENHKFDIKNYLNIFHKDIKDYQDIKLLKVGQKVFVLKEDSEFEKRKNIEFQINRMYKITQFSDGNIWLKFHLDARELNEIKKDVKNKKSEIVFVKEKELNIPIVKEDETISDRLSRSKDYEDRMFKFSSIDDFRLNRIKDVVGEEETKNLRDKLNKYKAFSSKIEIERETPLLKTSKNNWNFLFENYDFEIDITGRLKWIESGNESEFN

SEQ ID NO: 5764 - protein, 142 aa, unidentified
  REGION 1..142: note = Description of Unknown: Cas Enzyme sequence
MKKILGLDLGTTSIGWALVNEAEEITEKSSIVKLGVRVIPLTTDEEGDFLKGKAISINADRTLKRGARRNLDRFQLRRDALIEFLKEKNFITDESLLSEEGKQTTFSTYELRAKSVKDKITKEDFAKVLLMINKKRGYKSSR

SEQ ID NO: 5765 - protein, 1227 aa, unidentified
  REGION 1..1227: note = Description of Unknown: Cas Enzyme sequence
MAVAKYLYDNNLTPGQYVYEILKKGKKHIPDFYRSDLQMELDKIWAFQIQFHQQILTDEFKEQIINRGKQAISKIFLGKYGIYTSENKGKRDAVKLQAYKWRSDAVKLQMCKEELAYVIVEINNNINSSSGYLGAISDRSKELYFNKQTVGEFLYYQLKQNPHTKLKNQVFYRQDYLDEFNVIWEKQKEFYPELDEEFKSEIRDIVIFYQRRLKSQKHLISNCEFEKYHKAIPKSSPLFQEFKIWQILNNIEVENIKTHERFYLGEEPKEILFQELNIRNKLTDKETLKLLFDKPKEYKINYKDLEGNRTNAELYKVYQQILEFEEEECDFFKMKADEINEVVSTKFIELGVSTEILFFDSSLSGNNFDKQAFMQFWHLLYSFEDDNSRTGNESLLKGVETKYGFKREYAKLISDIPLQADHGSLSAKAIRKILPYLKDGNTYDVACTDAGYNHSSSLTKEELANRKLKNKMELLPKNSLRNPVVEKILNQMVNVINAIIEDKNLGKPNEIRIELARELKKSTKERGEMTQNISRATIEHDRIRKLLQADFGISKVTRNDIIKYKLWLELESNGFKTLYTDTYIPKEELFSKKFDIEHIIPKAKLFDDSFSNKTLSARKVNIDKGNETAYDFLKQNLDNLEFDQYLGRIERMFKGKKISRSKYNKLLMKLSEIPEGFIERDLRNSQYIAKKAKQMLEEVVRTVNTSTGSITNLLRNDWQLINVMKEMNLPKYEKLGLVEIIEGKNGQDEKRIKDWTKRNDHRHHAMDALTVAFTKPAFVQYLNNLNARSNKAGSIYGIEQKHLHRDKNNKLVFNSPIPLSEFRVQSKIHLENILVSFKAKNKVVTRNKNKIKVKDNFKVKIELTPRGQLHKETIYGKIERYVTKEEKVGTKFSLEKIKQVAKREFREALLIRLLEFDGDPKKAFGSKNAPSKTPIFVDYAKTIIVPEKVKLVWKEDRYTKREKLSPGFFKDSKKNDAFMKRVENIYDEQIKKILIRRYEEYKLEVERNNSTISNPSEKQKVLETAFSNLEENPIWLNKEKGISIKRVTISGVSNAEALHHKKDHNGEFILDKKGNKQAVDFVSTGNNHHVAIYRDEKGNLQEEVVSFYEAVHRVNEGLEIINKNKEGFEFLFTMKQNEYFVFPSKGFNPDDFDLLNPENVSLISKHLFRVQKFTIKDYFFRHHLETNVDNFKETKGIIWKREGLSGIEGIKKVRINHLGQIVKVGEY

SEQ ID NO: 5766 - protein, 965 aa, unidentified
  REGION 1..965: note = Description of Unknown: Cas Enzyme sequence
QNNKELIYKIIDDANTKYAYKKQIANIGNNLIDKYKAMSFEDEFAHKDYSYLLDKKDNEKIKEACVSFFGDRTWGQLENKEEILNDVTIQYQAFFRDSKRGYIESPTLSSIIETEFNNQNIDIDGNKLYHHSDRKNLYLEKLPIDKETNKHKLPIHSKTKETILPVPLIDSIKNPMFNKSMSILRKLMNELIIQQYVDEDGVIQYYIDENTEIIVEVARELNDNNKRIAIERYQRERRDNKAKYLEFIKEFKGEDKKSEEEDIYKLEIWAEQVFTKPNDDKSINKNHEILKEKNAIVRYELWAEQEGQCMYTGKMIRISQLFTNDIEIEHTIPRSLLPDNTKANLTVCYSKYNSDIKNNKIPTACPNFENDTTEGTAIHPRLEKWEKIRDNYKKQYKDRTKPFGNEDEAQKNNRIQNKHYFRMHFEYWKDKVERFTTKEIKDSWVRRQLTDTQMVSKYAREFLKTYFRKVVVQKGSTTADYRKIFGFQAEDEIKSRNKHTHHSIDAAVLTLIPTNSSKRVSLLNKMYKMQENKQGQFTTNPDGFSKFNAQALIKHIDNNTLIVNYQKDKITEPTYRNVRKRGKLQYLKKDGKYILDNNKEKILLKAKGSTIRGKLFQETFIGKIKNVKREPSGKPVRNEDKTWQYEKGKDEFVNVVRKPITEAKIEDIVDPILKKYIEEQLNNGISKSNLKDHQGNIIRHIRVKTKAGKKVKERINYKSQHEYKNYFYSAAGEIPYAIFITNLNKGRVERKMIPVPIHEVAQTFKEFHKFTPEIYLQKFHSEIEKYQDLKLLKVGQKVFVLQNDNEFEKRINIDFQMVRMYKITQFKYDGSKIMLKYHLEAQSKTDIDNRVKQTKSDILNIIEKKLGIEIIIENKKIENNIDRKKDYEKRKIDFKKRLKLIEEKGGKEIAVECKGKIEEFQTESSKIIKEGETPILGFSKNNWNFLLENYDFEIDLTGNLIWHDN

SEQ ID NO: 5767 - protein, 1117 aa, unidentified
  REGION 1..1117: note = Description of Unknown: Cas Enzyme sequence
MSKILGLDLGTNSIGWAVVDTNLNKIEGIGSRIFPEGVNRDTKGAEVSKNETRRTARGARKQQFRRKIRKRLLLIEMAKHGMCPLTDEDVNNWKIEKKFPDTSELREWFKENPYELRKRALDKPVSLMELGRIFYHMAQRRGFKSNRKEAGKEDGKVKSAISQLGQKMKEGNHRTLGEYFAYVDSHQNRIRDNYTDRQMYIDEFNTIWKEQAKYHKELTGDLKIKLGISADEKKLGVLFYYRPLRSQKYLIGKCTFEHKKTKCPVSAIPFELYRAYQYAHTIECNGQKLGKYHLEKVVEKLKIVEKTTFKIIKKVLDIEDGSFNYSDDDRIIGCYTISKLSKLFGKQWKQFSDKEKEDIWHTIFSCTDADWLDAYAKQEWNFNAKQLKALSSIHFKQDYASLSRKAINNILPFLYDYPYHVAVVMGGVKNAFGTRWDKLTDEKRDFLITNIPDIVGSGQKGGFMDDLKAILKEEFGLSDKQLGKLYHHSASIKEQVQQKKLPMGKQADREISGFRNPIVMQTMFELRKLINALIDEYGSFDKIKVEMARDLKNSAKKREEIRFDNKQQEKIRDIVKKELDKLNKPQNHESILIYRLWEECQKQCPYTGKQIGVEQLFSGEVQIEHIIPWSRSLDDSFMNKTLCFADENRAKGDKTPYEFYSQQGEKKWNEVKERAIKLFHTSKEFPKRYNKFKRFANEKEPKLDSFISRQLNDTRYISKEAKNILGKVCEQVQVAPGQMTAHLRHHWGLNKIINKENDIKNRNDHRHHAIDAIVMACFEVKHLQQLSNANRYNRNFRFEEIERPWDKFWEDAKTAIDKILVAHKSSHRIITTRNYKVKRNGKQHINKGVAARGQLHKEFVYGKRQPPGNDIPAFHMRKPLEMLTTRTHVEKIVDERIKGLIQHRIEALGGYIDGKKIPVATFFTSDEEGNKQPQIFLPNKNGNPIPVRKVRIHENIGGAEQLHDDINGYVNPRNNHHVLIYRDEEGNLKEQVVTFWTAVERKKQGDPVFQLPPPEYGKPEPKEIVTTMQINDLFLLGLQEDEIDWDSSDFIILSDHLFRVQKLTAGDYWFRNHLSSTIDGKDDYHRIRNFGDGKTGWLTFNPIKVRITRTGKIEKLV

SEQ ID NO: 5768 - protein, 1205 aa, unidentified
  REGION 1..1205: note = Description of Unknown: Cas Enzyme sequence
MKRILGLDLGTTSIGWAFVHEAENSEEKSEIIKLGVRVIPLSTDEETDFQKGKATSINADRTLKRGARRNLDRYQLRRTALIETLKTNNFIDLTNETLSENGKKSTFSTYEIRAKAAKERISKLDFAKVLLMINKKRGYKSSRKAQSDDEGTAIDGMSVAKKLYNSKLTPGQYVFNLLKKEKKIMPEFYRSDLQNEFDSIWNKQIEYYGEILKPKLKEELLNKNKSQTWAICKDPFNIKGVKLQGKTKEQKIEKYRLRTIALEEKLELELLAIVLQEVNNQINQSSGYLGAISDRSKELYFNKQTVGEYLYLQLKENPHARLKNQVFYRQDYLDEFETIWEAQKAFYPELTNDLKQQIRDIVIFYQRRLKSQKHLISECQFEKQHKAIPKSSPLFQEFKIWQLINNLEIRHIPTRTNYKNEDIEQDLKEILFSELNIREKLSANDILKLLVKDPKEHELNYKEGLEGNRTNAALYKAYQEILMLEGEEYDFKKLKADKINDIIVSKFSEIGINQDLMFFNIDKEGDHYDKQAILQLWHLLYSYEGDNSHTGDKGLIETLSNKFGFKPEYAKIISKIKLQSDYGALSSKAIRKILPYLEAGHPFAMSESENGLIGATNLAGYNHSSSLTKEQLEKRKLKDILELLPKNSLRNPVVEKILNQLVNVVNAIIQDDKLGKPDEIRVELARELKKSAKERSEMTKNINAANTRHDKIRKILQTEFGISKVTRNDIIRYKLWEELESNGHKSIYTNTYIPREKIFSKEFDIEHIVPKALIFDDSFSNKTLTVRSVNLKKSNETAYDFLNDYLNKDKFMQFLSRAEKLWKDGKISKAKYNKLLMKASEIPEGFIERDLRNSQYIAKKATQMLSEIVRKVSTTSGSITGRLRSDWQLINIMKDLNYNKYDKLGLTEVIEGKNGQPEHRIKDWTKRNDHRHHAMDALTVAFTKPAYIQYLNNLHARRDENQKTHKIILNIEQKNLHRNEKSKLVFNPPLPIKEFKAESKKHLENILISFKAKNKVVTRNKNKIKGKEKPQISLTPRGQLHKETIYGKIERYETKLIKIGSKLDIEMIMQVANQKYREALLVRLAKFDGNPKKAFAGKNSPSKNPIIIIHGSNNTDIDNTVPEKVKIVWKTNQYTIRKEISPDLKIEKVIDVGIKRILQNRLNEYNGDAKKAFVNLEENPIYLNKEKGITIKRVSITGVSNAEAL

SEQ ID NO: 5769 - protein, 1451 aa, unidentified
  REGION 1..1451: note = Description of Unknown: Cas Enzyme sequence
LLKAKAERAIDDSNKTVGTYIYDALLKKPNQKVRGILVRTIERKYYKVELEKILKKQIELNAKFKDLDLHQKCIEELYPLNDARRDVLNNVKDENKFKFLFVNDIIFYHRPLKTKKSLIADCKFETRVSLIAKADFKDIYNKADLGSKEKIKEFMSGIQFVVNIKAKNNKGKIITKKENITDEFIDLKESGKFKNHIFKYSNEYDKATSIINKDGVYFTKFKKKPIKAIAKSNPYYQEFRIWQFIDNLKIREKEREIDGKLKSDVDVTYEFIKTEEDKERLFDEFNKKEKITQSQFLAILKDSKGKKLSEKTHKWNYVEKNEYPLNETKHILTVKFKNNKGYLKFYEKNEYGLWHLFYSISSKDELKKALEKLYEKNKDDYDLPEDFVDKALKIKSFKKDYGTLSEKALKKILPLLRVGRYANENKVLETAKLNIDNIYERLESNNLLKASLTKEEQINKISELADDEITKGMLNSFANISQKRYTDLQMHQASYAVYGKHSEAKDTEKWNTPKDIEKYLTHEFKQHSLRNPIVEKVVTETLRVVKDIWEQFGNSEEDYFSEIHVELGRDLKNTKAEKERLTDIITDNKKTNQRIINLLRELKKENIKNVRPESPHQRDKLKIFEHDILSPYTEKELKTQELKGHGTVDIYKIANSAEPTSKEIEKYRLWLEQKYISPFTGKIIPLSDLFTSKHEVEHVLPQARYLDNSYSNKVICETAVNKAKGKLTGYEFIIKSKGEKFVELENGEKREIVSQTVYEKFVSDNFTKGTKKHKILLSEDIPAEFTDQQKSNMRYISSEMGKLLSKIVRVQGENEVFSKNLLPVSGKATNMLKHDWGLNQIWYELIMPRFERLNKLTGTKDFTYYSEKLQKDLPNVPPVLKQNFDAKRIDHRHHALDALIVACTTRNHTSYINNQHAKSENKRFDLKKKLTKKQYNSENSSDYKWVFKKPWDNFVIDTKNSLKMIIVSFKQNMRILVKATNKYISYKDENGNIRLDNNGKPKKDYTKQIKGDMRTIRQPLHEETVQGKSNVRFEKKVKFSVAIEGLVSDFYIFKDKKLGKHLKKQIRNGKLKNEIIADFKKNKYEFNGKDISDVIVYYFSNANNIPETEHKVAVRKDLSPALFSFTDKKKSYEKIKETISNTGIQNILLKHLKKYNTAKISIFDILDKPEVLKDEILKRKIEELKNENKNLIEYFQKDKINKKNEVEIFIFKTEIEFLKEDIIENPDLAFSPEGIEEMNKNIVELNNGKRHKPIYKVRVYTKLGNKFNVGEKRNKDKKYVVTGLNPYFAVYFRKDEEQNQIRKYQTISLTMTINRLKDKLSPVPEKYLDEKEEYELSFYLQPNDLVYVPKNEEEEIDFNNLTENQLKQIYKFTDGSGTTANFVPYYAATTIFNMNKKSQKQNNIDYPIQNEHGIGSPQSKNQKSINGTMIKDKCIKLKTDRLGNIIKVGKY

SEQ ID NO: 5770 - protein, 1342 aa, unidentified
  REGION 1..1342: note = Description of Unknown: Cas Enzyme sequence
MSKILGLDLGTNSIGWAIVDDKENKIINTGVRIFPEGVEPDTIGKGDKEQSKNAARREARQMRRQNFRTRIRRIKLLETLMKLQMCPLSVEELNIWKKYDKSKGKCSRHFPQSTVFVEWLKQNPYELRARALKENLTLEELGRIFYHLIQRRGFLSNRKSKDDNKIYKGKDNITGITKTKEQIQNSTLGNFLYSIYPEENKPYKTIKDENGKELRVRARYTLRKMYIDEFNKIWNKQAAHLGLNNQKIKIKKIRFYSGTINSKRNQAKINSLQNKFGNDNVIIDETSRKITTIEEIDLKEFFGGEIKEENNELKYRSQESLLFYQRPLRSQKGLLSKCTLEKRKFYDKKNKKWITVGPTPCPISHPQFEIFRAYQFINNIEYGAKQKLDSEQRKIVLNLINKKDSNFDFVNIPKALKLTNEHFNYDNKLKVPGNYTISKLKKLFKPDIWNKCKNEIWQCWYFFEDNDLLIKKLEKNFGLKKADFGKIEKIRLKDGYSNISLKAINNILPFLEKGYRFSDAVILGGVRNSFRKTIDGKQIDRWDDFNNTHNKIEDDIIKIIRERDSKEGEAIEKIKNYLSNPKNNLGFEKNDKCFKKLYHHSQEIEQHEIKDELSEIENLRNPIVQQGINELRRLVNFLLKHYRKDNPEFKFDEIKVELARDLRAGKKSRHEMSFKINENNKKNEEAREKLTEYGLQHSRENIHKYLLYKEIEEKNGTVICPYTGKTIGLNDLLGNENKFQIEHIIPKSISLNDSFSNKTLCEAKFNGLKGNQTPYQFFLNNNSASLWGTNSWDTIEERAFKLLPYHKAKRFTSKTDELDADGFIERQLNDTRYISKKAKEILSEICDKVRVMPGSLTSELRHLWGLNNVLQPVKVFDFENADINENESKPHYLIVDKNENPINILPVYNEKPQINNNETTVAGNFKKNDAKLINLFDNSISNDDKKYWAKIKLNENIIVGEIKNNYFLSAQFTNNNETSNISDGKYWTKIDLDNSPIKINKIYTEKPKSSENQIVLRGKVEKNKFKHDSFSKGIAVNQKDDFYWAIIDIDFDSISCLKVRNEFPLIDENQILITGSINEEGLFSSDIDTAHTFQTDLLPGKYYALFNVRNISNDFTLIKNNEPILENGQKLVEGNVWIDRQTGEIKFDPKKNRDDHRHHAIDAITIALTKQSYLQKLSNYNANKEEKKRGNKYEKPHFEPPWDNLFNDVKNAASKIIVSYKQNNKVLTKINKKIFKNGKKFNSVGFAARGQLHEATIYGQNRHCEKGEFVHRISIKKLKFAKTKGQATYLSDIIDTNIYKTIIERIVKNLSEQEKLILNEILQKENELNKLNTKSSKEKKEK

SEQ ID NO: 5771 - protein, 1551 aa, unidentified
  REGION 1..1551: note = Description of Unknown: Cas Enzyme sequence
TQFVSCARNLFIFIEISFYTTKMKNTILGLDLGTNSIGWALVEHDFEEKESEIIDAGSRIIPMSQDVLGKFDAGQSISQTAERTKYRSVRRLRQRYLLRRERLHRVLNILNALPFHYAAAIDFKNKKGKFLDGLEVKLNYKKNGKGEYDFIFKGSFNKMLSEFKKNYDNIKIPYDWTIYFLRKKALEEKISLQELAWIILNFNQKRGYYQLRGEEEEEDKTKSVEYYPLKVVGVEAEEPNYKNDIWYNVKLENGWVYRRKSKNPLNDWIGKIKEFIVTTQLDKNGNPKEDVTGNPKRSFRAPDENDWTLLKTKTQKDIEKYNVENNTIGVASYIINALLINPKQKIRGKLIKTIERKYYKNELAAIIRKQKEYHPELQNKELFQKCVVELYPNNFAQQQLLTQKDFVYLFTNDIVFYQRPLKSKKSLIDECKLEYRVYKNKEGKLTSKGIKVIAKSHPLYQEFRLWQFISNLKILKRKKEINGRVFIDYDVTTDFFPSEDSKVKLFEFLNQKEKITQKQFLASRELFGRKFSENDYRWNYVEDKEYPLNETRAMFITKFSKHKDFDWNTFLSKENEISLWHIVYSVSDKKEFEKAIENSKVTKSLPLEIKTSIKKIKPFKKDFGAYSEKAIKKLLPLMRMGKYWDYDSIDDKTKERIQKIITGEYDEKIRDRVREKAINLTVENSFKGLPLWLASYIVYDKHSERGSTGKWKTPKQINNFLKEFKQHGLRNPIVEQVITETLRLVHDVWEYYGQGKQNFFDEIHIELGREMKNPANQRKIITERVSNNQNTNQRIRILLREFKNQNMEGVLPESPNQQEKLRIFENDILARYSEKDLEKEEQDGIKIAKVIKSLEPTSREIEKYKLWLEQKYRSPYTGKTISLSNLFTADYEIEHIIPQARYFDNSFNNKVICEAEVNRFKDRMTAYEMISKKPGQIIDLGQGKSVKLFLLDEYQKFVTDNFVTGSKKQKLLLSEDIPEGFISRQLNDTRYISKVVKSLLSNIVREDGEQEDTSKNIVSITGGITDRLKKDWGLNDKWNEIILPRFKRLNEITNTNLFTYFNEKYHKEIPSVPLDLKKNFSKKRIDHRHHAMDALTIAVATKDHVNYLNNAYAKSDNQRYDLRNKLCFKKYTDNKENYKWLFYLPWKTFPVDVKNILENTVVSFKQNLRVINNASNKYQKWVNESGVIKKKFVQQKGRNWAIRKPLHKETVYAKVKLRKVKSVSINTAIDGVLNSEYICVDKQLSNKIKQLVNKGYNAKSLKKYFKTNVFRNEKINKADVYYFIDDYAAVRKTIDETFKSVRWIKENVTDTGIQKILINHLGRYNEIDNKGEITEHPELAFSHAGIIDMNNNIVELNDERQHQPIYKARVYETLGNKFAVGVNDNKATKFVEAAKGTNLYFAVYSGVNKKGEQKRVYDTIPLNVVIERQKQGLLPVPKKFVNEKDKTEAQLLFYLSPNDLVYVPTDEEMQNIDSIDFKKLTKEQNKRIYRMVSSSGTQCFFVRNNIAVPIVNKIEFSPLNKTERDINNEIMIKERCIKLKVNRLGKVSKAV

SEQ ID NO: 5772 - protein, 1050 aa, unidentified
  REGION 1..1050: note = Description of Unknown: Cas Enzyme sequence
WTLLAARQGKPDTPLRPVGLVAAGTRVFDAGVEGDIEKGREKSRAVQRREARLARRGTDRRARRMHLVYSILERAGLLPSLDPPSNSSEGNSRGIREQESQLRHETLVTLDRELAEKWREKLRSEGADKDKLRQINHTIPYILRARALDEKLEPYEVGRAIYHLAQRRGFLSNRKSPLKKDEDLGKVKGDINKLQEKIEETGSRTLGEYFSKLDPEEERIRQRWTGRKMYEEEFGKIWAVQQKHHPNILTEDLKKQLIGSKRHPAIFYQRPLKSQKHLIGKCELEKDRRRAPMAILDFQRFRMIQMLNDTRVITPMGELREMTAEEREKLLAELDIKGDLTFAKAKKVLGLSREHHFNWEGGIEKRIIGNRTAAKLVEIFGIERWKGFSEEERNRIIEDVLSIQKEDTLFRRGINAWGLDEESAKKFSELQLKPDYARFSRRALKKLLPLMQQGIPYKTAEKQVYGDRLAADAHASLPAVADVLPELRNPIVNRTLNELRKVVNAVIRKYGKPALIRIELARDLRNSAKQRKNIMKKIEDNRKAREKAAEGILKEMPHFGEPKRADREKWLLADECNWECPYTGRQISVSALFGENPQFDVEHIIPFSRSLDDSFLNKTICEIAENRNVKRNYTPYEAYGRDEEKWNQILHRVKNFRGRAGNLKLERFQVKEAKFEDFASQQLNDTRYASKLAKKYLGLLYGKDAAKHVQAGRGGVTKFIRDELCLNAILGDGGDEKKRTDHRHHAVDAIAIALTSPGVVKMLSDAARYNEEKGLRRRFGNIKSPWPGFFEDVRKAVENIVASHRVSRRVNGPLHEETNYSPIKKDENGRDCVHIRKPVESLDKKNLKDIVDPVVRERVREWMEQANEHRPYPVHKTKDGREIPIKKVRIRKYDKPMTIGRDHRSRNVLSGSNHHLDIFEVTDKKGRPKWEGRLVSAFEAMQLKRQGKSVYSRERKEGGKFLFSLSQGEIIELDEKDGNRGLYRVRILSQLNQRGIKYPRVSYVRINDARLKADILKAKEWNTKLLEPLRKLNCRKVTITPLGEVRRAND

SEQ ID NO: 5773 - protein, 1031 aa, unidentified
  REGION 1..1031: note = Description of Unknown: Cas Enzyme sequence
MNKDKTILGLDIGVGSLGWGLVKIGEEEYFDEKPDGTIVPKHRIIDGEIIDTGVRTFQIPQDEKGKSLALKRGSSRRSRKTTRRKAHRLKQLVKLAKEFELIDDNFDRDAILKPKKGDKESKWDIWFIRKEALERPLTDIELFRVLYHIAKHRGFFFHTKAEEIQEEDKKTEEGKEKAKVKAGLLRIRKKLEDSGWETIGQMFWNEFKQTSPTNKRKRNAKDKYENAIHRSLLKEEIEKIFEKQQKLGNNKAAEELKQRYIDEILMHEEGIDEDKLRKMMSECEFIPGTLCAPKESYTAERKMLFDRLNTLNVVDTKSKNEPMPVEGEQRRKIEALAYKNAKVTFSQIRKELKLENDLYKQFNLCSYKEKNPEYNKKLNCEVKDGQLQFEEKHKVPIVDITTGDVTVLDEEIKGIFRKRKESWPKAKRLYVYYSDIRKQLNLSEDFRFANLKGYTKSAAELGGEAKYIKQFEDDTFVELKGYHKIKNVIEKHCSDNKWDKLAEDTNNLDIIAEALVYHKSDETRIKYLQENGIADKDIIDAVLMINMKQLANHSKEALKKLLEYMENGDLFDGAKEKCGYGKIDYEKQAILQPYSGFFEKNPVVARVMSQTRKLVNALIRKYQGQYPIDQIHIEVATELANSKARKAQIAQGQKRYKDDKEAAGQRCREHGLDPEEGQNLLMFRLAEQQNNKCPYTGKAITFHPTGADNEVYIKDCEIDHIIPMSRSFNDSLNNKVLCCQKANQDKTDRIPFEWFEETYGKDSQQWAEFENTVKKMYGMPYPKRKNLIRKSWTEKDKEKFLSRNLNDTRYAAREIANYLRKYFDFSKSQRDDIKDGSRIQVRSGGITAFLRHMWGLNKNREENDLHHALDALVVACSTYGHVYLVSNLAKEIERKGKSWFKHFEFLRDKSKPWDNIRDDIQTAVDNVFVSRMPRHTVTAAAHKETIISKEKSNKKRTVAINGGYAEMGDMVRADVFTDDKGKNYVVPIYAVDIFSKKPLPDKYLHKSDAPYDEWPSIAADNLKFKFSLFKD

SEQ ID NO: 5774 - protein, 1011 aa, unidentified
  REGION 1..1011: note = Description of Unknown: Cas Enzyme sequence
MAKKIGIDLGSSSLGWFLRDDDKIIDNGVIIFDTGMVKDQGGYTSPTKDRRIARSKRRLIQARKYRKIELLKVLIEYGLTPLSNDELENWSKYKKGQQRVFPESEQFKRWLACDFTYLGNGKNYQNPYELRANVIDNKVLKHELGRALYHIVQRRGYKDIGEKDNETRKQIERREESGFKSALSKYRYLSKALKNEFIDKGERARNQYPYRFEYEEELLKICETQGYDISKNDENKFNNNFVKTVRKAIIWQRPLRSQKGNIGKCSLEPSKFRCPTSHLIYEIYRAWTYLNTIKTVEYVDDKHLIKKDIPLEFKKDLFENVFLKKENNFKFDIIQNHLDKLFKEKREYNYLNKSTKKYDSSVSGMPICKGFIKIFGDKVKNEIEQLHTYNIGTKKHNFVNNYSIYDIWHLIFNTDDDHLEDFAINKLGINTITKHDKKGKEYKENPIVKLKKAAFSSSYADLSIKAMNKIMPFLKEGFLYNQAVLLAKIPDVYSDWKENKNKVYEIIDNANDNYGYYKTIVGITNNLIDKYKALTFEDKFAYKNFDYTLDESDYIEIEKACISYWGEKTWKEKENKEIIIEQVATYYQSFFADIQRKYIEFPTLTNILKEEFQKNNIDIDIDKLYHHSDRKNIYLEKLPVDIETSKPKLPLDFKTKKTILPVPLIDSIKNPMFNKSMSILRRLMNTLIVKEYVDEDGVIQPYIDEDTEVIIEVARELNDNNKRIAIERYQRERRDNREKYRQFINEFKEKNNVFVNLNVEEKIPEFELWTEQTFEETIDEKGNIIANKNNNDIRKEKNAIKRYELWCEQKGQCMYTGKMISISQLFTPEIEIEHTIPRSLLPDNTMANLTVCYSRYNSDIKNNRMPTVCPNYENDTNEGTAIKPRLKPWIEIRDRYKNLYEIRKKPFGIEDEAKKNKRIQEKHYYKMHYDYWNDKLNRFTTEEIKESWVRRQLTDTQMVSKYAREFLKTYFKKVTVQNGRTTADYRKIFGFQSENEIKSRDKHTHHSIDAA

SEQ ID NO: 5775 - protein, 973 aa, unidentified
  REGION 1..973: note = Description of Unknown: Cas Enzyme sequence
KEKYINKSEKNNYRWNYVEDKIYPMSETRAQFLSRLKKVKINEGVTSSDALITVELIQKLWHIIYSVNDKEQYKQALKTFAKKNNLDVESFVSAFEKFPPFKSDYAAYSEKAIKKLLPLMRIGKYWNENIIIDDAKQRINDIIERLESVNFNKAQVEAISDDDIQKQMLKSFIKFQNKNPYCGLNTYQAGYAVYGRHSEADNITKWHTPEDIDEYLKNFKQHSLRNPIVEQVVTETLRTVRDIWNEYGNFNAIHLELGREMKNPAGKRESLAKKNTENENTNHRIKQILKELMNDGVSDVKDFSPSHQEILKIYEEGVYQIIENISDDIEKIRKNPKPSRNDIVRYKLWLEQGYVSPYTGAVIPLNKLFSTDYQIEHIIPQSRYFDNSMSNKIICESEVNELKTNKTAYEFIKAHQGQIVSLTNGNQVKIFNLDTYENHCKRYFSKNRAKLTKLLSEEIPEGFIERQMNDSRYISKLVKGLLSNIVREDGEQSETSKNLISVTGAITSKLKQDWGLNNKWNEIVLPRFKRLNKLTNTNDFTYENTEGTIVPTVPDDLQKGFNKKRIDHRHHALDAIVIALTTRKHIQYLNSLNNEKEKYDLQPSLLIKNKEGHYTKHFQQPWSSFPADVKNSLDNIIVSFKQNLRVINKATNSYQKWVKDENGEYKKKLVKQEGQNWAIRKPMHKETVSGKISFNAPKGKIATAVRTSLSDIKNRKHLEKITDKGIVKILENHLKNYIDDKGKEDFENAFSPIGIEELNKNIIQLNDGKKHHPIYKVRLFEVGSKFALSENENSPKSKKYVEAAKGTNLFFAVYETTDKNGNKKRVFDTIPLNLVIEHQKQMANLPKEQRTAVPVDKSKGNLLFTLSPNDLVYVPTNEELENINNIDFSNLSVEQKNRVFVVNDFTGVTCYFTPNTIATEIANHEVDFSWNEKKKKVTGFNTKTAVFQKKSIKDRCIKLKVNRLGQIVKVGEY

SEQ ID NO: 5776 - protein, 1315 aa, unidentified
  REGION 1..1315: note = Description of Unknown: Cas Enzyme sequence
MWGVRMFEEASTAADRRVHRTIRRRLTRRKFRLDLLNQFFAKALNEEDPSFLANLEDSSLHLEDKRIQKKYTLYNDEDYIDVHHYEKYPTIYHLRAELINNPEKHSAREVYLAIHHIMKYRGHFLFDGELKSDNNIDEALHHLNDTTNNLYDHVLFNLDGNNAEKLKLILKNANLTVKDRTNNLKEYVNNDLDSETKKVFSKIVSMIAGSKIGNIVDIFPELELEGKVGIHFKSSKFDEDLDNLTMLDFDQLQLIEYAKSIYDWGLLEEIRAGEKYISIAKIKSYQQHAKELSQLKHIIRKGASTDVYNDFFQDKKKKNNYTAYVGNGETGTANAEDFYKEVKKVLNKVEAFEKEKEEILSKIEINSYMPKQRVGSNGVIPHQLHLVELQAILENASTYLPFLNDADETGLSIAEKIIQTFTFRIPYYVGPLNPYHGKKENGGEGNAWVVRLKEGQVYPWNFEEMIDTSESAKNFIERMTNHCSYLLNEKVLPKSSLLYQKYMVLNEINNIKLGGKEKDFTVEWKQHLFEDLFVKQHKNITKKQITKWLMDHHHIGRDEQVVLTGIDDQIKSKLTTLHDMKLIFGEQLPNMQMLEEIIYWITLFSDSKDLLEKKIREEYGDHLTDAQIKKLRNKNYGGWGRFSRKLLEGLGDTNEYGEPTSIIQALYTTNNNFMELLTDEYLYSEQIETLNKQKMTDSKKLDYHLVDELPISPGVKRSVWQTLKIMDEIVSITGSAPQKIMVEMARGGGQKGKRTKSRQAQLIELYKNIQTDKNLLGELENTDEGKLRSKKLYLYYTQRGRCMYSGEKITLDELYNNNIYDLDHIYPRSITKDDSLDNLALVKKEINQAKGDKELREIEKLIKPEVHAFWNSLRKQGLISSRKYERLIRKDPLSDAEKAGFIARQLVETRQSTKVVANIFKQLYPKTEIIFVKAGLVSDFRNEQKNVDKETGEIRNKDYRDYIKLRNLNDHHHAKDAYLNIVVGNVYHTKFTSNPLNFVKKSEPRSYNLSRMYDKKVERNNQVAWIPGEEESIKKVNQMMNRHDILTTWMVTDGKGGLFNQQPVKKEKDKIPLKAGKDTEKYGGYDSAKISHLVFAEFQSKGKRANALFSIPIYVVLQKISVTKYLSERYKVENVEVIKNIPINNSIIELDGREIRITGSLNKNKRYYFHDYLQPVYSSEFNDYFKKIEKVIDPKINSTFEREKITDEIYLLMYKELINKAKSPLFIESTKKYIDVLEENINEVLSLDEKVKAELLLEMSKLIKGDNNGVNLSALGLGKTVGVKSIGYNISNLNSLKLVHKSITGLFENRVDLLK

SEQ ID NO: 5777 - protein, 1559 aa, unidentified
  REGION 1..1559: note = Description of Unknown: Cas Enzyme sequence
MKKILGLDLGTNSIGWALVDIDEKKIEGIGSRIIPMSQDILGKFDSGNSISQTAERTSYRGVRRLRERHLLRRERLHRVLHIIGYLPKHYGQYIDFENRLGKFFTDTEPKLVWKEIENGKFDFIFKNSFYEMVEEFKHYQPQLLESNNLIPYDWAIYYLRKKALQYKIEKEELAWLLLNFNQKRGYYQLRGEEEEENPNKLVEYHSLKVIDITADEPQKGKTDIWYSVVLENGWIYRRSSKNPMFDWFGKTKEFIVTTDLNNDGSIKTDKDGKVKRSFRAPSEDDWTLLKKKTETDIEKHIEEHKNITGIKGTIGTYIYNTLLQNPKQKINGKLVRTIERHFYIDELKAILEKQTEFHKELQDKKLLSACLEELYPYNESHRDTLQSTNFTKLIVDDIIFYQRPLKSKKSLISNCKYEYRTYKDDEGLLQKEPIKCVPKSHPLYQELRLWKFVKDLKIYEREKSIDGKLHTDYNVTDEFIKTEEDLVALFDWLNERKEIKQDTLLSSHFKIKKKKGEDKLPFRWNYVEDKEYPCNETHAQFINRLAKIKDVSVDFLTMSKEMELWHILYSVTDKLEIEKALKTFAAKNNLPTEFVDIFKKFPPFKSEYGSYSEKALKKLLPLIRIGKYWKEEAIDSKTKERIDYIISAEDNDEIKLVIREKAKSHNFEKTSDFRGLPEWLASYVVYNRHSEASEYIKWKTYNDLESYLDEFKQHSLRNPIVEQVITETLRVVRDIWKKYGDITEIHVELGREMKNPADKRREMTQHISDNENTNLRIKALLAELANDNNIENVRPYSPSQQEILKIYEDGVLKSGIDIDDDISKIAKSSQPTKSELIRYKLWLEQKYRSPYTGEMIPLGKLFTSTYQIEHIIPQSRYFDDSLSNKVICESVVNGYPYKDNQLGYEFISKNEGRIVSELSSSYKTVKIFNLAEYETFVKQHYGKNNAKMKKLLMEDIPESFIERQMNDTRYISKVIKGLLSNIVREENEAEPTSKHVIPVTGSITDTLKQDWGLNDIWNKIVSPRFERLNELTNTNLFGQWENKGGKHVFQTQMPLELQKGFNKKRIDHRHHAMDALVIACTTRSHVNYLNNENARKKDEPARYELRNKLRRLEDIEVDRIENGVKVRKRITVAKEFIKPWTTFTEEGQKALESIVVSFKQNLRVINKTVNKFESYKDENGNLHLNKDGKPTKGERKQIKGDNWAIRKPLHKETVAGQVNLRFRKQVTLLAAIDQWEMLVDKSLKIKIKQLINEGLNKKKIQKFFAEKGNKWQEKDISKPEVYYFSNEKEVLVASRTSLNESFNFKVIESITDTGIQMILKNHLAKYNEEKDGKTIEHPELAFSAEGIEDMNKNIKELNGGKFHQPIAKVRAYEAKGNKFNVGINGNKNDKFVVAATGTNLYFAIYSDIEGKRNYETIPLNVVIDRLKIGEQPILNEKLDEKGSQLTLLFYLNPNDIVYIPTQEQIERGIKIAIEDIDKKRIYTFISSSGNRADFIPANSATTIININFKDQIKLGLNLNIQNEFGVGSPKSKNERGITGEMVKDVCIKLKIDRLGNISL

SEQ ID NO: 5778 - protein, 1423 aa, unidentified
  REGION 1..1423: note = Description of Unknown: Cas Enzyme sequence
MEKILGLDLGTNSIGWAIRDTSETENQIIDKGVLTFDKGVATKEGKEFPMVQKRTESRSKRRNYQAEKYRKWALLETLIEQNMCPLTIEELDEWRKYEKGVGRKYPQSDAFIQWLRFDFDGDGKPDFERLGFSKHESYYLFRMLIVSDEEQHKKIFQDNSHILGRILYQLVQRRGYRGRDDENEEAKTILKGSEKSGTKGVEAIMPLIHEYKTLGAALYHLSKDKHERIRKRYNLRTDYEHELEEICRVQNLDDLLFKKLWKAIVWQRPLRSQKGLVGYCTLETPAKNESNKFIKAGKKRCPVSHPLYEEFRAWVFINNLKIKLPENTDKTTALKENIYPLFYKSSRDFKLSSINKELRKLGGNILSKHSKGTKNKEDDTKVVSCTLLNSFKEALGGDWKEKYGWEEALFDKIKPCKYSFEDIWHILFTFDSKEKLKEFAVEKLGIGEELAEKFSKIKLQQGYATLSLSAIKKIIPYLYHGFLYSEAVYLANLHKVLGKDVKIDDDLVNVFSSEIKKIIKQQNDDKQLINIVNSLISDQINSGFAFSTDADYHLTDDDKNEIEKKTISVFGTSTWNDKTETEKQEIIETVSKQYLAFLQSYRTKERKETYLKSERLHDRIFNYLKNTYGVPEDNKKHLWHPSEQETYEEATTKNDIPVLGKPQPISNGFKNPMALKTLHKLRGLMNYLLQEGKIDEDTRIVVEIARELNDANRRKAIEKWQRDREKENNEYKKFIDEINQDCKTSYDREDKTLIDKIRLWKEQEMHCPYTGDMINMCDLFNGVKYDFEHTVPASMSFDNELKNLTIASSKYNREIKNNRIPFDCPNYTEEKTISGITYKPILSTLELIFGNITIEEKISKGETKRTVTSERTDQINGQIDFWINESKKASTKDRKDYCIQQRHLNKFELDYWRKKLETFTIKEYKAGWRNSQLKDTQVVTKYALPFLKTVFKKVEVQKGSVTDDFRKIYKIQPRLEKKKRDKHSHHAIDAMVLTLIPPAAIRDKILFRYNEANDNNLPFHESVRQWENFNGQSIKKWIEDETLINFQPEYRTITNTYKNVRKRGKQKFVKEKNGNGKFYYKLDETGQKIPIIAKGDTIRGQLHKETFFAAIKQPKYKEVNDKFIPETDGKGNFIFQQNQKRGDDIFIATKVLLSDFEKLEDLEIIIDPNLKRYLKKEIQARINEGKTFVQATENLFAFGKEKDKNGNTINSLRHIRCKVKSGGGGFLNNPACIKPFKAFVSKQQHKQHSYAQNGETSICAFYQLFVNEELFREIVPYSILDISKVKNKITLDDAVEKNLEKTIKKAMHLIPLYATLKINQKVLFYENDMEELKTLSVKNLATRLYLIVKFEDGKISLKHHLNSMSEEDLKKEMKNLSLPDTGASVFSFSNPIPKLRISKSNFNFAIEGKHFEIKPDGEIVFKF

SEQ ID NO: 5779 - protein, 1427 aa, unidentified
  REGION 1..1427: note = Description of Unknown: Cas Enzyme sequence
MKNILGLDLGTNSIGWALIKQDFENKQGEILGMGSRIIPMSQDILGDFGKGNSVSQTAERTKYRSVRRLRERFLLRRERLHRVLHILNFLPKHYASQIDFEKRFGKFKVETEPKLAWKKIDGQFSFLFQTSFNEMLEDFRVNGQDLKIPYDWTIYYLRKKALSQKIEKEELAWILLNFNQKRGYYQLRGEEEEENPNKLVEFYSLKVVDVVADEPQKGKFDIWYSLILENGWIYRRSSKIPLFDWKDKTRDFIVTTDLNDDGSIKKDKDGNEKRSFRAPSENDWTLVKKKTEQEIEQSRKTVGTYIYEALLDNPKQKIKGKLVSTIERKFYKEELRQILEKQKEFHQELQSDDLYNDCVRELYRNNEAHQLTLSKKDFVHLLMDDLIFYQRPLRSQKSSISNCTLEFRKYKDENGAEHTQYLKAIPKSNPYYQEFRLWQWIYNLNIYKKDDEVNVTKDFLNITKDFENLFEFLNARKEVDQKALLKHFKLNDKTHRWNFVEDKKYPCNETKTMISSRLEKVENISDDFLTREIEQKIWHIIYSVNDKIEYEKALKSFARKHHLDESSFFEAFRKFPPFKSEYGSFSEKAVKKLLPLMRLGKYWNYADIDKSSKERIQKIISGEYDENIKDRVREKSVHLTSENDFQGLQLWLAQYIVYGRHSEASMIGKWNSADDLEEFLKDFKQHSLRNPIVEQVITETLRVVKDIWLKYGNGAKDFFNEIHIELGREMKLPADDRKKLTNQITENENTNLRIKALLAEMMNDSSVENVRPFSPMQQEILKIYEDGVLNSGIEIEDEYLKISKTAQPSPSDLKRYKLWLEQKYKSPYTGQIIPLNKLFTPEYEIEHIIPQSRYFDDSFSNKIICESAVNKLKDNYIGLGFIKQFGGTIIELGFGKSVKVFETKEYEDFVKKHYANNRSKRNKLLLEDIPEKMIERQMNDTRYISKYISGILSNIVRVEDGSDEGINSKNIVPGNGKITTQLKQDWGLNDVWNDLILPRFERMNQLTNSTDFTAWNENYQKYLPTVPIEFSKGFSKKRIDHRHHALDALVVACATKDHVNLLNNQSAKSDTKRYDLKKKLMKFEKVVYHHTQTGEKIEREVPKQFLKPWENFTVDAKHNLESIIVSFKQNLRVINKATNYYEKYVEKDGTKNKGRVEQTGTNWAIRKPMHKDTVSGKVDLPWVKVPKGKILTATRKSLDTSFDLKSIGSITDTGIQKILRNYLEFKGSPELAFSPEGIEDMNKNIEKYNDGKPHQPISKVRVFELGSKFQVGQTGNKKDKYVEAAKGTNLFFAVYEDKNGKRSYETIPLNEVIERQKQGLSVVDLKGREDFYLCPNDLVYIPSNDELENINNIDFKNIAKEKNERIYKVVSFSGSQIFFVRQDIATSIVNKAELSTLNKMERAMDGSMVKENCVKLNVDRLGNISKA

SEQ ID NO: 5780 - protein, 1061 aa, unidentified
  REGION 1..1061: note = Description of Unknown: Cas Enzyme sequence
VYRCVRLLTRMRIARMKRLLAQLGVLTPAQLDEPGGPWPWKLAARVHAGGPHLSWRELWDALRWYAHNRGYDGNRKWSRDEEEDSDDTEKVKAARALLEKYGKATMCETICAKLKIDPLSHDKKTSPIAYKTSNAAFPRDVVRDEVIALLEKHIGQLPKVDAALITALCAEDNTPKDGKTVREVLQVLGFDAHLPGRYVGGLLFGQAVPRFDNRIIGECPVSGEKRPLKDCREYLEFRWAEILANLTVRRTKDGDKVPLSAEERKTLTDIARTEGGFTASEFKKAVLEVSQAEASNVELMMTHPDAADALVLDPAMRFTKTNGMVKAVWEDLPLNLQKRVLGRWNKRRRVSWAWLLQQPEAPKSLDAKLQAAWKETKRKPRKGEEEAKWEDRVRQSIAPTFPSGRAPYGREVMKRVVAQVMEARQHPRENGGVLDAELIKKHDLGKEIDDLTNNHLVRHRLKILLRLVDDMVKTYADGDPTQVDKCVIEVARDLVEFSGKTNKEVAAELGIKLKNFKDVSKKLTDDLDGKGIPITAGLIRKARIADDLDWTCPYTGKEYDAMTLARSKVDKDHIIPRSLRPSDSLDSLVITFGEVNKWKANRTARKFIEDEQGKPVPSRPDLTIVTLRQYEAFVNKLAGEKKPNRFTPGQGSLDDKLRQWSRKQKMLLKDYEEKEFTPRDLTVTSHLVRLSARQLEKRFVQLQNTARIVSLPGSVTGTVRKVWKCLGCLAPACPEVMGMLPVTDDKGMIVMDSEGKPSLALQVRPKSDIRDITHLHHALDACVIAFAAHFLPKDGKLWEQIVTKKVLRQDAEAFRERYQWHGLLKLAEPKDEHDKGKARKLEVLDLPDTFKKQIVDALKERRVVQHVPADMSGARLEMNTWRVLRQEGDQVHLRQRTFGPKDIDPETGARKRTRKETKERASKLVGLKPGKLSALQGALVIGENYGVAILNAAAITSEDERFRIIPFHQVKRQMEELKKMNNGQTPLVLRGGQLIHVKSGSYAGTWRIFSVKNNTSGMALDMGLPDVTRLKNGTPGHKINVLLKSLVKAGITPLNHDLIGS

SEQ ID NO: 5781 - protein, 1400 aa, unidentified
  REGION 1..1400: note = Description of Unknown: Cas Enzyme sequence
MSKILGLDLGTNSIGWAIRDTYLLDNQFEKYGVLTFKKGVGVEKSSEYSFAAERTKRRSIRRLYQARKYRLWATLEVLIVNGYCPLHIDELDKWRKYNKPNGRTYPNSKPFDNWIKLDFNQDDKQDYTSPYQLRKAALKRKLDKYELGRIFYHIAQRRRFKSSRKSGDKENTAVYSGSRESGAVGVNEIKDLIVQEGTLGAALAYIETAGNRVRNRYTLRKHYQEEIEKICESQKIERASDFFKEINQAIFFHRPLRSQKGLIGRCTLEPEKYRCPISHPSFEEFRAWAFLNNIKYKPSNELQLKWSELPLALKKEIYNDKFFRKSKDYFDFVEIEDFIKKKGYNWKFNYKSKTTVSGCTVSARLKELFGEDWNNLIINTGKKRIKRNKDKTEAEHPITYSILDIWHILFSFDDEEAITEFAKEGLKLEDEQIKLFHTAWKSLPDGYAMLSLHAINKILPFLKQGFIYTEAVLLANMPVTLGNEFWEQHGTEITSHISDLINDNRNQKQILNIVNSLIAKYKSLPDQDKYGVKNTDYQLDENDKKQIENLIIETYGDKSWESKSIDEQDKIVNDVTTKYRAFFADYNRDFKKLPHLLDTIKDFLHDNFGTDIQDLNKLYHPSQIEIYPKAKPDMEGKIFLGSPKTGAFKNPMAMRTLHELRKLVNYLIEIGEIDDETHVVVELSRELNDANRRWAIETWQKRKEEENQEFASAIAGLLNEYPQIQASDKQEDKEKFRLWYEQLPFKITYKKEPVKKDNDNDPRKHDWVNLSNQIINQVIQEKDLVKKYKLWKEQKCICLYTGQIINITDLFDENVIDFEHTIARSKSFDNSLSNLTVCYADFNRNTKKNQLPTSLSNYETEIKPRLRDWEDKVDAIKTNIEYWEKKSKRATDKEDKDNAIRQKHLWQFELEYWDNKLNRFKLEEITTGFKHSQITDTQLVSKYAFHYLKTVFNRVEVQKGSVTSDFRKIYGIQPKLEKKDRSKHSHHAIDAAVLTLIPTASKRDDVLKMTYEYSEKYRNKQYHENPYPGFKLSHIKEIEDNILINNITNDQTLTPAKKVVRKRGKVVYLENEGIKLKNKDGNFIPKIATGDAIRGQLHAETFFAAIKKVKRDELDNPLKDNNGNFLFEEELFFAVKEPLVYKANTQSPGFKTLDEIKSCIVDPHLFKIIEKQVGEKPLKEAFDEGIWMLNKSGEKVNKIRHVRIFVRDKKPLRIKKQTFASEKELINVASREHKEYYYAGNSSNILYGLYQDGKDRGFECLNLFDLVQVRRLTQIYSIKDYLPTTIKHARSKKEIPLHAILKEGQRVIFFESTLEEIKSLSKFEKLKRLYKVNRFFSSITGQIQFQHHSEARQDKELGYGGSSIDFNNLTPRYLLSPINFNFLIEGKDFEISPLGDIKIH

SEQ ID NO: 5782 - protein, 1151 aa, unidentified
  REGION 1..1151: note = Description of Unknown: Cas Enzyme sequence
GAIRNKAGSYEHCVDRKMIRDEFAMLWDAQKRLGGPLAAKLSDDLRLELDNESSAGIWRHEGLLFGQRKTYWDTGTLGRCDLEPTERCVPHADMYASRYLVVETVNNLKIIERGKDARSLTPDERDKIKTYLSGPLGVHKKTQYKGQPKRSVSVTDLRDLMDNWGPARKSQFRFNIEADEERTINTDWFSREIIHGAISVEKWQGMAERVRDGINRAILKHDPNDDAHAAKLKSLVMKDWAGLSEAQADSLVAAWKRRPHPDEKKLNMSRRAARNVLQLMDRPEPWPDSNRQNQTRWLTQIEARKRIAEDAEFVDVTTGKPLDDRARGRYATGAKGATARDRHFMRKHLLSKNGETVCGPGGLPLHEPGRAGAAPPPQAPPPVPVIGNPVVRKSIHEVRRHLIEYMVTFARKPDEVYVELSREAKMGKKQADELLLRNRLRNRIRRDIIAMFGLDASTSTQQRAAVDRVVLSVQQRGICPMCGQAGLTERAAAGGEGCQVAHIIPRASGGHNGLGNIVLAHTKCNQDMGRRTPRDFWNTMKKGGFEEGVARVEQLFGDVERPGLSEVKTATGNSLWACYFNQRDDKAKIEQFKKDVTDIQQMTNRQDAATKYATRQIMAYLADALYDGHGLPERGGERKIFATDGMWTGRFRREWALFFDPHQFKAHGLSNDEEHARKEKNRGDHRHHAIDAVIIALATPQMRIAWDAREKQADVEGINSADEEVMDAYRRLHRIPPPSSFGDREEFRGCVRRAVFGQDELERPICHRPVKRKLIGRFHEETLLGTVTDKAGRLTDSYTAKKKVIDLDPNHLRMPREESENEAIDRLALRKMQRDGVDEKASRKWARAVVTSPGYKPAIVDPPPGKSGIVRDLALRKRLRTCLEDEGVNADDFSSGQVKKLVEAGRIRHASGVPIKSVVLLRTMSDPVIVSRWASDYSTGKRYRMYDANSGEGQATAARAYLGGNNHHIEIRVVTNKKGNEAWSGEVVTSFEAARRKLARLRALRQANVPNTRAFRKLSKAERAKWTPALRAIEQNHPLVDRGDNDDKGGRFVMSVCEGEMLLMRHKHTREVGYFVVAKLEKRQSIVLVPHWDARSATERKDAEGKKVAESKREQFSVTPGDLKVLAPPGHPHAVKVRVSPLGVVTVLQGD

SEQ ID NO: 5783 - protein, 1311 aa, unidentified
  REGION 1..1311: note = Description of Unknown: Cas Enzyme sequence
VDGRILGAGSRIIPMSQDTLGKFDSGQSISQTAERTGYRGIRRLRERHLLRRERLHRVLNILGFLPDHYSRQIDFNKRLGQFIPDTEPKLPYIFNPSTNKSEFLFKDSFNEMLQDFGRSQPILLKDNKKIPYDWTIYYLRKKALTKKIEREELAWLLLNFNQKRGYYQLRGEDQDENPDKLIEFYTLEVVAVTADKPQKGKEEIWYNVILQNGWGYRRSSKTPLFDWVGKTKEFIITTDINEDKTIKKDKDGKEKRSFKAVDSEKDWIAIKKSTEEKIDKSYKTVGAYIYDTLLQNPDQKIKGKLVRVIERKFYKSELEQILKTQQRFHSELTDKTLYQSCNEELYENNESHRLSNAQKDFANLFINDIIFYQRPLKSKKSLISNCKFESRTFIRGGKKEIEPIKCIAKSHPLYQEFRLWKLVKDLRIYKKAVPEDIDVTTEFLPLDEDRVALFDWLNGRKEIDQQAFLKYSAFNLKKNTDNYRWNYVEDKIYPCNETRVIILSRLNKTDNISKDFLTRENEEALWHILYSVDDKKDIEKALKTFATKKGLGEDFVENFKKAPPFKKEYGSYSAKAIKKLLPIMRLGKYWDAEQVAINIATYKANIQTLIDRLTNKREKNNSEKENNQLRNSKLFETFETLLKADVYSFEGLAEYLASYIVYGRHSEEGDIRNWNTADKIQLLPQHSLRNPIVEQVINETLQVVRDIWKKYGNGEAEFFSEIHIELGREMKNPKKDRERITKQVTENENTNLRIKALLIELLNDRDVENVRPYSPTQQEILKIYEDGALSAEDGNIPDEILKISKQSQPTSSELIRYKLWLEQKYRSPYTGEIIPLSKLFTRAYDIEHIIPQSRYFDDSFSNKVICEVDVNKDKDNSTAYEYIKNNPGKKVELSYGKVVTIFRVEAYEDFVKNNYSKNRSKLKRLLMDDIPESFIQRQLNDSRYISKVVKSLMSNIVREEGEQEAISKNVIASNGAITSILKQDWGLNDVWNDVVYSRFERLNELTNSENFGEWTDKEGKKVFQTQIPIQYQKGFSKKRIDHRHHALDAIVIACAGRNHINYLNNENALGKETKKEKEKKRYDLKQTLCFKKYSDDTKQNYNWVFYKPWSTFTQETKEAIFNIVVSFKQNLRVINKSVNNYQINKKNEDGKYIKESVKQTKGDNWAIRKPMHTPMPYGKKTYNFDILKIGENVGRREAIIDNNIRNKVIDAFNNCKSKVTETQAFLNKNPILNDEGKPILVTAFKIEIEKFRKRQPISKLSNRGQGGIKTTDEAIKFINKVADHKLNQDLLLHLKENNYEIDNAFSPDGIE

SEQ ID NO: 5784 - protein, 914 aa, unidentified
  REGION 1..914: note = Description of Unknown: Cas Enzyme sequence
VEIESKKKIKMRGSKVIPKSSPLFQEFKIWQNLNSLLIQDKKTKEILVFNIETKQELFHELNIKGNLSKAAIFNILKLQSSDWDLNFTSIEGNRTNQVLYEAFQKMMQFEKDEIDFTTFSAEEIKDNVLSFFETEGINADILEFNPDIEGKDFEKQSAYQFWHLLYSYEGDKSNTGNDTLYKILQNRYGFKKVYAQTLANIAFQSDYGSLSAKAIRKIFPFIKENKYDEACRLAGYNHSSSKTKAENDERMLKDKLDILPKNNLRNPVVEKILNQMVNVINAIIADPTLGKPDEIRIELARELKKNAKEREEMTANINAAKIDHDKFRKILVDEFAVKNPTRNDIIRYKLYEELKNNGYKDLYTNTYIPREKLFSKEYDIEHIIPKTRLFDDSFSNKTLSLRQVNLDKKNETAYDFIQKNHGEERLKEFLSRVEMLSKLKDGDKSCISKAKYKKLLMKAADIGEGFIERDLRDSQYIAKKAKQMLEEVCRTVTTTTGSITDRLREDWDLINVMQELNMNKYRKLGLTEMLEKKDGSFKEHIKDWTKRNDHRHHAMDALTVAFTKRNHIQYLNNLNARSDKAGSIYGIEQNETYKDAEGKRKFKTPLPHFREEAKKHLESTLVSFKSKNKVVTKNKNITKIKGKTNTKIELTPRGQLHKETVYGKVQQYVFKDEKVSAKFDEQTILKISNPAYRMALLKRLAENNNDPKKAFTGKNNPDKNPIFFDEQKTKMIPEKVKIVWMEDNYTIRKELSPDLFKDSKRNDDFLNKIESLYDIGIRKALKKRYDDTKKEVEQFNATVTNKKEIKKVLDVAFSNLDKNPIWLNKEKGIAIKRVTISGIKNGEALHNKKDHHGKEILNENGQPIAADFVSSGNNHHVAIYKDENNELQEKVVSFYEAVHRLNQGLPVVDKNYNN

SEQ ID NO: 5785 - protein, 963 aa, unidentified
  REGION 1..963: note = Description of Unknown: Cas Enzyme sequence
  MOD_RES 88..91: note = Any amino acid
GLTLGLDLGPNSIGWALIDEDEQRIVDLGVRVFPEGVDNFDTKKEKSRNEARRIARGMRRQTKRRAARKRKLRAALIQVGLFPADPAXXXXAEQERLFELDPYELRVRALSERLAPHEIGRVLLQLNQRRGFLSNRKRDRQDSEVKGMLEEISTLANTIGERTLGQYLHEKTVSLRHEHREPDDHIRNRHTRRSMLESEFERIWEAQAKYYPDLLTEELRYGRQGKHAYPCKPRPRSAELASIESYGIHGMLFFQRNMYWPKSVVGLCELEPKQKRCPRGDRHAQRFRLLQEVNNLRVIDDARKLERPLDTDERALLLDKLSQKSELKFDEIRKLLGQLPDSPAPEQLHFNLERGKRTKLQGMIVDHLMANKHVAGPAWHKRPNEEKNTIVRMLLNNERDDDAIKLRLVEDFGFSANCADAALGIDFPPGYVNLSLMAINRLLPHMERGLIYQSESDPEKSALHAAGYLRRDELQRRLFDRLPDTSRMKAGDCAIGEIPNPVVKRALVELRKVVNAIIREYGKPAAVHVEMARTVRMGPKARSEYNTMIHEREKERDRAAEAIRELGVRVNREGILRYLLWEEQGHECIYCQEPISQQQLFGGDVDVDHILPYSRCLDDSQGNKVVCHRHCNHDKGNRLPHEWVADADPARYERICQHAASLMRRGRLPYSKYRRFLQKELDLDKFIARQLTDTSYITRATAEYLRCLFDQPHHVLGLKGQHTAELRWQWGLNSILRDDNENRKSRDDHRHHAIDAIVVALTNRSRLRALSGIRKAGYFDRQSGEIYEVPQPWQDFRSAVEQRIAGVNVSHRVRRKVQGALHDEMPYGPTLEPGIFVKRKPITDLSANEIDKIRDEGIKRIIIDHLKKNSLEFGRGKKVDAKKLKAALSNLQMPSGVPIKKVRLLIPEQTVQPIRERKSDGCADDTCIALVRPGDNHHACIFEWEENGTVKRDAEYVSRLEAS

SEQ ID NO: 5786 - protein, 1030 aa, unidentified
  REGION 1..1030: note = Description of Unknown: Cas Enzyme sequence
MYRFAFDLGSNSLGWAVYRLTADMQPGALEGLGARIFPSGRDPQSKESNAAGRRGPRGARRRQDRSLGRRKQLLDDLIRFGLLPSDSEARNEIFAANPLVARAKAALEQVDLEQLGRALWHMSKHRGFKSNRRADKDADEKGKIATASAALLERLRADGHPTYGAFLHARLARGEGTRIRPAGDGAKLSYEFYPTRALLEAEYDHIWTIQAGFHPSLTEEMRERLRDTIFFQRPLRPVRPGKCTFFPDQNRLPRWHPSAQEFLILSQLNHLRIVDDYGEQPLDITARDLVGRTLLAGTKLSWSGLKKTLKLPSQAEFNLEKGGLKELARNDVAARLLGDTKKPGPLAALWPTLDNATQEEILWQISEVADPEELTCWLMQRLGLSREVAERVEKIPLPDGHLRFCKTATQAIVEELRRNVIPYDEAVRRAPLLGGAGLDHSDFQADEGVDTLPPYNRLPVLQRMIGNGTGDPKDTDLLRYGRITNPTVHIALGQFRRVMNALIAEYGKPAQVVIEATRDMAKSAEELNKIEKTNRDNKKRNDRWRDELQKEGLLAEGARIGDRFLRMRLWEEMGRGPADRLCPYTGRPIALHQLHSDEIEIDHILPFEQTFDDSPANKTLCFRDANRRKGKLSPSDAADRQPDFFNLAAIIGRTKHLPANKSWRFLPAAMQKWEETRGFEDRQLNATGYLARVVRAYAEALFPKTDDEGKRRSHVWVLPGRMTAMLRHRWGLNLGDHNRKSRDDHRHHAIDAAVVGVIDRRMVRVLQTHARNLGVERLDRVLPAPPEPFEGFRDAVLAAVEKVNVSHRAQHGSIDPTDPSQTSGRLHEETVFGLVRDVPENQANRTIGNVVVRKPVTGLTEKEIGQVRDVKLRLSLQDATSLARDKSLPEAERKKRLPEALAKWVQETGHRKLRILKPEAGVRPVHDLYGKPYKWLVPGEISSIDILEAPDGTWFHHATDIWAANSGGAVPWQVAHPGARFIMRVQKNDTVQLFDWDDKDRCLVAGSNRIKRIVRLEPSANRMRLVGIND

SEQ ID NO: 5787 - protein, 1056 aa, unidentified
  REGION 1..1056: note = Description of Unknown: Cas Enzyme sequence
MQNKMHYRLALDLGSTSLGWAMIRLNADNQPCAVIKAGVRIFSDGRNPKDGSSLAVTRREARAMRRRRDRLLKRKARMMRTLIEYGFFPAEEVQRKALETLNPYVLRAKGLDEALTPAEFGRALFHINQRRGFKSNRKTDKKDHDSGALKTAINKLRETLNKENCRTVGEWLYKRDLSGKPVRARYHQDKEIKEDGKTRINKYYDLYIDRAMIENEFDELWKKQSELNAAMFTDKARDDLKDVLLHQRPLKPVKPGRCTLIPDEERAPLALPSTQRFRMYQEVNNLRILRDGLKEEPLALHQRDTLITALEESNKCTFTKIKKLLGVGGAVRFNFEDPKREELKGNTTSAILGKKEHFGPAWFKLDETKQDAIVMQLITEENEGKLVRWLQTEGGVDEQHADAIANVGLPEGYGSLSAKALARILPELRRGVVTYDKAVQAAGFEHHSKLTTNSEIHGVTTKIESVDQDTGEIKAFHIHKELPYYGEYLQRHVGFGSGKPEDQPEKRYGKIANPTVHIGLNQTRLVVNSLIRRYGHPSEVIVEVARDLKQSREQRKVEQERQAKNQKRNERLRKEAAEILKIGEERVSRDDIEKMILWIELNETDSVDRKCPYSGVPISAAMLLSNEVEIEHILPFYRTFDDSLNNKTVSMRQANRIKGNRTPWEARQNFEAQGWKFEDILARAGNMRKEKRYRFAEDGYQRWLKDDDGFLPRALNDTRHLSKVAREYLTLICPQATRVIPGRMTAMLRAKFGLNDVLGLHGEKNRNDHRHHAVDACVIAVTDQGLLQRFAQASASAREKQLNRLVESMPLPWDSYREHVQRAVENIWVSHKPDHDYQDEMFDKTIYNADGFSRIAAKVRTVIPFNARQDSSSEQRHRDKDGQPKPYKGLLSNSNYCVEIVREGHIWEGEVIPTYKAYEFVREFKNQNRGCTEKHVFDALRNPARSLSGKPLVMRLSIDDTIRAEIDGITESLQVLKINSSGSITFIRINETNIPGRYNAKLAAQKLAAEGKAFDKGALNDAFFQKAVSANSLRELKARRVTISPIGELHDPGFKE

SEQ ID NO: 5788 - protein, 1147 aa, unidentified
  REGION 1..1147: note = Description of Unknown: Cas Enzyme sequence
MTGKQNNLGPLTFGLDIGIASVGWAVLGENRIVDLGVRCFDKAETADKGESLNLARRTARLLRRRLRRRAWRLTKLARLLKREGLIADANFFKKQIPFTQSLWQLRVKALDRRLTGEEWARVIYHLCKHRGFHWISRAEAKAADSDNEGGRVKKGLAGTKRLMQEKSYRTAAEMVIHEFPDAQRNKSGDYSKALSRELLEEEAKKLFQHQRELGNPHASAELETAILGNGDKKSGLFWAQKPALAGKDLLKMLGHCTFEKEEYRAPKASFTAERHVWLTRLNNLRIVVDGKMRPLNEQERHIALPHPYIQASDLTYKQLRSALVKAGLSDSFRFVGLSYPSKRQEDTEKAKNPETEKLIKLPAWQTLRKTLKDAGLEMEWQQISVAALDGKPELLDQIAWVLSVYKDDAEVEAELRKLDLPNKAKMVDALLDVRFDKFSNLSLKALRKIVPHMETGLRYDEACEQAGYHHSQLHKVGEGEHKYLPSFYSGRDKDGKLKFNEDMDIPRNPVVLRALNQARKVVNALIKTYGSPHEVHIEMARDLSRALDERRDIEKAQKEYRERNDRDKASFASEFNIVGTVKGKDFEKWQLYREQQGKCAYSQQPLAPNGDIQRIFDAGATEIDHALPYSRSFDDSKNNRVLVLTRENRNKGNMTPYEYLDGKNNSERWRLFVAFVESNKSYREAKRNRLLKKDFGEDESKDFMERNLNDTRYICRFFKNYVEQYLQLHADSTAKRCVVLSGQMTSFLRARWGLVKVRSDSDRHHALDAAVVAACSHGMVKRLSDYSRRKELDQVREGFVDVETGEIVNPAMFDKLEQHFPSPWPHFRDELLARLSMDSAETLRTEMARLGTYPPEALEALRPLFVSRAPQRRNSGAAHKETIYAQPESLKAQGGVTQKVAVTSLKPADVDKLIDPHRNEKLYAALRDWLQQRDEREKRAKEIEAGAGRGKDKRALTADEQAEIERLRALPRKPDKDGNPTGPIVRTVTMVIDKLSGIPIRGGIAKNDTMLRVDVFKNKKDGKFHLVPVYVHHSVARTLPGQAIIQGRDESEWTLIDDSFGFCFSLHSNDLVRVQQKGKSAILGYYSSCHRGTGSLNLWAHDRNLQVGKDGMVEGIGVKTALSLEKFNVDVLGNIYPAPPEKRRDLA

SEQ ID NO: 5789 - protein, 1378 aa, unidentified
  REGION 1..1378: note = Description of Unknown: Cas Enzyme sequence
MKKILGLDLGTTSIGWALVNEAENENENSAIIKLGVRVNPLTVDELTNFEKGKSITTNADRTLKRSMRRNLQRYKLRKENLIEILIENGFINNETILSENGNKTTFETYRLRAKAVNEDVTLEQFARILIMINGKRGYKSSRKAKSQDEGQLIDGMEIAKKLYNENITPGQLVFQILKAGKKYIPDFYRSDLQSELDKIWEFQRQFEPEILTDDFKKQIAGKGKINTTKIFLARFGIYTADNKGSDRRLQAYQWRDEGLTKQLRKEELAFVISDLNGTISGSSGYLGSISDRSKELYFTKRTVGQNLMAQLDRNPNTSLRNQIFYRQDYLDEFNTIWETQAKFHKELTNELKSEIRDIIIFYQRRLKSQKGLVSICEFENRQIEVEVDGNKKIKTVGSKVCPKSSPLFQEFKIWQILNNIQVIDKTGAKRFLEQDEKDILFRELNLKDKISKKDALKLLYENYKELDLNFKDIEGNKTQSALFKAYQSIIELSGHGEYDFSKMKTSEIIEIVVSVFKGLEYNTDILFFNSDLEGKEFENQPFYQFWHLLYSFEGDNSNTGNEKLISKITELYGFEKEYATILANITFQPDYGSLCAKAIRKIIPHLKEGNEYSTACLNAGYRHSKSSLTRKELDDKVLKDKLDILPKNSLRNPVVEKILNQMINVVNATIEFYGKPDEIRIELARELKKSAKEREDLTAAINKTTLDHEIYKGILQKEFGLSHISRNDIIRYKLYKELESRGYQTLYSNTYIAPNKLFSKEFDIEHIIPQSRLFDDSFSNKTLESRSINIEKGNETAFDYVQSKQGEVGLDEYLNRIEELFKTGKISKTKFNKLKMKGADIPSDFIARDLRDTQYIAKKAKNILEELVKEVVSTTGSITDRLREDWQLIDLMQELNWDKYDKLGMTETIENREGHKIKRIIDWTKRNDHRHHAMDALTIAFTKRSHIQYLNNLNARSDKAGSIYGIETKELSRDDKGKLKFKPPMPLNDFRTEAKRHLENTLISIKAKNKVSTININTTKKKNGFNKKKQLTPRGQLHLETVYGSILQYTTKLEKVGSGFNEVQILKVAKKSYREALLNRLKEFGNDPKKAFAGKNSLDKKPLFIDYLQTQKVPDRVKMVETETIYTIRKGISPDLKIEKVIDAKIKVILENRLNEYNGDSKKAFSNLEENPIWLNKEKGIAIKRVTITGISNAIALHDKKDKEGNLVLDKNGKTQPVDFVNTGNNHHVAIYKDENGNLQENVIPFFKATERVSQGLPIIDKSYRNEDGWEFQFSMKQNEYFVFPNEKTGFNPNEIDLLNPDNYQAISPNLFRIQSISSKYYIFNHQYETQSADGVLFKTKKQLAGITYNFFQRPKWLDGLVKVRINHIGQIVSVGEY

SEQ ID NO: 5790 - protein, 1064 aa, unidentified
  REGION 1..1064: note = Description of Unknown: Cas Enzyme sequence
MSSTLETAQKYVLGLDLGSASLGWALIALDEADDPVSLIRAGVRIFEPGVDGTSMEIEQGKDQSKAVERRTARLHRRQLRRRAARQRDQFRLLQRHSLLPTPEGVIGSPEEQRHSILNSLDQQLTDKWQSAFPINRFAELPLYFLRKAALDQQLEAHEIGRILFHLIQRRGFLSNRRENKQNPDQKKELGLVKAEIHSLEQEIQNAGARTLGEFFAGLDPHAQRVRRRWTARRMFQDEFEKIWAVQANHHPDLLTAELHDKIAHLLFFQRPIAAQTHLIGKCELEPGKQRAPWAAMEAQRFRIVQKVNDLRLINPGSLISNPLTDEERQRLYEFLDREGDQTFKAIKKYLSFPPEVQFNLEKGDEKRLRGNRTQAVMRKVFGDRWETIGVGKQHQIIENWRNSESDEVLIREAIEQWSLDAAAAALLSEQTPEPGYCAVSLAALSKLLPLMACGKSFKEAETELYGARFSGGMVFETLPEVRKQLDSLRNPAVERSLTELRKVVNAIVREYGKPQEIRIELARELKRPRQERIEATKKNRNRQREREDVAARILRECGLSNPSRKDIEKARLHEECGGYCPYTGRHIPFSNLFDNSEFDVEHIIPRSRYPDDSFQNKTLCYLPENRDVKKGQTPWEAYGKDEQRWAEIMTRVGSWKNRGKIARFSIQTEEALGEFSARQMNDTRYASVLASRFLGALYGGRDVMEGEKVRQAIFASSGAVTATLRSSWGLEAILHEIVPAEPGESRGKPRTDHRHHAIDAITIALTRPKVIQSMALAASREPWQRDSRAWRKIESPWRDFVPSIRPHIEQMLVSHRPEHKLSGELHKGTNYSAPRNYRGKPTVHTRCLLSGLSAADIADDEVIVDPAVRNAVRRKLEELAGNPKLFDRAENAPCLQARDGRLIPIRKVRIRETRNPLKVGQSIRERFVASGGIHHIALFVARDERRREKWDSSVVQITEAYERCRRKLPVVSHELANVADAEFIFSMMKDDTIEITDASGTKILRVKKFGDNKQVWFVPVNDAHDDAQQKKLGITWSKTPNSLKELRPRKVVIDLLGKVHPAND

SEQ ID NO: 5791 - protein, 1082 aa, unidentified
  REGION 1..1082: note = Description of Unknown: Cas Enzyme sequence
MKFNISTNTDPFLTGLVFGFDVGTGSIGYAVRRGSTFLPDGVGVLICDSEGSKLDERRNFRRQRRTLRSKKFRRQWFAKELVKLGLPKPTKEQLKRANNETNEQFDQRTNPVSLRVRALNEPLEKWQLFIALTHLFKRRGYEKDVPWANKEKDTKANKENDAEEWGSGTVPPEKVQSEFDASGCKYPCEFLARNPKHQRRRVWPRALLENEFHAIAKAQTENKIFPQLTEKTNWLLYGETKEVKGHHVYFKTTEAQNPGVLGLRWPRFDNRGPALDSLQPLDEQGRPLHVVRKNKETFRKAQWELALINFRVIDRATGNLVRPDDKSLTRLREIWESGKRKKKKESGSNAAESEIIKISEPVLKRWAKDFAGQYKLVDGQQPLTPQTGAGRARYSSPTLERIIAGEQFNPPQPLLRRKNESAEQALNRYMADIKHPLVRHRLTLFQKLLQQLVSRFGEPDMIVLEAIRSLAMGEKKRREHIQRIKENRDERESIRTELKKDNFSSSKNSILRYRLFKEAKGRCPFCLCPFCLQEVVYKEAEIEHIVPRSRVDCNEFYNLTVAHQECNKRKDNQTPWEAYGTTKDWEALRKNAEDCFGLGSLKYRLFTNPDAQNLVEEKSDLQHTAYIARVIRQVSLIQLGWLAEDGRDATGLKDPEMTAWRFQVTNGSLTSRLRKSWGLNQILNPFPSKDAWEAMTPDEQEKKKTEMQEKNRGDLRHHSLDAMVIACTLPWLAHRTHGATDLFGRPGWWWLDEKKRSRASNPLFPNEGQMYDVVKKEIEKVVVKHHVSRSNHQRTYDTTIYGRPKRNGVPIRDCYVSREPIIALKPADLKSPKTGKSKIFPPELGDYLASAWEKYCETEPEWEKQIKANNKCLPEAFQKRLCFSDFQQWRADGAPAFIWPKQVKIPIKRVGYIGVEDDSAVAPASPGTKGFVARGSFREVRLHPSEDGKSLVPVFVPLWRLDKPIPKAPIKTDSESVAVIRRGQTVEIKNSPGRNTPVGKYRVASTMQQNIKLLPVYLADIKEALKASGFLENGVNISWDTFIKSAGYELSQLPDAPRFFPIHQRLPNPVRHGIIGNIFYHD

SEQ ID NO: 5792 - protein, 1079 aa, unidentified
  REGION 1..1079: note = Description of Unknown: Cas Enzyme sequence
MNESGSLAQDYVLGIDLGSVSLGWAVIGLDKTDMPVVLLRAGVRLFDPAVTGDIEKGQDESNAVARRVARLLRRQLRRRAARQSELFRLLQGHALLPPYEGNEADASQQRHAILNALDLEIAAKWAKSGGAGAQAAIDLPLYMLRKTALDEALEPYELGRVFYHLSQRRGYRSNRKEQAEKKEAAIKGKKDDDLGTVESGIKELGEAMRSFRTLGEYYASLDPHTHNVRRRWTSRKMYEDEFAAIWEKQAALHPTLLTEELHRQIKHLLFYQRPIKAQSHLIGGCELEPGEPRAAWAALEAQQFRVLQQVNELEVISPGRVTGIPLTAEQRQTVLDLLENSSEITFKKISKALGLADYIGFNLQRGGDTKLKGNLTNTHMAEVFAERWTEMSEEEKKQVVEDWRTIDQEDSLIRRAIEYWNLDESSAKWLASRPAPNGYCMYSRKSIRKLLPLMATGARFRAAEKEVYGIRLTGGLVYDSIPPVRDTLKTLRNPAVERALTELRKVVNALVREYGKPTEVRIELANDLKKPRHERAEAFKYKRKWEKQRIDTKEKMLRELGPGFEYPSRADVEKALLWEECQGECPYTGKRFPFSSLYGENPPLQVEHIIPFSRIPDDSFQNKILCYHEDNQHKANRTPFEAYTDPAQYETILSRVRNWRTPNPGKQCRFELRTLEELEGFSERQLNDTRYACKLACELVGTLYGGRDEKTDTDSRQVVFASSGMVTATLRKSWGLEAIMRETAPSANGQNHGKPRTDHRHHAIDAITIALSRPKMIATLSRNNAQDSYRPSNGHTAPRIQSPWEDFVDSIRPHFEKMLVSHRPDHRLTGALHDETNYGRPHKEEGKDVVHIRKPVEGLSARDINNIVDPAVREAVRAKAAQLGGDLKKWTPKEGRGDWPQLGTKNGKQIPVKRVRIKKALSVETIGKDERTRHVALSSNHHVAIFAMLDKRGIEKRWKSIIVSLFEAMDRKRKGQPIVQTSYPEAGDYVFKFSLMGGDTVLLHKDCDHNQNPCNPSVWRLRSIAANGQLSLVRINDARPKSEIIKAKEWWSPIEDTLRELDAVKVVIDSLGRIHQAGG

SEQ ID NO: 5793 - protein, 1148 aa, unidentified
  REGION 1..1148: note = Description of Unknown: Cas Enzyme sequence
MKTTSVSPDLELAFDVGHSSIGWAVLQSKPELNILGCGAVTFRADDCLASTRRGYRRQRRHIRSTRQRIARMKILLTHLGVLKKEELDKPGCAWPWLLAARVLRGGKLLEWTELWDVLRWYAHNRGYDGNKAWSKHDAANLEDSEKEKRAGELLTEFKGKYGRPGTMAEVFCDVFKLDPLGPLKSSMIRMRNLGAAFPREGVESEAEQILRSHVGVLAHLDNRLINALMRDHTAFPDLDLHLPARYGQRLKDGSLSPGGLIFGQLVPRFDNRIVASCPIMFERVYQVVMAETGDDKQAKHEAEKQAKVPSVNCIEFFRFRWAMELAKIKIATIDARAPRNLTAVERKTVNAEIEKYGYLTPSALKKAVRALTGGALDNLDQILTHPDAERALVLDPVRRYIHSDQLVSSLWQILPSRLQKRLIGQWRRGHSITIEELLDDCGEVRAAALAVCEKHLDAQNTRKRKKDELLTRKAMMRIPLRVEPPKGRAPHTRQVMREVVEFIFGTDRHPAEDGGPLYRNEAIRQAQIQRAIDEQTNNHLVRHRLKILERLHTDLLDTYAEGNRAQITRITVEVNRDLREMSGKTAQEQAKLLGQQLAHFKGVAKKLAEAYDGLGVHVGPGLIRKGRIAEDLGWICPYSGKPYDALDLLHGRVDKDHIIPRSDRQSDSLDSLVITFSEVNKMKGKRTAVRFMEEFQGQPVHGLPQVMIKPLSIYLKDIAALNTTAVHKDDERRKKNRKRLLLLRDYVEKTFTPGDLTQTSQLVRLGVQALQKHYLAAENQPCMISLPGSVTGAVRKSWDLIGCLATANPLVLNPDDINEHGRPKLRTKTEIRGITHLHHALDACVLAIASRFLPRDGGAWELLVKRRLNEDEQRRARVIFGHQIEITKDGELRLVDLASELKAQICERLKERRVVQHLPTNVSGLRCKETVWRVFDSTDPHPNSKRLARWLEEMKIPVPAPGANTALIICRKRRAADVPGEISAGGKVLRETKIWRWVYDIKDKSALLGVAPEGDKTTAKLLRIKAVKVLGDNFGLALDPEPTLIRPHKVWHQLETLRARNGGRRPRTVRIGGLIHVKEKAARSDYRGVWMVRGVQLNQRAGYLLDLSPADQILYRGQPGCFQQVSVVTLLKCGMVIMNPPLCGATPV

SEQ ID NO: 5794 - protein, 1017 aa, unidentified
  REGION 1..1017: note = Description of Unknown: Cas Enzyme sequence
MRTLGIDGGIASIGWGLLDVDTDAGALTIVAAGVRTFDAPETAKERMPTNAVRRLHRGQRRVIRRRRQRMNQVRRLFLSTGLLPRADSNALALAGLNPWRLRAEGLERLLSGPELAVVLGHIARHRGFKSNAKRDAAANAADETSKMKKAIETTRDRLEGRTIGQMFATDPAFQDRKRNRGDFSRSILRADQENEVRQIFAEQRRRGNDLATERLEDDFGRIAFFQRPLQDSEDMVQYCLFEPKERRTARRSYAFEMFRLLSRLATISLSAGGRDERLNADQIARVADDFGKTKGISYKGVRKILDLDNRTRFVGVPEKDEKNDIVARHGNAAEGTAALRDVAGPSGWRVLMHNPQMRDRIAEVLSFREDPVSVRAGLIEAGLEEPLLGAVMLGVENGTFGKFSRAGHISAKAARALLEPLRRGLVYSEACEEVGYDHSAPASVSLEDVRNPVARKAVTEMLKQVRAIVQAYGLPDYIHVELARDIGKSAEERDKITKGIEDQNKKRSKSREELEELLERRLVGDELLRYELWKEQNGWCLYTGEQIKLEWIAADDNRVQIDHILPWGRFGDDSFTNKTLCLASANQAKKNRTPYEWYDEEGLDWPLFASRVEACKEMKGRKKGGFYLRKNAREVEETFRNRNLGDTRYATRLLLGMLARLYPRAIVLARPGQLTAKLRRAWGLDDLKKDVNGKRLEDDRHHALDAIIVAATTKSMLDRLTIAVQEARRLGLPRGFDFTQAPPPAAGFRDVVRQTVENVFVSRADRHRARGEAHAATIKRVETVDGVTTVFERKAVANLTLKDLERIPIPAPYGKIGDPMKLHAGMISELRQWIENEKPKDQMPRSPKGDLIRKVRIRSDDKIAVPVRGGTAGRGEMARVDVFGKPNKHGKFEYYLVPIYPHQIADRDMQPHPPNSYIVQGKPERDLDSSHTFRFSLYSHSLLEVVKSDGVIIRGYFKGLDRATGNIAIAAPRNSRDVTKGVGPKTLERFTKLNVDRLGNVTEVRNEVRTWHGVACI

SEQ ID NO: 5795 - protein, 1048 aa, unidentified
  REGION 1..1048: note = Description of Unknown: Cas Enzyme sequence
MPLIFGLDIGTTSIGFAVIYQRPAQGEWIIHRLGVRIFPEARDPKGTPLNQERRRMRMARRQLRRRRVRRRALNECLHEAGLLPEFGTDQWHEVMAINPVHLRTSGLSERLTPMEFGRALYHLAQHRHFKGRELEEETEQDAVSPDEAKAKTEREATLNRIRRTHETLGQILAEKGPHERQRGIHANRDSVAAEFERLWSSQAAYHPGLAETGLRERVADTIFSQRPVFWRLATLGACRFMPGEELCPKGSWLSQQRRMLEKLNNLAITGGNARPLDEAERAAILEKLHGQASMTWPAVRTALRPIFKARGDEGRERTLRFNLEEGGDKTLLGNAVESKLAHIFGGDWTRHPRRQAIRDTVPQLLWDADYGKIGTQRVVIRSEEERRLRRSEAAVSAIAEFSATKAQADALAALRLPSGWEPYSTAALQLFLPHLEAGTRFGALVNGPDWAKWRAETFPNRDQPTGEILSRLPSPANKDERERVAGIRNPTVVRTQNEVRKVVNNLISVYGKPDLIRVEVARQVGASKREREEIKDGQNRQARRREAAAKELRAKGIEPARADIEKFLLWKEGQDKCPYTGDQISFDALFRTGDYEVEHIWPRSISFDDSFRNKTLCRRDVNLAKGNKTPFQHFEHRINEWNAICNHLNRLVARKGAPGMSPGKVKRFLAQTVPDDFASRQLNDTGYAARQTVEFLKRLWPDTGPTAPVTVQAVTGRVTAQLRRLWELNSILADDGEKTRADHRHHAVDALVVACTHPGITNQLSTYWQARENPMAVRPRLVPPWANIRADAERAVAQITVSHRVRKRVSGPLHEQMPLGYTNEDVAKGGTIYGIYVKRMPVEKLSLDTLKIESVAEMSRSAKFVVRDAPVRQVLLDHLRAADCKPDKAYPPYPSVTPGGPEIRKVRVLTIQQKHLMVPVANGYADPANNHHIAIYRLTGGRVDFDVVTLFEASRRLARREQIVRRERNDGASFIMSLSAGDSLRFPDGEQAGVWVVSGVWASGVVVMERATDASHATTWRPAPGAILANRGQKVSVDPIGRIRPAND

SEQ ID NO: 5796 - protein, 1488 aa, unidentified
  REGION 1..1488: note = Description of Unknown: Cas Enzyme sequence
MAKTLGLDLGTNSIGWAIRNTIPTNELKNQIEKYGVTIFKKGVGEGKSGEFSFAAERTKKRSSRRLYQSRKYRLWKTLEILIGYGYCPLLIDDLNRWRKYDKAKAMKGEGGRAYPIDNELFDAWIKLDFNGDGKPDYISPYQLRAELIEKKLDLTNPTDSFKLGRALYHIAQRRGFKSSRKDAVADDEGDRQDAKSEQKKETEFENNLQKKFGKSMTNFPTIGAALAYIENQGDRIRLEWIQHTFRKHYKDECTKIFEFQSIGIDPDLYKDLIEKSKNRYNGAIFFQRPLRSQKGLVGTCTLESGKSRCPISHPEFEEFRALSFLNNVQYKKDGIWIDLSSELKKELYDKLFFRPSKPHFHFLEIREFIEKHIDKKLYHREEKEKGIEKSINYSDKTNVSACPISARLKDIFGESWKYFRKETNQTRKNKKGIEHSITYTIEDIWHVLFSFDDDEMVAEFASEKLGLDETKTKKFVTAWKVCAEGYAMLSLNALKKINVFLCEGFIYTEAVLLANIPEIIGKEIWNDPENQKLIKSSIAELIEQNRQTKQILGIVNNLTAKYKSLHDDEKYGHKDNSYTLTETDKKEILASIIEAYGEKTWNAKIQNKPAITEAVYYLYQSTFRSGFDTILFGEDRYHVITFNGQTYHKSVSHQFYKLPRVVDTIMDFIRGHFTHVTEKQLSKLYHPSMIEIYAPAPRNEADGKFYLQSPKTGAFKNPMAMRTLHELRKLINYLIKTGQIDEETRIVVETARELNDANKRWAIETYQRQRQAENNEFVDAIRSILENKEYSTQPNPESSDDVDKVRLWYEQVKQSQTNKGKGEYAQNKWTNQTTELFQNLSQAKTLVEKYRLWREQKCTCIYTGRVISISDLFDENKIDFEHTIPRSISFDNSLENLTVCFADYNRNIKKNQIPTQLANYEHEALGYTAIKPRLKDWEDKVVHLKAMIEFWKGKSKTASTKDFKDEAIRQRHLWHMELDYWQNKLERFTMTEVKSGFKNSQLVDTQLISKYAMHYLRTAFNTVDVQKGRITADFRKILGFQNTYEKKSRDKHSHHAIDATVLTLIPHAAKREKILKYHFEIKETEKLIHENGQGEKLQWLDSELKKEIQRLELPDVNKIIDAIDNQILINNIARDQALTLGKKLVRRRGRIVYLRDKNGILLTDENGKPKPKVAQGDCIRGQLHLDTFYGKIKLVERDENGKPLKTEDGDWKYIEKNEGFAYVVRKPVSAISKLDQIVEPALKKIIEKQLNGRSLEKALLEGVFMLDRKGNPIGRPIRHIRCWADTSNPISIKSQTYLSKAKEYKNSFYAANAENSLYAYYWDGKNKERGFECLNLFQVASIRKTNNPKRLEDYFASFKELGRGKAKNAIPLYAILKPGTKVLFFRESKEELKEIDETSRLKRLYVISRLYDAVSGRIMFSFHSEARTDEKLTKAFSKETFGQRGKNGFSEFNYEFPWPRLLMSPSSFNFLIEGKDFEVKPDGVIVFK

SEQ ID NO: 5797 - protein, 1012 aa, unidentified
  REGION 1..1012: note = Description of Unknown: Cas Enzyme sequence
MKTLGLDLGTNSIGWALRNTYSEENNQIEKYGVTIFEKGVGEGKSGEFSFAAERTKKRSSRRLYQSRKYRLWKTLEILIENEYCPLSVENLNRWRKYDKIKAQKGDGGRAYPKDDKTFDSWIKLDFNGDGKPDYRSPYQLRAELVETKLDLSKKVDRYKLGRVLYHITQRRGFKSSRKDAVTDDLGERQDTKSEQKKESEFENNLKKKFGKSLSDFPTIGSALAFIEKQGDRVRLEWIQHTFRKHYKDECTKIFMFQGIGIESKQYKDLIEKDKNRYNGSIFYQRPLRSQKGLVGICSLEQTKYKDPKTGKTIISGKPRCPVSHPEFEKFRALSLLNNIKYKTEKNDDWIKLSDSLKQEIYDMLFFRQSKAHFHFSEIREFIEKRIGRILDYRNKTINYSDKTNVSACPVSARIKDIFGEDWKNFHKESNLNRKNKKGEEHVIKYSIENIWHVLFSFDEDEMVSQFAENKLGLDENKVKKFINAWKACPEGYAMLSLNVIKKINEFLNEGFIYTEAVLLANIPEIIGHEIWKDKEKQKLIKENIAKLIDNNRIEKQILNIVNNLLARYKSLHDDEKYGYKDTSYTLTDSDKNEIHASIVETFGAKTWEEKIPDKNTIIETINYLYQCTFRTGFETTLFGDDRYHIINHNNQNYYKSTSHQFYKLPRVVDTVKDFIRTKFSSVSEKQLSKLYHPSMIDIYAPAPRNEDGKIYLQSPKTGYFKNPMAMRTLHELRKLINYLIKTRQIDEETRIVVETARELNDANKRWAIDTYYEQKRKENEEFAIAIAEMLNDPECSNINANPKSDEDINKVRLWYEQVAHEYIFKKAPDKGDKDTKRFNWNNISTSMMHKIQEAKENQIKKYRLWKEQGCRCMYTGEIINFTDLFNENKIDFEHTIPRSISFDNSLANLTVCFANYNRNIKKNQIPFDLPNYEINANIKGIEYSAILPRLKSWEGKVEQLQTNKNFWIGKSRTASKGKLIVPGSSISEKDFVIRQRHLWQIELDYWQNKLNR

SEQ ID NO: 5798 - protein, 1055 aa, unidentified
  REGION 1..1055: note = Description of Unknown: Cas Enzyme sequence
MKNGEVVPYVLGLDIGANSVGWAVLELDAKQTPCRILDSGSRIFEEAVKVDPKEGKEKSKNMQRREARLSRRRTRRRGAAQGTLFDLLQGAKLLPLEIKNRKGQVVTQRGPLLCALNDLLVRRWQDKLCPSRDLQYERRQIAQMLPYILRAKAVSERLEPEEVGRALYHLGQRRGFKSNRKSAPKADEKPGEVKATIDGLDRKLQQSGLMLGQYLSQLNPEEARIRGEGQYTSRKMYDDEFKAIWSQQCKDHPPLNDVKFRGRIRRAIFHQEPVRSQRDLIGRCELEKNRRRAPRASLLSQTFRLYARVNNLEKVFKGYRTVLSPEDRDKIVQFLETREKATYAGLRKMLGWERGSRFNVEGIDDEEADVRGNTTASRLIEVFGVDGWENLGEIDRDNVVLNVLGMSNESALTRRGKIPWKLSDEQASKFGGVKLESGYMHYSAQAMKKLLALLKEEKLRENEAIGQVYERKPLSPMDQLPPVLKVLPQMTNPLVRRALSEVRHVVNHLLSERGKPTLVRIELARQLKKSKEEREEEWKKNRSNESNRRTAAKYLLDQRDIRNPSPSLIRKVLLAFECDWHCPYSIEGFNVDDLLSEPPKVQVDHIIPRSRHPEDSFFNQTLCMTWVNQKKGNRTPFEAFGPHVPQDQRGRIRPWNEIEAAVRRFPGASGKIKLERFRMETLESLDDYAARQLNDTAYATKEAKKFLGLLYGGESATRVTAGKGQLTAILRGHWGLKKSRDDHRHHAVDAVVTALQDAAWVKEITDACQRAARLGKDNIDRIPEPWVSFRDDVAASVEKIVVSHRVRRKVQGPLHEETNYRQPKMEAKSKPLAHIRKPLSDLSADQVKLIVDEKVRNLVENKLIELQQKNPKRAFRFAGDHPFFVSRKKRRIPIHRVRIAVSLRTQEIGKDDHLRHVKLGENHHIEIIKGPDEKWEGRLVTRLEAMRRAKEGEVVICKEAKEGGTFVFSLAQGEIIEIDEPGVGRGLWRIRTITRDKDKQGKDKPRILAVRLNDARQKEKIPSTDMRRPFVGGLCVLNCRKVVIDVLGNVRDAND

SEQ ID NO: 5799 - protein, 1105 aa, unidentified
  REGION 1..1105: note = Description of Unknown: Cas Enzyme sequence
MSRTLGIDLGTNSIGWALLEDEKGIIKSGVRIFPVGVKSDDFLKLGNEVSKNVARRMARSARRRRFRYKLRREKLLAILVQYGMLPDGDDLLTTRELYELRSTGLDNALSLHDFGRILLLLNKRRGFKSNRKTTASEESKKEEGKVKQGIIQLHKEIEAENCRTVGEYFTLLFKKSQSKENWHNPDEPIERIRNRWVGREMYEHEFEMLWQSQLRFHGDTLNVTHRELTPEGRVRWEGPLKDAIGTRTIYHQRPLKSQKGLVGRCRFEPSKHCAPKSSALFQEFRVWQQLSGVRFANGERIGQELTTDEKRRVCDVLMKTNKMTEAGLKRLLGLSRTVSFNDVFDLRGNSTNARLIETLGESTFDSLTVEQHFELWHLLSYSDDAEGLKSIARRKITEGKLPQMSEEVLDSLAETNLEEGYGNFSTKAMKKFLPFLREGLIPFDAFTKAGYDSTKKYSLWESEELMKIPPLFPNELRNPIVQQMLGETFRVVNAIVKEYGKPDMIRVELARELKKPKDRREQDRHRSKDKRRQREEFAEFLSRRLKRRIEPNSPEIRKYELWLEMGCEDEELNKIDSFLRNGRIADAKKYHLWRECSRISPYSGKLISLTKLFSSEIEIEHIVPYSKCMNNEFTNLSLCESSINRDKGRQLPYEYFATKGNKELEDFKNRIAVFKGIKRMRFLMRDTDLTDEFLNSQLNNTSYAARELASRLEMLLPPLRQQEKSKPRVQVVNGQATALLRKQWQLNAILSKGDIDTKNRGDHRHHAIDSIVIACTSPSLIHTMARYSKFDALSRFENKELTTPWKTFLHDVGFSLNSLIVSYRNEKRLINRKPNKITVKNLEKYPDGFIKQSTVTVRGSLHEETIYGSVQINEEENYVSRRPLSWFTNPKQLEKIVDPVVRKVLSERVKRFEGDIKKAFSGIEENPIWMHSNTNKEVPIKKVRMFDPAKNLIQLRPDENQKLFVKSGNNYLIAIYEDSGTQKRDFEVVSFWEATQRALKKVSIINAERNGKPLLFSLVQKDIVVNYKEHPDEIDWNDMNYLRDNIFRVRKFDVNGNIYLDYLYVSDIDEKEDRHKLFFSFTPNTLRCVKVNVDLLGRIVSSGKV

SEQ ID NO: 5800 - protein, 1116 aa, unidentified
  REGION 1..1116: note = Description of Unknown: Cas Enzyme sequence
MNDEEITPKNKRRYRIGIDVGRNSTGFCALEIDDEDNPISFLNLSVLLHDAGVGKDGGKTQETRKAISGRTRRARRLIRNRRRRLAELDQFLLDLGWPLPDLEKYPDPHQPWKVRALLVEEYVEDERLRQEKLAIALRHIARHRGWRSPWVSVSSLHVSHPESDEVVALRSRVAEKTGRILPEDLTPGQLLYLLDRGEKIRGDAGILAGKLLQTDYATELKKIFSRQKISEDLGDQLIDKVFASKSPKGSAAEKVGKDALPGQEHLDRAEKAHPAFQRYRIATIIANLRIREDEDGQKERRLTGEEMSSLFKFLSDPDRKKVPTWIEVAKVLGIERQDLLGTGKLTADGERTGNTPPVDETNIRLTKCSIKPVQQWWRAASYLERCAFIEQISRASSPGEATSREEQIASDFVASLNDEDLEKLESSVRLPIGRAAYSVESLGRITKRILTDNVDLQQAREAEFGVSPEWKPPAVPVGEPVGNPVVDRVLKGVNRWLLRAEAEWGIPQQVNIEHVREAFMSKAKVNELQRFQAQRFKKNEEARQQIEGNQNLSGLPRIAAIRKQQALQRQHCECLYCGTHITFATAEMDHIVPRRGVGSTNTRDNLVAVCRRCNQEKSNIHFAVWAAQTNIPGVSQKEAISRVKGWFTDTSVKDDKRLRAGVIDRLSRTKADPEIDNRSMEAVSWMARELAHRIEQRYRTPQGQSVTAIDASGEKEAPSENKVKVRVFNGSITAAARRASGFEGRVNLIGGRGKTRLDRRHHAMDAATIAMMRPAVAQTLVERENLRRGQIMAGGEQNWKSWNGSTFAQQKIYAVWLEQMRYLTEIYNQALADDQIPVFSNFRLRLGDGKLHEEVKKLHRKQLGDAWSMNDIDRAETPALWCALTRLPDFVWAEGLPANPERKIVVNGGHFAADDSVGIFPTSAPMLKVRNGCVEVGTSIHHARIYRITGRKKPVYAMLRVFTVDLPNKAGVDLFQVDLPEQSISVRNAEMKLREAFREGNAEYLGWLVVDDELELDLSAERKGAIAELLSEYPGISHWSVDGFPMKITLRLRPLYLAGEGMPEDALPGTQEILQKQGWRPTVNKLFSTCKPRVIRRDVQGNIREDSSRLPSSWSI

SEQ ID NO: 5801 - protein, 1500 aa, unidentified
  REGION 1..1500: note = Description of Unknown: Cas Enzyme sequence
MTKNILGLDLGTNSIGWALVKQDFENKQGEILGMGSRIIPMSQDILGEFGKGNSVSQTADRTNYRGVRRLRERFLLRRERLHRVLNVLNFLPEHYASQIDFKKRFGKFIEETEPKLGYNKEGFIFKNSFEEMLSDFKNLDANQKVPYDWTIYYLRKKALSQRIEKEELAWILLNFNQKRGYYQLRGEEEEENPNKLIEFYSLKIIDVLADEPQKGKSDIWYSLVLENGWIYRRASKIPLFDWKDKTRDFIVTTDLNDDGTIKTDKDGNEKRSFRAPSENDWTLVKKKTEQEIDKSHKTVGTYIYETLLQNPKQKIKGKLVRTIERKFYKEELRQILEKQKEFHPELQNDDLYTDSIRELYRNNEAHQLTLSKKDFVHLFLEDIIFYQRPLRSQKSSISNCSLEFREYKKYKLDEKGNRIKDENGKYIFEKDENNENKKYKEYLKTIPKSNPYYQEFRIWQWIFNLNIYKKEDDSNVTKEFLNSTEDYESLFEFLNNRKEVEQKPLIKFLLERKDFKGKLLNAEIENYRWNYVEDKKYPCNETKTMIFERIKKVENIANNFLTREIEQKIWHIIYSVNDKTEYEKALKSFAVKSNLDENSFFESFRKFPPFKSEYGSFSEKAIKKLLPLMRLGKFWNENEILKYSDVYFKNIEYLLGVLQQKDENISDDDRKNWNKTINNKLREELENFQNAEIESFQGLRLHIAQYILYGRHSEASMIGKWNSVEDLEEFLKDFKQHSLRNPIVEQVITETLRVVKDIWLKYGNGEKDFFNEIHIELGREIKLPREERKSLTNKITENENTNLRIKALLSELLNDSSVENVRPYSPMQQEILKIYEDGVLNSGIEIEEEYLKISKTAQPSPSDLKRYKLWLEQKYKSPYTGQIIPLNKLFTPEYEIEHIIPQSRYFDDSFSNKVICESAVNKLKDNYIGLGFIKRFGGTILELGFGKNVKVFEIDEYEDFVKKHYANNRGKRNKLLMEDIPEKMIERQLNDTRYISKYISGVLSNIVRVEDGTDEGVNSKNIVPGNGKITTQLKQDWGLNDVWNELILPRFERMNQLTNSTDFTAWNENHQKFLPTVPIEYSKGFSKKRIDHRHHALDALIIACATKEHVNFLNNQNALDEKYKKKTESKEAYLEKRQKTRQDLRAILCDKKYNTDSKENYKWIFKKPWKDFTVEAKNNLETIIVSFKQNLRVINKATNYYEKYVEKNGVKTKEKVEQKGTNWAIRKPMHKETVSGKVDLPWVKVPKGKILTATRKNLDSTFDLKTINSITDTGIQKILRNYLEFKGSSELAFSPEGIEDLNKNIEKYNDGKPHQPITKVRVFELGSKFQVGQTGNKKDKYVEAAKGTNLFFAVYEDKNGKRSYESIPLNEVIERQKQGLTVTPLENQKGNRLLFHLSPNDLVYLPSEDEIENVNNIDFKNLSKEKKKNIYKVVSFTGNRLYVIPNNVSVSILNKVEYSQLNKIEFTKEKENCIKLTVNRIGIIDKLSSDKLKNIFDEYQ

SEQ ID NO: 5802 - protein, 1153 aa, unidentified
  REGION 1..1153: note = Description of Unknown: Cas Enzyme sequence
  MOD_RES 478..481: note = Any amino acid
MIKNILGLDLGTNSIGWSLIKQYFENKQGEILGMGSRIIPMSQDILGEFGKGNSVSQTASRTGYRGVRRLRERFLLRRERLHRVLNVLNFLPEYYASQIDFTKRFGKFKEETEPKLAYNKEGFIFKNSFEEMLADFKNHQPQLLENDKKIPYDWTIYYLRKKALSQKIEKEELAWILLNFNQKRGYYQLRGEDFEEEKDKTFVRLKVEKIVDSGDNIKGKILYDVYFENGWKYDKQIVKTEDWIERVKEFIVTESFLKNGDIKRTFKAVDSEKDWIAIKTKTEQEIDKSHKTVGTYIYETLLQNPKQKIKGKLVRTIERKFYKDELKQILEKQKEFHQELKNDDLYSDCVRELYRNNEAHQLTLSKKEFVHLFMDDIIFYQRPLRSQKSSISNCTLELRKYKDENGVEHTQYLKAIPKSNPYYQEFRLWQWIYNLNIYLRDDDSNVTKEFLNTTEDFENLFEFLNNRKEIEQKPLIKXXXXEKYRWNFVENKPYPCNETKSMISSRLDKVENISADFFTRKIEQKIWHIIYSVNDKIEYEKALKSFAGKNNLDENSFFEAFKKFPPFKSEYGSFSEKAIKKLLPLMRLGKFWDEDEILKYSDDYFKNIESLLGVLKQRDENISDVDRENYNKTINNKLRAELENFQNAEIESFQGLRLHIAQYILYGKHSEGDNKKFNSADDLEEFLKEFKQHSLRNPIVEQVITETLRVVKDIWVKYGDGAKDFFNEIHIELGRDMKLPAEERDKLTRQISENENTNLRIKALLAEMVNDNLVENVRPYSPMQQEILKIYEEGILKSDIEIEDDILKISKTAQPTPSDLKRYKLWLEQKYKSPYTGQIIPLNKLFTPEYEIEHIIPQSRYFDDSFSNKIICESAVNKLKDNYIGLGFIKQFGGTIVECGFGKSVKVFDAEEYEDFVKKHYANNRGKRNKLLLEEIPEKMIERQLNDTRHISKYISGVLSNIVRVEDGSDEGVNSKNIVPGNGKITTQLKQDWGLNDVWNELILPRFERMNQLTNSADFTAWNENYQKFLPTVPIEFSKGFSKKRIDHRHHALDALVIACATKDHVNLLNNLSAKSDTKRYDLKKKLMKFEKVIYNHPQTGERIEREVPKQFLKPWENFTVEAKNSLDKIINKTFVLLIKPLIIMKNMWRKMA

SEQ ID NO: 5803 - protein, 1420 aa, unidentified
  REGION 1..1420: note = Description of Unknown: Cas Enzyme sequence
MAKNILGLDLGTNSIGWAFVKEAENNNEESSIEKIGVRVNPLTTDEQTNFEKGKPITTNAGRTIARSARRNLQRFKLRRENLLQILKSHKWIDNETILAENGNKTTFETFHLRALAAEKQLELHELARVMFQINKKRGYKSSRKVNNTEEGSLIDGMDIAKKLYHENLTPGQYVLDLLKSGKKKVPDFYRSDLQTEFDKIWDFQKQFYIEQFTDNLKEELKGKGKVATWAILKVPFNLVGIKRNLKRDDLKLENYQWRNDALSNQLNLEQIAIVLQEINGQLTNSSGYLGAISDRSKELYFNNQTVGQYQYTQLQNNPHACLKNQVFYRQDYMDEFEKIWEVQAKGRETIFTDALKEEIRDVVIFYQRKLKSQKGLISICEFEQREIIKDDKKKTVGLRVIPKSAPLFQEFKIWQILHNVKLKNKITNEVVLLNENDKNHLFEELNLKGNLTASEVLKLLVDKPKDWEINYTSLEGNRTNQALYNAYLTILDNEGYNVREELKLKLNKDDITLADIDKSALEIKGMVQTIFNHLGIKSEILDFNAELEGKAFEEQLSFQLWHLLYAYEEDNSPTGMDTLYRLLEQKFGFNKEQAKVMGTVAFQDDYGSLSSKAIRKIYPFIKENEYSVACDLAGYRHSKNSLTKEELENRELKSRLDILPKNSLRNPVVEKILNQMVNVVNTLIDTENDKLEKAGRTRNFQFDEIRIELARELKKNAKEREEMTKAMNAGKIEHEKIINILQVEDGIKFPTRNDIIRYKLYQELKNNGYKDLYTNQYIERKDVFTKKYDIEHIIPQSRLFDDSFSNKTLVPRQINLDKGNKTAYDYIFDAFGQDKLNEFLIRSKALFDLNDEGISKAKYKKLTMKGSEIGEGFIQRDLRDSQYIAKKAKEILFQITKSVLSTSGSVTDRLRDDWDLVNVMKELNLEKYRLAGLTEMQTTKDGKPKEVIKDWTKRNDHRHHAMDALTVAFTKRSFIQYLNNLNSRRHDEYDGISNSNNKKSIDTNSLRISSKDALGIEEKETHKINDGKGNYKRVFNEPIPNFRQLAKQHLEAVLVSHKAKNKVVTRNINKIKGSDKVQIALTPRGQMHKETVYGKIKQYAFKEEKVSAKFDEATIAMVSNPQYKSLLLQRLAENGNDSKKAFTGKNALSKNPILLKDGTTLPEKVKLMWLEDDYTIRKDIGPDLKIDKVIDEGVKRILQTRLDQFKRDPKKAFSDLDQNPIWLNEEKGIAIKRVTISGVKNAEALHVKKDHLGNDIFDEDGNQIPVDFVNTGNNHHVAIYEDEKGNLQEKVVSFYEAVARVNQGLPIVDKGYNNHLSWTFKFTMKQNEMFVFPSEDFNPNEIDLFDRKNQTLISKHLFRVQKFGSLLSGFWFRHHLETTVDSNNKLKGVTFKVIQSSNNLKDIIKVRTNHLGEIIHIGEY

SEQ ID NO: 5804 - protein, 1018 aa, unidentified
  REGION 1..1018: note = Description of Unknown: Cas Enzyme sequence
GEEEEENPNKLVEFYSLKIVEVIADEPQGGKTDIWYSLMLENGWIYRRASKTPLFDWKDKARDFIVTTDLNDDGSIKKDKDGNEKRSFRAPAETDWTLVKKKTEQEIDQSHKTVGAYIYDTLLQNPKQKIKGKLVRTIERKFYKAELKEILEKQKEFHPELKNDDLYNDCVRELYKNNDAHQLTLSKKDFVHLFLEDIIFYQRPLRSQKSSISNCTLEFKKYVDKDGVEHTQSLKAIPKSNPYYQEFRIWQWMYNLNIYRKDDDENVTQEFLNSSEDLEKLFEFLDGRKEIEQKPLLKFLLEQKDFKGKVLTAEIEKYRWNFVEDKKYPCNETKTMIATRLGKVENIADDFFTRAIEQKIWHIIYSVNDKIEYEKALKSFARKNNLDEISFFEVFKKFPPFKSEYGSFSEKAIKKLLPLMRVGKYWNYDHIDNYSKARIDKIITGEYDENIKDKVREKAINLTTESSFQGLQLWLAQYVIYGRHSEASIIGKWNSADDLEIFLKEFKQHSLRNPIVEQVITETLRVVKDIWVQYGKGAKDFFSEIHIELGREMKNTAEDRKKITNQVTENENTNLRIKALLAEMMNDADMENVRPFSPMQQEILKIYEDGVLNSDIEIEDDILKISKTAQPSSSDLKRYKLWLEQGYKSPYTGQIIPLNKLFTPEYEIEHIIPQSRYFDDSFSNKIICESAVNKLKDNYIGLAFIKQFHGAIVECGFGKTVKIFEADEYEEFVKKHYAKNRGKKAKLLLEEIPEKMIERQMNDTRHISKYISGVLSNIVRVEDGTDEGVNSKNIVPGNGKITTTLKQDWGLNDVWNELILPRFERMNQLTNSTDFTAWNDNHQKYLPTVPIELSKGFSKKRIDHRHHAMDALVIACATKDHVNLLNNQSAKSDTKRYDLKKKLMKLEKAVYNDAKTGERIEREIPKQFLKPWESFTVDARNSLENIVVSFKQNLRVINKATNYYEKYVEKDGAKTKEKVAQTGTNWAIRKPMHKETVSGKVSLPWVKLPKGKILTATR

SEQ ID NO: 5805 - protein, 1135 aa, unidentified
  REGION 1..1135: note = Description of Unknown: Cas Enzyme sequence
MEEKFQYRIGLDIGITSVGWAVLQNNSQDEPVRITDLGVRIFDVAENPKNGDALAAPRRDARTTRRRLRRRRHRLERIKFLLQENGLIEMDYFMERYYKGNLPDVYQLRYEGLDRKLKDEELAQVLIHIAKHRGFRSTRKAETKEKEGGAVLKATTENQKIMQEKGYRTVGEMLYLDEAFHTECLWNEKGYVLTPRNRPDDYKHTILRSMLVEEVHAIFAAQRAHGNQKATEGLEEAYVEIMTSQRSFDMGPGLQPDGKPSPYAMEGFGDRVGKCTFEKDEYRAPKATYTAELFVALQKINHTKLIDEFGTGRFFSEEERKTIIGLLLSSKELKYGTIRKKLNIDPSLKFNSLNYSAKKEGETEEERVLDTEKAKFASMFWTYEYSKCLKDRTEEMPVGEKADLFDRIGEILTAYKNDDSRSSRLKELGLSGEEIDGLLDLSPAKYQRVSLKAMRKMQPYLEDGLIYDKACEAAGYDFRALNDGNKKHLLKGEEINAIVNDITNPVVKRSVSQTIKVINAIIQKYGSPQAVNIELAREMSKNFQDRTNLEKEMKKRQQENERAKQQIIELGKQNPTGQDILKYRLWNDQGGYCLYSGKKIPLEELFDGGYDIDHILPYSITFDDSYRNKVLVTAQENRQKGNRTPYEYFGADEKRWEDYEASVRLLVRDYKKQQKLLKKNFTEEERKEFKERNLNDTKYITRVVYNMIRQNLELEPFNHPEKKKQVWAVNGAVTSYLRKRWGLMQKDRSTDRHHAMDAVVIACCTDGMIHKISMFVKGRELRFNRNLTIVDEKTGEIFTREQWDEKFGVKVPLPWNSFRDELVIRLEKDDPKNYLMVHMDMQREIDYPGWMFGEEESPIEEGRYINYVRPLFVSRMPNHKVTGSAHDATIRSARDYETRGVVITKVPLTDLKLNKDNEIEGYYDKDSDRLLYQALVRQLLLHGNDGKKAFAEDFHKPKADGTEGPVVRKVKIEKKQTSGVMVRGGTGIAANGEMVRIDVFRENGKYYFVPVYTADVVRKVLPNRAAMNGKIASDWKTMEDNNFVFSLYSRDLIHVKRKKVIPTILSSGATFKQEEFYAYFTGADISTVSIAGIANDSSFKFRGLGIQSLEIFEKCQVDILGNISVVRHENRQGFH

SEQ ID NO: 5806 - protein, 910 aa, unidentified
  REGION 1..910: note = Description of Unknown: Cas Enzyme sequence
RGARSVRRNIMREGRRKKAIRAALSDFGLIPADAGGEWFAARRDERTVVRLRPKALEYLLNSREFARVLYSFASHRGYIDHGKSDKDDDAGKVKKALAANHAALADGGCKTFGQYLAGQPRSRNRAGDYSYTADIDMTVDEVRTIFARQRELGSEIASEALEERYIAELTWLTDTSKRDMSTYLKVGLCTYLGAPYRRGATSTISFEMVRAHQTLCNTVILHADGTSSTIPGNIRIEIVRELFAVKKSVKPLKWSGLRRRLGLAECDSFKGRPAEEEKRDCIALPAWAVLCSGLYEGHRDLLERLHDHIDDADAVCSALTYATSAASLAGRLAPLALTDDEVEAIVDLPYSARLFSGYASASLEALQMLRGTLEDPCVTSLRQAEEDSGLAQARAMLAEERGGAADGLLCAFSDYDPTCKNPVVLRATAQVRRMVNSAIRHYGLPDVIRVEVARELKRSKHEREVVAESNRARRELNEQAKRDIVEFLGLPDDHHVRGRDLDMVKLYREQGGKDPYTGAGIDFRRMLEERGYAEIDHILPISRTCDDSQANKVLCLTKSNRDKSNRSPYEWMTSGEAAAPDWDEFCGRMDRWAKMCEPRRYVRKKLANLTCENLVERAGGFIDRNLNDTRYMSVALAKWLRECLPFARDGHEHVFCVAGGATALMRSVWDIGITGPDGKKNRDDDRHHAVDAAVIACCTPGIVKNVALVNEGHARADVRQRLFSDSLPYPEFKEQVDAWIPCIVPTLTLPNTFTGSVLKDTVYPYLGRDEAGKDLYLAVKRDKDGRIVERKVNKATTMWKDGRGGCRKYDEMCALDAVFDASVGKRGKWSFDPVYCIDIPHRDPEIRIMRAFSKEKAIDLWDTVEVPEGAPRMTIRRGDVLVCDGKAARFHSYNVSNGAIFTFANQSYNP

SEQ ID NO: 5807 - protein, 1080 aa, unidentified
  REGION 1..1080: note = Description of Unknown: Cas Enzyme sequence
MKTSFAFDIGTNSIGWCVLALDNANLPYRILDAGVRIFSDGREPKSGTSLAEGRRLARGMSRRRDRYKRRRKAVIRTLIEYGLMPDDPAARRALVAETNDKAPGKIASDVYALRARALDDKLPLHHIGRALFHINQRRGFKSNRKTDKRDNDQGKIASGISRLRDKLASEGMRTLGEYLNHRHQAGNWVRVRPSRVPGKDDKEEDGYGFYPERALLQDEFNAIWTAQAAHYPDVLTEERRTHLETIIFFQRPLKPVQVGKCSFNPGEERLPRAHPLFQEFRLYKEVNELELVDRNQDHHKLSLDQRDALIAQLKTQREAAYSALRKTARAPLGTRFNKETESRTKMKGDEVAAELSAKTRFGQAWISMPLEERWIIVDTLRRVEDPLELTAWLEQHYGLDGEHIDAILAARLPEGYGRLGETALTEILVELKAAVISEAEAARRAGYDHALLQRGAGLEALPKYQEVIARRIPPGTGNPDDPYDVEKGRITNPTVHIGLNQLQKVLNALIRRYGKPEQIAIELARELKLNDEQKREKNIEIARNTRAAEQRSAKLVELGVPDTGYNRVLLKLWEELNLRAPENRVCIYCGEPINIETLFSSAVDIDHILPWSKTLDDSQANRLVCHVACNRQKANYAPAEVPQWQGRYDDILARANTLPLNKRWRFGRDAMKKFADEETFLARQLTDTQYLSRLAHAYMAALYPDEEPDAQGVLARKNHVRVITGRMTEMLRRQWGLNSLLADHNQKNRNDHRHHAIDAAVVGVTTRALLQRIATVAGGREAQALEETIGKIEPPWPGFRDELQAVIKRIVVSHKPDHGTLPKPGQGGQTAGQLHNDTAYGLTGETDSRGTPIVVRRKPFTSLTEKDLPSIRDRQLAQALGSAIAGRSGKELQAALEQFRDRDDYKSIRHVRVVEPLNVIPIRDGTGRAYKAYKGDANYRYDVWELPNGKWMHEVVSMFDAHDRSWTSAVHIHHPAARRVLSLKQNDMVAYDHPQDGPTIGRVVKFSQSGQMTFAPHKEAGALKARDADPEDRFRYFYKSGSAMKDIGLRQVRVDEIGRVFDPGPRDKEARNARKKKSTD

SEQ ID NO: 5808 - protein, 1140 aa, unidentified
  REGION 1..1140: note = Description of Unknown: Cas Enzyme sequence
MEENFQYRIGLDIGITSVGWAVLQNNSQDEPVRITDLGVRIFDVAENPKNGDALAAPRRDARTTRRRLRRRRHRLERIKFLLQENGLIEMDSFMERYYKGNLPDVYQLRYEGLDRKLKDEELAQVLIHIAKHRGFRSTRKAETKGKEGGAVLKATTENQKIMQEKGYRTVGEMLYLDEAFHTECLWNEKGYVLTPRNRPDDYKHTILRSMLVEEVHAIFAAQRALGNEKATEELENAYVEIMTSQRSFDMGPGLQPDGKPSPYAMEGFGDRVGKCTFEKDEYRAPKATYTAELFVALQKINHTKLIDEFGTGRFFTEEERKTIIDLLLSGKELKYGTIRKKLNIDPSLKFNSLNYSAKKEGETEEERVRDTEKAKFAGMPWTYEYSKCLKDRTEEMPVGEKADLFDRIGEILTAYKNDDSRSSRLEELGLSGEEIDGLLDLSPAKYQRVSLKAMRKMQPYLEDGLIYDKACEAAGYDFRALNDGSKKHLLKGEEINAIVNDITNPVVKRSVSQTIKVINAIIQKYGSPQAVNIELAREMSKNFQDRTNLEKEMKKRQQENERAKQQIIELGKQNPTGQDILKYRLWNDQGGYCLYSGKKIPLEELFDGGYDIDHILPYSITFDDSYRNKVLVTAQENRQKGNRTPYEYFGADEKRWEDYETSVRLLVRDYKKQQKLLKKNFTEEERKEFKERNLNDTKYITRVVYNMIRQNLELEPFNHPEKKKQVWAVNGAVTSYLRKRWGLMQKDRSTDRHHAMDAVVIACCTDGMIHKISRYMQGRELAYSRNFKFPDEETGEILNRDNFTREQWDEKFGVKVPLPWNFFRDELDIRLLNEDPKNFLLTHADVQRELDYPGWMYGEEESPIEEGRYINYIRPLFVSRMPNHKVTGSAHDATIRSARDYETRGVVITKVPLTDLKLNKDNEIEGYYDKDSDRLLYQALVRQLLLHGNDGKKAFAEDFHKPKADGTEGPVVRKVKIEKKQTSGVMVRGGTGIAANGEMVRIDVFRENGKYYFVPVYTADVVRKVLPNRAATHTKPYSEWRVMDDANFVFSLYSRDLIHVKSKKDIKTNLVNGGLLLQKEIFAYYTGADIATASIAGFANDSNFKFRGLGIQSLEIFEKCQVDILGNISVVRHENRQEFH

SEQ ID NO: 5809 - protein, 1112 aa, unidentified
  REGION 1..1112: note = Description of Unknown: Cas Enzyme sequence
MKYILALDIGIASVGWAVLDKESETVIEAGSNIFPEASAADNQLRRDMRGAKRNNRRLKTRINDFIKLWEKNNLSIPQFKSTEIVGLKVRAITEEITLDELYLILYSYLKHRGISYLEDALDDTVSGSSAYANGLKLNAKELETHYPCEIQQERLNTIGKYRGQSQIINDNGEVLDLSNVFTIGAYRKEIQRVFEIQKKYHPELTDEFCDGYMLIFNRKRKYYEGPGNEKSRTDYGRFTTKLDANGNYITEDNIFEKLIGKCSVYPDELRAAAASYTAQEYNVLNDLNNLTINGRKLEENEKHEIVERIKSSNTINMRKIISDCMGENIDDFAGARIDKSGKEIFHKFEVYNKMRKALLEIGIDISNYSREELDEIGYIMTINTDKEAMMEAFQKSWIDLSDDVKQCLINMRKTNGALFNKWQSFSLKIMNELIPEMYAQPKEQMTLLTEMGVTKGTQEEFAGLKYIPVDVVSEDIFNPVVRRSVRISFKILNAVLKKYKALDTIVIEMPRDRNSEEQKKRINDSQKLNEKEMEFIEKKLAVTYGIKLSPSDFSSQKQLSLKLKLWNEQDGICLYSGKTIDPNDIINNPQLFEIDHIIPRSISFDDARSNKVLVYRSENQKKGNQTPYYYLTHSHSEWSFEQYKATVMNLSKKKEYAISRKKIQNLLYSEDITKMDVLKGFINRNINDTSYASRLVLNTIQNFFMANDAYTKVKVIKGSYTHQMRCNLKLDKNRDESYSHHAVDAMLIGYSELGYEAYHKLQGEFIDFETGEILRKDMWDENMSDEVYADYLYGKKWANIRNEVVKAEKNVKYWHYVMRKSNRGLCNQTIRGTREYDGKQYKINKLDIRTKEGIKVFAKLAFSKKDSDRERLLVYLNDRRTFDDLCKIYEDYSDAANPFVQYEKETGDIVRKYSKKHNGPRIDKLKYKDGEVGACIDISHKYGFEKGSKKVILESLVPYRMDVYYKEENHSYYLVGVKQSDIKFEKGRNVIDEEAYARILVNEKMIQPGQSRADLENLGFKFKLSFYKNDIIEYEKDGKIYTERLVSRTMPKQRNYIETKPINRDKHEDSKDGRKIIGLSKTKLVKKIRTDILGNKYSCSEEKFTSFANLKK

SEQ ID NO: 5810 - protein, 1065 aa, unidentified
  REGION 1..1065: note = Description of Unknown: Cas Enzyme sequence
MIQQVPRPFEIALDIGHSSIGWAVFQNGEKFDLLGTGVVLFPADDCLAIKRRAYRRQRRHVRATRQRIERLKRLLCHVGALPEAELDEPGCAWPWKLAAEVLSGSGRLLTWPELWDVLRWYAHNRGYDGNARWSRQEEDGEDTEKVENANSLMQRHGTETMAATFCAALKINPLGVTKSSQERFKGLSVAFPRKVVIAEMKCILGKHQNALRQLTPELVRALVGNDNYQTGEWDDGAWHAVVVPTVRLPKRYKGSYLFGQSVPRFDNRIISSCPTTYARILADTHDSKKAVRDSKVPAKKCREFLLFRWAMILANLTVNMGQGVRPLTAEERKAIHQVMIKGDPAIECEAGHLTKTQLKKAVIQKTGALLNNIDTYFLTPNAEDALKLRPEKSISGRAPYTRQVMKQAIREVFEGKHPTEKGNCLYLSDDIKQAQLQRTLDKKTNNHLVRHRVLITRRLVGNIIKSYAAADTFRIGRITIEVNRDLQAFSGKTNKEIEGELNQMLKDHSGVVKKLKEHLADTSYRITAGLIRKARIAEDLDWTCPYSQKRYGPIELASGAFDKDHIIPRSLRPSDSMESLVITSKAINAMKGNRTALQFIQEFEGKNIEGDLGVGNEKSNLMTVSNFKKFVDKLNTRASHRQDADRKKKRKALLLLERYEEKGFLPKDLTQTSHLVRLAATEIEKEFDGLENKPRIISLPGSVTGEVRKGWKVYGCLAAHNPEVQKLLDRKKDEPELNIKKELRDLTHLHHALDACVIGFASHFIPNEGNLWEILVKRNRRPHEDELLVQMGNGYFVRDAKGHACLHEFSPDLKQQITDRLAECRVVQHVPKRMGGLAGLEENTRGIMAIEVPDAEASPGKKSKEPKLKEIWNNASGQPLPVLEKLDAVVVKLQRFGPRDPKNHDKRERPPTYEKAAKLLGLCPKDGNGKLRAIKGVRVIDANFGLALWRKNGKPDGEPDKRVILWHKVWPQLNDIAQKENGGKWPQVLRNGNLISVPRGIYQGIWKVASVKASLTVDLIFPQKATMESKGYGQKREVSVKTLMENGMSILPHKLTGASSCPTTS

SEQ ID NO: 5811 - protein, 1034 aa, unidentified
  REGION 1..1034: note = Description of Unknown: Cas Enzyme sequence
MEYVLKTADSSSWKDHEFYTSALVLGIDIGLEGIGIYLRKGRQSLHARTYLFTLPETAPLENRRLKRSARRARSSRKRRNILLRHWCEKHGLPTSPFATPNHEPFRLRLDAITEGKGLKSPEALVVCLRHIMCHRGYDYHLTEEGTYPWGEGLNFGDILSWARTTACKPEYGKELKYLLSESGLAEDKLARLYAAIDEAVARYAENPILKALETHFREKKPNLRPPARKHNFPRELVREHLEEICRKNSRYFAQTNLEDALTELKEILDYHRKPPGALAERKIKECPYSERLGLAPNMKCASNDDPDVRKFKLLQFLSERTFIEKSGARMYAIPAVIQWTIRKVEEDVQAVATKQPRMDTRNLRRDFEKETQVVLARKETHNEDFFDQLRDLLKPDMIVLKKRASLGAISAQRLYATATQDGTSFDPTSIRTNLENYYQLRRDNERGYGVYPQVEFLLGPRQSNDKLAVHGLLKRLMTDDAVQGHLDGKACPDYVVVEVIGDIPRDKDEAREIQKDQKARRSFKDKLFEQLKGKSSSSAHKRLLLFDQQNGLCPYTGKELGDALNTQLQIDHIFPRERGGISEMVNLVLTHGPTNSDKGKRTPFEFIGRDGVHPYLSKMKWNRAKRELFVREDAECPPWQNTTRMAQLARQLRDEVAHWLNIKGDATEMARRIGTPTGYMTSVCREAWGVPKKNRNDLRHHLYDAITLSYIPPGKGLNTVQYGGIFYYPPESKAGSIEMRAQQKAGPAPEIFERLPSDECLVIKSRRKKSKQSRMEETIYGQDREGNLWSRKPLLENATNADDASVPVKNAEKWLASSGIPAVKLSSKRIRDWAEHSGQKQLKLGDGTPVYRVPVQAGAEQPTSLIAHFNTLKKEPIGFKVATEGYLRCEIWSGSVKDKQGKLKTVFERLLIPHPRNIRNMRKRGENWKPKFSRPFLRHLELKGKFSKGDLLRLPLTVDGAICEPKEKVFCCLWYRVTALKTNGQIEFQLAEFKDKSATPLANCDKDVMQQKPSSAEVLAYVLNLNTSETVKST

SEQ ID NO: 5812 - protein, 1436 aa, unidentified
  REGION 1..1436: note = Description of Unknown: Cas Enzyme sequence
MSKKILGLDLGTTSIGWAFVTEAENDKELSTIERIGVRVNPLTTDEQTNFEKGKPVSVNADRTLKRGARHNLQRYKQRRTNLINVLIKNNIISTESILAENNKDTTHSTYALRNKAASEEINKGDFARLLLMINKKRGYKSSRKAKNEEEGQAIDGMAVAKRLYEENLTPGQLCYLLLKDGKKALPDFYRSDLNAELNKVWHFQKQFYPEILTDEFRKTIEGKGQRATAAIFWVKYGFNTAEIKGTRDEKKIKAYEWRSKAMHKQLSKEEVAYVITEINSNINNSSGYLGAISDRSKELYFNKETIGQYLYKQLQANPHTRLKNQVFYRQDYMDEFEVIWETQAKFHKELTPALKDEIRDIVIFYQRKLKSQKDLVSFCEFESKKIEVVTDGKANTKTIGYKVAPKSSPLFQEFKIWQNLNSLLVQNKVTKEEAAFDMEAKQILFDELNVKGNLSKETILSLLGYKSKDWELNFSTIEGNRTNQALYEAYLKILELEGYDVKELFEVKPDKDDVKLQELTGPTSEIVKIVRSLFETSNINTAILDFNAELDGKAFEQQPSYQLWHLLYAYEGDNSPSGNEKLYELLQAKFGFVLSHAKILANISLSDDYGSLSAKAMRKILPFMKEKKYSEACMLAGYNHSSFLTKEENENRPLKATLELLPKNSLRNPVVEKILNQMVNVINAIIDDPGLGKPDEIRIELARELKKNAKEREEMTAQINKSTAEHDKIRQKIITDFGIKNPSRNDIIRYKLYEELVFNAYKNIYTNEKIDYQDLFSKRYDIDHIIPQQTLFDDSFSNKTLIPRQVNLRKGNKTAYDFISAEYGQQALKEYEDRVKGLYDFYVKDRPAIKAKYKKLLMKALEIGQGFIERDLRDTQYIAKKAKQMLLDICRTVVSTSGSITNRLREDWDLVNIMQELSMDKYRNLGLTEMIEKKGGGTKERIVDWTKRNDHRHHAMDALTIAFTKHSHIQYLNNLNARKQEDKKGKEIHGIEQKETYIAIDDTGNKKRKFKSPLLHFRVEAKKHLENVLVSCKAKNKVATKNKNKFKTKAGEKTKIELTPRGQLHKETVYGRLKQYATKEEKIGAKFDKEIIQKVASEKHRNALLQRLAENGNDPKKAFTGINSPDKNPIYIDETKTQTIPEKVKTVSFEYQFSYRPKEGLTPELFKDSKKNDDFYNRVNSIYDKGIRNVLIKRYEQVKEEVEKHNESIKSSKEKKKVLEEAFSNLDKNPIWLNKEKGISIKRVTTTGVKTAEALHHKKDHLGKPILDKNNNKIPVDFVSTGNNHHVAIYKDAEGNLQENVLSFYETVERVNQALPVVDKSLNQHLGWQFLFTMKQNEYFVFPSENFDPLEIDLMNSANNKLISPYLFRVQTISIVKYGNNTIRDFKFRHHLETTIEDKKELKDVTYRQIKSLPPLEKIVKVRVNHIGQIVKVGEY

SEQ ID NO: 5813 - protein, 1278 aa, unidentified
  REGION 1..1278: note = Description of Unknown: Cas Enzyme sequence
MKDHVLHESPSFLTGLVFGFDVGTGSIGYSVRCGATFLDVGVLICPEDTSKLDKRRGSRSQRRRLRNRSRVRDWLAEQLEEKLGLPSPWVKTADGGIILKSGLNRARFSNPVLLRCEALQGRIETPEELHAAIVHLWKRRGKTEVPWKQGEAKQETAEQKEEKKIIAKKLNALAKEMAAGDGAKNPDGSPKAFEYPCQLLLHRQKLGIKQRDEVWPRDEFQKPFDFNLKNEFIAIIKMAAGLKNENGGQRFPKFSGADAEWILYGDTQKITNKGQERHVYFKTTECENPGVLGLRWPRFDNRNPGLDLLKPLDELDRPLHVVRKNKPVFRETQFEQALFDFRVIDKVSGKRVLPDTASLNRLRQIYDLAKRKSKSDDLKISESVIKNWVKEFTDKYELIDGQSELVSRAGDGRAKFSSATLRDIKQVLEKLSAGQKVEAIQPLLRIPNKESKEQAMTRFLGDIRHGLVRHRLNLFLQMLHRLIKEHGKPDFIVIEAVRSLAFSEKKKDEQKNEQKKNRVDRDQIYQKLKDEENSTSKDAMLRYRLARDAGFECPFCRQSFDQGDLFNGGVDISHLYPKSLTPCKEYYNLTIAHTKCNRTDMEAKIPREAFGADPLWPAIEANARKRFFGKKLELFLAHTREDAEKLIESKAPLAATAYISKMIRRLCLIDLEWQGEDGRDPTNKEGNIPSQRFLVTNGEITARYRDTWKLNEILHKPIPTFTDEEWNNLTAEEQQAHKEARKRRFEKNRGDHRHHALDAMVISCTWPAYAQRVHNATKDWQDKGWWYFDRLKNQLMSRHPLFESFELMKSAVTEWMNRQITENRIRHHASKSNHGRAYKTSFFSQRPGIQMIPRSAASAELSDPTKPKKQKNIKLRLKSNSSERELELNEEEANDYNLLLSEKGEAVAKSLAFNRELPCQIAARVKTESLRLGAEKLQQNFYLLREKLVDISPKDLRLRKVHPPEFSDYLYTAWDRYLENLYSYVEKAAAGFLKTFDAHTNVKLVTKQFANRLEWSDFKVWLKDKLKEPVLAKNEAVDRITLNPKAMPEFKKNQAGAWMAKLPEPEKLLKTMPEDFQGRLCFSHYQNWSQKRPAGFDFPKRVITPIVHVRYRQPVNDNSVAIGPKTIPGWNGGHVYVKRAEVREVWLMPYANGAGVVPVFVPYSKQDKPFSNYEFVRDAKPLAVLRKRGIVHFAKDYSSAYKVGDYVVTVLGESVAKFALPHVANTKEALIANGFPKSGLQAKWHMLIPALGFEFPKMVAATEQITDEEEDEEEQDEL

SEQ ID NO: 5814 - protein, 1040 aa, unidentified
  REGION 1..1040: note = Description of Unknown: Cas Enzyme sequence
MKINISSNANPFLTGLVFGFDVGTGSIGHAVRRGSHFMDVGVLICDSEGSDLSKRRDLRRQRRTLRSRKFRRKWFADELAKLGLIKPEIPPHDPISLRLRALNGEALKPEELHAALTHLFKRRGFSKVPWANEEKAAKENAKPKNDDDEGEIKEKVNEIIKELAGKYPCQLLAERRTESGKSPAKEWARKIYWPREILRDEFLAIAEAQKKYFPELAGKTGWLLYGDSQPKKKGEETYHVFFKTTEAQNPGVLGLRWPRFDNRGPALDSLQPVDDQGRPLHVVRKNKEAFAKAQWELALMNFRVLDIETRQKRDPRTDFPIFIENLRNEWNKKGKVTEARLKKLAEPFKDKFLLIEDQKPLAPETGAGRARYSSPTLELIRKEIGEGRRVDPPQPILRRKGESAEQALNRYLADIKHPLVRHRLVLFRRLLSQLVSQYGQPDMIVLEAVRSLALGQKAKNELNKRNEKFRKEREVAREQLSSNNESISRKAIQRYRLWQEAKGRCPFCQQTIERTDLGHGADIEHLVPRSIVDCNEFYNLTVAHIKCNRELKGDRTPFAAFGGTSQWEGLKANAENCFGGRKLEIFLSPNAEELIEQKSDLQHTAYIARVIRHIALIQLGWVNDAGRDPTPDRQNAALSFQVTNGQLTSRLRKAWGLNQILHPLPPGRRWDELTDEEQNQFTEKNRGDLRHHALDAMVIACTLPWLAHRTHGAKDELGRHGWWTQDEKQRSKAANPLFPNEGEMHDAVKKEIERVVVHHHVSRSIHQRTYDTTIYGRPKQNGVPVPDCYVSREPITALKPADLKSPKTGKSKVFPPLLGDYLAMAWESYCETEPDWEKQIKANKNCLPEAFQKRLCFSDFQRWRADDAPSFRWPEKIMIPIKRVGYIGVENDSAVAPASPGTHGYVARGSFREVHLHPSEDGKSIVPVFVPLWRLDKPIPKAPIRPNSKPIATIRRGQTVEIKNSPGHNTPLGKYRVASTMQQNIKLLPVYLADIKESLKASGFLENGVNISWDTFIKSAGYELPHPPPVKPQSESPDQA

SEQ ID NO: 5815 - protein, 1022 aa, unidentified
  REGION 1..1022: note = Description of Unknown: Cas Enzyme sequence
LKYLESNYQQFLNGTAFGIDLGTASIGYAVRKKRDFPQVGSLLCSEAINDLSKRRELRRQRRTLRNRNYRRKWFARELSQLLGLIQPINLPDDPISLRCRAVLGDEMTSLELFTGLVHLFKRRGYAKVPWASGETRKTDPDKKKEEGFIQSAISELEQEMESTRSTYPCQLLSQRREEKGTSPQDHWARKIYWPRDLLEKEFRATLEAQKSRYPQLCEKTDWLLFGNTKERRGFHVFFKATEGRNPGILGLRWPRFDNRSPGLDALRPVDDLGRPLHVVRRKAQAFVDAQWQVALQNFRVIEIATGAKLRPDAISLARLKQLYDLKKKSVSIKIPVKLLETWEKEHASKYKLIEGQTDLTPGGSGGRARFSTPTLLTLGQDDTPTNAQPILRRAGESKEAALDRYLREIRHPLVRHRLILFRQLLAKLVKDHGEPDFMIVEAARSLADSKEQRLARVKRNREFQQDREDAVDKLTHFDHSTSRKAILRYRLWKEIGSTCPFCLEKNIEVSNLFSTADIEHLVPQSRVDCNEFYNLTIAHAKCNRELKGNRTPYEAFHDKPNWPAIQENARQCFKGKKLELFLSPEAETKIEEKADLQHTAYIARAARHVALIQLGWLGEDGRDPTPEKQNPALRFQVTTGQLTHRLRQAWGLNQILHPLPAREAWDAMTPEQQQEEKDKTAQKNRGDLRHHALDAAVIASTLPWLAHRTHGAVDQNGNHGWWTQDEKMRSKAANPVGLDFLTVKRLMEAADIKQHVSRSPHQQAYNTTLYAKKGQDCYAAREVFTSLTPKNLEDIYPETFREYCRAAWNRYKEEAVDLDKELKASKKCLPSAFTAKLCFSHFQKWRANDAPEFTWPREIKIPIRNVRLISVKDDKAVMCASLGTHGYVKRTSFKEVRIHRSADGKALVPVFVPFWRKDQPFSDYEGDLNPTPLRVIRRGMIVQTIKPFSNGQPAGKYRILVTGQVQLRLVPHHLADTEEACLAIGLPKKGLQPYWPDFIRALGYELPHTPPAQPQSSDSGQA

SEQ ID NO: 5816 - protein, 1103 aa, unidentified
  REGION 1..1103: note = Description of Unknown: Cas Enzyme sequence
VSLNTYFRIPHSAFVFAIDLPGHRRSIASTPQRENWQRGLAMKDYVLNKKPEPAATETVWAFDLGKGSLGEAVRRGNEFLHKASLLIPAEFAETKTAAGRRRMFRTREAHKARERWLNEVMREAGIEILHGRNYDAAGNWKPGEPADKRLEQEFPAPGDDTCYTSCLLRIKLLCGEKLQPWQIFKAFHSAIQRRGYDKDIPWKNREARKAKDADDDDAGTEQRMHKFEQDLESMAPGKTDFHFPAYFDAYQMGLWNPAKPNELKLRSDCHAKTTRNQIVPRKLVEAEIRQMVEGAAKHYPALAGKADYLLYGIAQQSYASIKPELRQKFKLREGGATDWQGVVGQKIPRFENRIIAKCVLIPRLNVCKLREGEKGQPHEKSLVAVEVAFLMKLKNLRVQRPGGNGWLSAKEIRAILENPTRTDWKFTKSAWKKLCVTIGAIPLPGHDEIESPRFSGRSRFCRPALAVLKRLILSGKKPSEFLQEEIARLNGNKDPLKGLIEADLKFISDMAAKNDAWEGIYIPNQQLDALVELSNNSDDAITRLIGQQNDPVVRHRLGVFYKRLLELEKSTKSRPNQVVLEFVREDFMGKKAKIEYFSFIKRRAEERIKAREEAASAGATEKSAGLKLELMRAQDGCCLYTNEGLVPSRLDEYQIDHIVPRSKGGPDAVVNYVLTTQKANEAKADRTPYDWFHQEMPDKWDAYVNRVRARATHLRNKKVQLLVALNAAELAEKYTALAETAWIAKLAQAIVGLHFGWRNGVDENGNKRVTVISGGLTGRIRRKYALNTILNPNAKTEEEAEKKNRDDDRHHALDAMVISFIPSWVRDAMKEKFFRFPEPIHQNAKGFFEKEIQSVKPRNIALQKPAFEETIYGQRTIDGHKFIVGRESLASLAIKTTQNSETIKKVSDIEFGRIVDAKIQKDVKEFWELNPTATLESWKKWCADYRLGANGPRVNFILVKKSKEDAVDEYKNVSKAGVSSERGQYKRGAKHRGYYIYERPAPTRKEPNKMQIEVCPVFVFQSKKAVQENLLKQTGIKMHGYFESGCQVRTKQEWEFQGKKYPADEFILGSVWANRNAKLWHPIHQEVGPVGLRILLDAGFERI

SEQ ID NO: 5817 - protein, 1060 aa, unidentified
  REGION 1..1060: note = Description of Unknown: Cas Enzyme sequence
MIQQVPRPFEIALDIGHSSIGWAVFQDGEKFDLLGTGVVLFPADDCLAIKRRAYRRQRRHVRATRQRIERLRLLLLHAGALSEVELKEPGCAWPWKLAAEVLGGSGRLLPWPELWDVLRWYAHNRGYDGNARWSRSEEADSDDTEKEKKAISLMEEHGTKTMAETFCRVLKISPLGVTKSSRERFKGLNAAFPRHIVYAEVRSILEKHQGVLPQLTPELLRALVGHDQEQTKTWDDDAWQALAVPTVRLPKRYKGSYLFGQSVPRFDNRIISSCPITYQRVLAETGDAKRAARDSKVPVKKCREFLLFRWAMILANLRVNKGRGMEPLTGDERKSIHAVMVKERHLTKKELKKVLNEQTGALLGNNVDTCFLVPRAEEALVLRPDKLPSGRAPYTRQVMKQAVREVFEGKHPTEKGNCLYLSDDIKQAQLQRTLDEKTNNHLVRHRVLITRRLVRDIVKSYMGGAPAQVGRITIEVNRDLQAFSGKTNKEIEGELNQMLKDHGNVVKKLEKDLAETSYRITAGLIRKARIAEDLDWTCPYSQKRYGAIELASGAFDKDHIIPRSLRPSDSLESLVITSKAINAMKGNRTALQFIKELGGKDIDGDLGVGKEKSNLSTESSFKKFVEKLNTKASHRQDADRKKKRKALLLLEKYEEKGFLPKDLTQTSHLVRLAATEIEKEFGDLDDKPRIVSLPGSVTGEVRKGWKLYGCLAAHNPEVQKLLVRAETEELNIKKEMRDITHQHHALDACVIGYTSHFLPNEGGLWEALTKRNRRPDETDLLLARRIFSRDSEGRARLAHLRDEFKQQITKRLGECRVVQHIPKRMGGLAGLEENTRGITAIEVPDAPAGSGKKSKEPKLKEIWNKESRQPVPDIQNFEGVVVHLQQYGPRDPKNHEKRERKSTSEKAAKLLGLRPESGIGKLRAIKGVRVIDANFGLALWRKDGKPDGEPMTRIIVWHKVWPQLKAIAEKENGGKWPNVFRNGQIIHIPTAKGQSDYRGYWQIVSIKNNESGMALDVIRPDMTKLRNKVEWAGINVSVNTLVKCGMTAVNTGLTGVSLNM

SEQ ID NO: 5818 - protein, 1377 aa, unidentified
  REGION 1..1377: note = Description of Unknown: Cas Enzyme sequence
MDKTDYVLKNKPEPVSKEIVWAFDLGKGSIGEAVRRGNEFLHKASLLIPAEFAETKTAAGRRRMWRTRQAHKAREQWLEKVMRDAGIEILKGRQVGKVDGKWAETAKGDPRLEREFPAPGDDTCYTSCLLRIKLLRGEKLEPWQVFKAFHSAIQRRGYDKDIPWKKRESRSVKKDGDDEDAGTEKRMLDFELALAKMAPGKSEFQFPAYFDAWKMGLWNPAKPDELKNRTDCRAESTRNQIVSRQRVEDEIREMVAGAAKHYPALAGKADYLLYGPTGTSYASTKPEVRKEFPKLKLREGAVTDWQGVLGQKIPRFENRILNDCALIPRLHVCRNPSRAEYKELPEEKLLPAQVTFLMKLKNMRVEEKTPQRKQRGLTAAQIKEIFEKYNPARKYSLTSTQWKRWCEEFDVVPITDAGEKGKGAGDETGDEKKKGEKNIIEAPADSGRSRFSRPALRILKSLILSGLKPSEMHQKLLGRDIGLLAEIGMDILDKPPIKEKKDASSDVVQNYTKQPRPWLLVSDLSFLLAMRKTGANEDSWEDLFIPNQRLDQVVHEITTGGDSDAKAERQRRDKAIQKLIGSQNDPKVRHRLTTFWERLQLLEKEHGKPEQIVLEFVREDFMGKKAKDKLKKFQDERAESRKNAREHGGLKFELYQAQGGLCLYGKQVIKDGKCVYLENGLPMPGTPGWDNLVIDHIVPREAPYNGPDATVNYVLTTSDANNAKRKRTPFDWFQQDRLAEWDGYKNFVTSKIGTLGGKKVQLLTRSDAAELVGKYTSLAETAWIAKLAQTLIRLHFGWPLEHERGKERVTVVPGGLTGRIRRKYLLNTLLDERFKNLPTSQMKPEDEEDAEKDRQDLRHHGLDAMLISFFPDWMRNPNKGDFFRFPQPLDQPFPGKRNKHAVREFFKTQLDEVLPENLFLEKAKLAETAYGRSFQPEETAANGEMVKYKTTKLPLVELAYIKNPEGNATYDYTHARRTARGISDEKIRASVEAFLKTKSSEADWAAFCQKFEAELASQQKPGKAIKIEVRKVEEVRAHRVSVKDMAYEQGNSRQYDVLYARENVNEIVEDLPEQKIIKAKLRDFFTDTPSEAQWKSFAETLKPIDRCKLRSEFDEGGKKSKARTVKFVVFAHRPIPMKFNLEKAQARIDKICDEHVRQHLRAFINQNPPPDQSAWNAFCDSFAHERKDESGNLLKDAKDNVLYGAAIKKVRVNDGSPDEYKDFSKDGTGTFYKNKKEHKGQFVYVVDDGTPDGAVNVRPVYVFESVQAVKKNVEAVAKFKSLTGYFQSGCTVGIKEPVPADSYKLVVWIKVDDKEKKRRIAATAPLAANSKFMLSTIITASQAAEMQMADGTVIVFKNLEPLIKAGLHRVYRKSETE

SEQ ID NO: 5819 - protein, 986 aa, unidentified
  REGION 1..986: note = Description of Unknown: Cas Enzyme sequence
CGLPTRLKIKEDSDEPKNKKGEDTNAPKNLYALRKMVEHEFNTIWDTQSKHHDILNSTHEGKPIREFFYDALFHQRPLKSAADLVAQCGLEPTLPRAPRAQMAFQRFRIEKTLADLRWGAGKRAIHLSPKEKEVIRNILNDPKSLDDGKKKADRNGSISFESIYEKLEAAGQPRPLGKGLNLERASREELQGNKTLYAFHQLDEYSSIKHPEHSANLEQAFRAMDDKTQIAVINFLAELGSPEQLDDPEWHTSFVKRDGKPRQFSEPLIDFVNRIKEHDQFDRLSKMDFDGGRASYSVKALNTLADWLEDPNWPGDWQDSMKRMDEEAAIRVCYPKSLNREIKRMEKLPAPESTGNAVVDGSLRQIRRTVNRMIAELGAPPEEIIVEMAREMSLGISRRNERESENTKLQKMRKNAEKAIRDRNAVPTPSRIRRYLLWEEQATHCPYCNLTIELGDALDGGATEYEHIIPKSLTQVGMKRSEIVLAHHSCNQAKGDRTPWEAWGDGRNDARWQSVEATAARFDAKKNFRKAKLLRLKDFEREVLTDESVDGFADSQFHHTSWIAKEAAQWLECLCPNRVSVSRGELTSMLRRCWKLETVIPEVRYESNLPVLDTGGKLDDKGKALSAQPISQDEFNILKKYLEGHPVRSEDRKANPDFDFNRRPDKRLDHRHHLIDAITLALTSRGLFQKMAKNYKAASEEILPRDGESAEDRERRIKTHTRLRLEAPEPPLRNVRAAALDAVRECQISIKTDHYQTGRLFQDFAYRVIFPDGDIPARLARKKSVSDLAGDTAEQTRKNINDIVSSSILKIILEEFDKRKDTGKSIKEIFSAPFFNREYRTEIKKVFCLQKIGRGYMSTDGTFIVQHPLPTPKYEKRLLHDGYAYLEMVLENGKFKSAHPVTQLEGQQKTTTSSPVETVRFFRSDTVMDSKNGKIYLVRQIKAQSGGMLIMAPITETLGVADLSSEYGLLTASGSALARFRIINDV

SEQ ID NO: 5820 - protein, 1019 aa, unidentified
  REGION 1..1019: note = Description of Unknown: Cas Enzyme sequence
MNDYVLKNKPEPGSNDKFLTGLVFGFDVGTGSIGYAVRKGSDFKDVGVLICDSEGSDLSKRRDLRRQRRTLRSKKFRRQWFAKELAKLGLPKSETALDDPISLRLRALNGEMLKPEELHAALTHLFKRRGYSKVPWANAEKAAKETAKPKKDDDEGIIKEAVKEMKAKLGDNHPCQFLAEEKARVGNSPTTNWARKLYWPREVLRDEFLAIVKAQQENFPQLAEKADWLLYGDSQAKERNGETFHVFFKSTEARNPGVLGLRWPRFDNRGPALDSLQPVDEQGRPLHVVRKNKEAFGNTQWELALMNFRVLNFDTRQKRDPRTDFPIFIENVRNEWNKKGKVTEARLKKLAEPFKEKFLLIEDQKPLTPDNGAGRARYSSPTLNLIHREISEGRRVDPPQPILRCKGENAEQALNRYLADVKHPVVQHRLVLFRRLLMQLVSRYGQPDMIVLEAVRSLALGQKAKNELNQRNEKFRKERENAREQLSSNNESFSRKAIQRYRLWQEAKGRCPFCLQTIERTDLGHGADIEHLVPRAIVDCNEFYNITIAHIKCNRELKGDRTPLTAFGGTSQWQGIKANAENCFTGRKLEIFLSPDAEQLIEQKSDLQHTAYIARVIRHISLIQLGWLNDAGRDPTPEKQNPALSFQVTNGQLTSRLRKAWGLNQILHPLPPGKRWDELTDEEQNQFTEKNRGDLRHHSLDAMVIACTLPWLAHRTHGATDEFGRHGWWTQDEKQRSKAANPLFPNEGQMHDVVKQEIENVIVRHHVSRSNHQQAYATTLYAKKAKDTYVARDKVNELKEKDFTDIYPKELGYYFQAAWSRYVEEEADSEAQLKRTKDKLPETFTKKLCFSHFQQWRAGGAPTFHWPKEVKIPIRNVRIIAVKDDMAVVPFSPGTHAFVKRKGFKEVQIFLAEDEKSFVPVFIPYWKGDKLISEKPIKPNTKPIAIIRRGMVVETKKAFSTGQPAGKYRVLVTGQNQLRLLPPHVANKEEAILSFGLGKKGLQPYWPDFVRALGYELPH

SEQ ID NO: 5821 - protein, 1087 aa, unidentified
  REGION 1..1087: note = Description of Unknown: Cas Enzyme sequence
MDAKKITSERISPGKSCVADLELAFDVGHSSIGWAVLQDRKTVDLLGCGAVVFRANDCLASARRAYRRQRRHIRSTRQRIARMKVLLAHLGVLTKAQLDQPGCAWPWQLAARVLRGGKLLTWPELWDMLRWYAHNRGYDGNRRWSAAESEAASEDTEKEENAKTLMNKYGVHTMAETFCAMCGIDPLGEKKSANLPGDKRPKGQNAAFPRATVESEVRRILQVHFGKLSQVDAHLERALLGQSNQDKTAWQAIPCPNLKLPKRYEGALLFGQLVPRFDNRIISTCPISGEKVPSRNCSEFLNFRWAMQLANIRVSRLGEKEISALTVPERRQMDAIMRAQGSMGVEELKKQVREVSGAIRDNLETMFMHPDAKEALLLDPVTKLIQSSEVRPFWALLPERLQKRTRGQWRRGKSISILKLRQQLSELGGDTASFDDEVTRQLDRVNTRGRKKDKPATRGEFLSQPLSVKKLDQRAAFARPLLKKAFDEVMAGKHPKEEGGCLFITEKMREAQLTREIAEQTNNHLVRHRLLILERLLADIVKEYAAGDKARIVKITIEVNRDLREMSGMTAKQKAQDLGLRIANHHHVVQKLEEDESLRNILQKRRAKITAGLIRKARVADDLDWTCPYTGQRFQPVDLVTKRVDKDHIVPRADRVSDSLDSLVITFSAINKWKAKRTAWQFMEQEQGKSVPDLPSLSIMSLGRYKQLVEGLETFKGHDDDKRRKKKRKALMLLSAYEEKEFTPGDLTTTSQLVRLGAMALKKAFLDCARKPVVVSLPGSVTGAVRRAWRVMGCLSLANPQVLDENGEVKKKDEIRDITHLHHALDACVLGFASHFIPNDGRTWELIVKRRWTPAEENALKALGIFDKDSEGRFQMRDLDNELKEQIRQRLSEKRVVQHVPARMDGLRVEQNMWRVVAVKAGEASLQQRIRQPDGTRPVERGEEKVGKLLGLEPTGGRGKLKANKGVLKIPENFGVALDPQPAVIPFHKVWTRLQELKAAMGGKLPRILRNGQIIQVRKGRYQGIWRVFSAKATLTLDLGTPDKVRLESKGEGQKREVQIKTLLRDGMVLMRTPLTGISVCPTTSSA

SEQ ID NO: 5822 - protein, 1062 aa, unidentified
  REGION 1..1062: note = Description of Unknown: Cas Enzyme sequence
MSTELVPSDYILGIDLGSNSIGWAIIGLSQGKPSGLTRAGVRVFDAGMEGDLESGREESRNVARRDARMQRRQMARRARRLTKIFHILQRIGLLPPADLKTPEQRQEFLNHLDSNIIASDWFKTKRAANNIDEIDQVIPYLLRAAALDEPLDPHHLGRALYHLGQRRGFLSNRKKPMKKGEDEGVVKESIAELRQKMQESGARTLGEYFMRINPFERRIRQRWTHRDMYEGEFEKIWEAQAAHHPSLLTPERKKELKRAIFYQRPLRFPRELVGHCELEPEEIRAPRHYFIAQRFRLLQGLNNLLLAMPGEAERCLTREERTKLDNELELKGDHTFGQIRKLLGLKRATFNLENGGEKLLRGNRTTAQFCKVFGERWLEMSAGEHEQAIQDARSIVKDETRLRRATEHWKLDPDHAKEFAAISLEPDYFNLSRKAMERLLPLLETGVSYATARRELYPERFQAREPVPILPPVHDVFEYVRNPAVERSLTELRKVVNALVRQYGKPAQIRVELARDLRKSRKEREANWKKNRDIEKSRKDMAERITAEAGITNPSREDIRKALLAKECGWVCPYTGRAISMRALVGPDAQFDIEHIIPFSQSLDNSFFNVTLCYHEENRNRKRNQTPYGAYGNEPEKYQEILDRVRRFDSDLADEKLKRFQLKDTADILQGFVDRQLNDTRYASTMAGDYLGFLYGGKVDSQKNLRVRATTGQVTAYLRDEWMLNRILRDGPTEQGGKVAKSREDHRHHAVDAIAIALTDEGTIQQLSRAAQQAPQLGRRRFAPVQAPWPDFVDSVRAEIGRIIVSHRPNRKVSGALHEETLYSKSMPVPDSLKSQEKAPRVRKPLERLSKSEVEDIADPIVRKMVQKKLEQLGGDPKKFSVPGNLPFFKTADGRKIPIKSVRIIKKTPTFSLGMGSRMRNVTSESNHHLEIFAELDEHGEEVEWEGVVVPLAEAYKRLRTKIPVVQKDFGAHRRFKFSLSPGEVLECDGKAGNREFFVMRKASQLSAGQLQIGFAPVNDARKAREMQIARTWLWANPETLRQRRPQKVAMGPLGELSKAND

SEQ ID NO: 5823 - protein, 1096 aa, unidentified
  REGION 1..1096: note = Description of Unknown: Cas Enzyme sequence
MGAKIFQDLELAFDVGHSSIGWAVLQSSAGVSTAANTPRVNILGCGVVTFGADDCLASKRRDYRRQRRHARSTRQRIAQMEKLLAHLKVLSAEQLKQKHQQAGGHAAPWFLAARVFASNGDAKHLLDWTKLWDVLRWYAHNRGYDGNRRWSAQEAEAQADDTEKEKQAIALMEKHGTHTMAETLCKALGLEPLGDKQSSKENFKRLNAAFPRPIVENEVRRLLELHQKKLPAITSAFLKSLFEDWRAAGISDLKLPARYQGGLLFGQLVPRFDNRIISTCPITGEKVPSKNCPEFLKFRWAMTLANIRVTGAKEKELRSLNADERKKINAVMENEGALTPTQLKKAVRETTGCTCDNLDTMLMHPDAKDALLLDPIKKLIRGDRLATLWPTFSPRVQKRARDLWQRGKLVTLERICGIVQKLGESLADFEAELNKLSDAANTKRSKKAGSFNRDALLKEPLMIKKSDGRAAYARPLLVRAYAEVMAGKHPKEDGNSLCVTEEMRKAQLQKQIDQQTNNHLVRHRLLILERLLKDLIAEPTFANGDKSRIARTTIEVNRDLREMSGKSAKEIQQDLGRRLANHHGVAAKLEMELDGRTFNGKPIQITAGLIRKARIAEDLGWTCPYTGKTYDAIDLVSRQVDKDHIIPRSLRPSDSLDSLVVTFAEVNKMKGQRTAWRFVSDEQGKVVEGSPQLSIVSLTRFKQWAESLESYKGHDDDKRRKKKRKELLLLPNYEEKGFVPRDLTVTSQLVRLGAQIIKKSFAGVEKPPGIVSLPGAVTGTVRKGWNLLGCLELAAPQVKEADGSIKNKTDIRDLTHLHHALDACVLGLASHYLPNNGGLWEVMIKRNPNDAEKALLRSTGYFDFDSQGRFGLTELPDALKEQIRQRLAEKRVVQHIPADMSGLRVEENTRGITAIKDGRVFLRQQSRDAKTGKLSIKPTEESANKVIGLKPGKLTPQKGVRVITDNFGVAILDHAAEGEEKFVIVPWHKVWPRIQELKPKNSGKVPRLLRIGTLIRVPKKAGRSDYRGLWMVRGVQLNQKAGFLVDLSSPDVIQYRVSKRDDCAQNIRLQSLYDGGLEILKTPLTGVISSSLKPAE

SEQ ID NO: 5824 - protein, 930 aa, unidentified
  REGION 1..930: note = Description of Unknown: Cas Enzyme sequence
MSSMQNSKDYFIKPTAWNPAIDWASHEFYKSAVVLGLDIGIEGIGVWLRKGPNPLFYRTLKVTLPDAAPLEGRRGKRTGRRTRQSRKHRDYLLRQWCQKWGLINEKDLQRLFVAPKKGESSETHKPFDLRLRAITEGKKLGGPQALVICLRHIVRHRGFDYHLTNDGTYPWGDELTPSKVEDWAKRSVCSPSFKQEILQMFQTQGWLEKGKRNDSLSDEKRAELEDENRKRVEEKLDAAVAKYLDDPIRHAIEENLREQRNTNLRTAIRGEENEHPRELVKKHIKAICDKHADFFGGEEKMKAALAELIGADFGKDGNANRDFDENCIIDYHRKTENERRKHAQRKTGKCSFAERLFDGKQIVCGFNHHPDVRRFKLQLFLAERQFVAEKEGKVYATVEMRDWLFNAFLEPDIEATRFLWDEKFSKDAERQPRPPTLTWKTFEKQSGLDLLPLGQVAKRTHNGNFFDQLTDLLRQDYAVLKKRAKLCGDSAEALLKIATNEGKAFEAETVRKNLSNYYQWRRDMERDFFGVYPQVEFLMGHRNQYNEDGQPLDKTKDGQPQYHGILRRLFAGQLPLDDDALANLKKGLGGAIMPDYVVIETVRDIPRNKTEREEFQAEQKRKGEYKKGLFADKNLTDKQKKQVILFEQQDGICPYTGRGLKDALGDDLQIDHIFPKSKGGISELRNLVLTHKTTNHAKGERLPFEAANATDYPFRDESGKTRTWKEIVADLPKMKGWRRGGQEGVIEKRYIFLLEDSTEISDWGNTTRVAQLARQLREEVIRWLGIRGQFDHVADPKERDNQIANKIVEKIGTPTGFMTACCRDSWLEENNLPRGFKLVEVEEDGKRKKRIVKDRDDMRHHMIDAAVISHIPPGKGMNYAPAGIFRHKPNSKEGDISTEALPGLGPDLPSFEAAHKDECLVAESRRTKSK

SEQ ID NO: 5825 - protein, 996 aa, unidentified
  REGION 1..996: note = Description of Unknown: Cas Enzyme sequence
MSKYTLGLDIGSNSIGWALLDTGKSPKIIDLGVRVFPEGVDRDTKGAELSKNATRREARGARRNRWRRAYRKDKLVRMLQREGLLPREFDLIQKLMETNPYLLRAKGLDEQLGLHDFGRVLFHINQRRGFKSNRKTGKASDNNKVAKEAGQLQEAIDNTGCRTLGEYYANLNPEKNRIRSQYTFRSMYEKEFALLWAKQSEFYPEILTEQLKEEIKDKTVFYQRPLKPTDDLIGECDLEEGEKRCPRGDWYARKFRLLQDVNNLKIHHSDGSEDPLTDEQRAIVLEQLKKSKAVKFSSLRKKLGLLETDEFNMEYEVNEKGKKKDKIQGDEFNASMQKNIFGLKRWGEMAEGEKIRLNEWLVDLEDDELIEKLASEYGFSDEQTEKVLKISLPSRYMSFSQKAIKKLLPLMEEGKRTDEALDKIYPDRNQKKQVEAERLGLPEDLRNPLVNKALFEVRKVVNAVIREYGKPAKIAIEMARDLKGSLRERKEIHFKQKENERENKRVRERLKNDFNHVSLNRDNIIKYKLWEECNGLCPYTGKKIPQYALFGENPEFQIEHILPYSRSLDDSYMNKTLCEVHENISVKGNQTPYEAYHHDEEKYEQIKQRIKVLPWPKRRKFLQKEIELDEAITRELNDTRYICREAVRYLKQICSNVKGTRGKITSELRHQWGLNSILNLTDPNMKNRDDHRHHAIDAAVVAVTRNKHLRELAESKYAKTGSGVKFEAPWKDFREELAEKIKHINVSHRVTRKVSGQLHEETAYGPTGLKDDKGQDIFVYRKKLEDFTMPMVGRIVDPVVKEIVVDRLKKHGLNPEKKQTIPKEVWREPLYMKSKTGNGPRIKKVRIRDVFNNMIMLKDQNGKPYRAVAPGNNHHIEIFEYKDKDGNIKRDSKVVSMFEAVRRRRKGEPVIQRDHGEGKKFICSLSTNEMVMMPDKEGNNDLFRVQKMSINKQIYFRHHTAATIDNEETLIRKQANLFNGKKVAVDPIGRVFPAND

SEQ ID NO: 5826 - protein, 994 aa, unidentified
  REGION 1..994: note = Description of Unknown: Cas Enzyme sequence
MSDYTLGLDMGSNSIGWALLDTNNRAVVDAGVRVFQEGVDRDTKGAEVSKNETRRTARSARRARKRRNYRKDKLFRMLIRHGLLPKGPDELKEVFELDPYLLRAKGLDEKLDAYEFGRVLYHLNQRRGFWSNRKSGKSKEDGVVVKSATALAEAMDESRSRTIGEYFAGVDSHEKRIRGHYTFRSMYEEEFEALWTKQASFDGELFTDGLKKAIKDETIFFQRPLRWDPETIGDCELEPGEKRCPRADWHARRFRILQTVNNLKLYNPDGREGDLSKYRETIIGELCNRKEVYFDSLRRKLGLIDSQTFNFEEGAAEKKAKLKGDEFVPQLKKAIGAKALKGLEEADIIEINDALIDDNIEDEELVEKLMEQYGFSEEQANGVVNISLPSKYTNFSRLALQKLLPKMEAGLRTDEAIEAVYGKRQAVGEIEKRRRLGSVPDLRNPIVMKALWEVRKVVNGLVREYGIPRKIKIEMARDVKGSVKERDEIRVKQWKNEQENKRAEEELKLMGIRNPSFNDRLKYKLWEECGKECPYTGKPISQHQLFGEHPDIQIEHILPYSRTLDDSYMNKTLCYVNENRLKGNETPYEYYAENRVEQWEEILQRIKVLPYAKRRRFWQKEVVLDNFIQRQLNDTRYISREVVKYLKQLGCIVTGTKGQITSELRHQWGLNNILDYTGAGLKNRDDHRHHAVDAVVTAVTEQKHLGGLAASKYDKSGIEFDPPWEGFREQVAEKINAINVSHRVTRKVSGQLHEETSYGPTGLKDDKGQDIFVYRKPLEALTLPMAAKIVDPVVREIVYERLREFGIDPDGKSKIGKEVWKEPLYMKSKSGKGPQIKKVRIRDVFNNMIYIKDDAGKEYRAVAPGNNHHIEIFEYANKKGRIKRDGKVVTMYEAVRRSVNNKQVIRRDYMDDKKFVCSLSKNEMFMLEVEDGVHVLHRVQKLIQDGRIVLRPHTYAGKVSDSDNPPLVQRKNYNTLRGYKVTVDPIGRIHRAND

SEQ ID NO: 5827 - protein, 1340 aa, unidentified
  REGION 1..1340: note = Description of Unknown: Cas Enzyme sequence
MKKEYTIGLDIGTNSVGWSVLTDDYRLVSKKMKVAGNTEKSSTKKNFWGVRLFDEGQTAEARRSKRTARRRLARRRQRILELQKIFAPEILKIDEHFFARLNESFLVLDEKKQSRHPVFATIKQEKSYHQTYPTIYHLRQALADSSEKADIRLVYLAMAHLLKYRGHFLIEGELNTENSSVTETFRQFLSTYNQQFSEADDKQTEKLDEAVDCSFVFTEKMSKTKKAETLLKYFPHEKSNGYLSQFIKLMVGNQGNFKNVFGLEEEAKLQFSKETYEEDLEELLEKIGDDYIDLFVQAKNVYDAVLLSEILSDSTKNTRAKLSAGMIRRYDAHKEDLVLLKRFVKENLPKKYRAFFGDNSVNGYAGYIEGHATQEDFYKFVKKELTGIRGSEVFLTKIEQENFLRKQRTFDNGVIPHQIHLTELRAIIANQKKHYPFLKEEQEKLESLLTFKIPYYVGPLAKKQENSPFAWLIRKSEEKIKPWNLPEIVDMEGSAVRFIERMINTDMYIPHNKVLPKNSLLYQKFSIYNELTKVRYQDERGQMNYFSSIEKKEIFHELFEKNRKVTKKDLQEFLYLKYDIKHAELSGIEKAFNASYTTYHDFLTMSENKREMKQWLEDPELASMFEEIIKTLTVFEDREMIKTRLSHHEATLGKHIIKKLTKKHYTGWGRLSKELIQGIRDKQSNKTILDYLINDDDFPHHRNRNFMQLINDDSLSFKKEIKKAQMITDTENLEEIVKELTGSPAIKKGILQSLKIVDEIVGIMGYEPANIVVEMARENQTTGRGLKSSRPRLKALEESLKDFGSQLLKEYPTDNSSLQKDRLYLYYLQNGRDMYTGAPLDIHRLSDYDIDHIIPRSFTTDNSIDNKVLVSSKENRLKKDDVPSEKVVKKMRSFWYDLYSSKLISKRKLDNLTKIKLTEEDKAGFIKRQLVETRQITKHVAGILHHRFNKAEDTNEPIRKVRIITLKSALVSQFRNRFGIYKVREINEYHHAHDAYLNGVVALALLKKYPQLAPEFVYGEYLKFNAHKANKATVKKEFYSNIMKFFESDTPVCDENGEIFWDKSKSIAQVKKVINHHHMNIVKKTEIQKGGFSKETVEPKKDSSKLLPRKNNWDPAKYGGLGSPNVAYTVAFTYEKGKARKRTNALEGITIMEREAFEQSPVLFLKNKGYEQAEIEMKLPKYALFELENGRKRMVASNKEAQKANSFLLPEHLVTLLYHAKQYDEISHKESFDYVNEHHKEFSEVFARVLEFAGKYTLAEKNIEKLEKIYKENQTDDLAKLASSFVNLMQFNAMGAPADFKFFDVTIPRKRYTSLTEIWQSTIIHQSITGLYETRIRMGK

SEQ ID NO: 5828 - protein, 943 aa, unidentified
  REGION 1..943: note = Description of Unknown: Cas Enzyme sequence
  MOD_RES 207..220: note = Any amino acid
  MOD_RES 712..722: note = Any amino acid
  MOD_RES 909..915: note = Any amino acid
GKQVGYYALKVVSVEATDEKKGKDIWYNVHLENGWVYRRSSNVPLDWEGQVKEFIVTTSINPDGTPQLDKSGEIKRSFRAPKEEDWMLIKKRTEMDIENSQKTVGCYIYDTLLQNPQQKIIGKLVKTIERKYYKEELRQILQKQCILHCELQDKNLYKQCVEALYPSNEAYRTNIVNRDFVYLLMEDILFYQRPLKSKKSLIDNCPXXXXXXXXXXXXXXGEVKKAHLKCIAKSHPLYQEFRLWQFLYNLRIYQKEKEINGTIHTDVDVTSEFLKIEDDYVTLFDWLNRREKIEQKTLLKYPSFNIKKDVDNFRWNYVEDKTYPCNETRSLILSCLNKANLSEDFLSYQKEEALWHILYSVNDKQEIVKALQTFARKNGLDGTFVDAFKKIRPFNKEYGAYSAKAIKKLLPLMRTGKHWNVESIDGKTKERIDKIITGEYDEKISNRVREKAIYLSDISWFKGLPLWLACYVVYGRHSEQKEITKWETPDDIDAYLSTFKQHSLRNPIVEQIIMETLRVVRDIWKKAGSIDEIHIELGREMKNPADKRKRMTAQILENENANLRIKALLTEFMNPEYEIEDVRPYSPNQQEKLRIYEDGALNAAEQVPEDIETILKKFKENKQPTRSEFLRYKLWLEQKYRSPYTGELIPLGKLFTEAYQIEHIIPQKRYFDDSFSNKVICESAVNSLKGAQLGYEFIKEHHGEKVETGFGXXXXXXXXXXXYEQFIKEHYAKSKAKMKKLLMDDIPEQFIERQLNDSRYISKVIKGLLSNIVREKDESGEYEQEAISKNVLVCNGSVTDRLKKDWGMNDVWNNIVYPRFERLNTLIGKECFGHWENKNGKRIFQTEVPLEYQKGFSKKRIDHRHHAMDAIVIACATRNHINYLNNASASKNAQISRYDLQHLLCDKTXXXXXXXIKAIINGLSRNLGIHLLKIQKEYLITLL

SEQ ID NO: 5829 - protein, 1186 aa, unidentified
  REGION 1..1186: note = Description of Unknown: Cas Enzyme sequence
VSLVAGVITKTRTSRKDENFMENGFTYRLGLDIGIASVGAAVVQTNSFDNPCHLTEPDVRKFTAAECRENGKYYGKSAAVPRRECRSTRRRIRRKQLRMNCIKQALQKADLIDIDEFMKRYSDGTLPNVYQLRYEGLDRLLTDDEFAQILIHIAKHRGFLSTRRADKKDKESGAILAATSANQKLMMEKGYRTVGEMMYLDESFHTPCSSNEHGFIVTPRNKAKDYKHTIYRSMLVDEVHALFDAQRKLGNTKATETLESEYLEIMTRQRSYDLGPGLQADGTKSPFAMDGYKSNAGECTFYKNETRAAKGTYTAELSMTLQKINNLKLVDRYGDGRFLTDEEKQKILEYISKHKTMKYKTVKTLLGIDPMIRFNLLNYGKKKKTKKESEDKTKDDSTKKKGTKKSKTKAETGEKTDKDSNKDKTELERINRIEDTVFVSMEFTLSYTDCLKTRIKTLSETEKRDLFDEVGELLTSYKTDAARIEKLSNLGLTSEEIDHLLDLNPKGYARLSNKAMKEIEPYLVQGLTYDKACAAAGLDFQVTYTGEKMKYLKGPEINNIINNIQSPVVRRSVAQTVRVINAIIRKYGSPQAVNVELSREMSKSFLERKKAETAMELRHKENVKFCEEIKKLGINSPNGEDITRYRLWKDQNGICLYSGEKIPTRAMFTREYEIDHIIPYSISLDDRYQNKVLVKAKENQTKGNRLPYEYFGHDKTRWAAYENRVESLIKSDGKKAHLLKKNYTKEDQREFTERNLNDTRYATTVVYNMILQYLYLEPYNCDGKTKQVYAVNGAVTAYLRKRWGLNKKDRTNDRHHAMDAVVIACCTDEMIAKVTKYMQDRETAYSKNFRIADEETGEILTRSNFTREQYDEAYGVRFPVPWETFREEIDLRIFNDDPFDYLMKDRNLQIKIDYPDWMYGEEESPVAKGKYINYIRPMFVSVACSHKATGRAHEETIRSAKYHDSDSLVISKKALKDLKLNKDNEIKDYYNKECDPLLYEALRNRLLEYGGDGKKAFAEEFHKPKADGTDGPVVKSVKVIEKKTTGVQINHGLAGNGNMVRVDLYQKEGKYYAVPIYISDMVKKEIPRKAATGGKQYKDWRVMNPDDFLFSVYPRDLLHLKKWKPFNDGLSNDIYMYFAGLDPASASFAVTAHDSSISLRGIGIQNLELIEKCQVDMLGEIHVCRQ

SEQ ID NO: 5830 - protein, 1302 aa, unidentified
  REGION 1..1302: note = Description of Unknown: Cas Enzyme sequence
LFETANTAEERRMFRTNRRRLDRQGWRIKILQELFAEEICRVDPGFYLRMKESRYYPEDKRDAKGACPKLPYALFADPDYTDKDYHKEYPTIYHLRKMLMETETTPDIRLVYLAFHHMMKHRGHFLLSGDIGEVTEFEKTFQQLVENIKSEELDFKLETDADQMKSIESVLKDRELTRSEKKSRLIKTLKPNTACEKAILTLLAGGTVKLSDIFGKRELDEGEKPKISFADNGYDDYIAGVEADLGEQYYIIESAKAVYDWSILSDILGDSVSISDAKVKLYEKHKKDLAYLKKVVRENLSREVYNQVFVKTDEKLCNYCAYIGMTKKNGKKVALEGKRCSKEEFENFLKKTVVEALTDNEIREYLASEIEKGTFLPRQVTKDNGVIPYQIHLYELRRIIDNLSPRMPFMQENGEKLIQLFTFRIPYYVGPLGKGAGSEKFSWAVRRTDEAIYPWNFEDVIDVETSAEEFICRMTNKCTYLYGEDVLPKDSLLYSKFMVLNELNNLKLNGQSITVELKQRIYEELFCRYRKVTHKKLVSYLVCEGIVEKNVEVSGIDGDFKASLTAYHDFKEKLTGVELSRQEQEDIIRNIVLFGEDKKLLKQRMKRKYSKLTEKQLAAIAKLSYKGWGRLSGTFLENITVPAPGTGEVWNIITGLWETNDNLMQLLYGDYGYQQTEIECFNAKGREKELSYETIEESYVSPSVKRQIWQTFQVVKELKKVMQGDPKRVFIEMARENQESKRTESRKKTLLDLYRNCKKEEPEWIAELMNHLEKLDDSQLRKDKLFLYYTQKGRCMYSGEKIELEDLWDNTRYDIDHIYPQSKTMDDSIDNRVLVKKQYNAKKTDMYPIASDIRKKMRSFWKTLLDGKLISKKKYDRLMREEELTPEELAGFIDRQLVETRQSTKVVAEILKETFPDTEIVYVKAGNVSNFRHTFDIVKVRELNDLHHAKDAYLNIVVGNAYYVKFNKNAAWFIKENPGRSYNLKRMFDYDISRNGEVAWSAGSKGTISLVKNTVNKNHILVTRRSCEATGGLFDQQLKKKGKGQVPVKTSDKRLGDIEKYGGYNNASGAYFILVKSKNKKGEEQRTIEYVPIYLKHYIEESRENALEYLKNDRKLIEPEILLEKIKMDSLFRVKGFYMWLSGRTGKQLIFKGANELLLTESETRLLKKIIKYTQRRKENKDLKLTEWDNIAEKELLELYDAFTEKLSHSVYAVRLGTQGKTLTEKRPVFAALPVEEKCIILSEILHLFQCQSSSANLSLIGGPARAGILYLNSNISDVGEISIINQSPSGIYEKRIDLLRL

SEQ ID NO: 5831 - protein, 1029 aa, unidentified
  REGION 1..1029: note = Description of Unknown: Cas Enzyme sequence
MVYVLGLDGGIASLGWALLDEKGQQIVDAGSWCFDPPENPKDRTPTNAIRRQHRGQRRVIRRRRQRMAKLRELFLHNHMIEESGADALRWRPEHDPWTLRAAALTEKLTGLQLALALGHIARHRGFRSNSKRDQGANAPPDTKGMLTAIAANTDRLEGRTVAQLATTDPDWIKRKRNRGDFARTILRQDLEDEVRRIFKAQRALGSAFAAAELQEAFAPLAFDQGRLIDNEDPRSKIEVGSCTHEPSERRTSRFAPSFERFRLLARLRDLRLLTREDTPELTAGQISAAMADFGLKPGLTFKQLRKRLDIGNGVQFAGIPPANEGHDVAARTGDAARGTHALLTTLGETAWRALSQTPEKLDRIAEILTFREDLARIEEGLRETGIDPLYVDLLTEAACTGAFAKFKGAAHISAKTARAVNAGLTLGLNVDKAFAYAGYDHAARAETKLEAIANPVARKALAQMLKQVKTVIHEYRHLFGPTGMPDRIHVELARDIGKGPEERGKLEADLGKRTAAKERAFQELQGLFPAQRIGGEDLLRYELWKEQGGACLYTGDIIPPAGILANDNTYQVDHILPWSRFGDDSFRNKALVSARANQDKKNRTPFEWLGGDARRWEEFGALVQGCKEMSGGKKHGFYLRQNAAEVQEKFRTRNLNDTRYACRALLELLVQQYPAQERATDPDNPKRRVFARPGALTAKLRQVWGLEGRKKGPDGKRLPDDRHHALDAMIVAACSESMLQRLTAQVQRQEAAGQRRPFADVPEPWPGFRDQAHAKLDKVFVARPDRHRARGQAHKETIRQVRVEDGAATVYERKAVEALTAKDLLRIKNGDGRNAPTLAILQDWVAAGKPAADPPRSPKGDVIRKIRLIAANKVAVQVRGGTADRGEMARVDVFLEERTGKAGRFHLVPIYPHQIVDPLQNTPPNRAIVAHEPENAWTLIDNFTFVFSLYMNCLVRVPGKNGEPALGYYKGTDRDNAKIKIANPVSSQLEPIRVSTKTLPMFEKWAVDRLGRVSRVPQEIRTWHGVACT

SEQ ID NO: 5832 - protein, 1020 aa, unidentified
  REGION 1..1020: note = Description of Unknown: Cas Enzyme sequence
AREGWLRSTFERAGLSHALLQGRKADDSSGKWITHPADYRLEREFPPQIGKKTFDHAPSDEAGANICYCGAVLRIHLLQGRSLAPWQIFKALHSAIQKRGYDADLPWKAEQDRKSPAKEEIEKTNAAANEVQKVIDGLPDGYRFPCYLEAMCMSLWDPELPEQTVIRQTHEAGSAKRMVFPRSAVELELIALAAAAAKQLPQLAGHVRDLPYGPAGQRYASYYPDAIAEYKARTGDPLVRGKSTDWEGALSQKIPTFDNRALSACALIPRFHSAKSIPQKLEDGTFDSDSLLPAEVTFLMKLKNFRFDVAGQAEGKFPLSQICEIYESTRKRVIAKGDAAAFKLTKTELGKLIERHGGVALRKDQDAVESPRLSGRSRYSRPALKIVKKLLLSGKTPDEVHADELGALGGNTILTKGLVAEDLRFLQNMKGTTWENFYLPDESLAFVENAGISASDKIRALIGRQNNPIVRHRLELFWKLLRELEEKHGKPDHIALEFVRDDFMGADAKKKLSIFQSERRKAREEARKEVGSGKDGLRYQLMKDQGGQCIYCEAPIGIRDLANCHLDHIVPDKMGGPGSYWNFALCCQTCNDAKLKRTPWQWFHDDHRFGWDAYVSRVRSRTFQLRPKKVRLLTQEDAQELVERYQSLAETAWIARLARTVACLQFGWALNFKDDVRRVIVLPGGLTARVRRKYKLNSLLGQDIADLEQTLKENGDAKTEAEIDKKCRADKRHHALDAMVLSFLPQWTSNPTKRVLVTLPEGIHREYFRNYLDDLVPTNLCFEKSVLEESIYGQRRSHETGDPVATKRMEFGKLGFVMVKQKPVFKPSSLNGHIAKIYDPNLRGILQKFVSDTEPDEAAWKCFSSGFRMPSHKGLGPLVKFVRLIVSSNLKEYKDLSKGDKRPALRKGEMHRGYYVYLDLGGKPRVRPVYAFESISAIRMEIQGKIGAEVIEVIGFFQSGCRVTLKTECSYASGVMPPGDYILNTIEADRSRAIMTSNTGVSSPKILLEKLLQSGFHRKE

SEQ ID NO: 5833 - protein, 1031 aa, unidentified
  REGION 1..1031: note = Description of Unknown: Cas Enzyme sequence
MAYRLGLDVGANSIGWCAIRLGPDGQPAGLLDIGVRIHSDGRNPKDGSSLAAERRGPRGLRRNRDRYLQRRTALLNALTRSGLMPAEAQERKRVARLNPYRLRTDALHRMLQPYELGRVLFHLNQRRGFQSNRLTDRGNKDGGLISEAAKETEAMLLRTGNMTIGALLAERHAAHEPVRVRLAGSGKAAKYDFYPQRAMVKAEFDAVWAAQSAWNPALSNGLKAALWHIIFSQRPLRAPVVGKCWLEPGQDRAARALPSAQRFRIAQTVAHLRVSQPGMPERALSDTERGVLLALLFRGTDQPVDRLWKKLGLPAETDVNCRDDKLPGCAVAARLGGKSGIGPGWHALPLAVQDSAVQALCAAETEDAAVAALQTLGLSAEQALRAVNVTLPDGHASLSLTALRKVLPFLEAGQTYDKAVQAAGYRHHSDRRTGEIRDRLPYYGEILCQRIGTGSGEPDDAEEKRLGKAPNPTVHVALNEIRRVVNAVIETHGVPAEIVIETLRELGQSAVQRKDYEAEQKKNRVANDRRRAEIVALGFKVSSDSLLRMRLLEEQAKDPKQRCCVYTGTLISPRLALSDAVEVDHILPRAVTLDDSAANKILVTRVANRQKARQSPHAAFSHTAEWAAILERRALLPDNKKWRFAPDALEKFAREGDFLARHLTDSATIARWAAEYLEILAPGRVRAVPGRLTGLLRHALGLNSRSVLGKGGAAKDRTDHRHHAIDAVVVALTDRGMLQRVTRAMQAAEAAGERLMLTVEAPWDGFVADMAARLGNVIVAHKPDTGWQGALHNDTSYGIIKDAGPTGHNVVVRRSLETFVTWKNDDTTKKVRDPVLAEKIGAILAAPDASARKKQLSEVRYGGGPLVRSARVTERLEVRAIADRRTGEAYRAVKLDGNHCYEVWRCPDGTLQQFTVSRFDAARSAEAERLGRKAATRARHPAAKLLMRLHKNDMVALGCGETRRIMRVAIMTGAEIRLAPHNEGGVLRDRDRNPSDPFKYLRVGVTRLSAERARKVWVRPDGRILDPGPVL

SEQ ID NO: 5834 - protein, 1028 aa, unidentified
  REGION 1..1028: note = Description of Unknown: Cas Enzyme sequence
MVYVLGLDGGIASLGWALLDEKGQQIVDAGSWCFDPPENPKDRTPTNAIRRQHRGQRRVIRRRRQRMAKLRELFLHNHMIEESGADALRWRPEHDPWTLRAAALTEKLTGLQLALALGHIARHRGFRSNSKRDQGANAPPDTKGMLTAIAANTDRLEDRTVAQLATTDPDWIKRKRNRGDFARTILRQDLEDEVRRIFKAQRALGSAFAAAELQEAFAPLAFDQGRLIDNEDPRSKIKVGSCTHEPSERRTSRFAPSFERFRLLARLRNLRLLTREDTPELTAGQISAAMADFGLKPGLTFKQLRKRLDIGNGVQFAGIPPANEGHDVAARTGDAARGTHALLTTLGETAWRALSQTPEKLDRIAEILTFREDLARIEEGLRETGIDPLYIDLLTEAARAGAFAKFKGAAHISAKTARAVNAGLTLGLNVDKAFAYAGYDHAARAETKLEAIANPVARKALAQMLKQVKTVIHEYRHLFGPTGMPDRIHVELARDIGKGPEERGKLEADLGKRTAAKERAFQELQGRFPAQRIGGEDLLRYELWKEQGGACLYTGDIIPPAGILANDNTYQVDHILPWSRFGDDSFRNKALVSARANQDKKNRTPFEWLGGDARRWEEFGALVQGCKEMSGGKKHGFYLRQNAAEVQEKFRTRNLNDTRYACRALLELLVQQYPAQERATDPDNPKRRVFARPGALTAKLRQVWGLEGRKKGPDGKRLPDDRHHALDAMIVAACSESMLQRLTAQVQRQEGSGQRRAFVDVPEPWPGFREQAHAKLDKVFVARPDRRRARGEAHEATIRRIAEHNEKPATYERKSVDALKEGDLARMKDGDGRNAPIVALLRDWLRAGKPRDKPPISPQGDIIRKIRIRTDIKIGIVIRGGAVKRGEMARVDVFCERRPGKTGKFHLVPIYPHQIVDPLQTQPPNLAISAHKNEANWTAVDGFTYLFSLYQNCLVRVSSTPGEFSFGYYRGTDRDDAKIKIANPVSSQLITRESTKTLLVLEKWSVDRLGRVYHIPHEVRTWHGVACT

SEQ ID NO: 5835 - protein, 958 aa, unidentified
  REGION 1..958: note = Description of Unknown: Cas Enzyme sequence
MPSNETIWAFDLGKGSIGEAVRLNEQFPHAESLLIPAELARRGPASVSGTPANRYRAMKTREAHHERERWLEIVWTAAGLTPLIPRKVWENPKTKKWELKRNGDYQLEREFAPKLGETTKDGAPSDAAGAEVCYTSCLLRIHLLQGDKLADWQIFKALRAALQCRGYGPVPWATKEARKQGKTTKELQDEEDKKLQQADARYRDAVGKWPEFKRSVPAQFHFPCYYDASKIGLWDAANPSVFQPRANHLASSTRNIRFDRVDVRAELIKLGDQAAAILPELRDAFARWQKDGWKFPHPNGNELTYPVRAKTFGEFLCDGPAGKPDETSFEAFLNQRRDVKVQRGSYEEWMAALGQKTPSFDNRILNDCVLIPRFHVCKVAARLETEKDEDKNDKLTGKIVPESLLASEVTLLLKLKNLLVADTATGHRKLTVEEIRDIYDYTQRQIKSLALIDPEGNLIKEWPKKLMSRFAINQSDWKDIAAESECLRRLLALNLPVGRENRSLTKDEAVALLHAVANPKKGLEEMLPENLQPITKAAKSEWKKAKAESEEKLLRPMPGHEEVKAPKTSGRSAYSRVALRILKEVILSGEAASTFHTRLLRGDSDLLRRLGSTPDKPLSLLNDSIAKDKKQREREDKENGRHGVLISELDFLLKMRKDNEPDKWENIFVPSQTLDALQQRHTEDGKLDADAAIRDLLGTINDPIVRHRLGVFAARLKKLQHGDEKEEIPKCGVPDAIVLEFAREDFMGEEAVKKYQRFLNERADERKAAREEAGKLGLESRSSGLRYELFKAQGCICLYTGKSLSETSLDDYEIDHIVPRSMGGPDAAVNYVLTFHDVNHTKEKGKLTPFALLHGKEGWDAYVKRVEACATALRNKKVQLLTRQDAPELVERYTALAETAWISKLAQTIVNLHFGWTNGYDEKRVKRVIVVSGGLTARVRRKYSLDKLLYTDTTDAEV

SEQ ID NO: 5836 - protein, 1070 aa, unidentified
  REGION 1..1070: note = Description of Unknown: Cas Enzyme sequence
MSPALEAPQKYVLGLDLGSASLGWAMIALNPADEPTSLIRAGVRIFEPGVDGTALDIEQGKDQSKAVERRTARLHRRQLRRRAARQRELFQELQKAGLLPTNAAGTGASSEQRHELLNGLDRALTLKFLKPDDDSFAQKPLYFLRKLALDHPLEPFELGRVLFHLSQRRGFKSNRKDTKKSAKENEDLGQVKADIHALELAIQEAGARTIGEYFAGLDPHTEKVRRRWTARKMFEQEFALIWAAQSIHHGSFLTRELHDRVHELLFFQRPISAQKHLVGTCELERGDDKHPAKRRAPWATMAAQRFRMLQKINDLVVIDAKNQTSRKLTEDERLRLYQLLDREGTQSFTAVRKFLDLKGTTFNLEAGGDKDLPGNRTQKSMRKVFGIFWDEFTEGKQNQIIENWRNSESDESLMREAIDHLGLDADAAAVLVKESPQADYCSLSLAAITKLMPLMMSGRAFKDAETEIYGSRFSGLAVHDTLPPVRDALPTLRNPAVERAMTELRKVVNAIVREYGKPYEIRIELARELKKPRQERVKATTANRKREADNKGIAAKILSECGIANPSRADLEKAKLFVECGGICPYTGRSIPFSQLFQNSEFDVEHIIPRSRFPDDSFQNKTLCYLPENREHKRNQTPFEAYSNNPEVWAQILLRVAKWSNPGKLSRFKIQSESELADFSARQMNDTRYTSVLAGRLLAMLYGGRDVETDNGNRQVIFASSGAVTATLRRSWGFERILQSIVSPEPGETRGKPRTDHRHHAVDAITIALTRQSVIQTMAQASAFEPWQPGTRSWRRVPEPWTAPDFIRSLTEQISTMVVSHRPEHKVSGELHKGSNFSRPYFYKGKPTVHTRCPLGTLSVADIEADDVIVDSAVRDAVRQKLNELGGDPKLFENPTNTPVLMTSNGRSIPIRKVRIRETKNPLKVGNGMNERFVDSGGIHHVSLFVVRTEARKENWESAFVQITEAYERRRRKLPVISRELNGKHEADFLFSLQKDDTLEFDFNGTRAIARVKKFFATGQIWFTDVNNAQMDAEQKKQKTTWSKRANSLKELNPRKVVVDLLGRVHTAND

SEQ ID NO: 5837 - protein, 1057 aa, unidentified
  REGION 1..1057: note = Description of Unknown: Cas Enzyme sequence
MSQLSPSYSLGLDIGMASVGAALLGDSEIIALHVRTFDKAETAKEGESLNKIRRDARLTRRRIRRRTHRLLRMRRLFKRTGLLTDNTPNIFTIPGTSPWQSRAEGLDRLLTPVEWAAVLYHLLKHRGFQSNRKSEVKSDEKAGQMLSGVTANQQRMHEKGYRTIGEMAWKDERFSNAKRNKGGDYSHTFARVDLETELAALFTAQRKFNNPHSSNDFEQAIHKLLLARKPTLSGENLLKMVGKCTFETAEFRAPKASYTAERFVWLTKLNNLRITGIGTTRALNDAERQVLMLLPYTQARLTYKQVRSKLDLADSDKFVGLTYRQSDDKKDPESAALFEAKSFHALRKAYETAGLAELWQRDALDIARLDKLTYALTVFKDDKEATKWMTQQHIEPAIIEAVLEISFSDFIRLSIKALQKILPHMERGLRYDEAVQQAGYTHHSKLHTGNKSRVIPKLSKDDIANPVVYRAINQARKLVNAIVHEYGPPSEVHIELARDLNKPFDERKKIERDQNEFKATKEKDVKDFEDRFQRLPRGLELPKWRLYREQDAQCAYSQTGLDLNRLFEDGYAEIDHALPYSRSFDDGMNNKVLVHIKHNRDKGNRTPYEYLDGANNNDQWQRYVAWVEGNKKYRLAKRQRLLRKDFSEEEAGKFRERNLTDTRYASRLFKQMIEQHLQLAEDSNSKRCAVVSGQLTSLLRARWGLIKIREEGDLHHALDAAVIAAASHGMIKRMSDYSRRKELDQVRDNYVNPETGEVLDLATLRKLEQHFPVPWHGFRDQLTEKLKTVRVSRAPLRRGLGSAHQETIRSAKHLKDMEAGVKTPKSSVKTPLTSLKLKQLPNMVGYDDPRNASLIAAIEQRLKDHNDDGTKAFKEPLRRPTASGKEHLAPIVRSVNMLDTQKSGLPVRGGIANNGSMLRVDIFTKSGKFFAVPLYVADVVRTELPNRAVVQSKPEDEWPVMDENYLFLFSLHSNDWVKVSYKNDPAKEGYYSGLNRATAAIDIWSHDRNQTIGKDGLMQSIGIKTALSVEKYHVDLLGNLYKVHQETRQPLHHKRKK

SEQ ID NO: 5838 - protein, 1131 aa, unidentified
  REGION 1..1131: note = Description of Unknown: Cas Enzyme sequence
MNNNNSLTFGFDIGIASVGWAVLAPDRIVALGVRAFDKAETAKEGESLNLARRSARLMRRRLYRRAWRQTKVARLLKRESLIADAQLFHDQRPALVSPWQLRVDGLDRLLASEEWARVIYHLCKHRGFHWISRAEEKKAGEDAKGEGGKVKQGLAATGRLMREKGYRTAAEMVLAEFPDAQRNKQGDYGKSLSRVLLAEEIGILFDRQRGMGNPHTGAAFQSAVLGNGDRKSGLFWLQKPALSGDNLLKMLGRCTFERTGGTDGKGEYRAPKASFTAERHVWLTRLNNLRIAVDGETRPLNEQERCIALPLPYQRAGDLKHEHLRSALTKAGLWNEHFRFAKFPYAQSADGKVKDPESAVLVKLPAWQEQRKQLKDKGLETEWQGIAGAALEGNPDLLDRIAWVLSVYKDDAEVERELGKLNLPGGQTMIDALGEIRFDKFSALSLKALRKIVPHMETGMRYDEAVAAIPEYGHHSQLFKAGEGEERYLPPFYEHHRGKGPGQEGRMVFSERIEREIAGGIPRNPVVLRALNQARKVMNALIREYGSPASVHIEMARDLSRPMDERKKIKTAQDEYRERNDKIKATFAAEFGVPAKSREFEKFQLYSEQQGKCAYSIEALDLHRVLHDIGYAEVDHALPYSRSFDNSKNNKVLVLAKENRNKGNATPYEYLDGANDSERWRRFVAWVESNKTYRLAKRTRLLRKNFGAEEAEGFRERNLNDTRYICKFFKSYVERYLKLADESKSKRCVVLSGQLTAFLRARWVLTKIRSDSDRHHALDAAVVAACSHGMVKRLSDYSRRKELKAVRDGFVDLETGEIVNPAMYQQLETHFPDPWPEFRYELETRLFTDDPAQLRAGIERLGTHTSDSLDALKPLFVSRAPQRRNGGAAHKDTIYAQPERFKAQGGVTQKVPLASLALKDLDNLIDPHRNERLYAAIRERLEAHGGKGDKAFPASNPLHKPDRDGNPTGPVVRAVTKVIDKQSGIPIRCGLAKNDTMLRVDVFTKGGKFHLVPVYVHHRVKGLPDRAIVQGKDEAEWTLIDESFAFCFSLHSNDFVRVSQRGKAPILGYYSSCHRGTGNINLWAHDRNTQVGKDGMIEGIGVKTALSIEKFHVDVLGNRYPAPPEKQCDLA

SEQ ID NO: 5839 - protein, 1357 aa, unidentified
  REGION 1..1357: note = Description of Unknown: Cas Enzyme sequence
MSNDKLFVGLDVGSDSVGWAATNENYDIQRLKGKSAWGASIFDEAQSAAQRRAFRCSGRRYERRKYRLCLLNDIFDSHLKTLDPTFLLRLSESTYAFEDKSQNANQGSLLFLDRKKEKEFYETYPTIWHLRSRLIEGDPKAFSDLRNVYLALHHIIKYRGNFLSDSSLDATKFDETVFDRINGFFRSLIAEETESDESDVDFVWISQDNRQAFLKCLLDKRTNKTEKKKILKVLLGINETAAPYSDMAVALVCGGVFDLSKLGEGFEKNKISFGKDFDDKEEEYQGYLGTSFELLEEIKAIYDYVELHEILNGEKLLSKAFVKLYDAHKIQLHGDKVLGLSGLKSIVIGIDRKQGNKTPENRLYYKVFKDPHSKNNYAAFVHVGSSEDRPTIHEFNAFVLETLKANAADVEDQKSLFMLESLAENDQLLQTIAYRSSSVIPHQLHEKELSLILDQCQKYFPWLFEGKQKILDLFLFRVPYYFGPLNSRSINSSVVRNSNVTITPWNIEEVVDKDQTRTKFMKSLTNRCTYLRQKNVLPKQSLLFEEYEILNKVNGLKVNGSFLDRDTKDKLVADLLSKPQTSFAGLKKLLQRICPSLKKDIISVSGLNEKDLFVASSHACLAKSFDLTKDCAMAERIIFLATIFCDSKTEADRAIKKEFPVLSEEQRKAVGSLVCKGWAPFSRELLTGLKHTDENGVVMSILDVLKEENLTFIAALRDPRFGFERLVEEENKKAFGKRPVCEAVKEIFESIPPKMQRSTEQAIRIVDDVVKASKRMPDRVFIEVTRSDGKKKQQIDSRKKELERFLKGLFKEKAEGFADRAKHLYDELEKRDVSELKGKHLYLYFKQNGLDLYTGKPIDINDVIDSTKYDTDHIIPQSLIKDDSLDNLVLVNREANQRLKGKRYPLPPEIRNNHEVLRVWKILKDQKLLSDTKYNNLMRTTPITDEEVEVFANAQINVVNHSNIAIKYIFELKYPQAKLVFSRAQYPSYVRQVLSIPKLRDLNDCHHAVDAYLNILTGNILSERFGDPRFWKARHSMTEDEREQSFNMERTLERKLGENKLSEKVKNNCFRHDFLLTYRHLYQDSNFYDMTICPIGDESGLVPLHTKKGNPLSDVSKYGGYSGLTIEYCVIGTKKNGKRIIVSVPHLYTSLCKKPEELEAAVMKLQNEPDLRLDFLHKIPLNQKVLINGCQYLLCSKGKGEISLKPVTPIFLDATQSVYLLSLLKRVKTDPLFPNFEGDEYVFSTDKNGQHKTVLSSQDNLSLLRSIKTIATNTKYEKCPMIWAIKDYDENGFLLSCLYQQATILFSLIGLFGRNSSALCKIETTREFRKSNRVVFKDTVIAIDESPSGLFEQRRIL

SEQ ID NO: 5840 - protein, 1631 aa, unidentified
  REGION 1..1631: note = Description of Unknown: Cas Enzyme sequence
MKKILGLDLGTNSIGAAIINIPKSFEEYGKGGNIEWMGSRIIPMEGFVSTKTGKPFKENPIDSFTKGVGVSKAAARRVKRGSRRLKHRYKLRRTRLIRVFKTLGWLDDSYPEDFKKEFRNDQNFKFHISDYLPFSEESIEEAKKLLGAANNKGEITLPEDWIVYYLRKKALHQKITFAELARITYMMNQRRGFKSSRKDLKDENLDEKKWVEILTIKSVVQETFEPNRNKNFKFKITPDNEKVQPWVVERKKKPEWEGKEFTFLITEKIKTKSDGTVEVTQLTPQIPQEGDWDLCVTAQDNKIGDEYPGTYFFNGLVESVKNKTDFKIRQYAVYRAKYKRELEAIWKKQIELNEELRKINNDQTILRKIAEILYPTQTKLNKSKLRELLSSDLLHIISEDIIYYQRDLKSQKNSKSDCQYEKKKGTDGEWYGLKCAPKSSPEFQEFRIWQDIHNIKVFQRNGKEEKILDDGIVKEFDKVDIDVSVDFINEKVKEALFYLFDTSKEISQIQIIDLINRFNYENKIDIKTHRINMFFNEEKKLIGNETKEYYRKIFRRFGYEVKGEEILNNKEKFYRLWNISYSISLNDEEKSKQAIFRALTEKNNRRGNPKKVIFELPENVALAIASAPDIETTKKYASYSSKAINKLLPLMRCGKYWDENLVENTVKEKASRIIERLTKINHNPKRLKSVADDDIPQQLLKSFVGSSMESIIKGLNTYQACYLVYDRHSEKLDYQKFTSINEFDVPKLLPNNSLRNPIVEQVVRETLFLVKDLWKQYGQPDEIHIELGRDLKKNAKERKSATETTTGNFQERQRIKKLLYELMNEEFEQYQNEGDNVVISKAKFEIKPNPESPVDINKFRLWKNMSGISDVDLDKRIRDEKIPKNQEIKKYALWLSQKCISPYTGRIIPLSKLFDPNQYEIEHILPRGLVKNDSFSNLVIAEWGVNKAKGRELGALFIANRNGKCEYGNQIYQLLDYDAYVTHCKSTFKGQKLKNLLATEIPDDFISRQINDTRYITRKITELLYPVAKGNKDAETDAEKGGLVFTIGSITSELKNEWGLQKEWKKMLKPRFERLERLNNEKYIYPNKKNSNDIDFNVKENETLNIKRIDHRHHALDALVIAATTNEHIRYLNTLNAADSNEEIKQLKRKLVKGKIRKFNLPWESFTKEAKEKLEETIVTFKSNNKVFTKPFNRYQKWELINGRWEKTFVKQATNRKWLAVRKSLFKEPQGIIYIKEIETKSFRTPTDILKIIKLQMERIKAQNTPKQKTTSYIYDQEVRELVKQIIELSNRDLDRIKKYLKNFKPKDINGNPIYTVRIAVFKPYAAKRVKLDKSFDHKKIDKIPYGDKVRITEDRKMTIPQILHQHLEEYEEYDRKRKEIEAKEEELLTNDEKLFLENIMPEPFSEEGLEALDKKVGMKIRMVTIKEKIGIKKELQNKLMEADGNPYYVFYENVITKERSGFSSLSTYDVLQKRLNNQPLLEPKANHRIHVLQNNDMVYVPTKEERDKIVRGVPLIEIINFTEIGKRLYIVNDFSKTDIYFRPNSFAKAIISKELHTSFDDKCSRFVNFYNSEEESDMIKNVCIKVKFDRIGNIILNEDDYLHLKIKEAENDKSITLKEFKRTLFDEDNN

SEQ ID NO: 5841 - protein, 1458 aa, unidentified
  REGION 1..1458: note = Description of Unknown: Cas Enzyme sequence
MSKNNQINILGLDLGVTSIGFAHVIESEDHNNSEIKQIGVRVNSLTVDEQTNFEKGKPFSINAERTLKRGARRNLDRYQDRRNNLIEVLTKSGFITSETKLAEDGKNTTHQTWALRAKAVSEEVGKEDFALILLAINKKRGYKSSRKAKNEDEGQAIDGMAVAKRLYEENLTPGQLAYQLLNEGKKSIPDFYRSDLQAEFDKVWESQKQFYSEILTDEFYKELEGKGQRATSALFWSKYGFNTAENKGNREEKKLQAYKWRSEATSKQLEKEEVAYALTEINNNLNNSSGYLGAISDRSKELYFNKQTVGQYLYQQLQENPHTRLKNQVFYRQDYLDEFEMIWETQAKFHSELTNELKEEIRDIIIFYQRKLKSQKGLISFCELESKEAVIDGAKKIIGSRVAPKSSPLFQEFKIWQNLNNVSVRKKGSKKRVAKAQNQHSLFEEEKEIFTLDLEAKEKLFEELNLKGNLSAKKCLEFLGLNSAEWELNFTQLEGNRTNKSLYEAYLKILEIEGYDVKDLLKVKSNKDEVELDDLKVSASEIKNMVRDIFKTNEIDTEILDFDAEADGKAFEKQQSYQLWHLLYSYEGDDSQSGNEKLYELLAKKFGFKREHAQILANVGLVDDYGNLSSKAMRKIIVHLKQGFAYAGRKDRPNEPSACEYAGYRHSKHSLDKEELDNRVLEDKLELLKKNSLRQPVVEKILNQMINVVNALIEKNSERDENGNITKYFKFDEIRIELARELKKNAEERRDMDSQVREGKLRNERVFNILQKEFGIKNPTRNDIIRFRLYEELKNNGYKDLYTNTYIPREILFSNQIDVDHILPQSRLFDDSFSNKTVVFKKDNLDKGNMTAFDYIKSKYGEEKLNDFVERIENLFELGRKNIEEGISKAKYQKLLKQEAEIGDGFIERDLRESQYIAKKAKELLFKIAPSVVSTSGRVTDRLREDWGLINIMKELNLPKYRALNMTEVQERRNGHKVEVIKDWTKRNDHRHHAMDALTVAFTKHNHIQYLNYLNARKNESHKLHGNIIAIETLETELKIDDNGKKKRVFKEPIPNFRQVAKEHLENVLISHKAKNKVVTKNKNIISGKEKAQITLTPRGQLHKETVYGKYRFYQSKEEKVSAKFDLETIEKVTNPVYKKALLQRLAENGNDPKKAFAGKNALNKTAIYIDLENDIKVPESVKLVWLEEDYSIRKDVTPENFKDEKSIEKILDEGVKRILKNRLKEFSGDAKKAFSDLDKNPIYLNKEKGISIKRVRISGVKNAEPLHYKKDHFGNDILDENENKIPVDFVSTGNNHHVAIYREPALDKKGQPILDEFGNQKYNLQEKVVSFFEAVERVNQGLPIIDKTHNQHLGWQFLFTMKQNEMFVFPNENTGFIPTEIDLLDPKNKKLISPNLFRVQKIATKNYFFRHHLETTVETPKDLAGVTYKPQLGLNGITGIIKVRINHLGDIVSVGEY

SEQ ID NO: 5842 - protein, 919 aa, unidentified
  REGION 1..919: note = Description of Unknown: Cas Enzyme sequence
MKLNIYCGLRAIAYIITEGVNVIKYGIKRVNIPFDNYYEYIAGLPVSKRINRRLKRQMRRNLWRFKSRRQNLKRVLQKHGYNFEGQMSREQILKLRVKGLNQKLSKEELYMVLLSLQQKRGYKSLRGVSDNEDSDYLKQIEKHKENLKQYPSIAAYLLTLDSSTNIIFTRKSYEKEFNAIMDKQELDEGLRKKLFNIIYYQNPLKKGKPGKCKYEQNRTVAHASNPIYQEFRIWRDVNNIVIYDEERNEVEIPFELRKKWFEKCFAGRNLTKASCCKDLGYKKSASFTWYSGNIIVGNPLAIISKLTGLADVQTIWQELYSAVDSDKLAVFLRKKYGFDEYVINELLDLDLSKLGYCEYSVKAIRKLLPLLQTGMKLKEAALQVYGVVEFKDVALRNVVLEQHFESYKSLVEAIKKRYPIEEIQFEIDHLLKQGNKGRKAIAQQKRKDEKFRKENPELSDYNLLKLKLWNESGGISPYQPDYIIPKEELFSDKYNIDHIVPKSKIFERGYANQVLCPVSLNEKKGRLTGIEFAHELLGLNDKYEAAIEKFPESKQQFLRMREDEIPDNWVSRLQNSDYNTKCFGTLGGTNIPNKLINRYVNEWGVNQYADQDARHYLAKCWVLANMNQETVNYFDNLKAQSVGKNSESLYRLRPGIAPIDLENAPVFIPRIKFTRKTKYGYTPRFALHGETVYGQRKRLYRNAKGEVVTEYFYKVRQPISKLTPPMVEKIMDKVIQRKIKARIEEKGDHEEGIISLVEHPATHNGKPIKRVSVALGAERIFPLHSTDGNGRTGRKNAFDRKIDYVFSEKNYCLKVWVDEKGRTRKEVTTLLELIDALNNGGVKHDGFLLKENDIVELNGKQWFVLGAGENISIRPVYTLSATNQQRIKAEDWLKIQKLVVNQLGDITKKYGINGAQSRD

SEQ ID NO: 5843 - protein, 1335 aa, unidentified
  REGION 1..1335: note = Description of Unknown: Cas Enzyme sequence
MDKPIRTLGIDIGTASLGWAICEKATRTSEPELKEHGIMVFPEGVDRDQTGEKPKNQQRNKSRASRRRYFRRKRRKQILLEVLIENGMCPLPKESLMAWVKEDIYPTDEAFHEWFKMQPYELRAAALVRPLTAHELGRALYHMDQRRGFRSNRKEGDGEQKKFHSGDAGRGIRGYDETQELLKEHGTMGAVAAHLSKQPKVEAVRRRFVKRDDYVREFDLIWEKQRELHGNDALGAKLTEKLHDEIGAPFDGILFFQRPLRSQKGSVGKCRFEKSKRRAPQASLTAEVFEVLQTVNNIKVDGQPLSDELRQRVIADLFLKKDRFTAEELNKALAKWKVDGRSNYAGEEAKKVKFKGAEVIKDLAKLFGGKNWEPLALEIFNAPDSKIWLDRWSAIKDAEHFGEISELREKGKDTGKKRDLKQYAIEKWGFDEKQLKMLKGIAWPQGYASLSHKAMSKMLPWLRQGVIFSHAAFLANIDDAFGERWKTMGEQQRTKIAGDVQAIIESMRVEKGRTELLNGLVKQYRRHWDDTKNPHGFWTEARRKDFDRAFDNWAQRELGGQLGDAEREALRTELIGKFDTHVDEFGVKMPFIKLERADERIANYLTKKWDLGFDAISKLYHPADIEIYPEARGELLGSPFHPALNNPVALRALHALRFLINALLKSGAMDKNTRIRIELARELNSANERRAWQWFQNDMFERQRKAEEACKQWFDKHMPGTPITDDAIERVWLMQEAEEVLGQAKCVYTNRALSMADVLGGTANTDVEHTWPKWRSLDDSKANKTLCDREYNRQVKGDRIPSECENWEIPKAYKGGEPAAILPNVQKFKEKMEHYEMLVKIRKQDSKQAQDPSAKNNAIVQKNYYTFWYRYWKTKYEHFALESIPLGFTNRQQVEVGMITRFARAYLRSYFPRVDCVKGELVSFMRKEWMGRKQEKDRTSHFHHLVDAITLAATNKETTDRIAHELRQQEERNSSLTPTKPWPSFTEDVIRLKDKVLVYHYSVDPLGRKTKYSKLIKGKRRPVTGSTVRGSLHKDTFYGRILWKDPQTGTKVLRTVKRTRIHDMSDGDVEYIVSQQLRDIISSPEWAGIEKVKAAGGLPVAVKNGDRTNTHVVKKLRLFTQQLKRDKNGMPLPEEDSLLEIKPHRDRVEGRDHKHHLLAANDDNHFMGVYVNEKGDRSFHILTLFDLTKALQRGDRQGFPYNQLPPSIEREVRGKKVKYELWGRNGHPIVIRKDQMVLLYNESPEEINWNDPADVSARLYKVRSFEPDGRLVLVHHMEAQPISKLERKGAFVPGATGVRLRLSLNGLNALFEDVDFKCHPNEVVVRVDGRFTAVS

SEQ ID NO: 5844 - protein, 1439 aa, unidentified
  REGION 1..1439: note = Description of Unknown: Cas Enzyme sequence
MKRILGLDLGTTSIGFAYVIEGDVPGQSTVKRIGVRVNPLTTDEQTDFEKGKPVSVNADRTLKRGMRRNLDRYQDRRKNLTEVLAKSGLITSESVLTEDGKNTTHETWCLRSKAAAERIEKAELARVLLAINKKRGYKSSRKAKNEEDGQAIDGMAIAKRLYDENLTPGQLAYRLLKEGKKTLPDFYRSDLNAELDKVWMEQQRYHPDIFTDEFKKYLEGKGQRATSASFWGRYQFNTAENKGSRGEKKLQAYKWRAEAVSKRLEKEEAAYVITEINNDLNKSSGYLGAISDRSKELYFNKETVGQYLYKQLQNNPHTRLKNQVFYRQDYMDEFEAIWAEQSKYYVELTEELKTEIRDIIIFYQRKLKSQKGLVSFCEFESREVETEKNGKIVKKTIGLKVAPKSSPLFQEFKIWQVLNNLLIRKKGSRRRAVKKSDNSGDEDIFAFDMHAKQLLFDELNIKGNLSASKALGLLGYKSQDYELNYTVLEGNRTSKALYDVYLKILEIEGYDVKDLLKTKSNKDEVELDDIDVPATEIQKMVREVFEDLGIDTQILEFNAELDGKYFEQQASYQLWHLLYSAEDDTKKYSEEDTLVFGNENIGLKKKLCSKFGFKPEHSKMLVNITLSDDYGNLSSKAMRRIFPYIKEHRYSDACEHAGYRHSKSSLTKEEIANRPLKGRLELLKKNSLRNPVVEKILNQVVNVVNTLIDTENAQRKAQGLPEDFHFDEIRIELARELKKNAKERAEMTANINAAKLKHEKIVKLLQTEFGVKNPSRNDIIRYKLYDELKNNGYKDLYTNQYISREILFSKQIDIDHIIPQAKQFDDSFSNKTVVFRQDNLDKGNKTAYDYIESKYGEAAAVDFVLRAQHLFELGQKNSEEGISKAKFQKLQKRESEIGDGFIERDLRDSQYIAKQAKNMLYDVTRSVVSTSGSITERLREDWDLVNIMQELNLEKFRKLGLTEMVEKKDGTFKERIVDWTKRNDHRHHAMDALTVAFTKHNHIQYLNYLNARKDVSHRLHGNIIAIEAKETELVTDSDGNRKRVFKLPIPNFRQVAKEHLENVLVSHKAKNKVITKNKNRTKAKNGERVKVELTPRGQLHKETVYGKYRYYQSKEEKVGAKFDEEAIQKVANPLCRKLLLKRLAENGNDPKRAFAGKNALNKNPIYLDDAKQEVLPEKVKLVWLEEDYSIRKDVTPESLKDVKTIEKILDGKIKSILLERLNEYGGDPKKAFSDLDKNPIWLNREKGISIKRVTISGVKNAEPLHYKKDHLGDYILDDEGKKIPVDFVSTGNNHHVAIYRDENGNLQERVVSLFDAVQLVNAGEPVIDKTYNQGLGWQFLFTMKQNEYFVFPNEQTGFNPKETDLLDPRNKKLISPNLFRVQKIATKNYMFRNHLETNVEEKKELKNVTFIHIQSCNLLKDVVKIRINHIGDIVGIGEY

SEQ ID NO: 5845 - protein, 1115 aa, unidentified
  REGION 1..1115: note = Description of Unknown: Cas Enzyme sequence
MHYRLGLDVGTASLGLAAVSLNTDRQPEDLVWRAIRIFSEPLENDQGKLKSKKAARREARMQRRQIDRRRARAKGIAALGNLLGLTPQPPQPDNGSNLPQLRALAARERVELNDLLHVFLRMAKRRGYAGEFRPKKEGAKLGEVEGGSNDLKAAMRQLAEAKGVETVTLGEYLYHRLQQGLPTKLKVKENNSDTSIPLPNLYALRGQVEAEFDHLWQTQAVYHPVLNSMHNGQPLKTIFQQAIFYQRPLKAVGGMVGQCSLEPTLPRAPRAQPAFQRFRIEKTLADLRWGAGKRAEVLSAQQKNVIRQLLDEKEKVSFTAIYKALEKAGCPKPETRGLNLEGLSRDELHGHKTNHIFRKKLGLENEWRALDTRTQIQAINFLADLGSPEQLDDPQWHTRFVKAVKSDKKDKDGKWIYEDQPRKFDKPFVEFINLLKENKEFDRLSKMDFDGGRASYSIKVLNRLTEWLTEPWWPGAWSGEMRVDEDAAIRVCYPELQAKPSAQHARLPAPKPTGNAVVDGALRQMRYEVNRMIDKLGAPPAEIVVEMAREMSLGLTRRNERESENAKNRRARLDAEDAIRESGATVTPSRVRRYMLWREQGEKFCPYCEHTINLEDALNGAETEYEHILPRSLTQVGMKRSEIVLAHRSCNQEKGNRTPWAAWGDGRDPSRWGVVEQRAAWFGSDAKPRQFRKAKLLLLKDFEAEVLTDESIAEFADRQFHQTSWIAKEAALWLQSICPSPVSVSRGQLTAMLRRKWKLETVIPEVRIAEGLPVLDEDNKVITPEEFERYKPVWEGHRAPSRELHTDRKLNKRIDHRHHLIDAIVIALTSRGLFQDMARRYKQESENCAEGEHPRLKTPEPPLKTVREAALAAVQECPLTIKPDRYPDGAMFQGTAYGVAQKDGEDKLRLTLRQPLAELIDRKKGTVEQARKAITAIVSDDIRGLVSKAFEERITEGKSAPAALAELIYQEYFGKRLPIRKVCCYTEKYAEEATVIVHNSRNGEHKKYLLNEGYAYLECKPEERPRPIPIREAILIKTKRVNNGVTRIYKGDTVKDLDDGLLYRVCYFKAAGTIALLPICEPRSFKEANEKAARECKVGKTISFGPAAKRLVVVE

SEQ ID NO: 5846 - protein, 1104 aa, unidentified
  REGION 1..1104: note = Description of Unknown: Cas Enzyme sequence
METKQTTKLRYSLGLDIGSESVGWAVIELNEHGQPIGLVDMGVRAFDAVRQEQQKATTPAQERRVARSQRRRLRNKKKRKKRLIEACINYGLLSNKQEADACLVTLPGDKSPWDLRVEGLDRKLDRREWFRVLYHLVNHRGFKSFKRGEDLEKGRKDDVKKMKAAAKQLSSEWRDRGYRTVAEFLCNDSDWISKHGLRKRNKEGSYEFTILRDDLVEEAKLLFEQQRRFGNEFASAVFETEYIDILDEKPRLLEGEDLKAKVGYCTFEPDERRAPKATFTAQKFRALQIINNLRFINPETGEIKESLTSDEIKRLFNLALNRKEVKAEQILRELGLRGWLIEGYDKNNEKIIVLEDFHKLKEALEKKFPETWGKLLTDIDLYDQVASILTYYLAPESTKRELQKLQLDDEVIDALLNVSFKGHASLSLKALRKIIPYLEQGYKYSKACELAGYDHRALPEKHRRNHIPPFESEEFDKQLKAEYFGITNPNVKRALAQARKVVNAIVRHYGIPSRIGIELAREMTLSRKRREETRLNNERRKERENIIKKLKEEHNVDNPSAKLVDKYILYELQGGKCAYSLKQIDLNRMIHDPSYVEIDHIIPRSISFNNSFSNRVLVLASENRNKGDRLAAEYVKSYYGEEHYNKCLALFEEALKKPHDHRHRKRELALKLKLFKKESLTDEELVEFRERYLINTRHAARFFKKVLCAYLDIEDPRVITINGTITRDLRHLLGVEDLKEGRFSDKHHAVDATICAICDFSTVYKLSNYYKYKDGFYKIDGDTLISQNGLRLKLEDLAWPSFREDIVKRLETLVVSRAPNRKVTGRGHRDTIYSLKHVKKVVDLPEKGKISISSDAPRPTTRVRLDSLKPEQIKAILDNPEKVLVDYQSNYLLYERIIKRLRETEPDDGNKERWAVLAFGPDTEPIRVPSKDGKEGPVVRKIKIFTDILSGVAVRGGIAPYDNIVRLDFYRRKEKNGRYKYYVVPVYAADIAMGIVPDKVATTGKPESEWKKLDDSFEFLFHIFKGDCLRIYKDLKEPPTDMYFTSFDRNTVRLKGNYLDRSNKNKQGKIVTVEESITNAARIQKLHVDILGRLSVVEKEKKVF

SEQ ID NO: 5847 - protein, 910 aa, unidentified
  REGION 1..910: note = Description of Unknown: Cas Enzyme sequence
MRKILGLDLGTTSIGWALVNEAENESENSEIIKLGVRVNPLSIDEKTNFDKGKPISTNADRTLNRGARRNLQRYKQRRENLFEVLLKNKIIEKETVLTETGYNTTHETLRLRAKAPNQQIELKELARVLFSINKKRGYKSSRKAKSEDEGNAIDGMSIAKELYENKITPGQYVYQQLLNKKKYIPDFYRSDLQNEFNTIWDFQKQFYPNVLNDEMYKKLEGQGQQSSRKRFLAIHGIYTAENKGKRDAIKLQHYKWRSEATTNQLPIDQVAYVLVEINNDLNKSSGYLGAISDRSKELYFKKETVGQNLYRQIKENNHISLRNQVFYRQDYLDEFEQIWEEQAKYYSELTSELKNEIRDVVIFYQRKLKSQKHLISDCQFEKRHKAIPKSSPLFQEFKIWQNLNNLEFKNTKTKEKIVLDEDLRISLFEELNLRGNLTEKDILKFCDLDTTWKSNFTTGLEGNNTNKALYNIYQYIATEEGYGFDWEKKNAKEIQEELKSILPQINIDATILNFDANLEGQTFDKQTSYQLWHLLYSAEDDTKILEKDRLIYGNSNVALKKKLHTKYGFKPEYAAMIANISLQEDYGSLSSRAIRKIIPFLQEGNDYSESCALAGYNHSSSLTKEELEKRILKPKLEILHKNSLRNPVVEKILNQMVNVVNQIIDEYGKPDEIRIELARDLKKSAKEREETTKFINSATKVNDDIKLLIKKEFGFTPTKNDLVRYKLWLELKNNGHKSLFTNKYIPKENIFSKDIDIEHIIPKAILFDDSFSNKTLAYRAVNLKKADRTALDFIEQEYNNEEINNYKLRVENLYKNGDISKGKYKKLLMSIANLPTDFIARDLVNTQYISKKAKSMLFEVFQNVVPTSGRITDKLRGDWDLINVMKELNLPKYRSLGLTEIQERKGNKKI

SEQ ID NO: 5848 - protein, 912 aa, unidentified
  REGION 1..912: note = Description of Unknown: Cas Enzyme sequence
HEFGRILLHFVARRGFLSTKKQAAGDLVDDPDTIIFLNEIDNEPVDSKEEGAFKADIKEVHASINASGSRTLGEYLHKLGQGQCKRNRQHEGGHLRTERKMYQDELALIWKEQEQYFSHLPTDFMSRDQGVLQIIFYQRPLKLKKDRVGNCSLEPKNYRAAMARLETQQFRYLQDVNNLQYFERHTDQWLSISYEDKKTLINYFEHNPRVTITGLKKQLGLDKLTKINLEAKNLKGNITACEIRSVIGEQWDHYEEEKQAALVEDLLSIKKKSALKTRLISHWGMTKAKAIELCLLEFEPGHGSLSLKAIKKLLPFLQEGLIYSRNDHATGELGALQAAGYFDAEKEQQDFDTLGAAVKTSNPIVNKGLHELRRVVNAIIKQYGKPDTIRIEMARDLEMNTKRYKENEAQQLKNRKENEKAVDAYKNLSLGKYPSHDDKIKYRLWDEQGHSCAYSNKTIMLSQVFTAQVEIDHILPFKKSLDDSYMNKVLCFVAENRAKGDRTPKDTWGGDENKWLQITQAISRWKGLDSKVKRFYQTEADLQKRDFIASQLNDTRYIAKLALDYVQQLGCDVSVTKGYVVSQMRHQWGFNDLIGETDQKERTDHRHHAIDAVVIAATSRQMYKKAVTQIERNKLNIARPYESIKDELADQLQKTIISHTSQKKLSGGLHEETGAGYIEKHGGLVYRKNLAPDFTVKNANSIVDKTVKELILAHLLKHENEPKKAFADGTIVYHKDDKTPIKRVRVLQSKTTKEKLEQNKFGVRDKSGKVFKYMSYGNMHHVEILQHNKTGKYKGVFITMMEASHRAKGIRSKLNPEGAKQAIIKRDHGSEWVFKMALHRNDIVSISSGKDQIYYRVQKLESMNNRFVLRANQAATLNNKKDELVISINQESFDRCSLSLHQINAIGIITDD

SEQ ID NO: 5849 - protein, 1084 aa, unidentified
  REGION 1..1084: note = Description of Unknown: Cas Enzyme sequence
MFSQRNNPYCESLSNCDSKIENIIEMASKRILGLDIGVSSVGLAIVIEDENGRKDIEKLAVRVIPEDPNFHGKFYSGNTASKNLERRIKRGIRRNNQRFKLRRDRLYGILKKHEMFPNKALFELNAEKLYELRARAISEKLELQELGRVLIHLNQRRGFLSNRKADNEENATEYKKAIENLETERANLTIGQKLYKELKESENLHEIVLRERTYLRSSYIEEFDRIWEAQKEYYPDLLTGGSQEELVRGTLYDEIKNKTIYYQRPLKSAKGLVSECEFEKFHRSIPKSSPVFELFRIWQRLNDLNWRLDDGTLVKPNLEQKKELADLMIKGKKLNSKGLLSISEIKKFFGFSRNQRVYFNFKEIEGSKTAKIIREALKKAKVKNIDALLSFDYHQHDEKGGLYELWHISYSLPDKESIISTLQKRFGFTEDEATVIASEVNFKSDFGKLSSRAIKKILPYMEEGLQYSEACDKVGYDHSGYKNTEAIADKLTQVKPNSLKNPVVEQVLNQVVNMVNLAIDEYGKFDEIRVELARELRNSARARNRISSNINRNKKENQKIRERLKDEYGFNIVNGRDVKRYKLWQETDKQCLYCSNPITNTDFLNGNAEIEHILPKSRSFNNAMNNYILSHKKCNSDKGQRTAYDFMKNKSEADFEAYVDKVNELYNAKKQKISQTKFDNLLCSGDDIPSDFIERMKKDSQYIAKETVKMLKTICPRTLTTTGQVTDLLRAEWGLKHVLEELGLPKYRAIGQVETKTIKDKEGNIKQIEKIIDWSKRDDHRHHAVDALICALTDQKVIFKLNNLNKIFQYERDALSPEEIQELERINQTNFDLKHFVEQAAYEFKEPIDSLRSKTKNHLESIFISFKKPTSKVLTKNLNNIKNGPDQITWVPRNRLHEDTIMGERKRRSNKKIKLNMKFDRVEDVVSELEKEVIERHLKKYDNDTNIAFSSKTLKKDPILIEGEKLESVSVYEVTNSKRVPLSESFTSAQTEKIIDDRIKELVKKRINDFRSIKSAFKDIEAEPLWFNKEKGIKVKSVSVYDESKVIDVRSGTAKTGGNHHALIYKDENGKYHDKVVSFNDAVQ

SEQ ID NO: 5850 - protein, 1378 aa, unidentified
  REGION 1..1378: note = Description of Unknown: Cas Enzyme sequence
EEKGIEFPKVKKRTESRGKRRNYQAEKYRKWELLEFLIQNKMCPLSIDELNEWRKYSKKDKRKYPQTEEFLNWLRFDFNGDGKPDFHLLGGDKHESYYLFRAKAVSEDQKDKKVFQENPQILGRVFYHLVQRRGFKGRDEEEAKTMLQGSKDGSTKGRNEISEYIDTYKSLGAALYHYQKDHSKNYEKVRIRQRYNLRKDYENELKEICRVQGLSDKDYKKLHKAIIWQRPLRTQKGLIGLCTYERNKRRAPISHPLYEEYRTWVFINNLKIEAPKGEELDTYLREKIYPLFLKSGTDFNLKTILDRVNKDAGKVHSKFADRPETKVLSAKLLKKFEDLLGENWKKDHQWNDSFVREAQPSKKNDEIYTVEDIWHILFTFDNEEKLKEFASTKLGLSEEASTKFSKIKLQQGYATLSLSAIKKILPYLHKGFVYPKAVYMANLQKVLGTQEVSKDFVDHFASEIDTIYENGATEKQLNNILNSLFRAELVSEGDYHLTEHEDLDDADLDLIQQKIIEILGEKTWKETDEITKKQHFDYIKNQYKQFLQKPFQAKKAGFIEQPRIHGQIFKYLQDHYPEQVPDKNIKYLWHPSEQEKYPNAFTYQEINLKSKTLFIKEAELDRFLHKNPNAEAEGISLELLGDPEPISKGFKNPMALKTLHRLKQLLNFLLKTQQIDKHTRIVVEIARELNNANYRKALEKWQSERERENESYKKRIEEINKECNTSFDLNNKSLIRKIRLWEEQDRKCLYTGEVINMCDVLNGEYYDIEHTIPASISFDSELKNLTLANKDYNNHIKGKKYPTQLENYDDASTFNGKRIEPILKNIESLFGKRTVYRKKVKKRGVEKEIIVEKWAKIADLEKQLDGLKNLSYIDSKDAKDYKIQQRHLLKFKLDYLKQKLQTFTIEEYKASWRNSQLRDTQIMTKYAVPYLKTVFNRIEVQKGNVVNDFKEIYNVKLFGEKKDRAKHSHHAVDAAILTLIPKPARRDQILKEYNLAKDNGVARTYHEQPTEWKDFKTYYIKKIEEETLINNLKDQHTLTPTFKKVRKRGKIVKKENGKPMWANGDTIRGQLHGESLYGAIKQAKRDEDNKIVFDDDKKMILEDDIKLVIRKPLSYAKDAVSAGFKTLKEIEKVIVDRALFEMIKTQVDEADSFKSALEKGIYMLNKKGEKVNKIRHIRCFDRLKHSTAVRPHNHDFISDKEYKQTTYAQNGENVFCLFYKGELKDKEERAINIIGIFDLAKLDIQDEKDFFKIPHFSSLQKKKTKLPLYAVLKSGQKAIFYKENLEELKDLSEKELSDRMYKMYQFEGDSNKIKFKHHLISGANTEINKSLPKGYKEASPFGSFEKQPLMRLTAGNWNFAIEGKDFEMDLDGTINFKL

SEQ ID NO: 5851 - protein, 1048 aa, unidentified
  REGION 1..1048: note = Description of Unknown: Cas Enzyme sequence
MNRFAFDLGSGSLGWAVYGLDGVTSNPIDLLNLGVRIFPTGRDPQSKESNALGRRQPRQQRKQIDRRKKRQLELEECLMAHGLMPTRHQVEARNVFFALDPYIARERAARGKADPYDLGRAIWHISRHRGFKSNRKTDRANEDEKGKIASASADLRQKLVDAGAPTYGAWLATRHENGEPVRVRPTGDGAQTAYDFYPTRAMLEAEFDHIWRMQAAHHAGLTDEVREAVRDAVFFQRPLKPVKPGRCTFFPNEYRLPKWHPLAQEFLILQQLNMLRLVDESGERQLDPTARDLLKKHLMSGEKLTWAGLRRSLGVGSEVDINLETGGLKGLAHNAVVARLAGTAKKPGPLASTWNAWNEDQRMRLLRILDEAATPEEAVERLMSDCELDFEAASRVEKITLPDGHLMIGEHASGAIVQVMREDVIVYSDAVRVANERGLFGEGVDVHHSDLRPDGDPGLERLPRYFELPTLQRMIGTGTGNPEDPPEIRFGKISNPTVHIALGQFRRVMNALIERYGKPAQVVIEATRDMAKSARELNEIDIEIRKNTRRNDAWRAELEEAGLIDPGARVGDRLLRMRLWEELGKTPADRLCPYSGEPIGLHQLHSDVVEIDHILPFDDTFDDSPANKTVCFRAANRIKGKRVPGDAWSGAELEAIVARVKGAPGMSRKLWRFLPGAMEKWQDGRGFEDRQLHATGYLARVVRAYVEALFPKDGTSNIWMPTGRMTAMMRRRWGLYLPDHNAKTRDDHRHHALDAAVVGVIDRRTIQKLQTYARRIGAEELDRILPDPPEPFVGFRDQVMARVARVRASHRPDHAVSGRLHEDTAYGLIRDVPENQAARTIGNLVVRKPVGSLSAKEIGQVRDEKIRAELLGAMKGLGADKKGLAAALQEWSARTGHRRLRIIKPAANARAVCGTDGTAYKWMLPGEIAYLDVLEDAEGNWFHHAVDIWAAQSEDPEDARRDHREARFIMRLFKNDTLQLFDLDEDGQPIAGSNGIKRAVRLEPSANRVRLVGLNEAGVFDNRHGNTKDPFRWDFANIGKLKMRRVRR

SEQ ID NO: 5852 - protein, 1001 aa, unidentified
  REGION 1..1001: note = Description of Unknown: Cas Enzyme sequence
MRYVLGLDIGISSVGFAVCDLTGKKIEHAGVHLFERPEVPKTGASLASQRSAKRRQRRQIKRKRQRRSQVRLLLAEFGFPTDELSSVISRKDFEDRSNKTLWDIRAEAVERSLADDELAAVLFHIAKHRGFQSNRKRDRRKDEETGKINKAIESLRAEYQQADCKTIGQYLAWNKEHQRNRVENYEFMITRSLLIEEAQLIFEKQREFGQMLPEEFEQQFVEFLRFQRPLQSTEDLVGFCSLLPSEKRAPQSTPSAERFKLLQKINDLSIKDQFGEEWLNESRRLELIKFCERQARTSFDQIRRHFEIPPNYQFNLVRYDSKISDPKQRAKKDKDKEKNLLLGNLECSFKLSEILEDGDEWSREQIDQVAHILTYQMDDLKLTEFLESSLPDASAQQIEQLSELDFDGTINISLAAIYRLLPHMEKGKNYYEACQLAKLPEDNSGDSHESILSPFEDLRNPVVNRALSQARKVINAVLRKYGPPTTIRIELARELGKSVEQRKKISKRQDENKKESEKVRQEFQNALGFEPKKDEALRYRLWKEQGGCCPYSGKCIPRESIRGNETQVDHILPISRSFDNSYFNKVLCVTKENADKKNRTPYEYMDGNKFEALKLFATKLPKEKQRRLLNQYFGQPDQEEAWKSSALNDTRYLTRTLKNGLERSFPTVKIEPINGQITSYLRSKWGLPKDREVHTHHAVDAVILSCVGRAMVQTITLYHQDIRRNKHEEKPWPQPWKGFREELLEKVDGIFITRSPQRKITGALHNETFQRHNPPQGKEKIALVALTKEKLERLVEKDGRSKKLYEVLKQRLEAYDYKPEKAFKEPIRMPTGETAKQKPLIQSVMVEVGKSKNTSAYAIDDTRLVENLGQARIDVFRHKEKYRISVERKLDLLQSCLSDRVITRNRQHSDWTKIDETFDFQFSVYPDDLICIQEKKDSPRIYGYYKTTDISVGLIKVASYNRGIKQELRIPFTNALSIEKYSISYLGILHKVSREQRIPLA

SEQ ID NO: 5853 - protein, 1024 aa, unidentified
  REGION 1..1024: note = Description of Unknown: Cas Enzyme sequence
METIWGLDLGTTSIGFAVVRMDIKKEQGEIIKTGVRIFPEGVNPEKNQFIPRNKRRRDMRLHRRQLRRRRIRRIELSRKLKEMTLLPDFASDAWNQLMEQDPYVLRKNGVSKRLELHQFGRAIYHLVQRRGFLSNRRSVGSEERKGEEGIVKSALHDLDQELGESTLGAYLSEQEIKRGRYLDRKRVTEEFKRLWKCQRHYHPEVLTEEMEKEFFEFIFHQRPVFWRISTLGSCRLLPEARLCLKGSWLGQQYLMFQELNSLRLEGSNEPLPIEERQLLIEALLNEGELSWPGCRKILKTSWQKRGIPAKTKFNLEFGGKSKLAGNRVVSSIRSVLKENNCEVKDIEKLYQLLPQWHFEILYKEVGEGRNARILMRNNQEIESQERFFVNQLMNEMKLKETITEKLVSLDFPAGWLSHSRDAIERLMPHLEQGFVYSEACDRAFPSHRVVEGEGLDFLPSDQSYLKEVRNPTVKRALNELRKVTNNLIRTYGKPNRIRVELARELKLPSTKRNDYRNKTKQRENERTQAREAIREANFRGNSLEIEKYLLWKESDEKCLYTNQSISFSALFEEGRYEIEHILPYSVTLDNGFMNKTLCETNFNGFKNNRIPYEAFKNSGGEEAWKMFAERVKKSKLPDPKKRRLLAQKIEDLVGDDPAERQLRDTAFIAREARDFLMKLFTKEEGKAIPVETSNGMITAQLRQLWGMNQLLAEGDKKNRDDHRHHAVDAVVVAMVHPGTVRHMSFLSQNWLRGERTQFPAPWMDFFHDVQESIKRVIVSHKVQSKVNGKLHDELLYGKRRDQTGSKKGSSIFKRRVSLQSLSKPQLRKLKEGTLEAAWDAGGNVQQILRNHLEHHKDFSTLPFFSLEHGEKRFIKSISLLYNKKDHLVEDLHGKQRTFVDKNENHHVAVYENAGGTIRFEVISRMDAAKNLSQLGSPVIREIGEGYRFKFSLVINDAVMSYDRENRPNVLIVQSIWDSGNIVFRDHRDAGNKDRRINKSVSTLINEGWEKCAVDPIGRLAKKND

SEQ ID NO: 5854 - protein, 1066 aa, unidentified
  REGION 1..1066: note = Description of Unknown: Cas Enzyme sequence
MKNKTTLGLDLGQSSIGWALLKNNNFSNEPCELIDWGVRIFPDGRDAKSNQPLAVERREKRCSRRRRDRALARQRELIRILTLHGLFPVDQKDQQELKYENPYKLRALAVREKLSLFEVGRALVHICKHRGFKSNRKIDRNDLDESSGMKVGISKLKKTLNGKTLGEFLFERYQNGEWTRFRPTSNKSGKNIWDLGYPDRSMYEAEIEKIWDFQKKHYDELTPELLVKVHHIIINQRPLKPQPVGRCTFEYKAVGKAGERAPLSISLVQQFRVWQEVNNLELETLNGKQSLSKDELNLIASHLLCTQKGKSMVNTKGTLLFKTIRKKILNLESDCPFNLESAGRDGLKADTTARQLSHSNCFGEAWFQLSEKKQTEIVQLIRDEPEEEPLLQYFIDNYSMTKNNAKQISSIRIADGHAKLSLLAIRKILPYLQAGFRYHEACQKAGYHHSARNPEMIYDELPYYGEVLEDVVIPPQDRSKYDREKEPEKYWGKINNPTVHLGLNQLRKIINAIINKYGKPDCIVIELARDLKRTEKQKKQYKDFQRKNTLQNQKIDSELDKLGIKKNRENRQCFKLWEELSTNPAARCCPFSREPIAIHQLFSPEVEIEHLLPFSQTFDDSMANKTVCFRHANRKKGNRTPYEAFYGSDEWASIMSHAMQLPKNKRWRFEADAMNRFAESGDGIARLLNDTRYLSKVAHQYLNTIVAKVNVVTGQMTAILRRSWGLNHILSDGVKNRDDNRHHAIDAFTVACTTTRFLQKLSSTAQKVREMELGKPDEIFANMPSPWDHFNPDKLKDSAQRIVVSYKPDHGLKIGRKNDRNNSQISISPLHEETNYGLISQGKKDKVIVANRVELQSIKKAEKNIKEIADQRVQKSLMDANRVITSDKEWQTFLSEYTVKTGIRRVRIHREKDIRTMRKITHKDQAGKEHFKYVATGGNFCADIYVPLFGEKKGKWRSEIISNFDAHQRGFTPNWKKEYPTARKIMTLQISDMVELEINGVSDLYKVKKMRQDGRVYFRAHQIAREKGDELTLALPASKLQQYKAKKASVDILGKVQSRAVKVKIS

SEQ ID NO: 5855 - protein, 1127 aa, unidentified
  REGION 1..1127: note = Description of Unknown: Cas Enzyme sequence
MIYRLGLDVGTASVGIAAMELNQDGEPVRLANHLVRIFDEPLEKGQGGLASKKVGRRKARMQRRQIDRRAARLRRIAQLSELLGLKCGDILPDDGNTLPRLRAQAATERIEIADLLRILLRLSKRRGYKGEFKENKKGPVAEGSSELGLAMKQLAESQGVNEITLGQYLLHRLENGQPTKLKIKEVGDDTKSKKEQTDGDASGALKNLYALRKTVEKEFDIIWQKQSTFHDILNQSHNGKPLKEHFKEALFYQRPLKSASDLVAQCSLEPTLSRAPRAQMAFQRFRIEKTLADLRWGAGRNAQPLQTQQKAVLRDLLDQTDKIKFEGIYEELEKAGFPKPQGKGLNLDRASREELLGNATLAALRKLDKYGKKHHPDRAAELEKQFRALDEKTQIATINFLAEIGSPEQLDDPEWHQVFVKKDGTPRRFNDALVGFVNQIKEHEQFDRLNKMGFDGGRASYSVKALNTLADWLDEPNWPGDWQADMKRMDEEAAIRVCYPQSLNREVKQLDKLPAPESTGNSVVDGALRQIRWAINKVIDELGMPPSEIVVEMAREMSLGITRRNERESDNSAQQKARSFAEKEIRAHGQTPTPSRIRRYLLWAEQDKSFCPYCNKTIGIAEALSGAATEYEHMLPRSLTQVGMKRSEIVLAHHACNQEKGERTPWEAWGNTDRWQSVEAAAARFEKKKSFRKAKLLRLKDFEREVLTDESVNGFADRQFHQTSWIAKTAAQWLDCLCPNKVSVSRGEMTAMLRRKWGLETVIPEVRIESELPVLDDEGKPMAPEDFAKLKKFLEGHPVTRSDREGNPGFDFNRRPDKRLDHRHHLIDAVTLALTSRGMFQKMAKNYKAAAEKMQPCDGETVEERERRMKGETRLRLETVEPPLRDVRAQAMEAVRECRISIKPDRYPDGAIFKDTAYGVAQREGEEKIRLTLRQAVADLGKSQGKTSVEAARKAIASIVSDDVRRIIAQVFEARLANGISADVALKEPFVHPLYNKPIRKVCCFMGYAEDAQPIVHTSRSGEHRKYLVNEGYAYLELATDGAQEPRLVKIRDAMRDKYKPAKPGIVRLYKGDTVKDEKDGRLYKRLFSQIMLLSRPAKRHSEPLSGFRADSVFAFERAEPAQVVCQ

SEQ ID NO: 5856 - protein, 1539 aa, unidentified
  REGION 1..1539: note = Description of Unknown: Cas Enzyme sequence
MTKILGLDLGTNSIGWAVVDDKENKILGIGSRIFPEGVKADTIGKGDKEESKNAARRNSRQQRRQFYRKRLRKIKLLRTLIDLRMCPATHLELDIWSKWDKTKGKAGRKALDSPSYEEWHRLNPYVLREKALHNDLTKFEMGRVLYHLIQRRGFLSNRKGKDDGKIYKGKEGMVGITETQEQIGGKTLGSFLNSILPKEGEPFKLITDEKGNELRARARYTLRDMYVEEFEQIWNRQSKVLDLDNKKALKTKTQFLKGSLNNNRNKKKIEKLKELYGAENVKIEELKGEATNKTLYKVTTSKNVSLKIFLGGHIHHDEDGNVKHRSQDSVLFWQRPLRSQKGLLAKCRFEPDFKNKDGKYLQKGKTPCHLSHPLYEEFRAYQYINNIEYGKKQKLEETQRLQVLELINSKDSNFNFSEIPKKLKMEYEKWNYGDDQKVAGNKTIKQLSALFPNEVWENNKEEIWHSFHFFDDNDNLIEKLKNDFGLEENDVEKVEKIDLKEGYSNVSLKAIKNILPYLKRGLQMSDATILGGVRNAFGNRWDYFTEAHEQLENDILKINHNKINKEGEAIEKIKNYLADSENKFGFSTNDKSFIKLYHHSQEIEEKELKDKLDAVENLRNPIVQQGINETRRLVNQLIEEYGKFDRIQVELGREVKNSKKGRQEQSRKIYDNTAKNDEARKLLTEYGLKHDRENIQKVLLYKEMQEKGVTTICPYSNKSINISDVLGKENKIQIEHIIPKSVSLDDSFANKTLCDAKFNGLKGNLTPYQFYLKNSDSKLWGGATSWEDIEQRAYKVLPYAKAKRFTSKIKVEDADVKSSFIERQLNDMRYISRKTKEIMSQICEDVRVLPGGLTAELRHLWGLNSILQPVMLVDLPTYKLEEGKVIPHYVVMDENNKPVLTLPIYNDKPKLGSNETTITGKVEKGIFKTTEQYVKLITETPELVNGEYWLNLKLSEPKKIIRIFKERPTTTEDEIVLRGKVEKEKFKNDGIGLVSAKGLDNGTYWAKFTIINKKFEAPEKDKQPKKTGKQVLLFGEVKEGFFKSYIYSCETNELDGKYWLLLDIDTENASFERAINERPIVSDTKIIIEGSINDEGLFVSEIDAQHQFKTTEKPGKYWFVFDILNELTDFNAIEQPKPLLQEKQTLVEGTIWVDKYTGEIKFDPKKNRDDHRHHAIDALVIALSKQSYFQQLSAYNAARDAKKKGLTFEKEQLDFPDPWTGFHTDAKKEAEKILIAHKQNRKVLTEVRKKITKNGKTFTSVGNAVRGQLHKENVYGQRQAPFETTKGYHMRKKVVDLKDNQLDKIVDLEIRKIIINARKEEVTIKKQIDALDKQKKKVHSDEEENALNIQIIELKKQIELLYTLKNKNGERVPIKKVRIREEMSNAQQVKVINQFVNPRNNHHLLVYVNDKGELDKNIVSFWTAVKRLKKGDDLIQLPKDGLEIVETFQENDMFILFLEKDRNIEDLSQKEMFNHLFKVQKIAGADYFMEICFRRHTDSKISTEADYVYIKGFGDGKTGWYSFNPIKVQITPTGKIEKG

SEQ ID NO: 5857 - protein, 1066 aa, unidentified
  REGION 1..1066: note = Description of Unknown: Cas Enzyme sequence
MSHLVLGLDLGPNSIGWALVNDDPEHPVESKLVDLGVRVFPEGVDNFDTSKELSRNEDRRVARGMRRQIRRRARRRQQLKQALIDSKLWPSDPNDEVVLYNTNPYELRARALKERLEPHEVGRVLLHLNQRRGFLSNRKKDRGDKEVQGMLAEINENEQQCKDGGFDTIGAWLADKQANIDHANREENDHVRNRHLARSQYVDEFEAIWSVQAKHHPKLLTEELKVGKLGKQTYPVKPIPRWHEHRQGLSPLESFGIYGLIFFQRPMYWPKSVVGLCELEPKERRCQRSDRRQQRFRLLQEVNNLKYVDPDTHLEQKLDDKQRRLLLDKLSHTKEMTFDQIRKALDFLESVKFNLERGERSRLKGVPIDALFAAKDVLGQEWYDRPEQQKTEIVAVLLDNERDDDRIIARAVAEWGMTAKEAEAMLGVDLPAGYANLSCKAIEKLLPHMERGLLYMDDDESNSAMHAAGYLRRDQLRRRIFDVLPDPARTPNCPIGDIPNPVVKRTLTEIRKVVNAIVREYGKPDAIHLELARSVQMGKEKRSEYSKMIRDREAERDGIVEKLRESGVRVTRDNILKYQLWEQQNQECIYSGKPISFEKLFGEGGGVEVDHILPRSRSLDDSQANKIVCLRTANAGKGDQTPYEWLADTQPKQYEQVCQRAGMLMRSGRMPYAKYRRFIQRELELDKFIARQLADTGYITKATMEYLRYLFDKDHDVLGLKGQLTAELRYHWGLETILEELPDSPAWHEADSGKLRPGEKNRADHRHHAIDAVVIALTNRRRLVQLSDIVKRGGARAHGEILEDPWPNFRENVVQAIKKTNVSHRVERKVAGKLHEETLYGPTRTPGEWVLRKPVIALSANEVERIRDATIRQIVVSALADAGIDVGRGKKPDAKKMKEALSKLKMPSGVPIRKVRLTKPEQTIQPVRAGRPDQAFVKPGSTHHLCIFEFTENGKTKRDAVFVTMLEAMNRLKRREPVIQRTHPERPDSRFVMSLSAREMLLANWKDGERLLTFKTASSTQGQIWFAEHTDARKSADYKQFVANANTLDAKKVTVDPLGRIRWAND

SEQ ID NO: 5858 - protein, 1176 aa, unidentified
  REGION 1..1176: note = Description of Unknown: Cas Enzyme sequence
MTKILGLDLGTNSIGWALVNIETKKIQGIGSHIFSPGVNYEKGNEISKNATRREKRQIRRQTFRRKRRKRKLAQLLSKYKMFPVIYDLETEITKEKLNEELKDFFAINPYECRAKAYKGEKLSLNEIGRIFYQFAQRRGYKESLKTSEQEDEGKIYDGKPKEGIIGINQTREKIKEFGTLGNYLNNEDPHKTRLRNRYTTRNMYLDEFEITWESQRKYYPEILTDELKTTLGDHENGILFYQRTLRSQKHLIGHCTFEPDKPRCPISAIPFEEFRMHQFINSIKHGENPLDENERQIVVELINSKEKKFDFKELKKKLKLEKGTFNYKDDYKITGNRTISSFRKIFGKKRWDSMSNEEKEKVWHIKLFATSKEWLSEYAKTNWELDDKSVEKLLKFRYAEDYSNLSRKAINNILPYFKEGKLYNEAVLLGGLKKVFGAECWKTILDEEKKTIEDTVIAIAGQKSEPGKETDKIKNFLRKQYKLSDERLSKLYHHSFLEKAESDSEKLPEPENLRNPIVQQALYELRKVVNEIIKEYGKPEAIKVELARELKMPKKMRDKIKFDNMENEKRNDEAKKVLDDYNKPHSRANIQKVILWEECDHSCPYTGEKIGVHELFDDGYVQVEHIIPYSVSLNDSMQNKTLCLADENKAKGDRTPFQFYGSNDKKWDEVKNRAYKLFKNNYPKYKRFISKQIPDVDEFISSQLNDTRYISKASKNYLKSIFSNVDVTQGSATALLRHYWGLDTILNKSINIENLEDGEYYGAVDENNQFVDILEWNFNTKEKDLESLKKKGKLLQGKVKDGKFYSYKTRDDHRHHAIDALTVALTKKSYLQKISTLKARGLQSEDIFEKYEIPKPWEKFWEDANNAVQNILITHKKTDRIITKIKKPLFDYNGRPRKDKNGKIIFSQGEAARGELHKESVYGKHTGEDGKEYFHITKPLEKLTSAQIKKIVDKGIRDIILNRIKEMGVNTEQKKFDVPKGTFFDYNDAGNKIPKIFIPNKNGEPIPVKKVRIRETIGNAEMLKELNQYVNPMHNHHVAIYKNENGDFYEKVVTFWEAVERVKQGLPAINKQQDDGSEFVTSLQINDLFLLGLTDEEYENYKDNKEVLSEHLYKVEALSSKYYEFRLHNSANTKDENRPSYIRITGFGFGKGGWLSHNPLKVKLSVLGRIITSVVK

SEQ ID NO: 5859 - protein, 1414 aa, unidentified
  REGION 1..1414: note = Description of Unknown: Cas Enzyme sequence
MFSQRNNPYCDLLQNVIQRYKILFMKKILGLDLGSTSIGWAFVNEKEDEIEKSSIVKTGVRVIPLTTDEQGNFEKGKAITTNQDRTSKRSARRNLQRYKLRRQELIKILTEIGFIDNNSNLIEDGKDTTYQTLELRAKAASNRIEKDELARVFLAINKKRGYKSSRKAKNEDEGQLIDGMGVALELNKRKITPGQFSLELLKNGKKLLPDFYRSDLQTEFDIIWNIQKRFYPEIFTDSFYDELKGKGQRATSAIFWKKYKFNTAENKGNRDEKKSQAYQWRVDALSNQLNKEEVAYVITEINNDLNKSSGYLGAISDRSKELYFNKQTVGQYLHEQIKENPHARLKGQVFYRKDYEDEFDAIWNEQTKHHKELNYELKQTIKNIIIFYQRKLKSQKGLISICELEGKEKEISVDGKNKTKLIGPRVCPKSSPLFQEFRIWQRLNDLEVSNKKEKTKYKLDEESKLLLFKELNIKESLTKAQILKLLYKDFKNLDLNFKDIVGNRTNTSLYKAYQTIVEASGHDEFDFTSLPAHETTEIINGIFETIGINKGILNYNADLEGKDFEQQPYYQLWHLLYSYEDDNSTSGIDSLLKKLKEKFGFEEEYAKVLANVTFEDDYGSLSSKAIAKILPHLKDGLQYDEAAALAGYNHSNSLNKEERANRPLKDKLELLAKNSLRNPVVEKIINQTINVVNALIEEYSEKDKDGKIIKYFKFDEVRLELARELKKSAKEREDATKSMTASQTEHEKFRKILQTEYGLPYVSRNDIIRYKLYKELEPRGYKTLYTNTYIAPENIFSKEFDIEHIIPQSRLFDDSFSNKTLELRSANIEKGDKTAYDYILEKYGENGLAEYEKRVDDLFKGVDGKKGKHKKLLMAGKDIPDGFIDRDLRNSQYIAKKTKELLEDVCRTVNTTTGSVTDRLREDWQLIHVMQELNWDKYDKQGLTYYETNKEGKQLPRIKDWTKRNDHRHHAMDALTVAFTKYNHVQYLNNLNARSDKASSIYGIEQKELYRDEKGKLKFKPPMPLDEFRAEAKKHLENTIISFKAKNKVVTPNKNKITGKNKPQNTLTPRGQLHLETVYGTIKRYKTTETKIGSNFYIETINKVAKKKYREALLQRLSKFDNDPKKAFTGKNSLAKTPLYLDDLHLFQVPEKVKLVEEEIVYTIRKTISPDLKIDKVVDGKIKSILEIRLKEFNDDPKKAFVNLDENPIWLNKAKGIAIKNVTITGVSNAIALHDKKDKNGLLMLDENGNTQPVDFVNTGNNHHVAIYRDEKGNLQEKVVSFYEAVTRVNQGLTIIDKDYNKDNGWQFLFTLKQNEYFVFPNEKTGFNPDEIDLLDEENYVLINPNLFRVQKISTKNYLFAHHLETQAISGDTLKDKKELSEIIYHFIQTPSKLENIIKVRVNHLGKIVQVGEY

SEQ ID NO: 5860 - protein, 987 aa, unidentified
  REGION 1..987: note = Description of Unknown: Cas Enzyme sequence
MAKVILGLDLGITSIGWALASVDDENSQNSKVIDSGVRIFTIAEHPKDGKSLALPRREARGARRTTKRKAQKIRSIKRLLLQNKVIDENELENLFIGNKNQLDVWQLRKDALYRLLSNKELSRIMIHLAKHRGYASNRKSEEPSDSEGKAVLSGIAENENTLKNKTYLTVGEYLFTKTKKRNGKDSEGKLNYANSVSRAMLMNEIKTIFAKQKGFGSSFVNDALLEKYSEIAFSQRSLKSVEDMVANCPFEKDELRASKSSFTFEKFRALQKLKNLRIITQNGEMALSKEQINQAIHKAQKGTFTYKTLKTLFGLDKNAQFKGLTYFDHKTGESTKDPEAAKLLDFSAYQKIQKAIENADHLFWSKIESDDALLDAIAKVLTTEKDDKKSLEKLHKIIYNEAVCNALVGVSFSGFGHLSTKALTKIIPHLEDGLDYDKACEKAGYDFKAIFQVDKTKFLPPLSEQENVEMTNPVVKRAIAQMRLVYNAIARKHGALDAVHVEFTRDIKNSHEDRKKIEKAQGEFRDKKDEARIHAVEILGKEPNVKELLKFRLWKEQNGECIYSAKEIRPEHLMDNFATEVDHILPYSRSLDDSLINKVLCFTKENQDKGNKTPFEYFGADKESSVWQNFVGRVEGLKNLKYAKKNRLTKMNFDESSENSFKDRNKNDTSYISKFVKNYIEAHVEFRESKMNRHVFTMNGMLTSQLRYKWGVGDKNRDTHLHHAEDAIILAFSTQSQVQKLSTVSASREGFSYKNREEKAKHLKFEPPMEEFGTKVQESLSQIFVSHMPRRKIGGAAHKETVYSNKTLSVKKADGKIDSLKGGGVKNNVKLKHGIALNDGMPRVDLFQHKKSKKYYLVPIYVSDFVKPKLPNEAIVSGNKPWLEMDENYEFRFSFYKRDLIEIQTKKTATKEAVRVLGYYDSADSATSQISLYTHDNKNTYRLGVQNLVSIKKHQVDALGNIVEVKNEKRQGSLHEGRELRKKQRSA

SEQ ID NO: 5861 - protein, 1115 aa, unidentified
  REGION 1..1115: note = Description of Unknown: Cas Enzyme sequence
MADKTLGALTFGFDIGIASVGWCVLSENRIVDLGVRCFDKAETAKEGDSLNLVRRAARLMRRRLRRRAWRLTKLARLLKREGLIAQTGDIQRPSPVSPWQLRVDGLDRLLTGDEWVRVIYHLCKHRGFHWISRAEEKQADADSKGEGGKVKQGLAGTAKLMKEKGYRSAAEMVLAEFPEAQRNKQGDYGKALSRVLLGEELSLLFMRQRDLGNPHASQKLETAVLGSDDRKSGLFWVQKPPLAGNDLLKMLGKCTFEKEEYRAPKASFTAERHVWLTRLNNLRIVVDGTTRGLNEQERRVALPLPYGQAGDFTYKQLRSALVKAGALPDAFRFASFSYAQQADGKAKDPETAVLVKLPAWQELRLTLKKAGLETEWQGMAGSATDGRPDLLDKIGWVLSVFKDDDEAAAELHKLPLPNAEKMVDALLDIRFDKFHALSLKALRRIVPLMETGLRYDEAVAAIPDYGHHSQLHKVGEGEHKYLPPFYSGRDKDGRMVFSEDMDVPRNPVVLRALNQARKVANALIRRYGSPTAVHIEMARDLSRPIDERRKIEKDQAEYRDRNDKDKAMFAEQFGQPPQRNEFEKWCLYREQQGKCAYSIEPLDLHRLLEPGYVEVDHALPKSRSFDESKNNKVLVLAKENRDKGNRTPYEYLGGAENNPRWQTFAAFVEGNKAYRLAKRSRLLRKNFGNDEAKEFRERNLNDTRYICRFFKNYVERYLQLKVGAGETAAKRCVVLSGQLTSFLRARWGLIKVRTDNDRHHALDAAVVAACSHGMVKRLADYARREELRNVRTGFVDMETGEIVDPAMFQQLRQHFPEPWPHFRTELEARLKIDDPAALRDEMERLGTYPVEALETLGPLFVSRAPQRRNGGAAHKDTIYGQPESLKAQGGVTQKVPLSGLSLKNLDKLIDPHRNEKLYSAIRARLEAHGGKGDKAFPASNPLRKPDRDGNPTGPIVRTVTMVIDKLSGIPVRGGIAKNDSMLRVDVFTKAGRFHLVPVYVHHAVAEDLPNRAIVQAKDKNEWTLIDDSFEFRFSLYPNDLVRVKLKDGVRLGYYAGCDRSTACVHLWGHDRSAQFGKDGLMRSIGVKIALSVDKLHVDVLGNIYPAPPEHRVGLA

SEQ ID NO: 5862 - protein, 1105 aa, unidentified
  REGION 1..1105: note = Description of Unknown: Cas Enzyme sequence
MTVKYRLGLDVGTASVGAAAVSLDKEGQPDSLIWHHVRIFSEPLENGQAGLVSKKAGRRKARMQRRQIDRRASRLRHIAHLSSMLGLKREEVAPDDGSSLPYLRAQAATERVELDDLLRILLRLSKRRGYKGEFKAKKKGEVAEGSNELSLAMRTLAEERGIALKDENNTGITLGQYLLHRMENGLPTKLKIKEVGDEPKNKKAEDANAPKNLYALRRMVEHEFNAIWDTQAKHHEILNGVHDHKSIREHFYEALFFQRPLKSAADLVAQCGLEPTLPRAPRAQMAFQRFRIEKILADLRWGAGKRAEPLMPAQKKTIRDLLDRNDKVKFEDIYEALEGAGCEKPQGKGLNLDRASREELPGNGTLAALRKLDKHSKKHHPERAANLEPAFRALEEKTQIAVINFLAELGSPEQLDDPAWHTSFVKRDGKPRQFSDALIGFINLIKEHDHFDRLGKMDFDGGRASYSVKALNTLADWLEEPNWPGDWQDDMRRMDEEAAIRMCYPKSLNRKIKRRSDLPAPDSTGNAVVDGSLRQIRWTVNRMIAEIGKPPEEIVVEMAREMSLGISRRNERESDNNKQQKSRRDAEKEIRAHGQTPTPSKIRRYLLWAEQDKSFCPYCNKTISLAEALSGSATEYEHIIPKSLTQVGMKSSEIVLAHHACNQEKGDLTPWERWGNTERWQPVESAAAKFYAKKRYRKAKLLRLKDFEREVLTDASVNGFADHQFHQTSWIAKEATQWLECLCPNKVSVSRGELTAMQRRNWKLETVIPEVRIENNLPVLDSEGKQIEPEDFAKLKKYLEGHPVRREDRKANPGFEFNRRPDKRLDHRHHLIDAITLALTSRGLFQQMAKSYKIAAEKMQPREGETAEDRERRLKNETRLRIEVPEPPLRNVRSAALDAVRECNITIKPDRQPDGALFKDTAYGVAQRDGEDRLRLALRQPVAGLGKTQGKTSLDSARKAIANIISNDVRRIIADEFETRIAQGMEAGAALAQPIPHPLYGKPIRKVRCFETYAEDAQPIGFTSRQGEHRKYLINAGYAYLEFYTDGSKEPRLVKIRDAMREKGKFSPPNTIRKLSYPRQSRGFISISPSKGQKRDAPKGAGSHA

SEQ ID NO: 5863 - protein, 1081 aa, unidentified
  REGION 1..1081: note = Description of Unknown: Cas Enzyme sequence
MLKRVLGIDVGISSIGWALLEFQGDIDNKDLPSGKILASGVRVFTQAENPKNGESLAKPRRDARLARRRTRRRAQRLTDIKDLFFKYKLVTGISRNKINSIYKTEENKKDPWTLRKEALYRKLDGEEFARVLTHIAKHRGFKSMRKSEEEGSDTKAKETQRVLTEIGKNKDTLKTGIWQTAGEMIASRPKGDARRNKTDSYKNSISRELLQDETKIIFEKQRGMNSQFTSADLEKEYSDIAFHQAPIQSMLKMVGGCTFEKDEEGKRLKRAPKNSYSAEVFTALTKINNLVLKTKTANINDRFLTTEERKKALELCHSNAKVTFKQLRGELGLPEDWIFNTVDYAKKPKKTAVKETEPESACFFQMRGYNEIRKSVGKDLWTEISMKKEILNSIVTTLATEKSDEAIKAQLKKSEVPDEIAEKVLGLNFRGFLHLSIKALDKIIPFMMAGDKYTDACDKAGYKEQISGIKKIFLRKLNDEENEQITNPVAKRAITQFRKVINAIIREYGKFDQMNIELARDLAKSYDDRKKIKEGQEDFRAEKDRAAQRCKDNGLDPNSKDNLSKYRLWEQQDNGFCIYCGKPIELQRLAEQGYCEVDHILPYSRSLDDSQHNKVLAHIHDNQQKKNQIPFEHFGGDGPKWEEFVGRLNSQFKNLPKSKLNRLVKRKFDEKDMEGFKERNINDTRYISRFIKNFVENHLEFAESAQKQKVFVRSGSLTAFLRHQWGLIKKRDESDRHHALDALVTACATQAMVKSTAITAQKMESYNWINKEKPRMPLPWLNFRDDVQKSLDAVFVSRAPRHKVGGAAHKETIRSIRKCGEENLIIEKTPLVDIATKSGIKLKDIEKLYKKEQNRKLYETLKERLEQNGNDPVKAFGNPDDPVRMPTNDLTKTGPIIKSIKLITNKKSGLNVRAGIADNGEIARLDVYERKGKFYLIPNYVADFANKELPKKAIKANTPETEWPIIDRNYNFKFSLFKDDLISIKQKLDSPEEFYYYKGPDVSTASITVESVDRKRLWEEKKKGKIENVFHTRIGTKTLKSFRKFNLDILGTKAPVEIKKETWVGVIRKNGVANNTGNKAM

SEQ ID NO: 5864 - protein, 1124 aa, unidentified
  REGION 1..1124: note = Description of Unknown: Cas Enzyme sequence
MTSKQENLGALTFGLDIGIASVGWAVLGKNRIIDLGVRCFDKAETAKEGESLNLARRTARLLRRRLRRRAWRLTKLARLLKREELIADANLFKHKIEKNTPIPNSSWQLRVDGLDRQLTAEEWARVIYHLCKHRGFHWISRAEEKAAESDSKSEGGKVKQGLAGTKKLMQEKNYRSAAEMVLAEFPEAQRNKQGDYSKALSRILLGDELKALFEHQRKLGNPFSTEKLEAAILGNGDRKSGLFWAQNPALAGNDLLKMLGHCTFEKAEYRAPKASFTAERHVWLTRLNNLRIVVDGTTRPLNEAERRIALPMPYQQAGDFTYKQLRTALTKVGYLPESFRYTGLAYTSGQKADEKTKDPEAATLVKLPAWQELRKTLEKKGLASEWQKISTDALDGKPQLLDQITWVLSVYKEDAEVEAELRKLNLPNAEKMIDALLDVRFDKFSNLSLKALCQIVPFMEQGQHYDEAVANIPEYGHHSQLHIVGAGGHKYLPPFYSGRDKDGRMVFNDDMDIPRNPVVLRALNQARKVVNALIKKYGSPHEVHIEMARDLSRPLDERRDIEKLQKEFRDNNEKGKAQFAQDFNIVGVVKGKEFEKYQLYREQQGKCAYSIEPMDIHRLFELGYVEIDHALPYSRSFDDSKNNRVLVLAKENRGKGNRTPFEYLGGIDNSERWIKFVRNVESNKAYRLAKRSRLLRKDFGEKEAKEFRERNLNDTRYICKFFKNYVEQYLQLHEDSEAKRCVVLCGQMTSFLRARWGLVKVRGDSDRHHALDAAVVAACSHSMVKRLSDYSRRKELEQVREGFVDVDTGEIVNPAMFQQIQEHFPNPWPHFRDEVKLRLSMDDSALLRSEMEKFGTHTLAALEALHPLFVSRAPQRRNSGAAHKDTIYAQPERLVAQGGVTQKVPLSSLTLKDLEKLIDPHRNEKLYAAIRARLEQHGGKGDKAFPASNPLRKPDSEGNPTGPIVRGVTMVIDKLSGIPIRGGIAKNDSMVRVDVFTKTNKFHLVPVYVHHTVAKALPNRAVVAFKDEDEWSLIDDSYQFCFSMYSNDLVQVTLKTESQLGYYAGCDRSTGCINLWAHDRNQQVGKDGLIRSIGVKTALSIEKFNVDVLGNRYPAPPEKRCDLA

SEQ ID NO: 5865 - protein, 1146 aa, unidentified
  REGION 1..1146: note = Description of Unknown: Cas Enzyme sequence
MTSKQENLGALTFGLDIGIASVGWAVLGENRIIDLGVRCFDKAETAKEGESLNLARRTARLLRRRLRRRAWRLTKLARLLKREGLIADANLFKHKIEKNTPIPKSSWQLRVDGLDRQLSADEWARVIYHLCKHRGFHWISRAEEKAAEGDSKGEGGKVKQGLAGTKKLMAEKGYLTAAEMIMTEFFKQRINEDGKPVLTKKTGEPILDGVARNKQGDYSKALSRILLGDELKALFENQRKLGNSFAPEKLEAAILGNGDRKSGLFWAQNPALAGNDLLKMLGHCTLEKSEYRAPKASFTAERHVWLTRLNNLRIVVDGTTRPLNEAERRIALLMPYQQAGDFTYKQLRTALTKAGYLPESFRYTGLAYASGQKADEKTKDPEAAALVKFPAWQELRKTLEKKELTSEWQKISTDALDGRPQLLDDIAWVLSVYKDDAEVEAELRKLNLPNAEKMIDTLLDIRFDKFSNLSIKALRQIVPLMEQGQRYDEAVANIPEYGHHSQMHIVGEGEHKYLPPLYSGRDKDGRMVFNDDMDIPRNPVVLRALNQARKVVNALIKKYGSPHEVHIEMARDLSRPFDERKKVKAAQDEFREGNEKAKADFEKEYHIPAKGREFEKFKLYKEQQGKCAYSVEPLDLHRVLHDLGYVEIDHALPYSRSFDDSKNNRVLVLAKENRDKGNRTPFEYLGGKDSSEPWRQFVGFVEGNKAYRLAKRSRLLRKDFGDKEAKEFRERNLNDTRYICKFFKNYVEQYLQLHEDSEAKRCVVLSGQMTSFLRARWGLVKVRGDSDRHHALDAAVVAACSHGMVKRLSDYSRRKELEQVRTGFVDVDTGEIVNPAMFQQVQEHFPNPWPHFRDEVKLRLSMDDPALLRGEMEKFGTYTPAALEALHPLFVSRAPQRRNSGAAHKDTIYAQPKRLVAQGGVTQKVALTSLTLKDLDKLIDPHRNDKLYTAIRARLEQHGGKGDKAFPSSNPLRKPDSEGNPTGPIVRGVTMVIDKLSGIPIRGGIAKNDSMVRVDVFTKANKFHLVPVYVHHTVAKALPNRAVVAFKDEDEWTLIDDSFDFCFSLHPNDLVQVQQKGKAGMIGYYSSCHRGTGNINLWAHDRNLQVGKDGMIEGIGVKTALSLEKFNVDVLGNRYPAPPEKRRDLA

SEQ ID NO: 5866 - protein, 1242 aa, unidentified
  REGION 1..1242: note = Description of Unknown: Cas Enzyme sequence
MTSKQENLGALTFGLDIGIASVGWAVLGENRIIDLGVRCFDKAETAKEGESLNLARRTARLLRRRLRRRAWRLTKLARLLKREGVIADANLFKLKIEKNAPVPKSAWQLRVDALDRPLNAEEWARVIYHLCKHRGFYWISRAEEKAAEDDSKGESGKVKTSLAETNKLMAEKGYRTAAEMVMTEFFKQRTDANGKPVLTKNTGEPILDGVARNKQGDYSKALSRILLGDELKALFEHQRNLGNTFATEKLEAAILGNGDRKSGLFWTQNPALAGNKLLEMLGRCTFEKTGGEDGKGEYRAPKASFSAERQVWLTRLNNLRIVVDGTPRPLDEQERRIALPLPYQSGEKFTYKNLRTALVKAGCLPESFRFAMPYPSEQQKIDGKAKDPEADTLIKLPAWHELRLTLKKAELETEWQSMANAALNGKPELLDDIAWVLSVYKDDAEVETKLRKLALPNLEKMVKALLDIRFSKFHALSLKALRKIVPLMEQGQRHDEAVANIPEYGHHSQLRKVDEGKEEYLPPFYEDHRGKETWNKDKMLFSARIESEVQGGIPRNPVVLRALNQARKVMNALIREYGSPHEVHIEMARDLSRPLDERNKIKKEQDEYRDRNENDKTQFIEQFGSKPKDKEFEKFRLYREQQGKNIYPTMREDQGICAYSFEPIDLNRLLEPGYVEIDHPLPYQRSFDDSKNNRVLVLARENQNKRNMTPYEYLDGAENSERWLQFVRFVESNKTYRLAKRSRLLRKDFGDKEAEGFRERNLNDTRYICKFFKNYVEQYLQLHKDSTAKRCVVVSGSLTSLLRASWGLPTSKEKRAESDRHHAMDAVVIAACGHQVVKRLSTLVSTDGWTHKPELGGYVNVETGEMLTTKEFVRKDEVYKLFPRPWPHFRDELLARLKIDDPALLRTEMERIGTYPPEALAALRPLFVSRAPQRRNSGAAHLDTIYTKPRDGHVLMVEDKKAKKIAKDNTEKVLRPATTEEKASMAIARIGVTDKDSKGNYKLTLEKLEDIIDPRRNERMIEALRHWIVSRDEREKAAKAIEANFGRGKEKRKPTDAENAELERLRALPRKPLQADPDCGPFTGPIIRAVKVNAGKTTGISVRNGIAANDTMLRVDVFTKANKFHLVPVYVHHSVAKMLPNKAVVSKKDESQWTVMDDSYAFHLSLYPNDLLQLKIDGESILGYFAGININDGGLKYFPHDQRGADSLKKRGISGAELFTKFNVDILGNRYPAPPEKRRDLA

SEQ ID NO: 5867 - protein, 1061 aa, unidentified
  REGION 1..1061: note = Description of Unknown: Cas Enzyme sequence
RRRLRRRAWRLTKLARLLKREDLITDVHLMHGPSATSPWKLRVEGLDRQLTDDEWARAIYHLCKHRGFHWISRAEEKKAEGDKKEGGKVKKGLSDTQRRMSEKGYRSAAEMVLAEFPEAQRNKQGDYGKALSRVLLNDELALLFQHQRELGNPHASAELETAILGNGDRKSGLFWEQKPPLAGADLLKMLGKCTFEKEEYRAPKASFTAERHVWLTRLNNLRIVVDGTTRQLTEDERRVAMPLPYSYVDAKLSYKQLRSALTKKTGLNNFNFAGIAEDKEKDTLTKLPAWETLSKTLKGKALETEWESMAGAAAGGDPTLLDEIARVLSVFKDGDEVDAELRKLPLPGGEKMIEALSEISFDKFHALSLKSLRKIVPHMETGLRYDEACVAAGYHHSQLHEAGAGGHKYLPPFYTRRDKDGRMVFDEELDVPRNPIVLRSLNQARKVLNALVRTYGSPSAVHIEMARDLSRPLNGYFTDNGKRIDGRRDIEAKQKEYRERNEKDKATFAAEHGIAAKSREFEKFQLYREQQGKCAYSLKPLDLHRVLHDIGYAEVDHALPYSRSYDDGKNNKVLVLTEENRNKGNRTAYEYLTSFPGGENGERWRNFIAWVESNKAYRLAKRTRLLRKDFGGKAAEEFRERNLNDTRYICKFFKNYVERHLQLKVGADGTAAKRCVVLSGQTTAFLRARWGLLKVRGASDRHHALDAAVVAACSHGMVKRLADYARTRELAKVRDGFADPETGEIVDPAMFQQLHAHFPDPWPHFRGELEARLQLDNSAELRAQLEMFGTYPAEALETLRPLFVSRAPQRRNGGAAHKDTIYAQPERLKKQGGVTQKVALSSLSLKDIDKLIDPHRNEKLYAAIRERLEAHGGNGDKAFPADKPLLKPDREGNPTGPIVRTVTMVIDKLSGIPIRGGIAKNDTMLRVDVFRHKKDGKFHLVPVYVHHAVAQELPNRAIVQAKDEDEWTLIDDKFDFLFSLHPNDFIRVTQKNKAPIPGYYASCHRGTGNLNLWAHDRNQKVGKDGQIEGIGVKTAVALEKFHVDVLGNIYPAPIEPRHGLA

SEQ ID NO: 5868 - protein, 1056 aa, unidentified
  REGION 1..1056: note = Description of Unknown: Cas Enzyme sequence
RAFDAGMKGSIESGREESRNVKRRQMRLQQRQTWRRARRLKKIFRLLQEFKLLPDGEASTPDKRQDLLEALDKNILASAWFKQKESAGSKHEARQVLPYLLRAAALDEKLEPHYLGRALYHLAQRRGFKSNRIQSSVKKKEDDEGPVKQEIKSLGNRMGEATLGQYFSGLSPFVQRIRTQKTLRDWYRKEFDLIWDKQAQHHPELQMTEKKKEELFHAIFDQRPLKDQSHLIGPCELEPGERRAPTYLLSSQRFRLLQKVNDLRVRVPEGSELELLAEDRTKLIQALEEKGNQTFVQVAKKLKLGEPEFNLQRGGEKKLPGDRTGSQFRKVFRKSWDQMTDEERDEKVSVVYDCLDDQKLVGIGEKEWSLDAKFAAKLTEIKFESSYLNLSRAAIGKLLTLMEAGFSYGSLAPFYRHLTPETTASLLSKVQEGMPPKLASQVVFAECINPAGEPKSLLPPVAMEIPWLRNPTVMRSLTELRKVVNAIIRQYGKKPEEIRIELAREMKKPKWRRKQISKRNRENETGRKQAKEEIKRETQNPYPSPYDIRKLILYKECRGQCVYCGAQISRSNLFGDNSDSEVDHIIPFSRLQEDSFTHVVLCHARCNAEKGNRTPSEAFTGEEHERILDRVSRFDNDEATRKAKLRHFTLAGEELANYLNDFSSRQLNDTAYASKLACQYLGVLYGGVEDSTGKKRVKASSGGVTGYLRRLWNLNRILNDGPTKSGGFIPKTRDDHRHHAVDAVVIGLTDESVVHKLSRAAERGFYRGRPFAPLEGLWPNFVPSIKTEIDRVVVSHRVSKKVSGALHEETIYSPSIPERGPDGKPNGEGIPHVRKPLAAITKGEIKDIADDAVRQRVQKRLQELGDGDPKKLFAIEANLPFLIAKDGRHIPIKRVRVKKKLPTFPLGSGRAERNVTTESNHHLEIFSKLDEDGNEVGWDGAVVSMLKVYSRKRLGLPIVQREHGPGTQFKFSLGAGEVVECDIAPGQRGLFVFRKVSRITATDQIQIGFAPLNDARKAKDMQTSRSWLWSGPNRLMERHARKFVVNPLGEVSEAHD

SEQ ID NO: 5869 - protein, 1102 aa, unidentified
  REGION 1..1102: note = Description of Unknown: Cas Enzyme sequence
MNYYNGFIITENAMTSKQENFGALTFGLDIGIASVGWAVLGENRIINLGVRCFDKAETAKKGESLNLARRTARLLRRRLRRRAWMLTKLARLLKREGLIADPNLFKLKIEKNTPTPKSAWQLRVDALDRQLNPEEWARVIYHLCKHRGFHWVSRAEEKAAEGDSKGEGGKVKQGLAGTKKLMQEKNYRSAAEMVLSEFPEAQRNKQGDYSKALSRILLGDELKALFEHQRKLGNTFATEKLEAAILGNGDRKSGLFWAQNPALAGGKLLEMLGRCTFEKTGGDDGKGEYRAPKASFSAERHVWLTRLNNLRIVVDGTTRPLNEAERRVALPLPYLQAGDLTYKQLCSALIKEGFLQKEGFKFAGLPYPTKQASEEKSKDPESAVLCKLPAWHTLRKTLEKHGLESEWQKLSTDALEGKPLRLDEIAWVLSVYKDDAEVEAELRKLALPNAEKMIDALLDIRFDKFSNLSLRALSKIVPLMEQGQRYDEAVANIPEYGHHSQLHKVGAGEHKYLPPFYKERDETGRMVFNDDMDIPRNPVVLRALNQARKVVNALIKEYGSPHEVHIEMARDLSRPLDERRDIEKLQKEFRDNNEKGKAQFAQDFNIVGAVKGKEFEKYQLYREQQGKCAYSIEPMDIHRLFEQGYVEIDHALPYSRSFDDSKNNRVLVLAKENRDKGNRTPFEYLGGKDNSESWRQFVAFVEGNKAYRLAKRSRLLRKDFGDKEAKEFRERNLNDTRYICKFFKNYVEQYLQLHVDSEAKRCVVLSGQMTSFLRARWGLVKARGDSDRHHALDAAVVAACSHGMVKRLSDYSHRKELEQVREGFVDVDTGEIVNPAMFQQVQEHFPNPWPHFRDEVKLRLSMDDPALLRSEMEKFGTYTPEALQALHPLFVSRAPQRRNSGAAHKDTIYAQPKRLVAQGGVTQKVALTSLTLKDLDKLIDPHRNDKLYTAIRARLEQHGGKGDRQPPPAALPALDAALGQELLTAADHDKKQRLRGDDDGEREEPCADEPPHRQGEEIEAERPAEDRIDDGAGSRRVPVQRQRGPVRHHRHARGDSDEERAAERDEAQDRLDRQLQRLAVDQNGNGGKVAQSARFQNQERSV

SEQ ID NO: 5870 - protein, 1065 aa, unidentified
  REGION 1..1065: note = Description of Unknown: Cas Enzyme sequence
MSKLVLGLDLGPNSIGWALVNDDSDHPAESKLVDLGVRVFPEGVDNFDTSKELSRNESRRVARGMRRQIRRRARRRRQLKQALLDARLWPSDPDDEAKLYVADPYALRARALTERLEPFEIGRVLLHLNQRRGFLSNRKKDRGDKEVEGMLAEINENEEQRKTGGFDTIGAWLAEKQASIDHKTRQPNDHVRNRHLARSQYDDEFEAIWAAQAKHHPKLLTESLKYGELGKQKYPVKPIPRWDERRKGLSALESFGIYGLIFFQRPMYWPRSVVGLCELEPRQKRAPRADRRAQRFRLLQEVNNLKYIDPDKHTEHRLDEDQRKLLLAKLNRTKELTFDQIRKALGFLESVKFNLERGERSKFKGVPIDALFAAKEVLGPKWYDRPETQKTEIIATLLDHERDDDSLIARATAEWNMSPSQAEAMLAVDLPAGYGSLSIMAIEKLLPHMERGLLYMDDDESNSALHAAGYLRRDQLQRRIFDKLPDPARMSNCPIGDIPNPVVKRTLTEVRKVVNAIVREYGKPAAVHLEMARSVQVGKEKRSEYNKTIRNREAERESVAEKLRENGIRVTRDNILKCQLWEQQSHECIYSGKPISFDKLFGEGGGVEVDHILPYKRTLDDSQMNKVVCLRTANAGKGDKSPYEWLADTDPKQYEQVCQRVGRLMRAGAMPYAKYRRFIQRELELDKFIARQLADTGYITKATLEYLKCLFDKTHDVLGLKGQLTAELRWHWGLETILEELPDSPAWREHNPDLRPGEKNRADHRHHTIDAVVIALTNRSRLHQLSDIVKRGGARAHGEVLEDPWPNFREDVVQAIKKVNVSHRVERKVAGKLHEETLYGPTPAPGEWVLRKPVIALSANEIERIRDPKIRQIVSDALADAGITFGRGKKADAKKMREVLGKLTMSSGVPIKKVRLTKPELTIQPIREGRPDQAFVKPGSTHHLCIFEFVENGRTKREAVFVTMLEAINRLKRREPVMQRTHSERPDARFVMSLSGREMVLANWKDGEHLLTFKTASSTQGQIWFAEHTDARKSADYKQFVANANTLDARKVTVDPLGRIRRAND

SEQ ID NO: 5871 - protein, 1001 aa, unidentified
  REGION 1..1001: note = Description of Unknown: Cas Enzyme sequence
MSVKARDAFTLGLDIGIASVGWAVLAPDRIVALGVRAFDKAETAKEGDPLNLVRRTARLTRRRLRRRVCRLTKLARLLKRQGVIDNAHIFQPQHPFSHSLWQLRMEGLDRQLNSEEWARVIYHLCKHRGFHWISRAEEKRAETDAKSEGGKVKQGLAGTARLMKEKNYRSAAEMVLREFPEAQRNKRGDYGKALSRVLLGEELMLLFKRQRELSNPHAGQELEVAILGNGDRRNSLFWLQQPPLAGNDLLKMLGKCTFEKGEYRAPKASFTAERHVWLTRLNNLRIVVGGSTRPLNEPERRIALSLPYQQAGDFTYKQLGSALVKAGYTESDKFKFAGLSYPSEKQKAEGNTKDPEKATLIKLPAWQELRSTLKKAGLETEWQGIASAAMGGHPELLDQIAWVLSVFKEDEEVSAELRKLTLPNAEKMVEALLDIRFDRFHALSLKALRQIVPHMESGLRYDEACEKAGYHHSQRYKVGEGEHRYLPSFYSNRDKTGRMVFNEDMDIPRNPVVLRALNQARKVVNALVRQYGSPAALHIEMARELSKPFDERKQIEKEQTEYRERNEKDRALFAEHFGQMPKGLEFEKWRLYREQQGKCAYSITPIDIDRLLEAGYVEIDHALPQSRSFDNSKNNRVLVHAKENRDKGNRTPYEYLGGAQDSPRWRQFVAFVESSKAYRLAKRSRLLRKEFGKKEAEEFKERNLNDTRYVCRFFKNYVERYLQLAEGSDAKRCVVVSGQLTAFLRARWGLIKMRSESDRHHALDAAVVAACSHGMVKRLSDYARRKELEQVREGFVDAETGEIVNPAMFQQLHQHFPDPWPRFRHELEARLKIDDPAQLRAEMDRLGSYPPDALEALRPLFVSRAPQRRNGGAAHKETIYAQPERLKAQGSVTQKTPLASLTLKDVDNLIDPHRNEKLYAAIRARLQNYDGKGKKAFPLNNPLRKPDRDGNPTGPIVRTATLVIDKLSGIPVRSGIAKNDSMLRVDVFTKAGRFHLVPVYV

SEQ ID NO: 5872 - protein, 1067 aa, unidentified
  REGION 1..1067: note = Description of Unknown: Cas Enzyme sequence
MKSTSRSRSETHTYRLGIDLGSASIGWTAVAEDSEGEPAEILAMGIRRFEAGVDGSLDEIEAGKDKSRATARREARGPRRLTWRRQYRLRKLFRLLQRLDLLPPGDDSHDGRHHVLAELDRRIRDDRIDPNDHVENQLLPYRLRARALDEPLSRHEFGRALYHLAQRRGFLSNLKAAPKDNEDGGKVRTGITELEGYMRQAGSRTLGEYFASLDPDNLRIRQRWTARSMYTDEFNQIWAAQVARHNLTDEDRQRIHDVIFYQRPLKSQKHLIGRCDLEPGKRHAPLASLAFQEFRVRQRVNDLVVTAPDNTQSRLTPEQCNQLAAALDTEAKLTYVAIKKLLSMKKSREWGRHYVFNFEEAGDKEIIGNRTAAKLIEVLGDRWLAMSRDDRAAMVDEILAFESEELLVARLIKAWKLDQSTAKAVAAKSLEQGYGSLSRKAIARLMSLMEQGMQYATARKKLYADREVKCDPVDQLPANHHCAVLKNLRNPAVARALSELRIVVNALIRRYGKPATIRVELTRELKKSRKHRQDITDRIKKNTQSRDDATAKILAEMENGERFCTDRNKLKVQLAEECGWKCPFTGRPIPMQALVGDGPQFDIEHIIPFSRSLDNSFANKTLCYHEENRHGKKNRTPFEAYHGTDKWDEILQRVRGFNGSAARRKLELFTAETLPDADEFTNRQLTDTAYMSRLACDYLALLYGGQCDAEGRRRILVNPGRATAYIRQRWDLNAILGHPDKKERGDHRHHAIDALVVALTGPREVKMLSDAAQRAESLFDDRLFEKVDPPWEGFLEEAFEAVKQINVSSRVGRKLNGSLHKATIYSKPQTKFDENGAPVIQRDGTPATVHHVRRKIELLKAADLPDIVDPRIRAAVEAKLNGGDPAKVFKDRGNHPYTKTKDGHVIPIHKVRVRENVHPISVGAGVKARYVAPGSNHHMEIVAVLDKNGKEKTWEGRIVSAFDANQRFRDGLPIIQRNHGPDRRFKFSLAGGEYVEMEHQTGVRQLFRVVVISEGKIEFHLHSDARPTTLLKKTPGSRVTRSPGSLFKINARKVTVDPLGNILPAND

SEQ ID NO: 5873 - protein, 1209 aa, unidentified
  REGION 1..1209: note = Description of Unknown: Cas Enzyme sequence
MKLLGLDIGTNSVGSAWIDTEKKTIKLGVSVFPAGVKEAEDKRGEPKNQARRSQRQQRRSIERRAKLKRRLRQYLIKKNWIPTEKERLQEWENLNPWLLRRDAVREEMKTDHDFRAEEKFGRILLHLAQRRGAWWFDEEPDEAEEIKKKEKDPKETPGTVEFTKAAMQEKDAKTFGELIAIEYENRTTSTNNNRLRHKRVRNRADVFGEKISEYVADRHMILAEFEKLWETQRSFAGPLAAQLTDDCREELYNKKKTNTWRCQGVLFSQRKAYWDLGTLGRCDLEPTDMKCSRADMYAQEFLVLTSVNNIRITPRTEPTRKLTREEREKVMSAIRRQKTVSESTIRKALGIDKGANKTHYTLNTEGDKFTVNGDWFYSQIACDVFGEDAWKDFDINTRESVNRAILKFDPGEDADVKKLTSGCKEWWKLDEGQTGNFIAAWQKRPKTDSRVNLSRKAIKNLLPYLRDGWSVTEARDMYAEDASHDADDPTRSRYSTKEVVVSKRIRHFQEKHADSPPPVSEGISNPVVRKSIHEVRRHLTEYIKKYGKPDRVGIELAREARQSERVVARRIQKNKAIDALREEIIETHKLDAPGTTSTQRESAVKRVRLCRQQREMCAYSGETITDKAAAEGSGLEIDHIVPRSRGGDNGMSNLVLCYASANQGKGTRTPIDWLSKEDFGQLELRFKHLHLDKSKKGKRIITKDTVDMVDNAKWENLHRETPKEGFTEEQLRSGAYAATQTSDWINKVLYGSEDRSKRYVFASGGQYTGILRRDWGLFFDEDGQRSEKGAKNRGDHRHHAVDAAIIAVTAQCLAKVKEAFIDFEEQKEDKRIKPVRDAVDEPWDGFSEQLAEEYMKLKVSHRAYNRQIAGHLHKDTLYGPAVIYERYKKDDKKKGIRKGEIAPDEEGNPKFQKGLYIKNIGASDLRGTHLRMPIRWSDWKQELKKAENRHEKKKIWEKMYALDAVAPGKSGIVRDVSLRRQIRDWLIENGIENIDNIKKVNGRKTNELITFETLVKEKGLIINGTPVRKVRLLWKLNEVKEVRRKGFDYENSSPQAKRKSLRVYQTQNNHHIEIREKATEKGEVKWSGDVVTNFDAAERIRRNNEPIIDKSENEKGKFVMSLSKGEIVHMRYSETQEANYFVVFKIDKAIHFTPHTDANPASSRKDVKLREEIQLVPNDLRKAIVFTEGGVPEKVKIPPLGEVEVLVND

SEQ ID NO: 5874 - protein, 1457 aa, unidentified
  REGION 1..1457: note = Description of Unknown: Cas Enzyme sequence
MKKILGLDLGTNSIGWAVVNKHTEKVETNGLWKNEERYDLKNKGVLIFSEGVKIEKGKESSKAAERTGYRSARRIKFRRKLRKYETLKVLIKEGMCPLTLEELEYWKSSINLENGKRQSFKHYPSSDDFRQWLHTDNVGDETERKKQRKNPYFLRAKSLDEKLTKEELGRVFYHFAQRRGFLSNRLDSTDMSELEALMPDIQQLLNLSQSLEDLEKELEEFFENHDLTQEEFKGVKTLRNSFLGIIKTHRALSFEELKERLDKRLNKKEDLGKVKRGISELTEEITEGGFRTMGAYFYSLHKEAKPVRKRYTAREEHYLHEFEEICKAQKLSGINEKETDSAMRYTGIVKDLYRAIFYQRPLKSQKGTVGKCSFEPSKSRCPVSHPDFEAFRMYSFLNNIKIQTPDDEKLRFLNEEERQKALGRFALKKPNFPFEEIAKVIAPKNDYAFYKGKDAATKGYLFNYQMNATVAGSPVTARLKSVFDCELEAIAINYTAKNGKGETVNKSVDYRDLWHVLFSFDSNERLVAYAKNKLGLSDKKANAFAAIRLKKDYAALSLKAINGILLYLQEGLLYSHSVFMANLPDIIDADKWKGNEAFLKGAIRDVINNDREDNKQIGLVNDLLGAYKEQYPNQHDKDHEVDTIDHQTVTAKLEAVYGAKALEVMNEEKAKALLVNVEAQYLSCIRTGKFLPKKRLDEKVLDLITDNHLCSDLSRLDKLYHPSDIDTYKDAQRIDGKLYLGSPMTNSVRNPMAMRSLHQLRKLVNTLMKEGIIDEQTIIQIELARELNDANKRKAIQKWQKDQEEEKEKYRKEIGALYEKECEKRITPNEEDILKYKLWVEQGKRCIYTHKTISICDFIGPDPKFDIEHTLPRSISEDNSDMNKTLCDRTYNREVKKNRIPADCPNYDDIMDNVQHWKKDYEALDTQIESVSRAVKASTTKEAKDVRIEKRHLLRLERDYLFGKYDRFERKEVTSGFKNSQKVDIGIISKLSRAFLASLFPKVYSVKGSMVDQFRKSWGLHEFERDENGKIKLHEVHETPIYLKKDRSNHTHHCQDAVVIACMSKQKYDVLAAAWRKEENGNIKAAKAILEAAKPWETFTQDVKGLRDEVLVVHHSPNNVGKAAKRKRRKRGKIDRNKKGEVVYLQGDSARGSLHKAFFYGAILRPENKDSAKPTLDKEGNVLEKVFYVKREDVRGLNDNDLQRIVDEKVRDIVIEARVKENELNKEVAELKKQRSKAEEEDIQNIDDKINALQEIVKNELYRIPPKEGKTQFTPIKKVRLYQPTVTAPIHLKPHTHASRHEHKANYHVMNDENHSFNIYEGIDKKGNIKRKAQVINLLGFTSGETVAMELNGLKLKTTVKKGDAVLFYEQHPDELKTMTNQVIQKRLYQVALFDKSGRLYFRPHSEARPASDLKEQYKLDLNTPAEQVRLTSANWNFIVEGDGFNMSRSGAITFDF

SEQ ID NO: 5875 - protein, 1036 aa, unidentified
  REGION 1..1036: note = Description of Unknown: Cas Enzyme sequence
MSKTILGLDLGSNSIGWALLTADDNGQPWGICDAGVRIFPKAVEEKTPTPKNVKRRTMRLARRTIQRRARRKMKLSNYLISLGLLPKELLESSQPEGILNSLGDPYALREKALDNSLTANELGRVLLHLVQRRGFLSNRKTLLGRDMLDDPDVLAVLGEHDESEDDAAEESAFKADISQLRESIREAGCRTLGEYLANKPKGACKRNRDGQHLRTDRQMYQEELSLILEQQSQHHPLLTSDVQEKIERIIFYQRPLKLKPDRVGKCSLEPKNKRAAIARLEYQRFRYLQDINNLSYLDPYTDEFHSLTQEDRQKLASLFEISDSLSFPAIRKALGLDKKVEFNLDSGVKKLRGNTTVATIRSEFSEWDSLSPGEHQMLVEDLLTIKKKSALKQRLMTRWKMDGGTAVRLCLQEFEPGYGSVSLKAIRRLLPHLEQGLIYSDARQAAGYSYDPEVMGVQVQEKLGPPPMLPNPIVSKALHELRRVMNALINEHGKPDIVRIEMARDLEMNTKRYNSFRKQQDKNTKSNDRATEAYQQIGKERPTLKLKVYPSREQKIRYRLWEDQGHCCAYSGRTINLGALFSGEVEVDHILPYSLSLDDSYMNKVVCFANENQRKGQRTPIDAFGLDEEKWNQITQAISRWGRELSSKRNRFYRREVELLERDFIGSQLTDTRYIAKEAGTYVKTLGVDVTFSRGIMTGWLRHQWQLNDLIGSSSEKERTDHRHHTIDALVTACIDRPLYNALVRQSKDLEKSGSGRTMKEIYLTPPILDIRQQLAEKLESLIVSHVPQRKITGALHEETGVGFIEGVGTVYRQRLDQEFNAKKVASIVDDGVRELVIAHLDKYGNDAKKAFSEGVQLLHKDGKTLIKRVRVVQSKTTREKLEKSKFAIRKADGVAFKWHAYGNTHHVEILRRRDGKGETASFFVTAMEAARRAREGVGKSASLVKIEHGDQWEFLMALHINDLVKVLVEGEQQVHRVQKLERDASSITLRLHTAATIGGKSEGIRKSISTLINDYQMQPITVNAIGKYHHDQAHD

SEQ ID NO: 5876 - protein, 911 aa, unidentified
  REGION 1..911: note = Description of Unknown: Cas Enzyme sequence
MSKILGLDLGTNSIGWAIVERDMDKFDLIDKGARIFSEGVKSEKGIESSRAAERTGYRSARKLKYRRKLRKYETLKVLVKNNMCPITLDEIQEWKSSGFKTYPLNPVFLKWLRTDDLENVNPYFFRDQASRKKIALFDLGRAFYHIAQRRGFLSNRLDQSAEGILEEYCPRIQSNIEDLNSVTAIINELNENFTDYGILDSEIKGGFKKDLDEGDKKLKTLYNALISITSKNKNNLDSCKKELIERLNRKENLGAVKQKISEISQAMKDGNYATLGQYFNSLYNTSKIRNQYTAREEHYLKEFEVICKTQSLNGINEKEQIPEKRYYGLVKELYRAIFFQRPLKSQIGLIGKCSFEPSKARCAVSHPDFEEYRMWSYLNTIKITSRLENNLRFLTHEEKLKLIPKFLRKKDHFSFEDLAKELVEKGAKFGFYKSGEKDNFDYWFNYRPTDTVAGCPVSASLKTVIGDNWQEKIFIYKTKNAEGIEVERRVNYNDLWHLLSVSSSDIYLFEYAKNKLGLDEKSAKSFTKIKLKKDFGNLSLSAISKILPYLKEGLLYSHAVFMANVHNMVDEKIWNDPTQRNYIQNEIQKIIENHTLENGIFETINGLIKECKTEGTYYSKEAENIYKTDLENKLIAFFRKNKMDDELVKRSIIDDTFPVFKEQLIKFEFIKIKRLDEKVLEFLSGTNENGEIFCTSPNQLKKLYHPSDIDVFKKKLVKDEFGNETQVLGSPLTQSIKNPMAMRALHQLRKVLNTLIVEGQIDEKTHIHIEMARELNDANKRKAIQDYQNDNQKFKTDAIKEIKSLYLEETGKNIEPTGDDLLRYQLWVEQNYREIYEPEGKNIPISSIIGNNPKYDIEHTIPRSLSQDNSQMNKTFDSPSLYQYVNSLRCQRLYLCCTNKQKRYDNIGIRR

SEQ ID NO: 5877 - protein, 1080 aa, unidentified
  REGION 1..1080: note = Description of Unknown: Cas Enzyme sequence
VRSAATVGDGARAGLRYVLGLDLGVASVGWAVVRLGEDGAPAGIIRMGTHLFEAGIDAGKSTPEAALAAGKEASRATPRRLARQQRRQTWRRAARKRRLLRTLQRYGLLPEGDTRDGAAIDAYMKALDAGLRETWNEGADHRTHQILPYRLRAAALERRLEPYEVGRALYHLAQRRGFLSNRKTDRGDEDQEAGKVKQGIADLAAAMERAGAPTLGAYFASLDPTNPEERRIRERWTDRRMYVKEFEAIWGAQAEHHPELMTEEAREAVRCAIFFQRPLKSQRHLIGRCRLIPSRRRCAVADRAYQRLRLLQKVNDLRYVDTATGEERGLTPEQRAALIQLLEAGDVPFSALKRTRGGLGLPKSVEFNLERGGEKKIVGHRTDEKLRKVFGEERWGRLSEADRAELVEDVLTIENPDALERRGRERWGLPADAAVELARVRLEGGYAPFSRRAILRLLPHLERGVPLQTAIKEEFPASFEAAEAMDLLPPVIGTGPGGEGGAFRDPPSPAVTRGLSELRKVVNAIIRRWGKPERIHLEMARDLKKGRKQREEAAREMRAREKEREEAKRKLLEEAGIEHPSREDIEKVLLAEECGRTCPFTGRSFEMRDLVGPTPSVDVEHIWPFRRSLDNTFLNKTLCLHEENRHRKRDRTPFEAYGADPQRYGEILQRVARFKGGARREKLRRFAATEIDEGFTERHLAETRYVSRKAAEYLALLYGGLWDADGTRRVQVSTGGLTAWLRRNWGIDGLVGAADGEGGKARDDHRHHAVDALVVALSDARAVKRLSEAARAAAENGGGRLLAEVERPWEGFERDAREAVASVVVSHRADRRVSGALHKDTIFSRPIRGVGTSGEGGHRLRKALHKLSRDEVEAIADPRIRDLVRAALESRGGGDPAKVFADPAAAPVLEYGDGRRVRVRKVRVDRRERPRAFGQGGGRRYVAPQSNHHTVILARVGPDGRDVEWRDEPVPLWEAYERIRRGEPVVDTRDREDGWVFRFSLVVNEYIEMDRKDGGGRGVYRILNISGGDMEIREHFDGRTRQAIRAAGSSPERVSGSSLLRRNARKVRVTHLGEVVRAGG

SEQ ID NO: 5878 - protein, 1058 aa, unidentified
  REGION 1..1058: note = Description of Unknown: Cas Enzyme sequence
MGNTLGLDLGPNSIGWALIEENTEGVGRLIDAGVRVFPEGVDNFDTSKEVSRNQDRRMARGMRRQILRRKRRRRILRSALAEVGLFPRDREAQQRLLDLDPYVLRCRAIHEQLEPYEIGRVLLHLNQRRGFLSNRKKDRGDKEVKGMLAEISQLQGEMGDRTLGDYLAELRQDPHTRVRGRHTHRAMLAEEFDRIWQAQAKYYPKLLTDQLRYGRAGRFDPLKPLRPRRLPHDSNWLAEYGIQGIIFFQRPMFWPKSMVGVCELEKGEKRCPKADRAAQRFRMLQEVNNLRYIDPEARSEKALTAEQRALLLDKLGSREKATFDEIRKWLGFLDNIRFNLERGERSSIGGHKTDARIAKVIGKAWYKRSEDEKDRIVRLLINTEFDDVAIARRLVEEFDLTSEQAEALLGVDLPAGYLSVSLKAINKLLPHLERGLRYMADSDPSNSALHAAGYLRRDELQRRLFDKLPPLQFVRTGPLADLPNPIVRATLYELRKVVNAIVREYGKPDEIHVEMARELKLSEAKRRELSAAMRQREQERSRAADYLRQNGVRVTRDAITRFLLWREQGEKCIYSGRSISFEQLFGGEVDIDHILPYSRSLDDSQSNKVVCFRSENHRKGQRTPYEWLGSEDSQAYAALCQRARILPYLKYRKFLLEELQLDDFIQRQLRDTAYISRLAIEYLRMLVGEHQVIGSKGGLTAELRHQWGLDTILSELPDSPAWQEQGSLHPGEKNRADHRHHAIDAIVVALTNRSRLQKLARMREAGGTLVTGEVLPEPWPHFRDTVLQRIRTMNVSHRPRRKVSGRLHEETNYGPVHDRNGQPVHGTYVVRKPVQDLSPNEVDNIRDPAIRRIVAEAFAAAGQTVGRRKRGTGPAAANPVTTKQLLASLMMPSGVPIKRVRLLKTDQTIRPIRLRQAQQAGDPTQITYVKPGRIHHACIFEWEENGKRKRDAEYVTMLEAAQRLQNRQPLVRRQHSQRPDARFIMSLSPGDMVLAELDGREILMVVSTLVSTQKRIHVVPACDARRSSERADRGLTPNSLKARKVTVDPLGRIRWAND

SEQ ID NO: 5879 - protein, 1027 aa, unidentified
  REGION 1..1027: note = Description of Unknown: Cas Enzyme sequence
MSSESSHVLGIDLGVTSVGAALIDPQAKQILWSGVRIFSAAFEGDYESGKEESRARQRRLARQQRRQTDRRRRRMLKVYRLLQQWGLLPCGERTQVLPALDAELRKQYPDTEILPYTLRARAVEQPLSVYELGRAFYHLAQRRGFRGRAARDADGDEGGQLKAKMEGLWAEIRQSGCRTLGQYLSTLDPHISRIRDRRTHRRMYEEEFEAIWDFQARHHPEILTPERKQILHSALFHQRPLKPTDHLVGQCELEPGEKRAPLWLPEAQQFRTLSAINNLRLVLKDGSTRQLDDRERRVLMQESLRRDKLTFKEIRKLLALEAGCEFSIEIGGETSIPGNATSCRIYRILGDEWLQMAAERQRELVADLADPRRNETDEALMECLQSRWGFPCDTAQALCEINLPDGYLRLSLKAIQKVMPHLETGMTFGEARRLLWPEQFTEKEPLAYLPPVLDMLPEVRNPAVVRALTELRKVVNAVIRRYGKPASIHIELARDMKRSRKERLEESKKNEERKKLREHAKNELKPYVGDNPSRADIEKYLLWLECKGRCPYTGQSISLQSLFGEYPRFDVEHIIPFERSLDDSFQNKTLCEASFNKTTKGKRTPFEASGHSSEWPEMVARVREFGNPGKLKRFTMTETDTEKLLAEFTQRQLNDTRYASRLAAKYLGCLYGIDRSDNRRIVVCAGQVTAYLRQKWDLNRVLHDRPEKNREDHRHHAVDAIAIALASPAQVRCLADAASRALAEGHRRFGSLADPWPDFRQHVKEAVSRVQVSYRPKRRLKGALHEETYYSAPITVDGKKYIRTRKPVDQLTATEIDQIVDEKIRTIVKSAWEAAGRNAKKLQGQWPCIETNDGRRIPIKRVRYYKAHEAHRLGNDAAPPRYVIAKGNHHIEVIAVRDVVTNKIKKWEHYTVSSLEAAERYRQQVPIVQRNHGPGREFLFSLSEGDLVMARRSEGSPEEVWYVRSVRARGAFELQPSTDARKKTDARKKQDVAKSGQLWDVRLNTLMKLGGRKVVVTPLGEILEAHD

SEQ ID NO: 5880 - protein, 1064 aa, unidentified
  REGION 1..1064: note = Description of Unknown: Cas Enzyme sequence
MDFTEPRDGHAVGDYILGLDLGPSSIGWAVIECNKGTPFRLVRAGVRRFEAGVQGDIEKGGDESRATQRRAARGPRRQHWRRQWRLKKLFQLLSNSGLLPACDSSDADVRHQTLLDLDAKLREELAPTQSRAEAHVFPYTLRAMAIQQPLPLLAVGRALYHLAQRRGFLSNRKAAKKTEDTGVVKAGISRLHDEMQRVGAPTLGAYFATLDPEEHRIRARWTSRQMYLDEFKRIWSFQSAHHPELTDELKKLVHAAIFYQRPLKSQKGLIGRCELEPGKRRAPLACLLAQRFRIVQRVNDLRVTAPNGEVRQLTPPERQILIEELSKKAKLTWADVRKLLKMKRSKEFGRNWEFNLEAAGEKELIGNRTAAKLSETLGDAWLRLSSTQQEQLVDEILSFESEDTLEKRLINAWNVPPADAVAASQLVLEQGYASLSRKAMAVLLPDMEQGDSYSTARIKHYGDSLRTERVYEKLPPVRPTNRDRQGAFPELRNPAVERAMSELRKVVNAVIRWCRKKPHLIRIELARDLKHSRKRRKQMVTLRNRNTKARDDAKKRILQEMGERYVTPENILKVRLAEECGWICPFTGKPIGMEALVGNHPQFDIEHIIPFSRCLDNSFTNKTLCYHEENRNRKRNRTPWEAYHGTPQYDEIIQRVRRFNSEMRAKKLALFQMEKLPSENEFAEKLLSDTRYICRLASQYLGLLYGSKLKVDDQSKLRVQVSAGRTTAYLRQRWNLNSILGHDDDKNRADHRHHAIDAIVIALTDPGTVRLLARAAQEAEHRGDSKLFADVDPPWDGFLKDVREVIGKINVSSRVSRRLNGSLHEDTILSKPRMATNNKGQLVEVHHVRKRLEAMSAQEVDAIVDLRVRQLVKERLQALGGKPEEAFKDPNQHPCLIAKGGRVIPIHKARIRKAGRPVPIGQGSKQRYVAPGENHHMEIVAVLDKDGNEIRWEGVIVSRLEAVQRHRRNAPIIQRDHGEGKRFKFSLAGGEHVIMTVDGRKDVLLRLTSISEGELEFVEHWDARSTKLRKKEGGRIRRSPDSLRKLNAQKVVVSPLGDIFEAND

SEQ ID NO: 5881 - protein, 1090 aa, unidentified
  REGION 1..1090: note = Description of Unknown: Cas Enzyme sequence
MNYRLGLDIGTNSIGWCALKLDSEGAPCGVLDAGVRILTPNDEAGRDPQSKASLAANRRAARAMRRRRDRFLRRQQRLMETLIKAGLMPADVAERKALEKLDPYWLRARALDQRLSLHEIGRAIFHLNQRRGFRSNRLADADDDEKGATRAGIRGLEEALRAVDARTLGEFLARRQKRDRLGRRQKNDHEGYIAPEPVRFRPHREGARNLYPFYPTREMVEAELSAIWASQSRHHADLTPALLARLRRIIIDQRPLKKPAVGRCTLRPEAGIVRRFGFDIDEGERAPKAHPLFQRFRILQDVSQLRVRRPGHAERVLTRQEAAAVAARLMSASGSTVAFEALRRAARLPEDARFNYELAGRKGLQPDQTAARLGAKKAFGAAWRGLSRDRQIEVVERLLATEDPDALEDWLCKEFGLGEDAAEVISEMRLPQGHAQFGRSVLADLVRVFEAGAIDPETGQPLDRLPTYDEAVRALGRHHSDLRPDGTTDRLPYYGEALVRHVIAKPDAPEGSQERIGRVPNPTVHIGLNQLRLLVNTLIETYGPPAEIVVELARELKLSRERREQIQRENRENEARNQARRERLAALGKADTHDARLRLRLFDELPAAERVCVYSGKPLCIERLFDGSVDIDHILPYSRTLDDSIMNKVLCTREANRIKRNRAPAEAWSGAELQQIAERAERLFPKKAWRFQPDAMARFEADGGFLARQLTDTQHMARMAKTYLEHVCEQVWATPGRLTAMLRARWGLNDLLPDHNYAAVAQPKNRKDHRHHAIDAFVVACTDRGLINRIARASGQAEELDPDRLFPRDGFPDPYPGYRDDLAARLATMIVSHKPDHGRPPGAKGNVHVTSGRLHEATAYGPADDEIDGKRYNLVFRKPLEALSEGKIGRVRDPELRAALQEVARNAKSSGRKLNEALAEYGRLHGIRRVRVLKREQSVRVVRHADSLGRTFCKAYSPGDNHCIEIYRLPDGTWAGEGITVYDANTPGFRPAWRTAFPDATLVMRLHNGDLVEADFGEGPRILRVCRLEPSANRVRLIGHNEAGSLDKRHDDPNDPLRWIFATYARLQQGAARRVRVDPIGRVTPATDRP

SEQ ID NO: 5882 - protein, 1370 aa, unidentified
  REGION 1..1370: note = Description of Unknown: Cas Enzyme sequence
MKKILGLDLGTTSIGWAYVNESENESEKSEIKKLGVRIIPLSTDEETDFQKGKAVSINADRTLKRGARRNLDKYQQRRDALIEILIENKFISDATILSEEGKATFETYKIRAKAAKEKIIKEELAKVLLMINKKRGYKSSRKAKNDDEGIAINGMKVSKYLYDNDLTPGQYVYKLLKDKKKYIPDFYRSDLQNEFERIWEFQKSFHSEILTNEFKEQIANKGKLATSKTFLGKYQIYTAENKGKRDEVKLQAYKWRQEALANELSKEELAYVIVEINNNINSSSGYLGAISDRSKELYFNTQTVGEYLYSQLKQNPHARLKNQVFYRQDYLDEFERIWEKQSEFHSELTNELKTKIRDVIIFYQRRLKSQKHLISNCEFEKYHKTIPKSSPLFQEFKIWQIINNLEIRHIPTRTKYKNEDIEQETKDLLFNELNIVEKLSAQDVLKILVENPIEYELNYKDGLEGNRTNAALYKAYLEILKLENQEINIKKLSADDVNYQVSTKFSELNIEQEVLSLNTNLVENEYDKQPILQLWHLLYSFEGDNSRTGDESLIKAISEKFGFKLEYAKIISNIELQSDYGSLSTKAIRKIIPYLKEGNTYDIACDNAGYNHSSSLTKEEQEKRELKDILTLLPKNSLRNPIVEKILNQLVNVVNAIIKDENLGKPDEIRIELARELKKSAKERADATTYINKATIAHDKIRKELANLYPFNTGVRITKNDIVKYKLYLELAPLGYHTIYTNTYVPLEKLFSKEFDIEHIIPKAVLFDDSFSNKTLATRHFNSHEKSNKTGIDAIIEKYGDDSPNYYRYKENIEKLYNKGKGEFSKAKYNKLLMRGTELPDGFIERDLRNSQYIAKKAKQMLEEVVRTVNTTTGKITSRLREDWQLINIMQELNWEKYDKLGLTHYEKSKDGKDIPKITDWTKRNDHRHHAMDALTVAFTTYSHVQYLNNMSARKNEAHKEYHSVYGIEQKYLYRNEQNKLLFKSPMPLDKFRVEAKKHLEDILISFKAKNKVVTRNKNKTKLQGKDNYKTKVELTPRGQLHEDTVYGEIFWSRVSLTDKISKKEIEAIKDKKLKKYVSEYILERGGIKKAFSKENVQNLKYKNKSLTEITINISCYTKRIEVSKFFTDTQKTVSAKEKAINNLLDLGIRKIFKARLDKFEGDFKKAFSNLDENPIWLNKEKGISIKRVTITGVNNVETLHSKKDHNGKYILDDNGKKQAVDFVSTGNNHHVAIYRDEKGKLQDEVVSFYEAVGRVNEGLPIIDKEKDGLEFLFTMKQNEYFVFPSVVFKPDEIDLLNPENASLISNHLFRVQKISSGDYNFRHHLETVVESKKELNNISYVRIRSANNLEGIVKVRINHLGQIVKVGEY

SEQ ID NO: 5883 - protein, 1368 aa, unidentified
  REGION 1..1368: note = Description of Unknown: Cas Enzyme sequence
MKKILGLDLGTTSIGWAFVNEAENELEQSSIQKLGVRVNPLSTEEQLDFEKGKSLTLNADRTLKRGARRNLQRYQQRRQNLVELLSTAGIVTDKTILAENGNNTTHQTVALRSKAAVEKIEKEELARVLLAINKKRGYKSSRKAKNEEEGEAVDGMAVAKRLYEDDITPGEFCFNTLKSGKKNLPDFYRSDLQAEFKKVWECQRKNYPDILSEQLFNEIDGQGFKITRSAFIKTHEIYTTDLIGSRLEKLLQAYEWRSKAISECLDISEVAFVLAEINKNLNASSGYLGEISDRSKELFFSKETVGQNLYKQLQANPHTRIKGQVFYRQDYLDEFETIWETQKQFHLELTDELKSKIRDVVIFYQRKLKSQKGLISFCEFESQEKLMPANGKLKIIGSRVSPKSSPLIQEFKIWQNLSNVVIKNKETSELFNFSLEIKQRVFEELNIKGNLKKDEVLNLIVANPKEWDLNYTQLEGNRTNEAFYEAFQKIMHLEGNDEFQYKKLNAEEAKSSIISFFEAFDVNPGIFEFDALKEGAGFENQPFYQLWHLLYSYEGDNSKLGNDKLFQKIKSKFGFKRDHAVVLSNIVFQDDYGSLSAKAIRKIIPFIKEHTFSKACEYAGYNHSKSISADENRNRVLKERLEILPKNNLRNPVVEKILNQMVNLINAIIDDPLMGKPDEIRIELARELKKNAKERKEMTQQIKKAKDNHDTYRKILQSEFGISNPTRNDLIRYKLYLELESNGYKTLYSKTYLQKEKLFSKEFDIEHIIPKSRLFDDSFSNKTLESRQINIEKSEATAFDYVTQKYSDAHVLEYTAAVEALFKEGKITKAKYKKLLMKGVDIGEGFIERDLRETQYIAKKAKEMLFEVCRNVVSTSGSITNRLREDWDLVNVMKELNIEKYRSLSLTEFIETKDGNRKEHIIDWSKRNDHRHHAMDALTVAFTKHSHIQYLNNLNARKNENNKKYANIHAIEKKELIKDGNKKRKFKLPMKNFRSEAKEHLESTLISFKAKNKVVTRNKNQVHGSDKAQIALTPRGQLHKETIYGFSKKRVVKKEKISGKFDSTLIQRVSKPIYKEALLKRLQEFDNDPKKAFTGKNALHKLPIWLNDQKTEKLPEQVKVLYEENQYTIKKAITPDLKLEKIVDEGIRRELQKRLERFGNDPKKAFVNLDQNPIWLNEKKGISIKRVTITGVSNAEALHSKKDHLGKTILTKEGNEQPVDFVSTGNNHHVAIYQDDQGNLNEQVVSFFEAVARVNAGQPIITTNHQFGWTFLFTMKQNEMFIFPSKDFDPSEVDLLNPNNYSKISPNLFRVQKIAAKNYMFRHHLETNVDEKKELKNVGYINIRSTKLLKGIVKVRLNHLGLIVRVGE

SEQ ID NO: 5884 - protein, 1371 aa, unidentified
  REGION 1..1371: note = Description of Unknown: Cas Enzyme sequence
MEKRLGIDLGTNSIGWAIREVNTKLKNQIVNKGVLLFDKGVATDKGNEYPKVQKRTESRGVRRNYQAEKYRKYELLEFLINKNMCPLSITDLNNWRKYVKGNKRKYPQSQNFINWLRFDFNGDGKPDFHLLDKNKHESNYVFRALSIDDKYKHVFDDNPNILGRVLYQLAQRRGFKGRDEEEAETMLKGSSATGTLGRNNIEEFINKYKTLGSALYHYQKENGGRIRNRYNLRKDFEFELKMICEVHNFDNTTYQKLWKYIIWQRPLRTQKGQIGLCTFEKNKKRVAASHPWYLEYKTWTFINNLKIIAPEGFNQVKYLHDKIYPIFIRKSDFEVKHIIEQVKKDGGKIDSKYNSIRLQETKVVSLSNFYSFEQVFGSDWKEKLSFDAIYNRAPQPTKKETSNYTIEDIWHVLNTFDSKEKIEGFAKNKLNIDDKRAKIFSNIKLDNGYATIGLSAVKKILPYLKRGIKYSHAVYLANLSKVLGSNEINEELIKYFIEEVNFITYNVELTKKLNRVINNIIKNHLEQDGRYFINNNRELEGFEINSIKLKLQNYFGEYTWSNFSDTEKDFKIKYVSKHFKEFLQKNINDKKDIFLKSPRLHQEIFNVLKDKYNLPKENIKYLWHPSEQEVYQKAELYHKFIYKNKNIFIPNSKHSLFSAKFPNAIDEMISLNLLGSPEPISKGFKNPMALKTLHKLKQLLNHLLKTNQIDEYTEIVIEIARELNDNNMRAAIRTYQNKREKEKLKYKKQIEEINEECNTNFDSNDSQLLKKMYLWNEQDKTCFYTGKKINLFDALNGNKYDMEHTIPASMSFDSELKNLTLADTNYNRTIKKKQIPYQLQDYNEILKRVDFMKDKIDKFQKALKDNFRYTKTLQDKSKKDKSIQNRHIIKFELKYWREKYKTFSAKEYKLGWRNSQLRDTQIITKYALPFLKTVFKRVSVEKGITVNNFKEIYKVKLSDKKDRSKHSHHAIDAAILTLIPNSYERDKILGKFHEAKELNKKYHTVPLNWESFKASTIILIENEVLGNNLVDDRKLTQTFKKVRKRGRIIYNDLLNKKPRIANGDTIRGQLHNESFFGAIKQPVIVDGKILFDDNNRMKLKDEIKLVIRKPLKYKGANDVDGFKSLSELEKVIVDKGLFSIIERQIGGFSFEEALDKGVYMLNKQGGKVNQIKKVRCFINTKYETAIKPHEHITKSNKEYKHHTYALNSENAYCFYYTGIINGKTERAMKTISLFELSKLKLKSIDEIYEIPYYNIYTEKNQTLKLEKIFKTGDRVIFYKESKIELLDLSHKEILGRLYKAYQFEGDSKRIKFKHHIISGEMTQIKKIYKDVTNPKFLEYEPLLRLTKRNWNFAIEDVDFTISIDGKINWLS

SEQ ID NO: 5885 - protein, 1126 aa, unidentified
  REGION 1..1126: note = Description of Unknown: Cas Enzyme sequence
MSKKLGLFVDTTSINWSIVDLSTFDLIDVGVRVFPAGCENFGSGKRELSKKHGRRLVRLRRIRYARIRTRKIYLLRILIQNQMCPMTLKELDQWKKTKKFVSKSMDNWFALNPYHLREQGLHEKLSLEEFGRIFYQIACHRGYRFGERNLKLTESVLSRGNPAERKIGYLQTQKEIGKGTLGEHLSSIYPAHNNSYKATKTRIRNRICTLEMYFEEIHLLWKMQSQFYHSLTEELRNQLIGDPQDVDPQGALFYQRPLKSQKHRVGNCLYEPKKTRCCVSSLIYQEVEAWKWANSIKLNNAPLNLKDTRKVVHYFLTHYRFKFDEIKSLLQLNHSENFNYKADDAFKGSFINAELSREKYFGKEWFDFDQKTKEDIFHALYFFNSSLRLQDTAEQKFGLNSYAAQKFSKISIDKSYAPISKMASSKILYFLKQGYPYKIAVYLAGIRNALKTKWDDLSDVQRSEIIQVSLNLHRDSSQQELISKLIEVFQSMFRLEGFDPKKLYGFSPNLTQKPKANKIPLTREVNNQIQQLKNSTLIQSTFELRKVINALIDKYGTFDEVACELSVDLKVNRMQRYIFRLDRRRITENNKRYIEKLKPLGVDLIPMHVLKYSLWEECKHTCPYTGNEIPLEMLFTSHVQIVYIHPWSRSLNDNSLNKTLCFTSLAEQLNERTPFEYFDEEKSEEWEKVKTRAAKIFSNTHHHPTSYKKFKRFIKKYNYRDVIKKQFNDQHQLSRSLGELIGFVTPKVKMIPGNVTQHLIDECLLMSIFPDRKCVNDYRLNILKAYVNAYCEKGHISFLSQRNKYKRQLKKTKIPVPNEQYLSQIEEKLMGVLVSHRKSSKAISKRSFWHKDINNKVKVKAVSVRGMLHKDSLYGKRTPPMLTESMHIRRPLTSLRVVSQIEKIVDPVIRKKAQESIVNLKNNKGVLPVGLFVEEGPDGFPLSKIHLDNHKGGDPVPIFKVRMREGFSNSIQLKENENRFAIPRNNHHIMILIDGEGEFKEEVVTFWQAIQRYRKNLPIYRALEAGEEEVVTYLHINDMYLLGIDNVVENLHLIPKYILRKHLYRVQKLSSKYYEFRQANKYINPSFDYPEYIRINNFGSKKTGWLTYNPVKVKISLTGDISLMNV

SEQ ID NO: 5886 - protein, 1047 aa, unidentified
  REGION 1..1047: note = Description of Unknown: Cas Enzyme sequence
LICCKTINIKDCRASEQPICLLSLKRLHFDFEDIAKQLAPKKQYKFFKDRNKNLEDYLFNYHLKTTVSGCPVSARFMELFGDKFMDVEYKYKREKDGKSSTIDIDDIWHILFTFHSEEKLIEFVQKRLNFNNEQIKEFLNIHLKQDYASLSLKAIKKILPYLREGLIYSQAVFLANMENVIPSNIWNEEENRKIIREEIHSIIKTQNEEKQIIEIVNGIIKNNKEEETCWSEQASDIFKSELAEKLSNYYGKNNYSVFSEEKTLRIEANAFTLLKKQMQLKMGTGDYAKVQRIDERIKTFIIDNFEVKENSLKKLYHPSAIEVYKPAVKRKDGRLYLNSPMITAIRNPMAMRALHQLRKVINELIKNDVIDATTKVNIEMARDLMNANERKALQNWQRDRENKMKEYSSAIKEHFIEIDSNAEPSNDEVLKYQLWEEQKHKCIYTGDEISISDFLGANPNYDIEHTIPRSLSLDNSQENKTICQNRFNRSIKKNKIPYDLRDIVNYPLILERIEPWKEKYEDIEKQIQQAVRQSKGAVDKTSKDRAIQKRHKLTYERNYWRNKYQRFTMKDVPEGFKNSQLVDTGIITKYARLYMKTIFDKVYTVKGNTVADFRKMWGLQDEYKKKARVNHIHHCIDAITIACITKENYEKLAKFYHEWKEGYVAGIEQKPLVDKPWVTFSEDVKEVENEVLISHYTPDNLPKQSKKKIRIRGKIKRNAEGEPIYQKGDTVRGALHKETNYGAIKKTVLNKKGEEEEKLLYVSRKSIDSLKASDIKNIVDDNIRVIVEEGKKKEVNLKKEFEIVEKQLKVVKTPEEKNDLNNKLEDLRNQLSNLFAIANKDGSFTPIKKVRCVATTVTNPLHIKKNRDLSKYDYKHFSHFANDGNYMMAIYEGKDKKDNTKRDFILVNNLDAGKFFTGNLKDNPIHDIHPKSGLQFKSLLKTGTMVILWENEPDEVWELNVYELKKRIYKIVGLSMQIIQNKYEYGVIVLRHQNEARMSVDLTVQDGIFNVGENHKPLRKLNQNQFNALVEGFDYTITATGKIIRKN

SEQ ID NO: 5887 - protein, 1047 aa, unidentified
  REGION 1..1047: note = Description of Unknown: Cas Enzyme sequence
MKKYRLGIDLGATSLGWSILELNEDNSLKGLVDMGVRIFPDGRDAKTSVPLNVKRREHRGIRKNRDRYLQRRAYLMDTLVKYGLMPEKEMERKQLEHLYPYFLRAKALDEEISLYELGRAIFHLNQRRGFKSNRKLDSAEKETSRMKDSIKELKKNLNEAGARTLGEYLYKLNIDVPHNAQHKKRPQRIRDYGKDYNFYTDREMYSDEFDLIWKKQSEYHTELTDKKKEHLKEIIFFQRPLKPQPKGKCRFELEEFRAPVAFPIVQKFRIYQEVNNLILLDFDRNEHELTNEQKEIIIQALLKQKTATFKSLRKKFGKEYDEYIFNLESEKRKDLKGDETTFIMKKDLHFGKKWDLFSDSEQDEVIRRIINEDNDIEIEATLITWLQENFGLNEENAQHIKEVRLPQGIASLSKKAINKILPYLMEGYIYSDACAKAGYHHSDFRTGEVYDEGNLPYYGKVMPHHVAFGTNDEDDIDEIQYGKIANPTVHIALNQLRKFANALVKKYGVPTQIVIELARELKLGQKRLKDIEREQTANRRHNEFVAEEIKKIGIENTYQNRLKYKLWEELDNDPAKRCCPYTGKQISISELFSNKFETEHILPKSKTFDDRPLNKTVSYYLANRFKGERSPFEAFGESPENYDWEAILERGMNLPPNKRWRFYPDAMKNYEDQGVLISRMLTDTQYMSRTAREYMSYVCGPDNVWAIPGALTSKFRAKWGLNQLLSDDNEKNRADNRHHAIDAFVVACTDRALLQKVARATEKSRERFIKKMPLPFKDFSHDKMQKKVNDIVVSYKPDHGNAKEATKKNRTVGQLHDETAYGFVSETENKIMLSVHKPLRGLNTLKKINEIADGNIREALIGEINKNKEKKIDDILDAFIQKTGTKRVKIHVEKDKKTVIPIRNKMGNIYKYYTSGNNYCADIYCSDKGKNAGKWQVEIIPMFYAHQQDFEPEWHTKHPTAKKIMRLFINDYVAYDDNENRKIVRVKKMNIDGRLFFIDPTISKSEKDPNATSVKQLQERSARKVGIDILGNVFDPQRHEHNRDKKE

SEQ ID NO: 5888 - protein, 1543 aa, unidentified
  REGION 1..1543: note = Description of Unknown: Cas Enzyme sequence
MKKILGLDLGTNSIGWALTTHDFELKKGEINGLGSRIIPMSQDILGKFDSGQSHSQTAERTGYRGVRRLIQRNLLRRERLHRVLNILNFLPEHYANAIDFEKHFGQFKKGQEIKLNYKKTIEGKHEFLFMDSFQEMVNEFLKNQQSTKIPLDWTLYYLRKKALSKKISKEELAWVLLNFNQKRGYYQLRGEEEENETKKKEYYALKVVDLVATEDKNAKGTWYHVVLENDWIYKRQSKEPLDNWLGKIKEFIVTTSLGTDGKEKMDKEGNIRRSFSAVDSEKDWIAIKKKTEQDIKESSKTVGEYIYETLLSNPKSNPKPKIRGKLVKTIERKFYKEELQKILKTQITFHPELQDKNVYKACLNELYPRNEAHQNNIKNNDFEYLFLDDIIFYQRPLKSKKSTISNCPYESRVFLKDGIKQAPQFLKCISKSHPLFQEFRLWQFLRNLKIYQKENNEKGKLDVDVTDTFFESETDWVNLFKFLNDKKDIEQKQLIEYLIGIDKIEKQNKTNYRWNYVEDKKYPANETRASFLSRLKKIENLQVDEFLSKAIEFSLWHIIYSVKDKQQYKTALKTFARKNNLDETTFIESFIKYPPFKNEYGAYSEKAVKKLLPLMRMGKFWNEDEIPELAKDRISNIQERLESIDYDKEVFEKDRNDRLKTIVDDEIPKQFVKSFLSFKNRNPLTGLNTYQACYAVYGRHSEVGIIKNWNSPTDITAYLDEFKQHSLRNPIVEQVVTETLRVVRDIWQHFGNGEKDFFNEIHVELGREMKNSNEKRKRMSDRNTENENTNARIKSLLEELKSESNNDIRPYSSSHQEILKIYEEGVYQNPEVSYQKLTEDDVIKIRKNTTPSKAEINRYKLWLEQGYISPYTKEIIPLSKLFSIDYQIEHIIPQSRYFDNSLSNKIICESEVNQLKDNRTAYEFLKDENGRIVALSNGNSVKLLNIEQYEDHCTQYFKKNRTKLKNLLSEDIPEGFINRQLNDSRYISKLIKSLLSNIVRDDGEKEATTKRLIPVTGAITSKLKHEWGLNDKWNEIVAPRFKRLNALTNTNDFGYWDDKINAFRTQVPDAISRGFNKKRIDHRHHALDALVIACCTQKHTNYLSALKENFGLRDSLLIKNENGHYTKHFQIPWANFATEAKAQLEKTIISFKQNLRVINKTNNKTWQWKPQENGAFKKELIKQTKGENWAIRKPMHKETVSGFVKIKKIKKGTSNLLSYLDKADLIVNKSIREKVKSLSVVFDGDLKRIKKHLKESPLLINQSEVTKVRVYEWTTNATATRVALSEKLTRKQLEAITDSGIQAILENHLKNYTDDKNVERFDLAFNTDGIEALNKNIQILNNGKKHNPIYKVRLYEEGSKFSIGQTGAKSKKFVEAAKGTNLFFAVYYDESKQKRVFETVPLNEVIEHQKQTANLPKNKRLPIQPNYTKGNLLFTLSPNDLVYVPTDEELENSSLVNFNNLSKEQVSQIMVVNDFSDITCYFTPNNLATSIAPKEVDLDFNVSKNKLTGSYDTKTAKFKGKSIKDICWKINLSRLGNLLKVEK

SEQ ID NO: 5889 - protein, 1057 aa, unidentified
  REGION 1..1057: note = Description of Unknown: Cas Enzyme sequence
MKKILGLDLGTNSIGWALIENNIILGMGSRIFPEGVVNLGEGEGRETSKNASRTEARGVRRQIFRRRLRKRYLLKELAKHNLCPIAPSLIKDWNGTDIFKNKLIKEWFQFNPYELRAKAIQEEISLIELGRIFYHMIQRRGFLSNSRSASADVKETSTIFKGDAKIGKIGISDTLKSIEQNKTLGSFLHSIQPKESEPFSGELERIRNRYTTRQMYIDEFETIWEFQKQYHSSLDSNLKTILGGRKKDNYKEDGVLFHQRPLRSQKHLVGYCSFEPKKTKCKLSAIPFELFRIYQWVNTLSYDVNGVKKKITLEERKIIIALLLSKEKPSFKEIRKAINKLDGSYKFNYKDDDKIVGSHTISNLSNKKFFGNKWFDFSEKEQENIWHVLSFFDDREKLKEYAIKNWSFDKERAIKISKFNLKDGYSNLSRKAILNILPFLEKGFMYDIAVGLAGVKNTLSVNWEEHKQFVLDNVPEIVRSNLKGGYIEPLKNMLKNEFNCTDKQLEKLYHHSSAIETEKILDRLPVNLHADREIQKIKNPVVITALFEIRKLVNEIIDTYGKPNEIKVELARDLKASKSNRLETRKKQKELEKQNDRVKVELEKLNQRINHINILKYKLWEECNHTCPFTGKVITISQLFTGEVQIEHIFPWSRSLNDSFNNKTLCFADENRAKGNKTPYEFYSEQGDQKWEAIKLQSLSCFKTKLNYPNCYNKFKHFVKKKHDEDFISRQLNDTRYISKEAKNYLSKICTNVLVAPGQMTATLRHHWGLNSILNLEDDTKTRDDHRHHAVDALVMACSTRNHLQELSKRNRYNKNYDLKDFPDPWLNFRQDAENSVAQILVSHKKHKNLLTVRTHSTKKNGVVHKNIGVAARGQLHLDTVYGKRKDVFTKELSYHVRKPIIALTAAEIPKIVDIEIKKIFYKSIEELGLIINKKDRKPIIKTKEEKKLFEQLLNKSFFLPNKNGNPVPIKKIRIKKNFSNAEPLKEKMNQWVDLGKNHHVLVYKDIKGSLKEDVVTFWTAVERKKQGQNVCQLPKGGKEIVNTLQINDLFLLGLNE

SEQ ID NO: 5890 - protein, 1077 aa, unidentified
  REGION 1..1077: note = Description of Unknown: Cas Enzyme sequence
MKWRLGIDLGTNSLGWAALELAQVDKAWTPVGLIDCGARIFSDGRNPKDKQSNAVKRREPRGARRNRDRYLRRRDRLMRQLIQYGLMPDTEVERKALEGGKGMDLTHSDPWILRTRALEEPITLHQLGRAIFHLHQRRGFKSNRKTDRGDNESGKVHDATRRTRDRLEAEGARTLGELFGNPRLETLQHNRTAARGAGLPQPLARVRKSGDGSKWQYDYYPTRELILDEFDQIWEAQRAHHAAALTDEARDTLRNTIEWQHPLKSPAVGKCTLLPEFPRAPKALPSSQCARIYQEINALRFGRTGEIKEPLTLAQRDKVAERLMHPTNKTADVTFDQIRKLLGLSSYDIFNTESQKRNKLKGDEAAARLMQKDRWGDAWFDLNLATQDNIVMRLLEEENEEKLLAWLKEQYGFDRQKAIHIADCPLPDGYGNLSAEALALVMPHLESDVRVYSKAVEVAGLHHSQFGTGEIFEKGLPYYGMILERSVAFGSGEPEDSDEKRYGKVANPTVHVALNQVRAVINDLTRRYGTPEQIVLELARELPLSARGKSELESKQRDNQIENERRSKQLEELGVANTYENRMKLRLYEDLEALGKRCVFSGDQIALSMLFTDQIEIEHILPFSKTLDDSFSNKTLATRRANRDKQNRSPYQAFGHSPAGYDWNELTKRANELPVSKKWRFGPDAMERYENEERNFLARQLTDTQYIARLAKAYVEAIYGGQGHAGSENHVWVITGRLTADLRHHWGLDSILRGHNEPTSEAQKKNRDDHRHHAIDAVVIACTDRAMLKAAADEAHQQEEAFNARLLAGIPEPWDNFRDHVAQKVRDVVISQKPDHGFQDAMHNDTAYGIVKGVNGEPDRKGIRTVVTRKPLDSEAFKSPADLQKIRDFPTMMALLEATQGLKGTEFKSALLATARAMTPPVRKVRIEEKLNVIALEDKQGKIYKGYKGDGNYCYDIWVDPKGKWTGEVVSTFQAYQLAREDKDWWTKQTGRAGQPLAMRIRKGDMVKVIVDGKPLILTVYKFSEGKLNMAEHNEANASARIREKTLNGFQMSPSSLQKADAKRITVSPSGMVKIYQ

SEQ ID NO: 5891 - protein, 921 aa, unidentified
  REGION 1..921: note = Description of Unknown: Cas Enzyme sequence
MKQTLGLFIGTESIGWSLVRDSSHSEIIDMGTRVFSSFVNHIGEGEREISNATIRTQARNDRKIYLRKIYRKRQVLTFLAANGLCPLKSKDLIKWYKDKKPTIRTQIMDVWFALDPYEFRAKGLQGKISKFELGRILFHMTQRRGKIMSDIENKTKAKALLEGLPMANRLGIPHTYDHLDNKHLGAYLNTIKPKKNKPFVYGNTRIRNRYLDRKMFINELHALLNEQQKYHKVLTEEFRHTLMGDDYRSGLFFFQRPAQYKRLGGGNMSCRYEAQKKAMLKSHPLQEWHDIYIWVNSIRYNGHKLTNEQRDKALSIALKFSSFMFKKVRIALGVDDADAFNYEDSTKLFLSHTLVQLSRIQAFGNRFFEFTQEEQHDLWHDLHFYTDKNKLKERLISKWGLSNINASSVIRLKLKSGYGSLSMKAGRAILPFLIAGHQTRTAAVLGSVKNVIGIENWRQMPQKKVEAIIYFVERAVKDNYIDDSKWIADFHDAFSIKLPHDKLYIAQQQEGVETLPVNAEENSLIQREYKPIVQKPIFELRKIVNKLIQQYGPIDEINFVLSNQLKTNAKNRKAIYIDKKIREQQLPKIHKAVIEAGQNPTHSNLLKYKLWLEWSKTCPYTNTPISEEMLFSEEVAIIYILPWKRFFNDSDKNKTICIRSFVNEIRNKTPYEYFKEQPSGTWEKLKTRVLEQLMNGTSKHYAYQKYKHFIMSIYAEDVVNKEFNDQHHLAIKVKYFLSQVAPKVVAARGNSIGSLRRKWGIKSLGAYENKPRHYNSREPALNALVTALNAPKYLEELRHWNRYEPDVYREVFPTPWKRFTHDVSNYYNRIAVSIDAENKVVRLLKNKKSGAICLSPKGKLHKDSFYSKRLGPDGNEAFHIRKPIKSLTTAKQVSKIVDHSVKELIYDHIDLYGGFENGKIP

SEQ ID NO: 5892 - protein, 1150 aa, unidentified
  REGION 1..1150: note = Description of Unknown: Cas Enzyme sequence
MKKILGLDLGTNSIGWALIERNFESKIEITLGKGKILGMGSRIIPMSQDVLDKFGQGQSHSQTSERTDYRGVRRLRQRFLLRRERLHRVLKVIGALPEHYERSIDFENKKGQFIDGVEVKLNYTEIEPKQFDFIFKDSFKEMVKVFVSNGQVNKIPYDWTLYYLRKKALSKKISLQELAWILLNFNQKRGYYQLRGEEKEEHKNKIKTFEVLQVSELKDSGDKIKSTEDILYNVYFTNGWKYDKQITKTENWNNKIKEFIVTETITKSGDVKRTYKTVDSEKDWIAIKKKTEQDIKQSNKYVCEYIFDTLLKNPHQKINGKLVKTIERYFYIEELTAILEKQKEFHAELKDKNLTDSCIIELYPNNYAQQNILKQKDLTHLFVNDIIFYQRPLKSKKSLIDGCKYESRTYKNNEGELVTNPIKVIPKSHPLYQEFRLWQFVENIRIYEKKKFIGDRLYTDYDVTPEYLPTIDAKVVLFDFFNDKEKITQRQFLALYKDNFGKKLMEDNFRWNYVEDKEYPLNETRALYISKFNKHKYFDWRTYLTKENEIKLWHLLYSISDKKEIEQALENENSKLNLPLEIRQEFKKTKPFKKEYGAYSEKAIKKLLSFMRMGKYSENISQEYKNRIDDIFLRLDTIKHNKEKVGEVADDDITKGMLKSFCGYEKIYFGLKVHQAEYIFYGKHAETRDINIWKTPEQLENYIKEFKQHSLRNPIVEQVITETLRVVKDIWKHYGKGKESFFDEIHVELGRDMKNPKNIRERMTKNIVNNQNTNQRIRILLREFKNQNVEGVIPESPNQQEKLRIFEDDILSGFSEKELESQEQDGVKIAKVVKAVEPTNREIEKYKLWLEQKYRSPYTGQVIPLSKLFTTDYEIEHILPQARYFDNSLGNKIICEAEINRFKDRQTAFEMISKSPGRIVELGQCKKVALFTLEAYQDFVSENFISGSKKQKILLSEDIPENFISRQLNDTRYITKVVKGLLSNILREDDEQEATSKNVISVTGSVTTVLKNDWGLNDKWNKIVEPRFKRMNEITNSNDFGYFDKEKGFFRTDVPMELKKNFNKKRIDHRHHAMDALVVALATRNHVNYLSNQHAKSDNLRYDLRNKLRRVEENTANGKTYKRAKEFILPWRGFPVEAKNSLESIIHPNI

SEQ ID NO: 5893 - protein, 1583 aa, unidentified
  REGION 1..1583: note = Description of Unknown: Cas Enzyme sequence
MAKTLGLDLGTNSVGWAVVEKNRINNNEFKTTLKDKGVVIFSEGVKKEKGSEKSRAAERTNFRSARRIKFRRKLRKYKTLKVLINDGMCPLTIDELEKWRLYKNPETTKNESFKNYPTNSDFLDWLKTDEENNKNPYYFRDKFSRQKYDWENNKTLKEELGRAFYHIAQRRGFLSNRLEQSDDSVIEEYKEKIEEILEKVNNSAELLDNINQLFEPFEFEEKKEKDLDATEKKLNRTKKYILRVIENKIKDKNFSSFSEKKEAIHEYINKSENLSPVKGGIKTLSNEIEDANCITLGQYFYHLYKKDRNNQKNKIRTNYTAREEHYLHELEIICKTQELERIKKNEKSPDKKYFGLVKELYNAIFYQRPLKSQKGLVGNCSFEKNKPRCPVSHPLFEEFRMWSFINNIKIKTPDDDKLRVLTKEEKEKIIPKFYRKSKAHFDFEDLVKDLIPKGKKAEYYKSQDAKNVRYLINYNLNTTVSGCPTSANLKNIFGDDWKNISFNYKTVNKKEEIKSRNVNYHDLWNILSTFTTNDKLKDFALEKLKLNEKDAVKFSKISLKKDYASLSLAVIKKILPYLESKQGLIYSHAVFMANAEKVVDENIWKNETKRNELQNAIKQVIENNTLDNQITQVINGLIKNCKNSDNNFTYNEQSKDSYKDDVKNALQNFYGKKSWKELENNNKILENSCEIFFKQLKKKSGTGDFIKSKRTDEKVIDLLLGKNETGEIYCSDETRIDKLYHPSDIERFKSITIKDESGNKFKGLGSPATSSVRNPMAMRSLFQLRKLINNLILEGKIDQDTKINIELARNLNDANKRAAIKKYQEERKKIREFYKERIQEMYSDKTKQQIEPTDDDILKFQFWLEQDTIHLPPVTEQEVLKYQLWDEQHHRCIYTGKTIGITDFIGSNPIFDIEHTIPRSVSYDNSQINKTLCYNKYNRDEKINKLPIDCVNYESGKSITFKDGETVNCPAIAYGIVERWERKFKELDDKIAQLVKNTKHASTKEKKDKIIQNRHYFKMHRDYWKGKYERFTMKDVPQGFKNSQKIDIGIISKYAREYLSSVFKNKNGKSNVYSVKGEMTAEFRKAWGLQESFINEFGKKDYKPKDRSNHIHHCIDAITIACMDKNKYDTLAHAWALEEKREYNNAKKELENSKPWKTFKTDVEKIVDEVFIVHHTPDNVKKQSKKKLRKRGKIVSNAIYKKDNNEKYILNEKGKKIIEKYIYEKDKQGNKIPVFGKLLNEQEIKNKIKDTDYFILQTTEENKYYEFVKYKKDKNGNKKGEIVYKKAAIIQQGDTVRGSLHKDTFYGIIARNKSGIIKKDKEGKIKPQYVIRKTLLQTSLNPLKESDIKNIVDKEVQTKIEDAIKIEGSFKEAMNNSIWMNEEKQILIKKVRCYQSVKGAFELKPHRDLSEHKHKHQYVVANDDNYILALYEGLDTKNKKIRTFEVLNNKKSGEYYKLSNKDFSKQYPIVEEIKKGLMLKAELKKGTMVMFYKENQNEIWELDIKDRNKRLYEIRGFRADDGRITFRFHLEARPDKELKSVSKFNFNKPEAKLIISPSNFNFLIENIDFKITPTGKITKIKKQ

SEQ ID NO: 5894 - protein, 1052 aa, unidentified
  REGION 1..1052: note = Description of Unknown: Cas Enzyme sequence
MKRYRLGIDLGATSLGWSVLELDKDNSPKDLIDIGVRIFPDGRDAKTNEPLNVQRREHRSMRRNRDRYLQRRAYLMEMLVKYGLMPEKARERKQLELQYPYFLRAKALDEEITLYELGRVIFHINQRRGFKSSRKMDSAEKETSRMKEAIKELKQRLDNVGARTLGEYLFNLNKDIPQKNQNKLRPLRIRDYGKEYNLYTDRKMYENEFDIFWNKQSTYHSELTEDVKEHLKQIIFFQRDLKPQPKGKCRFEIGEPRCPVAFPVYQQFRIYQEVNNLILLDYDRKEHELTKAQREMIIQTLLKQKSATFKSLRKKIGKEYAGDYVFNLESEKRKDMKGDETSFILRTIENFGIKWNELSEDEQDEIITQIINEDNDIEIEKKLITWLCKSFGLKNENAENISNVRLPRGIGSVSKKAIRKILPFLKEGFLYHEACQKAGYHYSDFRTGEIYDEGNLPYYGKIMQHHAAFGSDDPNDIEEIQYGKIANPTVHIALNQLRKFINALAEKYGAPTQIVVELARELKLGQKRLREIEKEQTHNRKHNEEIAEELKKVGIENKYQNRLKYKLWEELDGDPAKRCCPYTGKQISISDLFSNKFEIEHILPKSKTFDDRPTNKTVSYYIANKFKGERSPFEAFGESPENYNWDKILERGENFPPNKRWRFYPDAMKNFEDQGELISRMLTDTQYMSRIAKEYMSYVCGPNNVWAIPGKLTSKFRAKWGLNELLSEDSKKNRADNRHHAIDAFVVACTDRAMLQKVARATESTRERFIEKMPPPFEDFCHDEMQEKVNNIVVSYKPDHGNAKAAILRDQTVGQLHDETAYGFVSEDEEKGKITLSVRKPLISLESVKNINEIASSKIRNELLTLAEGVPKNEIKAILANYSERTGIKRVKLHVEKDKKTVIPIKNKNGEIYKYYLSDNNYCADIYCPNKGEKAGKWQIEIIPMFKAHQQDFEPQWHKDNPTAKKIMRLFINDYVAYEESGERKIRRIKKMTGNIIYLRELNIARKEKGKEDIGEQFSPSKLQYINARKIGVDILGKIYDSQKKNEHSRDK

SEQ ID NO: 5895 - protein, 988 aa, unidentified
  REGION 1..988: note = Description of Unknown: Cas Enzyme sequence
KINLKDGPSNISLKAIRNILPFLVKGYQFSDATILGGVRNAFRKTVDKKQIDRWEYFASEHKKIEDAIENIIKEKGNKEGEAIGKIKDYLSNPKNGLGFNKNDKSFKKLYHHSQETEQIELRDKLQKVENLRNPIVQQGINELRRLINSLLEHYRKEDPEFKFDEIKVELARDLRSGKKARQDMSFRMNENNKKNNEARQKLTEYGLQHSRENIHKFLLFKEIEEKNGTVVCPYTNKTIGINDLLGSENKFQIEHIIPKSISLNDSFSNKTLCDAKFNGLKGNKTPYQFFLNNKDADLWHANSWEEIEQRAFKLLPYYKAKLFTSKNQELDVNGFIERQLNDTRYISKKAKEILSEICDKVRVMPGNLTSELRHLWGLNNALQPVKNINLENAQFDENKLKEHYLIVDPDDNAIDILPIYNKKPELKNNETTIIGKIKNNEFSSTLLNEKFETFDLADGNYWTKIKLSDSPVKTIKKFTNKPSITENEIILRGKIEKNKFSHDTFASKISVTEDDGYYWAKFDVTNIKFEEPKKKDRPQKTGKQILLFGEVKNGVFKSYIYEQNTELDDGKYWAIIDVDLNSISCLNVKNKIPTLDQNEILISGSVNNEGIFSSDIDAEHTFKTNLLRGKYYAIFKIIENPKNFALIKNKKPKLENGQKLVEGNVWVDGNTGEIKFDPKKNRDDHRHHAIDAITIALTKQSYLQKLSTYNANKEEKKRGNKYKKPTFEKPWENFFNDVKNATAEIIISHKQNNPVLTKINKTFFKNGKKYKSNGFAARGQLHEESIFGKRKAPKSEEAYHIRKSLDTLKTNKHIEKIVDKNIKEIVKNHLKENFNIDISGKYNIPKNAFFENGQPLIFLPNKNGAPVPIKKVRIKKFIGNAVKLKSENQFVNPGNNHHVIIYKDENGELNEQPIVTLWKAVERATKKLPIYSLSEQQADKPKPVEIVATLEKNDMFILGLSDEEFTNNKDDNKILSKHLYRVQKISSS

SEQ ID NO: 5896 - protein, 915 aa, unidentified
  REGION 1..915: note = Description of Unknown: Cas Enzyme sequence
TNSIGWAVVDDEKNKIIDTGVRIFPEGIVRDKGKEKESKNAERSRDRQTRRQYYRKRLRKIKLLETLIQFEMCPLKIEELKIWSKWDKEKGKEGREFPSSDEFKMWLKQNPYELRKKALNNNLTLYEFGRILYHLIQRRGFLSNRKSNDEGKIYTGKDNMTGIDDTKSQIKDSTLGNFLYSIYPKENEPYKKITDKNGNELRIRARYTLRDMYIDEFHKIWEKQARQLGLDEKKYEKKKIRFIKGNIDNNRNKKKIENLIDKYGKENVIIEDNSASEQGGGIYCINHSSPSLNNVQIKNNIATKDGGGMYCITYCNPALENVTIIGNSSSKSGGGINCMGSSVPIFSNSVRCNIFQNYAGTNGNDLCSQDPLNVFVDTFTVSQPDNYFASPIENFTFDILNFKIEPVSQDLYVSPTGSNENSGFSADEPLKTITFALMKILADSINTKTLYLSNGTYSPSQTDEKLPINCKSNVSLIGEEQEYTILSGDDLFGILSCSSDINFSIANMTIVNGNQLWGGGVYCIEYSAPNFVNVTIANNSAYKGGGICCIRSSLSLQNVNFINNHASYRGGCIYCTSYSSLMILDSNIDGNSAIWSPGIYINHYSEANIDNVSITNNSGAGGSALSCYYSDMILRNAVIVDNDAGAGIACSHGYAIIQNVLIEGNSGSGIGCGKNSIMDLENVIIAGNSASGNGGGVSCGEDITLNIKNVTITGNSGVSNGGGIYSNFYSDTDIQLVNCILWDNSPHQIDVTNSPITVTYSDIQDGWNGIGNVDEAPLFVGTGELPYSLQEDSPCIDAGNPNQLYYDPEDPSNPGYALYPAMGTITNDMGAYGGPNAIGWIYVSVEDEFFIEPVLCNLYQNYPNPFNPETTIRFTAEDAKNAEIIIYNIKGQKIKTFHVILSGVEGQSSIIWDGT

SEQ ID NO: 5897 - protein, 1406 aa, unidentified
  REGION 1..1406: note = Description of Unknown: Cas Enzyme sequence
EGSKKYENKNMKRILGLDLGTASIGWAVADEAESKNETSKIVKLGVRVNPLTVDEKTNFEKGKPLTTNADRTLKRGARRNLQRFKLRRQNLVSVLIENGILKKDKSLTEDGKDTTHQLLKLRSKAAQEKVNLQDIARVLLAINKKRGYKSSRKTNLEEDGVAIDGMEVAKFLYEEELTPGQYVLRLLGDDKKYTPDFYLSDLKAEFDAIWEVQKNYYPDLLTDELYENLQEKNKSQTWAICQEPFGLIGIKLKGNATEQKEQRYQFRVDALKEKTELEHLAIALQEINNDQKKSSGYLGAISDRSKILFIDKKTVGEYLYEQIEANPHTSLKNQVFYRQDYLDEFEKIWSTQAQYHKELTSELKIEIRDIVIFYQRRLKSQKGLLGFCQFESWEQERKDKDGNVVLNKLTGLPKKRTVGQRVVPKSSPLFQEFKIWQNINNLAFKQKKNIDGEDFVLDEDQKQELFEELNMGRSMTDKQLLKFFNLSDKEWSTNQPASDGVSGSKKPIEYNKTNATLYNIYQTIADLEGYGFDWSKKTSKEIKEELRSIFPEIGIDPRILEFNATMDGDSFDKQMSYQLWHLLYSAEDDPKSTEEDRLTYGSTDVALKKKLHQKFGFKPEYTKMLSSISLSDDYGSLSARAIRKIFPFMQNGHEYSKACGLAGYNHSNSFTSEELEKRVTKDLLEILPKNSLRNPVVEKILNQMVNVVNQVIEEYGKPDEIRIELARELKKSAKEREETIKFIASGTKRNEDLRKIIQKDFGFMPTKNDITKYKLWQELDKNGHKTLFTDKYIGREQIFSKDIDIEHIIPKAVLFDDSFSNKTLAYRAVNLKKADRTALDFITQDYNSDLENYKSRVEHLYKQDAISKGKYKKLLMSFKDLPDGFIERDLRNSQYIAKKAKHMLFEICNSVVSTTGSITDKLRQDWDLINVMKEVSIDKYRALGLTEIEQRKDGKTIEKIKDWTKRNDHRHHAMDALTVAFTTHNHIQYINNLNARRDEEHEKHKIVWAIEQKIKQKDSKGSSRFTPPLENFRDQAKEHIESILISFKAKNKVVTRNINTIKKKNGLYSKDQLTPRGQLHKETVYGKSKRLMTKATKISKRLTYSQVLNIASEDIKSIIIEHLGAFGNEPEKAFGSKILKKSPLLYNELPIDEVFCYEEIFTIRKPINSDNFKDLKSLEKVVDKGVKTILQKRLSDFSGDAKKAFSDLDNNPIWLNKEKGIAIKRATISGVSNAEPLHYKKDHNGDEITDEMGSKIPADYVSTGNNHHVAIYEDEEGNLHEKVVSLYEAVARVNQDLPVIDRSYKSEVGYSFLFTMKQNEMFVIVTDDIKGLDLMEQKNYSLLSPNLFRVQKIGSKDYWFRHHLETSVTNDIKGVTYYRIKSTNPLKAFKKVRVNHAGKIVGVGEY

SEQ ID NO: 5898 - protein, 1037 aa, unidentified
  REGION 1..1037: note = Description of Unknown: Cas Enzyme sequence
MSKKILGLDLGSNSIGWALLEEINGEAHSIINIGSRIFTKAVEEKVPTPKNVKRRDMRLGRRVLQRRARRKQRMLNYLVSLNLLSNELQRNYQPEVILNKLGDPYELRNKALDEKLTRYELGRVLLHFVARRGFLSTKKQVAGDLIDDPDTIAYLNEIDDKPTKDKEEGAFKADINDVRQAINDSGARTLGEYLYKLEKGGCKRNRSHEGGHLRTDRAMYKDELDLIWQQQRQYFSNLPDDFMEDNKGVKEIIFYQRPLKLKKDRIGKCSLEPKNNRASMARLEVQRFRYLQDVNNLQYFERQTEQWLAITQVDKGKLVEYFERHSTITITTLKKLLGFDKLTKINLEAKNLKGNVTACEVRSVLSDQWDNYSNTEQFNLVEDLLSIKKKSALKARLIKHWSLSTEIAIKLCLLEFEPSHSNLSLKAINKLLPFLQQGLIYSKKDHQTGELGALQAAGYSDEIKEQEICNKLGAPLETSNPIVNKAMHELKRVVNALIKEYGKPDTIRIEMARDLEMNTKRYKENEARQNKNKKANEEAVEAYQGLNLGKYLNYDDKIKYRLWEEQNRRCAYSNEAIPLNSVFSSTVEIDHILPFKKSLDDSYMNKVLCYVVENRNKADRTPKDAWSGNMEKWLQITQAISKWKGVDSKVKRFHQTEEDLQKRDFISSQLNDTRYISKLALDYMAELVGQSNVSVTKGFVVSQIRHQWGFNDLIGEVEKKDRTDHRHHAIDAVVIAATSRSLYTKSVKQIERDKLKIEPPYPEIRNELAECLEQTIISHASHRKLSGGLHEETGAGYIEKHGGLVYRKNLAPDFTVKNANQIVDSTIKLMVLKHLEQYDNDPKKAFADNIKVMHKDGKTPIKRVRVLQSKTTLKKLEKNKVGIKDKSGNVFKYMSYGNMHHVEIIKNKETGKYKGEFITMMQASHRAKGIQSKLNPEGRKQPLVNAQHGDEWEFIMALHINDLVSIKAGNGKRKFYRIQKLDTQNNKFVLREHLASTLQNKDQEVNVSITTENLGSKEIRLHKANAIGVFTDDQTNH

SEQ ID NO: 5899 - protein, 1067 aa, unidentified
  REGION 1..1067: note = Description of Unknown: Cas Enzyme sequence
MSEQNNVSPYVLGLDLGSNSIGWSLIKLDENDNPCGLENVGVRVFEAGMEGLYEKGKEDSRNKKRRDARLARRQIERRSRRYRKLANLLQRLGLLPPGNLSISSERQKFFEELDKQLREMFIPSDIPETEKNRLHQIFLYYLRSLAVEQKIEPYALGRILYHLGQRRGFLSNRRGQKQDDEERGKVKQGIAEIRNEMTRLGAETLGRYFAKIDPTDINQKRIRGRWTARDMYEQEFYTIWEHQSQYYPELLTEDNKKQVFQTIFSQRPLKSQKEKIGFCQFECIARGAIRNRRRAPWIILKAQRFRLLQKVNDLLIKEEGSDKRPLTDEERKLVIDYLEKNGNTTFAQLKKLLKLPQKAKFNLEEGGEKKIPGNRTASAIREIIGERWDNMTPEEHDKLVEDIYSIVSNKALKKRLMNHWKFSETEAEQLSEMAIEDGYCNLSRQAIDKFLPELEAGKLYGELVKVIYGMDELRDDIRVELLPPLEEAPIGEIRNPTVTRTLAEMRKVINEIIKRYGKPRYIRIETARDLRNTKKERKKLWEHSRDLEAVREKIKQRLQSQGITNPTRSDIERYMLADECNWTCPYTGRSISFTALFGPESQFDIEHIIPLSRCMDDSFKNKTLCYHEENRERKHNQTPYEAYASNETRWNEILERVSKFNPLKNAEEKLQRFKLHGEELEKFIDRFSSSQLNDTRYATKEAALYCGLLYGREYRKHIFTVSGPTTALVRRMWDLNKVLGSPEKNREDHRQHAIDAIVIALTSPAMVKNISLQAKEIPKDEHRKDRWWRFIQPPWDTLFNEAHEKVLNIIVSHRPERKVSGRLHEETNYSPPKPGDKEGETVVHVRKPLGSLSRGELEDIVDPIVRETVKKKLEELGTDNLKVFAEPENYPLMPNKKGLKIPIKSVRIKKKVPVFPVGKNERVRYVATDENHHIEIFETVDKKGRTVWDANVVSMFEAMQRKKKGEEIIQRKLIRDGKEIEGAKFLFSLCKGDMVYMKDKDGKFDYYTVVIVSEYASGAKVMFFLQHYAAKSPKSWVGLTRYPSTLQQSEAKKIAINALGEVQIAND

SEQ ID NO: 5900 - protein, 1582 aa, unidentified
  REGION 1..1582: note = Description of Unknown: Cas Enzyme sequence
MKKVLGLDIGTNSIGWAFIETNAYEHHPETLDGKIIQLGSRIIPMDADAMNKFETGNPESKAAGRRQARSARRLNQRYKLRRTRLIEALKILGWLPVEFPTEFKKLKKHNINKYLHFSDDLKKETAGFFGISGLKTTKGEEFEISEDWIIYFLKTKALHTKISLPELARILYHYNQRRGFKSSRKDAKIEDETKEIKYPLFEKWVEIVTITSIIEKGKGEGKDSECTFYELVCKTPTLEFTAIKKRKNPLDWLNKNIEVEITKKTTKDLSVNYTISEVDPNAWESRKRALEKDIQREDLSISEYYLNNIKADRNYPIKQRIVDRKFYQEEFRQIWKEQSKYYQNEFTNKNKIAEIADTFYTHNKDKNKELKGKDLFHIFFNDIIYYQRGLKSQKGLLANCQFETKSYKTKNGELKIAGVKVISRSAPCFQEFRIWQTINNIKVFLKEEIVDGKLKVDNDKTAEYLTIENKENLFELFDSAAEISRDSILRSFGFTKDKVENAEKTFNYHLNYTDEIFKGNETKALFRKVFKKHDFAEQGEKYLNDKELFNHLWHIVYSLPEEKEIVSALSNKKYFDFPEDVIKHISKLPEFKSQYASLSSKAINKLLPLMRTGKYWSENGIDKNTLDRIDKILSGEFDENISDITRDEIQKRNLNRIKEFNGFQTHLAAYTVYGRHSEMANEEKYNSVDDLKVNELIPYNSLRNPVVEKVIRETLSLVKEIWKNEKLGRPDYIHVELGREMKNNNEDRKKIAEANTKNRTEKERIVNLLKELQYQNFNENSLADVERFRLWKESGGKKGEEDFDLLFKKNNAEFVKDADIEKYRHWAEQNYRSPYSGKAIPLSELFSSKYQVDHIIPRAKFYDDSFANKVVVEAEFNDRKDNRLAIQFIDEFQGREIHLSNGEIRTVLALDQYKKFVDEVFTSKKKKRYLKLYEVPEDFVERQMNDTKYISRTVAQLLRPVAIGTESDDGIVYTSGKITSDLKHEWGLNKLWKAILKPRFERLETILGEQLILPSETKQDDYFFAKDYKRIDHRHHALDALVVACTSRVHIKYLNSLNSLSNNKKDVAKYNQWQQWKYILNKKKQLENKENGMTEFGTPWDRFYLDTKDAIESVIVSHKPTSKLISKAINKYYKYVEVENENGQREWVKKIHLQEQPKDDDKYWVAVRQSLFGQPYGKIHLAEYKKGVDIKAAIKAQIQFLKRENKEWNTEDWRIAKSDIRKEIDKLIKHHNVDEKAILKYLSQNPLKNKEGNKIDRIDLLQFKKYASKKVSIDETFTKDKIEKMPYSNLEKNWLTTLLKTHLAEYNNDPKQAFKGEALEMLYKKAPHAINKVTRKETGEKIEKNNKLLDGDKGVNQYFIIEIKKEIDKKTGDEKTIRKYSTPDFLDCIERLAKGLPVHDENPDSTYIVLSPGDLVYVPKKDEVVSQIDWSDKKAIAERVYIMKSSSTTTCYFLPVAVASIIEKGEFETLSKSEKTKEGSQVIKENFIKLNVDRLGNIRPFKFNYRSASNDENSTIVSEPEVLLKKKLKTFDSFNEASEAEAKAKANLSPEQHILNVTQRIKGMYAEELKKPMDKNLKFRND

SEQ ID NO: 5901 - protein, 1467 aa, unidentified
  REGION 1..1467: note = Description of Unknown: Cas Enzyme sequence
MSKKILGLDLGTNSIGWALVDDEQKKILGMGSRIIPMGTDKQDYEKGIGITKNADRRTKRTIRKMNKRYKLRRNKLLYILHQLGMLPEQFQFKNGIPEANKIQDLELLPIARKREYNEQGQRKDRLYIDGKKIEQDPLSMLTYKLKVVALSEVVELKEFGKILYQFNQLRGYSGGNSDDDTKKKKEDDNDQNESVKKYEVFNQKVTIQKIEQSETKFQGRGKNKGQEFNKFNVTVSFDEEELEGETELQNLAEKINQEEELEIRIRRNKKGETTSVVFALPQKTNWRKQMEKTEEDLKQGNLHVSQLILQDLEQNKWAKIRNRVFLRNRYQAEFDVVWETQSKKYDFLKNCPQTTLEKIATYLFPGTSESQKQLREAAINGGLKYIIKEQVIYYQRPLKPQTELISKCQFEKEEQVLANTHPLFQEFRCYDQINRMYITSKQEVYNEKKKKNILQYTDRFLTNDEKQKIYEKLQTQKQIGFGEVAKIVNLKNDKTEYLNGLNVKAKLKGCDTQIEIKKKLAEHFETLLKNDSNIVEKIWKAIYDNVNNGSEYDPNSLKVSSIKDVLKSLNDETATKLALQLAQTIKFPRKYASLSAKAINNILPLMQLNPRNVPNGIKTKFENVKNLVETGEIVNDMDNNLEDYVISYVQNNPQAIETGGLMYAFASSLVYGKHTAEKVAAQIKNYHDIKYENRNLRNPIVEQISNETMQVVKAIWKQYHFNTEELEIRVELARDLKNSAAERDKIYKGQIKSQKINERIKQRLTELKQDLSQYNIDLYKLWSNQNKEQYPIPKKANEPTKDEIEKLRLWEEQGCISPYTLKPIPLSKLFSPERLYDIDHIIPKARYFDDSLSNKVIAERHLNEEKSNRTAWEYITQQNSKYKNKDGSLEICSADNYTQHINDIFYGKKKKNLLLEKIPTNPVERQLKNTQYITVAVKNELAKVVGSDNVKTSTGEVTDFLRSRWGLKDLFMRVTKERFEQMGLWDINTETGKPNEEWVKTEFDKKKNKDVLKIKNWSKRYDHRHHAIDALVVALTEQSHIQRLNNLNKYLQDELTNRKEEFKLEVKEDENILEAFFNLEEKRREEIQKQIESSRHFEKPFEDLVRQAKEYLETMIISIKPKDKLGIKKDDNGNTQLKIRGALHQETNYGKTKDPKTSLLRDTKTVGISILKAKDISQIIDEVLKKEIDTHRKKYESMKEAFTGEGLKAFNESRFQRKKPTELKPPVYKIKIWYSAKEDEGSTLQRLYDKNKKLSVVTGDNYLFIVMEKNGKRIFDIASLYDSAILAKEALKNNEDLKQRICEDFRIKHKDKPDKILFTLQQNDLVYLPENAEDQVLNKSAEEFKTWINILENKKKFSKRVYKVVKFTGKDCYFILNNYANVVSVPKDLTSEQKEELKKQYGDKKIPKQELNYQEFGSFGTSSKTEANDNFVKELVLKKNFKGDKPIKIQETCIKLQVDWLGNISKA

SEQ ID NO: 5902 - protein, 1530 aa, unidentified
  REGION 1..1530: note = Description of Unknown: Cas Enzyme sequence
MEKVLGLDLGTNSIGWAVINRNENKKLEGIEAAGVRIIPMDASIMGDFDKGNSVSQTADRRGFRGTRRLRERHLLRRERLHRVLSLMNFLPNHYAENLDRYGKLTTDTEPKLPWKKNLQGKYEFIFQDSFNEMLEDFKKEQPSIAVKGVKIPYDWTIYYLRKKALSKRITKEELSWIILNFNQKRGYYQLRGEDEGTDTSKLIEYYSLKVVSVEDSGEKKGDDIWYNVKLENGWVYRRSNRYPLDWVGKTKDFIVTTDLDENGIPKKDKDGNTKRSFRAPKEDDWTLLKKKTEADIEHSHKSVGEYIYDSLLENPNKKIRGKLIRTIERKYYKEELRQILEKQTAYHIELQDKNLYLACINELYPNNESYRKSIEKFDFIYLFIDNIIFYQRPLKSKKSLIANCPYEQRVYIDKKSKEKISVPIKCIPKSHPLFQEFRLWQFISNLEILQRERVTKTSDGQLPLFPSDDTTSQKIEIDAKVTKEFLPDDEAYADLFDWLNDREEITQNTLLGSYFKIKKPKGKDEDYPYRWNNVEDKKYPCNQTRGMILSRLEKANIKADFLTKENELALWHILYSISDKQELKQALISFAETHQLGSKFVDIFQKFPPFDKEYGAYSAKAIKKLLPLMRMGRYWTEEAIDKNTKSRIDKILTGEYDESIRERVRQKAINLTDISHFKRLPIWLACYIVYNRHSESKDIYKWESPSDIDSYLMSFKQYSLHNPIVEQVILETLRTVRDIWKQVGHIDEIHIELGRNLKNPKDKRMKITEQISDNENANLRIKAMLSEFINPDFQIKGVRPYSTSQQDILRIYEDGVLKSVAEIPEEIKAIINKFNENGAEKRPTHAEVLRYKLWLDQKYQSPYTGEFIPLSELFTSDYEIEHIIPQSRYFDDSFSNKVICEAEVNKLKGNDLGYEFIKKQYGRIVETRDGKHVKISSIEAYEKFVNDHYSRNYVKKRKLLMEDIPDDFINRQLNDSRYISKVIKSLLSNIVREKDEQEDISKNVIPCSGAITDYLKKDWGMNDVWNSIVLPRFERLNQMTGTTEFTTEANGHTIPSLPLDLQKGFSKKRIDHRHHAMDAIVIACATRSHVNLLNNEAARSENKANRYQLSRKLRHYEKVMINGQEREVAKEFLKPWNTFTQDARNTLNNIVVSFKHNLRVINKTSNYYQYIKDGKKKYKKQERGDSWAIRKPMHKETVFGLVNLRSIKEARLTEALKRPQSIADKDLKEKVKELLSENFNENRIIKYFNDNKEIWQDINLSKIKVYYFSNEIGTTFYATRFGKDLVSIFKDAKNKDKALNVINSITDTGIQEILKNHLKEMNDDPILAFSADGIEKMNSNIQQLNGGKEHKPIYKVRTYEMANKYTIGQKGNKSKKFVEAAKGTNLFFAIYESIVIDKETGIEKKTRNYFTIPLNVVIDRLKNGLSPVPEENEMGNKLLFYISPNDLVYLPNKEDNNSNIISNPIDKNRIYKMVSSTTSACFFIKNNIANCIVDKYEFSPLNKMERSVTGEMIKETCIPINVDRLGNIKL

SEQ ID NO: 5903 - protein, 994 aa, unidentified
  REGION 1..994: note = Description of Unknown: Cas Enzyme sequence
MKDYTLGIDLGSSSIGWAIINDHPSPNETNVLAGVRVFPEGVDRDKGREKSKSETRRAARGMRRQHERKSRRKSTLKQALIQAGIFAECWGADPYALRRRGLDEPLTPGEFGRALFHLNQHRGFKSNRKSESKKETGVVYEGIEHIARDMEKDGARTLGEFLANRKATEKVRNHYFLRDMVKREFNLLWDSQSRFHADRLTPELRQKMEHIIFFQRPLRPANLGKCELEPDEERLARASWFAQRFRLLQDISNLRLLLPDGTEGPLSEEQRQALTQQLGAKRELKIEKVRSLLQLDERTQLNIESYRDKLQGNTVEVELRRLFKDYDKRKEFYIEQVYEACVEQEEEDFEQKARIELELNEEQIQSLYKIIANQPKGYLHLSRKAILKLLPHMQNGCDFFKAKENAGYLAPSDSGESLDILPLPDKSLPNPIVRKALFELRRVVNAIIREYGKPSRIIIELARDTKGSAKERNETMLRNFERDRERQRIEAYLKEQGIASPSRNDVLKYRLWKECADQRCPFTGRTIGFDALFRTGEVQVEHILPYSRSLDDSQFNKTLCFASENQWKNNRTPWEAYHANPAQWEEIQARVQRMHIPPNKKRKFLQHEINLDECVTRQLNDTRYMSREARAYLQRLYPQNSLDSVTTTRGVVTAELRRRWGLNSLLHEDEDEQRDRKNRKDHRHHAIDAAVIAMTTPSHLKNLARRSDFRQQGKPFPAPWATFRDEMQTVINRMLVSHRVTRRISGALHKDTAYGHRPGEKPQQFVYRKPLESLTPAMIGKIRDPLVQSVIRQRLEEFGGDIKKAFGNRDNPVLMPNKKGLRIPIHSVRISEIFTNMIPICDQSGKPYRYVEPDSNHHISIFEYKDKKGQFKRDAVITSMFEAAQIAMENGRRRKQGLPPREIIRKTHPEIPEARFLFSLSKNEMFLLDIGDETVLCRIQKFDVNGAIILRPHTYAGKCDNADMPPFVYRRSPSTLIGRKIVIDALGRMAEAHD

SEQ ID NO: 5904 - protein, 1036 aa, unidentified
  REGION 1..1036: note = Description of Unknown: Cas Enzyme sequence
MSKKILGLDLGSNSIGWALLDEENGEVSNIVDIGSRIFTKAVEEKVPTPKNVKRRDMRLGRRVLQRRSRRKQRMLNYLVSLDLLSNELQNNHQPEIILNELGDPYYLRAKALDEPLTRFEFGRILLHFVARRGFLSTKKQLAGDLIDDPDTIAYLNEIDDKPSGDKEDGAFKADISDVRKAIDESGARTLGEYLHQLEQGACKRNRSHEGGHLRTDRAMYKNELEQIWLQQKQYFPHLPDDFMADNKGVKEIVFYQRPLKLKKDRIGKCSLEPKNNRAAMARLEVQRFRYLQDVNNLQYFERQTEQWLSINDNDKANLIEYFEHHPKITVTALKGLLGLDKLTKINLETKNIKGNITACEIRTVLDEQWDKYSDELQAALVEDLLSIKKKSALKARLINHWDFDASKAIELCLLEFEPSHSNLSLKAINKLLPFLKQGLIYSKKDYGTGELGALQAAGYSDDIKEQELLDKLDAPIETSNPIVNKGMHELRRVVNAIIKQYGKPDIIRIEMARDLEMNTKRYKENEARQAKNKKENEKAVDAYKELNLGKYPNHDDKIKYRLWEEQNRRCAYSNKTIPLNSVFTAEVEIDHILPFKKSLDDSYMNKVLCYTAENRNKGDQTPKDAWGGNTERWVQITQAISHWKGVDSKVRRFHQTEEELQKRDFISSQLNDTRYISKLALEYMAQLVGKNNVTVTKGFVVSQIRHQWGFNDLIGEVNKKDRTDHRHHAIDAVVIAATSRSLYTKAVNQIERDKLKIEPPYAELRHELEERLKQTIISHASQRKLSGALHEETGAGYIERHGGLVYRKNLSPDFTVKNANQIVDSTIKELVLLHLEQYDDAPKKAFADGVTVFHKDGKTPIKRVRVLQSKTTLKKLEQNKVGIKDKSGAVFKYMSYGNMHHVEIIQHKETGKYKGEFVTMMQASHRAKGIQSKLNPEGRKQPMVKTQHDGDWRFIMALHINDLVSVNSGNGIRYYRVQKIDSGSNRFVLRSGEASTLKNKEQELYISISYESFNKYGIQKCNINAIGIISNDKTCN

SEQ ID NO: 5905 - protein, 1284 aa, unidentified
  REGION 1..1284: note = Description of Unknown: Cas Enzyme sequence
LDLGTNSIGWAIVENEEGNFKMIDKGVRIFQEGVKIEKGIEGSKAAERTGFRSARRIKYRRKLRKIQLLQVLSEFGYCPALTKKELENWRYKKIYPKNNEFIEWWKTDDLKNKTPYFYRNLAVTEKLDLNVEEDRFKIGRALYHMAQRRGFLSNRLEGTKESEGAVKKEIAKINEEKGNLTLGQYFYEKYLKGEKIRDTYTSRETHYLDEFMRISDFQNLPDEFIKKAKDAIFYQRPLKSQKGLIGKCVFEKNKPRCQVSRIEFEEYRMLSFLNNIKIKTPEDEKLRFLSEEEKEKAKSQFFRKSKEHFDFEDIAKQLAPKKQYKFYKDSNKNPEDYLFNYSMKTSVSGCPVTSKLIELFGDNIYAFKILHNNQNGNLITIDIDDVWHVLNTFDSEDKLIEFGRAKLKLNNEEVDKFCKIKLKQEYTALSLKAIKKILPYLRKGLIYSHAVFLANMEVVLPAEIWNNEENQLIINNAIFEIIQNHTEENKISEVVNGIIKDYRDQNVSWSKHAEEYFITDIQKKLKRVYGENYYNDLPETKKNSLEKKGWQLLKEQMQKNMGKGEFINISTIKERIITFLFDNFEIDKDKASKLYHPSAIETYKPAEKAKDGKYYLGSPMVSSVKNPMAMRALHQLRKVINQLISEGAIDRHTKINIEMARDLKNANERKGLQDWQREREKTKSNYAEKIKAHFKQNGKNLEPSADDILKYQLWEEQHHKCVYTGDEIAISDFLGADPKYDIEHTIPRSISFDNSQENKTLCQNRYNRAIKKNKIPYELQNHDEILDRIKHWKEDYEKIKLQIEGTIKQAKSAGDKNQKDKAIQRRHRLTYEMNYLRNKYSRFLMKDVPEGFKNSQIVDTGIITKYSRLYLKSVFSKVYTVKGNTVADFRRMWGIQDEYDKKERVNHVHHCIDAATIACITKENYEHLAKYYHDRETSFIKGIKDKPKVPKPWKTFTEDVKNIENEILISHHTPDVLPKQTKKKLRKRGVIEKKPDGSPIIMQGDTVRGSLHKETFYGAIEVKQEDKNGKTNKAIKYVMRKPLAELEQSAIKNIVDERVRNIVEDGRKKEKLLRKEIEILQTQLKNAEEADEKAINDNIDKLKNQIDDLYCLPNKNGAPIPIRKVRIFQPTVTNPIFLKEHRDKSITENKPWKEHIHVANDGNYCMAIYEGKDKNGKVKRDFQLANNIGAAEFFKLSVQKNLQSQNLNKIDKLFPEIKLNGKIELPLRGILKIGTMVILWENNPEEVWDLDIKSIKRRLYKVIGLSNQKINGAWRSSTLSSSTQ

SEQ ID NO: 5906 - protein, 1313 aa, unidentified
  REGION 1..1313: note = Description of Unknown: Cas Enzyme sequence
MTKILGLDLGTNSIGWAVVEKDGTDFSLVDKGVRIFSEGVKSEKGVESSRAAERTGFRSARKIKFRRKLRKYETLKVLALNNMCPLGVDEVVAWRKSGFKEYPLNDEFLKWLKTDDDQNINPYLFRDKASKGKANLFELGRAFYHMAQRRGFLSNRLDQSAEGILEEHCPKIEDAIEECLTIVELKTEIQDYFEGLDILDKNAKDLDEGEKKLKSLFNSLDKIIKANTKDFEKAKNEIVERLNKKENLGAVKQKISEISQAMADGNFKTLGQYFYSLYNKEVELENSTTKEKEKFNRSKIRNQYTAREEHYLAEFEIICKAQGIEGINDAELLPEKKYSGLAKELYKAIFFQRPLKSQKGLIGKCSFEKSKSRCAVSHPDYEEYRMWAYINTIKIKTPEDETLRFLTAEERQKIAPKFYRKKDNFNFEDLAKELIPKGATFEFYKSFNAKSAHYLFNYKLKDTVSGCVVSASLKNIFGDDWKTKTFSYQTKNGKGENVIRNVDYKDLWHLISVSNNDIYLQEYAKEKLGLDEKRAKSFSKIKLKKDFASLSLNAINKILPYLKEGLLYSHAVFMANIENIVDEKIWNDATQRKYIQDSIAKIIETNKYDNGLLEVINGLMKEYKKDGVYYSREAEPSFKNDLQKKLTLFYKQHKITEKQDQILNDLFPVFIEQIKKQEFITVKRLDEKVLEFLSGKNEDGEIFCSDEKQLKKLYHPSDIEKFKKIIVKDENGNETVVLGSPLSSSIKNPMAMRALHQLRKVLNALILEGQVDSKTIIHIEMARELNDANKRKGIQDFQNENKKARETYKDEIKKLYFDATKQEIEPTEDDLLRYQLWLEQDKKEIYEEGKSIGISQIIGTNPEYDIEHTVPRSRSQDNSLMNKTLCSQRFNRAVKKNQMPVELSNHIEILKRVDHWRKEAEKLTLEIGQIVKSTKAMATKEAKDRKIRLRHFLTLKRDYLKGKYDRFVWEEPKVGFKNSQIPDTGIITKYSQAYLKSYFNRVESVKGGMVAEFRKIWGVQKSYQENGKKYYEIKDRSKHTHHTIDAITMACMTKDKYDVLASAWTLEDKEQISDARKLLAESKPWKTFTEDLVKIEEEILVSHYTPDNVKKQAKKIVRIRGKKQYVAELTKDVNGKNIPKKDANDKIIYKLDEKGNKIPRLQQGDTIRGSLHQDSIYGAIKNPLNTEEIRYVIRKDLESIKATDIENIVDETVKDIVRMAKENKIIVFSANAQQKNKLNGTVWMNEEKGIPINKVRIYANSVKNPLEVKEHAALSKSRHEHKQMVYAQNDENYAMAIYEGLDKKGNIKRGFES

SEQ ID NO: 5907 - protein, 963 aa, unidentified
  REGION 1..963: note = Description of Unknown: Cas Enzyme sequence
MRKTILGLDVGSNSLGWALLQEIDGKTNKIIDMGSRIFIKAVEDGVPTPKNVKRRDMRLGRRVLQRRSRRKRRMLNYLASLNLLPKALQGHPQPEILLNDLGDPYALRAKALHVQLTPYEFGRVLLHFVARRGFLSPKKQIAGDLVDDPDTVAFLKDTDDIPITDKEEKAFKADIKIIRQSIDEAGASTLGEYLYKLTNGTCKRNRKHEGGHLRTDRKMYQDELDLIWQQQSQYFKELPDDFMEKDRGVKQIIFYQRPLKLKKDRIGKCSLEPKHYRATIARLEVQRFRYWQDINNLQYFERHAGQWVSLNHEEKNKLADYFEHHAKITIPALRKYLGFDKLTKINLESKNLKGNVTACEIRAVLGTPWGEYTDEAQHALVEDLLSIKKKSALKKRLIDHWQLNTAKAVALCLIEYEPGHSNLSLKAIKKLLPFLKEGLIYSKRDKETGELGALQAAGYDEVIIERKNLEKLSQPPETSNPIVNKGMHEVKRVVNAVIKQYGKPDIVRIEMARDLEMNTKRYKENEARQAKNKKGNEKAVDAYKAQNLGQYPSRDEKIKYRLWAEQNQMCAYSNQTIPPQALFTAQVEIDHILPFKKSLDNSYMNKVLCYVAENRNKGDRTPKDAWGGNTEKWNQITQAISRWKGLDLKVSRFYQTEADLQQRDFISNQLNDTRYIAKLALDYVAQLGCDVSVTKGYVVSKIRHQWGLNDLIGETDKKERTDHRHHAIDAVVIAATSRGLYRQAVKKIERDQLNIDPPYPELREDLAQHLNKIIVSHASARKLSGGLHEKTGAGYIAKHGGLVYRKNLSPKFTVIHARKILDETIKQLVLDHLEKYERDSKKAFADGVTVYHKNKKTPIKRVRILQSETTQEKLEENKFGVKDQSGRVFKYLSYGNIHHVEIVQNRITGKYKGEFVTMMQASHRAKGIQSNLNQEGYKQAITKTDHGQDWRFVMALHINDLVS

SEQ ID NO: 5908 - protein, 1534 aa, unidentified
  REGION 1..1534: note = Description of Unknown: Cas Enzyme sequence
MSKILGLDLGTNSIGWAVVDDKQNKIIGIGSRIFPEGVKADTIGKGDKEESKNASRRNSRQQRRQFYRKRLRKIKLLRTLIDLKMCPLTHSELNVWSKWDKTKGKAGRKAPNSKIYEEWHRLNPYVLREKALNEDLTMLEMGRVLYHLIQRRGFLSNRKGKDDGKIYKGKEGMVGITETQEQIGGKTLGSFLNSIFPKEGEPFKLITDENGNELRVRARYTLRDMYVEEFEQIWNRQAKILGLDDKKAIKTKTQFLNGNLENNRNKKKIEKQKEKYGVENVKIEELKDDKSKKILYKITTTTNVQLKIFLGGEIHHDDDGNVKHKSQDSVLFWQRPLRSQKGLLAKCRFEPDFRNKEGKFLQKGKTPCHLSHPLYEEFRAYQYLNNIEYGKKQKLEESQRLQVLELINSKDSNFNFSEIPKKLKMEYEKWNYDDEQKVAGNYTTKHLSALFLEEIYEANKEEIWHCFHFFEDSDNLVEKLKNDFGLAEKDIEKVDKINIKEGYSNVSLKAIKNILPYLKRGLQMSDATILGGVRNAFGERWDYFTDAHEQLEKDILNINHDKSNKEGEAIEKIKNYLADPENKFGFSTNDKSFIKLYHHSQEIEEKELKDKLDAVENLRNPIVQQGINETRRLVNQLIEEYGKFDRIQVELGREVKNSKKGRQEQTRRIYDNTAKNDEARKLLTEYGLKHDRENIQKVLLYKEMQEKGVTTICPYTNKSINISDVLGRENKIQIEHIIPKSVSLDDSFANKTLCDAKFNGLKGNLTPYQFYLKNGDSKLWGGATSWEDVEQRAYKVLPYAKAKRFTTKIKVEDADVKSSFIERQLNDMRYISRKTKEIMSQVCEDVRVLPGGLTAELRHLWGLNSILQPVMLVDLPNYKLEEGKVIPHYVVMDENNKPVLTVPIYNDKPKLGVNETTITGKVDKGVFKTTEQYIKLIAETPDLVNGEYWLNLKLSEPKKIIRIFKERPASTENEIVLRGKVEKEKFKNDGIGMVSAKGFDNGAYWAKFTITNKKFEAPEKDKQPKKTGKQVLLFGEVKEGFFKSYIYSCETNELDGKCWLLLDIDTENVSFERAINERPIVSESKIIVEGSVNDEGLFVSEIDEHHQFKTTEKPGKYWFVFDILNELTDFNAIEQPKPLLQEKQTLIEGNIWVDKYTGEIKFDPKKNRDDHRHHAIDALVIALSKQSYFQQLSAYNAARDAKKKGITFDKEQLDFPDPWNGFHTDAKKEAEKILIAHKQNRKVLTEVRKRITKNGKTFTSVGNAVRGQLHKENVYGQRQAPFETTKGYHMRKKVVDLKDNQLDKIVDLEIRKIIINARKEEAIIKKQIEVIEKQKKKVHTDEEETELNLQIATLKKQIDLLYTLKNKNGEPVPIKKVRIREEMSNAQQVKEINQFVNPRNNHHVIIYKDENGVLKDDIKNFWEVVERQKQHEDTYQLPEEDGGGKIITTLQENDVFVLGLNNDEFDDNKSNISYLTKYLYRVQKISKMNIMFRHHLASTLNQKEQEIHVQSLGRLEELNPIKIKITTTGKIEKL

SEQ ID NO: 5909 - protein, 1150 aa, unidentified
  REGION 1..1150: note = Description of Unknown: Cas Enzyme sequence
MTGKQNDFGPLTFGLDIGIASVGWAVLGESRIVDLGVRCFDKAETAKEGESLNLARRTARLLRRRLRRRAWRLTKLARLLKREGLIADANLFKNKIEKGSPVPKSSWQLRVDALGRQLTSEEWARVIYHLCRHRGFHWVSRAEEKAAENDSKSEGGRVKRGLAGTKKLMAEKNYRTAAEMVLAEFPEAQRNKQGDYSKALSRVLLNDEFVLLFRRQREFGNPHTSTEFQEKILGTGDKKSGLFWAQNPALAGNDLLKMLGHCTFEKGEYRAPKASFTAERHVWLTRLNNLRIVVDGTTRSLTEAERREALPMPYKQAGDLTYKQLRSTLTKAGYLPESFKFTGLPYPSGLKTDEKAKDPESAVLVKIPAWHELRKTLEKKGLADEWQKMSTEALEGNPKRLDDVAWVLSVYKDDAEVEAKLRELPLPNADKLVDALLDIRFDKFSNLSIKALRQIVPFMELGQRYDEAVANIPEYGHHSQLHIAGAGEHKYLPPFYSGRDKDGRMVFNEDMDIPRNPVVLRALNQARKVVNALIKEYGSPHEVHIEMARDLTKPLRGHWNDQGKFIEGRQDILKKQEEFRDRNKKDKAKFAEFASTFNIVGSVKGKEFEKYQLYREQQGKCAYSLEPIDLHRLFETGYVEIDHALPYSRSFDDSKNNRVLVLARENRNKGNRTPFEYLDGKDNSERWRQFSGFVEGNKAYRLAKRSRLLRKDFGEKESKEFRERNLNDTRYICKFFKNYVEQYLQLHEDSDAKRCVVLSGQMTSFLRARWGLVKIRGDSDRHHALDAAVVAACTHGMVKRLSDYSRRKELGQVREGFVDVDTGEILNPAMFEQIEKHFPNPWPHFRNEVEARLKLDDPVLLREELQRLGTYTEEALQAVHPLFVSRAPQRRNSGAAHKDTIYAQPERLKAQGGVTQKVALTSLTLKDMDKLVDPHRNEKLYAAIRARLEQHGGKGDKAFPASNPLHKPDSAGNPTGPIVRGVTMEIDKLSGIPIRGGIAKNDTMLRVDVFTKAGKFHLVPVYVYHAVAKELPNRAIVAFKDEAEWTLIDHSFNFCFSLHPNDFMKVQQKGKPAILGYYSSCHRGTGNINLWAHDRNQAVGKDGMIEGIGVKTALSIEKFNVDVLGNIYPAPPEERCLYPAQRSGAEHDLA

SEQ ID NO: 5910 - protein, 1123 aa, unidentified
  REGION 1..1123: note = Description of Unknown: Cas Enzyme sequence
MTKILGLDLGTNSIGWAIVDDIDQKILGMGSRIFPMGVENLGEGEGREISKNASRTGARGIRRQFFRKRLRKKILLKALSEYKMCPLINSDFDDWKQTKLFPSEKLNEWFSLNPYELRNKALIEKLSLEEIGRIFYHLIQRRGFLSNSRKGGTDDGTIFKGNPKEGKIGITETQEKIQDKTLGSYLFEIYPTENEPFKEGLERIRNRYTTRKMYVDEFELIWEKQQQFHSILNQDLKQLFGGRKLDGYKEDGILFHQRPLRSQKHLVGNCSFEPTKTKCPISAIPFEQFRVWQWVNTVEYNGRKISQLEKEKIVEFLFSYEKPDFKKIRKVIGKESAEFKFNYKDDDKIVGTYTISNLSNKKFFGKKWFEFSEKEQEDIWHVLYFFDSKSNLKEYATKNWKFTNEQADAISKFNVKDGYSSLSRKAIANILPFLKIGFTYDVAVVLGGIKNVFGIDWEMLSTEKRNFLIDNVEDIVRSKIKGGFIEVIKKILQKDYNISENKLKKLYHHSASIETTELLEKLPVDKESDKEIQSIRNPIVITALFELRKLVNEVIDEHGKIDEIKVEMARDLKVSKSQRNEIRKDQKRLERENDRVIKRLKENNMRITHDNILLYKLWEECKKTCPYTGKPIAITQLFSGEIQIEHIHPWSRSLNDSFSNKTLCFADENRKKGNKTPFEFYGNDDSNWSAIKERALKLFSDTKEYPKAYQKFKRFVQQKFDDDFSSRQLNDTRYISKEAKNYLSKICSKVIVSPGQATSNLRQKWGMNTILNDDNEKSREDHRHHAVDALVMACTKVSYIQELSKWNRYNRNYDLKDFPMPWQNFWSDAEKAVNHILISHKKVSNDITIRTHITEKNGQKHKNVGVAARGQLHKETVYGNRTFDGEQAFHVRKPIELLTTVKQLDKVVDKAIRLLIIKRIQVLGGFVNGNIPKDTFFIVDENGKKLPKIYLPNKNGNPVPILKVRMRENIGGAEKLKENLNQWVNPRNNHHVLIYKDEKGNLQEEVVTFWTVVERKRTGESAYKLPIDGKEIVTTLHINDMFLLGLKEDVINWDKPDYKLLKEHLYRVQKLTSGDYFFRKHKSSTVTDNEYFQIRGFGFGKTGWFTFNPVKVKISVSGKIEKI

SEQ ID NO: 5911 - protein, 1142 aa, unidentified
  REGION 1..1142: note = Description of Unknown: Cas Enzyme sequence
MTGKQKNLGALTFGLDIGIASVGWAVLGENRIVDLGVRCFDKAETAKEGESLNLTRRSARLLRRRLRRRAWRLTKISRLFKREGLIPHISTLKIPFAQSLWQLRVDALDRPLNAEEWARVIYHLCKHRGFHWISRAEEKAAEGDSKSEGGKVKQGLAGTKKLMSEKSYRSAAEMVLAEFPEAQRNKQGDYSKALSRVILSEEFVLLFKRQRELGNPHTSADFEAKILGTGDKKSGLFWQQNPALAGAALLRMLGKCTFEKTEYRAPKASFTAERHVWLTRLNNLRIVVDGTTRSLNEAERRVALPMPYLQAGDLSYKQLGSALIKAGYLAKDSFKFTGLTYPNKQTSDEKAKDPETTVLVKLPAWQTLHKTLKDAGLESEWQQVSTDALEGRPQLLDDIAWVLSVYKENADVEAQLRKLALPNQDKLVQALSYVSFDKFSNLSLKALRQIVPFMEQGQRYDEAVANIPEYGHHSQLHAVGAGEHKYLPPFYSGRDKTGRMVFNEDMDIPRNPVVLRALNQARKVVNALIKEYGSPHEVHIEMARDLTKPLRGHWNDQGKFIEGRQDILKKQEEFRDRNEKDKATFASEFSLIGTVKGKEFEKYQLYREQQGKCAYSIQPIDINRIFEQGYVEIDHALPYSRSFDDSKNNRVLVLARENRNKGNLTPYEYLDGKSDGERWRQFAAFVNGNKSYRLAKRSRLLRKDFGADEAKGFRERNLNDTRYICKFFKNYVEQYLQLHTDSDAKRCVVLSGQMTSFLRARWGLVKVRSDSDRHHALDAAVVAACSHSMVKRLSDYSRRKELEQVRAGFVDVDTGEILNPDMFDQIEKHFPNPWPHFRDEVKARLNIDNPALLREEMQRLGSYSEQALEAVHPLFVSRAPQRRNSGAAHKDTIYAQPERLKTQGGVTQKIALTSLTLKDLDKLVDPHRNEKLYAAIRTRLEQHGGKGDKAFPASNPLRKPDSAGNPTGPIVRGVTMEIDKLSGIPIRGGIAKNDTMLRVDVFTKAGKFHLVPVYVYHSVAKVLPNRAVVQAKDEAEWTLIDDSFSFCFSLYPNDFVRISQKGKEQIIGYYSGCDRATANLALWAHDRNQQVGKDGLVRGIGVKTALNIEKFNVDVLGNRYPAPPEQRRLYPAQRGGAEHDLA

SEQ ID NO: 5912 - protein, 1458 aa, unidentified
  REGION 1..1458: note = Description of Unknown: Cas Enzyme sequence
MKRILGLDLGTNSIGWGLIQIDFDKKVGNINGAGSRIIPMAQDILSTFETGQSYSQTADRTNYRSIRRLYQRAKLRRERLHRVLNVIGFLPEHYKNNIDFEKKIGQFKPGKEPKINYLPVQGNAKTRYNFLFKDSFEEMVQEFKEQGYEDAIPYDWTIYYLRKKALSEKISKQELAWILLNFNQKRGYYQLRGEEEETKSDKKEEFFELKVVNVEATEDSSQSGTWYNIHLENGWIYKRKSKDPLDHWMNLSKEFIVTTSLNQDGTEKHDKDGLVLRSFRAPKEDDWGLVKKRTESTLKKSGLHVGAFIYKNLLKKPQQKIRGSLIKTIERKYYKKELEAILDQQIKHHQELQSEELYVETINNLYPKNTSHQLELREKGFKYLFVEDIIFYQRPLKSQKHLIANCQYEKRFYINKNGEKIEAPVKGIPKSHPLFQEFRIWQFLSNLRFYDRTKLKNGEELNITDQLLKSEQDLVELYEWLSIQKEVDQNKIHQYFTKKKLIPKQRKENPDIRWNFPEDKKYAMGELRAQLLSCLQKVEGIKADIFLTRQIELQLWHIIYSVRDKNEYEKALNTFSNKNGLDNSTFVKSFKKFPPFKSEYASYSQKAMIKILPLMRRGKFWSKENIDNHTKQRIDKIINGEADDKINIRARKLSYHFNKPEDFKGLHPSLACYIVYNRYSENNENKKWGKPADIDSFLNRFEQHSLRNPIVEQLIKESLRVVRDIWQHYGHGSTNFFDEIHLELGRDMKNPASKRKQISERIQENENTNYRIKEILQDLKNNGVSAKPYSPSHQEILKIFEEGIYQSAEKVDDDIEKIRKNGSLSSKEITRYRLWLEQGYISPYTGELIPLSQLFTTQYEIEHIIPRSRFFDDSLSNKIICESGVNALKDNQTGLEFIMNHGTEKVDIGEGKTVEILSKKSYADHCKKYFKRNRTKLKNLLSEDVPEGFINRQLNDSRYISKYVRNLLSNIVRDEDENEAISKHIQTIPGAITSQLKQDWGLNDKWNELVAYRFKRLNEITQTNDYGYSDDKINAFRITVPKEISKGFSKKRIDHRHHALDAIIVAACTRDHVNYITSLNTERHNHSLVSKLRNTKKVMIRGKERNVVKAYKLPWPSFPLDVKSILETTLISFKQNLRVINKTSNKTWQWVEENDQLKKKLIPQTKGDSWAIRKSLHKASVSAKVEDLGKGKIKTTIRTPLSDIKSLKQVSKIYDKQIREVIIPNHLKHFINDKGEPNFEAAFNQAGLRRLNDKIQDLNEGKPHAPIYKVPLYEVGSKFAVSEDENSAKSKKYVEADKGTNLFFAVYWNEKKQKRSFETVPLHEVIAHQTLVADLPKAERTPVPIKAGLGKFLFSLSPNDLVYVPTEEELDNPHLINFDQLSKDQTKRIYKMVSSTSNECHFIQHHIASLISKYNAKAKIGEFGSLNKEEKTIEGHSIKNTCVKIKINRIGHFHTIKK

SEQ ID NO: 5913 - protein, 1289 aa, unidentified
  REGION 1..1289: note = Description of Unknown: Cas Enzyme sequence
MKRILGLDLGTNSIGWALVDEASSKSNEESKIIKLGVRVNPLTVDEKANFEKGKPISTNADRTLKRGARRNLQRYKLRREHLSNLLLNAKIISQDSLLTEIGKNTTHQTLKVRAKAAKERIELDEFARVLFAINKKRGYRSSRKTKTEEDGVAIDGMSTAKILYDKNLTPGEFVYKELNAGKHYIPDFYRSDLQDEFSQVWESQKSHYPKILTDTLFRELKGKNKTQTWAICKEPFLLEGIKLNGNRTEQRLTKYKLRVDALTQKVSLEHLAIALQEINNDQNKSSGYLGKISDRSKILYIDRLTVGEYLWKQIENNPHTSLKNQVFYRQDYLDEFEKIWETQAQYYSKLTQELKEKVRDTVIFYQRKLKSQKGLLSFCEFESWEVVRKDKEGSPILNKSTGEPKRQQIGQRVIPKSSPLFQEFKIWQNLNILELISKNSNNHERFRLEEEHKNLLFEELNLRGALSIKQALKVLGLSDKDWKTNQPILDKDKSAAKPLEGNRTNEALFNVYQVIAEREGYGFDWASKSASEIKTELKAIFSEIGINPKILDFDANAEGFDKQPSYQLWHLLYSAEDDGKISEEDRLIYGNADVNLKKSLTSKFGFKPEYSKLLANIDFQDDYGSLSARAIRKIIPFLQAGHQYDQACILAGYNHSHSETKEQRDNKVLKSRLELLSKNSLRNPVVEKILNQMINLINQLCDEYGKPEEIRIELARELKKSAKERDEAIRAINAGTKRNDEVRKIIHKDFGFSATKNDVIRYKLWQELKANGGRTLFSNQKIEYSELYSKNIDIEHIIPKALLFDDSFSNKTLAFRKVNLRKGERTAIDFIEEDHQSELSQYKKRVEVLFKADAITKAKYKKLLMSAKELPEDFIERDLRNSQYIAKKAKMMLEEVFKTVVSTTGSITDQLRKDWDLINLMKELNFPKYKAAGLTEVQRRWDAGQEIEKEFEIIKDWTKRNDHRHHAMDALTVAFTTHNHIQYINYLNARKNEEHKHHARIIAIEKLIRQDRKFIPPLTALRNEAKKHLEELLVSFKAKNKVVTKNLNKAKGNQIKRIQLTPRGQLHKETVYGQIKRPAEKPTKVNAKLTTEKISLIINPMHKTVVQSHFDNFNQDPGLAFSTKTLKKYPLIYNGESLKEVSCYETIYTIRKEVNPTNFKDEKSIRRVIDSKQKMLLLERLKDHGGNAKAAFTDLDKKPIWLNQEKGISIKRVTITGVSQVEALHSKKDHLGKEIPDANGQSLPADFVSTGNNHHIAIYQDANGKLQESVVSFYEAVARVNLGLPIVDK

SEQ ID NO: 5914 - protein, 1028 aa, unidentified
  REGION 1..1028: note = Description of Unknown: Cas Enzyme sequence
MSKIILGLDLGSNSLGWALLSANVATSGKIKPTDIIDMGVRIFPKAVEEKTPTPKSQKRRNSRLARRVIQRRSRRKQKLLNYLIRINLLPLELKGHLQPEIILNSLGDPYQLRAKALDKGLTAHELGRVLLHLVQRRGFLSNKKTLLGQDMLDDPDLLAVLGEEEEFDDKGEEGEFKKEISALRLEIKNAGFRTLGEYLASKTKDECKRNRDGQHLRTDRQMYLEELVLICKRQASCHKELTEEVQADIEDIIFFQRPLKLKKGRVGKCSLELKNKRAAIARLEYQQFRYLQDINNIEHFDANTEQWIKLTQEDKQTLKQLFETSEKVTFPALRKALGLQRGTEINLDSGVKSLKGNITATAIREVLPQWDSYSDQQQQALIEDLLSIKKKTALKRRLMSRWQLTGKQALHLCLLEFEPGHGSHSLKAIKNLLPHLEKGLIYSEAIKFSGYDEVKEIALQNKLAMPPELPNPIVNKGLHELRRVVNGLIATYGKPDIIRIEMARDLEMNTENYANFIRQQRMNTTLNERATEAFRGVQTGISASKYPNRDQKIKYRLWLDQNHCCAYSGKTICLKALFSADIEIDHIFPYSLSLDNSYINKVVCFAKENQLKGQKTPKSAFGSNEAKWNQITQAINKWPKQLENKKKRFYILTSELRERDFITTQLNDTRYMSREAGQYLNTVCSDITFSKGVVTSWLRSQWKLNSLIGTSARKDRDDHRHHAIDAAVTACIDLGLYQRLVATAKSLEESGSALNMYQIAVKSPLPDIRNKLAEKLANIIIAHTPLRKLTGAIHEETGVGFIEGIGNVYRRRLDPQFDLKAAAKIIDPIVKGRVIAHLEKYNGKAKDAFSPEVKLLHLDNKTLIKRVRIVQSKTTRERLEKNKFAIKDKAGKPFKWHAYGNIHHVEILHNKTTQKYRGEFITMQQATARARGILRAKVPIIQTDHGDQWEYLMALHINDLVELNHEQTTKIYRVQKLDRGTARIVLRLHTASTLNNSEESISGAIKVLCETYKMKSIKVNAIGRRLND

SEQ ID NO: 5915 - protein, 994 aa, unidentified
  REGION 1..994: note = Description of Unknown: Cas Enzyme sequence
MEYRLGLDLGTNSIGWVILKLIDDKPMAIIKSGVRIFPDGRKKKDKTSLAVSRRLARQTRRTRDRYLKRQKRLMNHLIEFGLMPSTESERNSLQQLDPYKIRKKGLDNLLKPEELGRAILHLSKRRGFKSNRKIDSSARDSGIVKSSIDKTRLSMKKTGFRTYGEWLYRRREAGEGVLARTCGEGAKKAYEVYADRALIEDELIALWDAQKKLKNSYCTDLAFRAIRNTIFFQRDLLPVLPGKCSLETDQPRAPKADIRVQQFRIFQELNHIKVIDEDYNSRPLTLEERNKIAKVLSKGTGKKSDKIAKLIGLPEACELAGSAKSGDVKGNETVKILSKSEHFGKAWHNMPEAKQIDIVNELLTNESEEATVKYLQQQVNITIETAKKIANCRLPEGYSNYSLLAIEKILPKLKEQVITKDKADLLAGYTNNNFDCDKVFDQLPYYGEILERYTGKPNENSSNSEEAKYGRIANPTVHIALNELRKVVNAIIVKYGHPSKIVIEVVRDLKNSAKVRKKISQKNEENKKNNAGYAKELENLGLRNSYENRQRFILWEELAPSPLDRKCPFTGEQISIAKLFSPEVEVEHIIPFSRCLDGDNLGNKTLSMRKANRDKGNLTPYEAFGQSTNGYSWDHILDRADKLPPSKKMRFAPDAAEKFADQEKWLARQLTDTAYISTIARQYLTAICQKNSVYVVPGRLTKLLRDALGLNRLIGNTAQKERHDHRHHAIDALVVGLIDRSLLQRASRHAKYAREQGFKRILQDMPRPWENFVEQASDSIGRIVTSHKPDHGIEAALHNDTAYGLVEKPNKDGVSKVVHRKSLIEELKKSDLPKIRDRKLAQSIKEYTNQSQLTFIAAVKEFSQANKVYRCRVVESITVIPIKCQNGMPYKYYKGDGNYCYEIFENEKGQWTGRIITTFDANQSAYKKFLANTKVSRKHSFCGKKLTMRLCGDDIIVINKPARTLFRVVRISEGAITLASINKANVAARNRDPD

SEQ ID NO: 5916 - protein, 981 aa, unidentified
  REGION 1..981: note = Description of Unknown: Cas Enzyme sequence
KPYCDKIEQQIKNIIFTMPNKIGIFIDVNSIGWTLINQETKDIVAMGTHVFSPGSENFGMGRREISKKFNKRIFRLRRVRYARIRVRKIHLLKILIENKMCPLSLDELNSWSANKVVPETNFDEWMRLDPYELRSKAVYGQISLHELGRILYQISSHRGYRFGERNSKLVESVLKEGSPEEGKVGFAEMRRVTRDETLGSYLHSIKPIEGKSYTKSNTRIRNRVCTIQMYFNEIHAIWNVQQQFFHNLTEDLRNTLIGSPGDVDPSGVLFFQRALKSQKHKVGNCMFEPNKTRSCVSSFEYQEVEAYKFINSIEFSGHPLNASQRSEVLGYFFTHYRFKFIDIKRLLNLEYSQEFNYKDEEGFKGSFIHSELSKGKFFGKGWFQIEEKVRQDIWHALYFFSSSHRLHAYASEKLGFSDHSSFSFSKIRMDKNYAPISKRACNNILFFLRLGITYNLSVILGGVKNALRNVWDQLSEDEINEIMFIVEDTHLQSPSSHFVDNLKENLVKLGYDSIDESKLYGGAAKKNSSNKILKKLPTDPASNKQIFELKNTILIQSVFELRKLINKIIEVHGPIHEISCELSVDVKVSRMQRFLHRMDQRRTRNNRERYIRVLGLHKENIIPMNLLKYELWEECKGVCPYSGIEIPLEKLWTDEIRVAYINPWSHSLNDSVFNKTLCFSFFHDLLNERNPFDYFNEEDPDAWESIKKRTAKLFASTNNHPASYSKFKRFIKKYNQRNLSVSQFNDSNYLSRAVHSYLSQLSQNVNVSPGNTTSHLIEEWLLTSLLDKEEINTDLRYSALKGYVNAFKTNEHILELSKRNKYFRNTKKSKFPTPAPDHLTHLDYHMNSILVSHRKDPRVISKKTQVVVHDGVKVLNKGWSVRGMLHKETLFGKRTAPRMNSGLHVRKSLLSFKTLNQVDKIVDPIIRGIVKAAVEKTATSGSQIPFSAFFKTASDGSLIPKLYLPNTKGGDPVPIKKVRIR

SEQ ID NO: 5917 - protein, 995 aa, unidentified
  REGION 1..995: note = Description of Unknown: Cas Enzyme sequence
SFIEKTKDAVVQKTSPLVKLKNNLPAGYGNLSQYVLRKLIPLLKTGLLYNDAVLLANLPEALGSDFENNKDKVFELLNESNKIYKDNKIINFITNNLIERYKGLIDAWNNNEENEVFAYKDFDYTLKDSDKKDIVEACIGYFGKNKWDKKTNKVEIINDVGILYQDFFFDSKRKYRELRTLQEIFQEQLLSNDISLKKSLYHHSKRENIFGTTILYRDTDIEILPLAQVNSIKNPMFNKAMSVLRKLVNQLIIDGEIDYETEVIVEIARELNDNNKRIAIERYQKQRESKRNKIREFLQEYKDKEKSTLNVEENIVQFELWSEQIFEETEDDKGKSFKNMNRKEILKENNAILRYELWMEQKGQCIYTGKMISISQLFSTDTNIEHTIPRFLLPDNTLANKTIAFATYNTNIKGTELPANLPNYDKNVAGVGSQILPRLDNWNSQRDGYKAAYVSRQKPKGAEDENTKNKRIQEKHFFRMHYDYWNDKLERFTRTDVTDKWVRRQLVDTQNISKYAREFLSTYFNKVSVQKGSNTAAFRKMLGFEEMDNKKDRSKHTHHTIDASILTFIPTNSSRRDSLIKKMYDLKDTRNKQLSYKPFKDFNAREIKDSIEEKTLVVNYFKDNITTQTFKKVRKAGKIQYKHDTLNEKHLDEPIISRGDTIRGSLYKDSFLGKIRDVERYDDGQPIRENGDWKYKKGDDEFIYVKREAIEKITKSNIKDIIDPNIAQLIKNQLGKKPILDHQGNAIRHVRIKKKAGKPVKKRIDYKSEKDYKNFFYSESGSIPYGIMVFKPKSSERILLQVHLYQIAEVFREKRNFDISLFVKKYYPTYMDYEKKLLKVGQKLIVFMDDTEYEDNLKDGFIRNRLFKISKIDNSCLWLKYHATATSDNDIDNLVKEKKDELLWVYEKNMGLEKVIENPEILDLKQRNEDFQNRRYKFSSWSDFRMERILKYAGQEKASEMKNELAKFKKQASTIEIEGEAPLLKLNTSESWNFL

SEQ ID NO: 5918 - protein, 1029 aa, unidentified
  REGION 1..1029: note = Description of Unknown: Cas Enzyme sequence
MSKKILGLDIGSNSIGWALLEGDDGKASNIIDLGSRIFTKAVEDKTPTPKNVKRRDARLTRRVLQRRARRKQRMLNYLIKLKLLPQELSGHTQPEVILNDLGDPYQLRKKALDSALSAHEMGRVLLHLVQRRGFLSNRKTLLGEMADDPDVLDVLEELESEGNTSTEAEKEETAFKKDISELRNKIEESGSRTLGEYLAGFGKHISTRNRSHDGGHLRTDRKMYFDELNKIWEVQEEFHDQINSEVKEQIDQIIFYQRPLKLRSDRVGKCSLETAKKRARIGRLEYQRFRYLQDISNLTYFDPYQEKNVRLTSDQRKIIVAHFEDKANPTFAQLRTLLGFGRDKTYSFNLETDNKKLKGNITRIKVKSVCPQWDDFTEEKQYGLVEDLLTINKKSVLKNRLINHWEFPLSVAIDLCLLEFEPGHGSLSVKAINKLLPFLEDGYIYSDAREKAGYGYEREEITPEDKLGKPPSTSNPIVNKGLQEVRRVVNAIIKEYGKPDIIRIEMARDLEMNTKRYKAQQKQQNQNTKANEDAQSEFEKVGKANPHLKLRTYASRQDKLKYRLWKDQDTRCAYSGKVINLSILFSGEIEIDHILPYSQSLDDSYMNKVVCYAAENQKKAQQTPRDAFGHDEEKWNQIAQAVSRWDKSIQSKKNRFYQRAEDVQARDFISSQLNDTRYITRVALDYLATLGSDITTCKGQITAWLRHQWGLNSLIGVSDKKERIDHRHHAIDAAVVATVDRGFYNTLVSVAKQHERNHPELKTKDLHIDPPWDSLRDDMDKKLSNVVIAHDAQNKLSGALHEDTGVGYVHGQGTVTRKTLNPEFNQASKIYDEGVRELVQQCLEKSGNDPKKAFAEGFRLLHKDGITPIKRVRILQSSTTLEKLVNKKFGVRNKDGQVFKWLAYGNYHHVEIIKNKKTGKYSGRFVTMMEANHRAKGIGQGKSAIIRTDCDGDDEFIMSLVINDIVRLENAAGEYYRIQQLEEPSKLVLRLHTASTLQFKSEAIRMSISSLFAKHNMRKVLVNSIGKFR

SEQ ID NO: 5919 - protein, 1152 aa, unidentified
  REGION 1..1152: note = Description of Unknown: Cas Enzyme sequence
LADRKSRPWRLGLDVGTNSLGWCVFDLKKGEDGRQHPSGIRRMGVRIYSDGRAPKSKASLAQERRGPRGARRRRDRYLDRRADLLNALIRHGLMPADPAARKKLEGLDPWQLRGEGLDRKLSLHELGRAIFHLNQRRGFKSNRKAERGSDDKKAKDAQDMKAAARKLDAVIGPDKKDARTLGEYLYKSRRATFDGVAWQPKPHPDAATVRSRPTTVNDRNTYDFYPLRSMIEAEFDALWAAQLAHHPELTDAVRDELRDIVFYQRPLRPVDPGPCTLDPEEDLDKRDRRAPLALPIQQDFRILQELANLELFHKTNPSVRRRLTLAERDAAFAALKRSEKVTFKRIRILLKIDAIWSFNLESEKREDLKGDIVSVRLARKDVFGKRWYEGLSDIERQNIVLKLLDEEDEAEIVRVGVESWNLTPEEATKAADSSLPDGYGRLGLVALSRIVPILRERADKDGGPIRYSDAVQAAGYDHHSDFGDGELLEELPYYGEALQRYTAQVRSDTAPAWEREFGRLANPTVHIGLNQLRKLVNVLVEKYGPPEEIVVELARDLKRSQEERDEVQRQQSENQKKNDLRRGTLDEMQKSQPGWKPPRDAMLRLRLWEELDATNVANRRCLYTGKAISRRMLFSEEVEIEHILPFTQSLDDGPGNLTVSLRSANRDKGNRTPYDAFGHSPGIYDWDAIMLRVSVLPRNKQWRFRADALDLVKSRIARENARLDGGLPKDALDDIEKTGGFLARQLVDTAYLARLTRQYLWKICDPNKTWVIPGQMTALLRRKWGLNSLLGDHNKKNRADHRHHAIDAFVVGLTDRSMLQEIQKAQGTNRERIVDDMPDPWDGYRDQLKAALDRIVVSHRPDHGIDPKAAPRKRRSTSGRLHEETAYGLVKEPEREGGNVAARKPIDSLSENEIGRIRDIGLRRKLQQHLAPFLGDGSSLDNAKARLAEARKAKDGTAVERAKTEIARLKIEAKNRKKAGAKDFKVALAAFGEANGVRRVRLVKPEAAIVVIRDASGRPYKAYSAGDNLRVEIFERADGSWGREIVTVFDANRPDFQPEWHKIEPRPTLKWRVHKNDLVKLVVDGEERVMRVVSLWDKYLQLAGHTETNLAERYRDGEFKWTFANYDKLKEQEFRRVTVSPMGELRDPAKTA

SEQ ID NO: 5920 - protein, 1141 aa, unidentified
  REGION 1..1141: note = Description of Unknown: Cas Enzyme sequence
MPNLLGLSIDVNAIGWVLLDSDSKKIISVGSRIFPIASENYGSGKRELSKRAFKRGKRTTRLRYQRRRKRKIKVLNLLVKNGMCPLTEEGLINYKKQKAFPDLELKSWFRLNPYELRAKALKEPLDLKELGRIFYQITLRRGFPVSERNRGKKETTMYYGSPMQDRIGINHTLKNLKEKTLGSYLNTVLPKENQTYRYTNERLRNRYLTREMFQEELLQIWNYQKQFHKGLTEELKIDLIGSQVQTSIEKGAIFFQRPLKSQKFRIGRCHYEPKKPKCCVSSLTFQEVLAYRWANSLKRNGIYLSPRDRRIAKDFFLTHKRFDFNRVVNHFENREGHYNIKEDELIKGSFVNATLSHPQLFGASWFEMSEKDREDIWHNLYFFNNVSLLKTYFINQWGFDDFQAKKISSIQLDKNYAPISKKAARGILYFLKRGVVYDLAVILAGVKNCLGERWKTIDDRDVSYVIKTVSNLYKDNKNGEFIPKLKDFLEEEMALLDLNVSKLYGVETEEKQIKRLSKFPVSKEDDKQIRDFKNPHLVNTTFQLRKILNELIKEFGTIHEIQAELSANIKLNKFQRYLNKLDQKRREALRARYIELLGERAENITPMNLTKYELWEECKQTCPYTGAHIAITELFTEAVKVVYIQPWKYSLNDSHWNKALCIKSFSKNILDFSPYEYFNTYNSEEWSTVVKRAARLFSNNKSFPSSFRKFKRFVKKHNHRDPLKHQLMDANILSRNLKNYLSQGVEKVSISPGQSTLMFIEKWRLHQIFSPEIYESSQLDYRYNILLAYINANRSKEYIELLANENKYHPSGNRIEFPEPYKGFQDDLECHINSVLVSHKKVNKLISSRKHRTRNGDRHYENFCLSVRGSLHKETLLGKRKSPEDQQEAYHIRKNLSQIKTKKQVSKIVDVEVRKVVIDAIEAAGGFSGDSIPNKAFFSKNDEGYSIPKVFMTNTKGDNVPIKKVRIREMLSGVVQVKNGENQYVNLRNNHHVLIYLNQSHEYCEHVVTFWEAVRRFRFGEPVFQLPEDGVEFVTTLQINDLFLLDIEETQLTIENESKSFLAKHLYRVQKLSSKFYEFRLVHHNDTSITESPYYVRINNFGHRKTGWQTHNPIKVSLNAIGKLSIKDETLEFKKSIKSYS

SEQ ID NO: 5921 - protein, 1328 aa, unidentified
  REGION 1..1328: note = Description of Unknown: Cas Enzyme sequence
MKDWYLGLDIGTNSVGWCASDKECNILTKNSKLQCGTRLFNDAQDASERRVFRSTRRRFARRKMRIHLLQNIFDSAITTKDASFFIRMNESYRQDNNGNGIYPLFMDAGFADRNYYSKFPTIYHLRKHLLENDETDPRLLYLACHHIIKYRGHFLFERFNTDSGNDGYAEILARFGENTTLESLQDNKGIYAALKGNKIQLEKIFVDDNDDIKEKISAIKDQLTKDYNFKNEKFEELQKVANSILSDEQSDYVLRLKNLYDRIQLDDILNGSQNIPSAMVKHYDEHKADLKLLKAFIKTNLPKEYDKVFRKNGNYSNYVGLNNTRNKETNSHDKKCKTDITTINYEEFLKSIASVIDNAKNKDNYDHLKNKIDKQTLCQNHNTKNNAYLPYQLQEAELKKILERQKDNFPFLANTDKYGSVTDKIISLLTFRIPYYVGPLSEAHKGKFTWIEKKKGHEGEKVLPWNFSEIVDTEASGEAFITRMTAKCTYLKNEDVIPKASLLYQRYMLLNDLNNLKINGNRISQDLKQLLFHGICQEETSLSKTKIKEYLASKGKIQNSDTVGKENENDTAFNSSLSSLIKLKRILGESYDEEMCENIIKWHTVFGDEKNPVVYKIKTVYGGKLTDNQITELKKISFKGWAQFSKKFLNGIVTTSKKTGETALTIIKILEETNLNLMEVINSQSYTPTFIETIAKENTRDTSKLDYDGLVADLYCSPTVKRSIWQAILVCKELAKINGSKPKKVFIEVTRGEDKKKKGKMTQSRLSQVKTLLEKSVNDSQDIGNLLEELNQKKEDELRSDRYYLYFTQLGKCAYSGNAIDLSRLQENLYDIDHIYPQSIIKDDSLTNRVLVQRSHNADKSDTYPIKSSIQDQRRDFWKMLQRKGLISTEKLRRLTCTQSLTQEQVGAFINRQLVSTNQAVKETANALKLLFGNDTKIVYSKAGNVSEFRHTYNLVKCREVNNLHHAHDAYLNIVVGSVWDSVLSECNFWKETGANTDKGIDKLFKYDIDGIWKVAYLEKINAYLFDNKKYLGKYPVTFRPYIKKGAFYDQTIHPKGKAQFPLRKGLPTEQYGGYKTGTNAYNCVIEHDDKKKGRIREAFSLPVRYLIQYSEDALYEKIAKEKNLSNHKVIVKRILIDAVLEVNGFRYLARTGDLQCPATVEWMPDKQTIRIIHDIVKYLKLVTDKQITPNIEIKDDIIFAGREKNKHQKEGKVISRENNLKIYDAIIEQIKKPFFAQYPFAKKVSEGTISRKIFDDLSTHQQTEQLIEMLKAITFNGKNFDATKIGGKSNETPVYKVTSIYDKNIYMITQSATGLFESKIEINKKNN

SEQ ID NO: 5922 - protein, 1069 aa, unidentified
  REGION 1..1069: note = Description of Unknown: Cas Enzyme sequence
MGIRFAFDLGTNSIGWAVWRFGSGVYGKNTPLELLGAGVRIFGDGRNPKDGQSLAVMRRGPRAQRRRRDRFLLRRANLIDALKRFGLWPSDEKAAQALASLNPYQLRAEGLDRALTPHEFGRALFHLNQRRGFKSNRKADRKNSKDDGKIAAATTRLRERFATENARTFGEFLWRRQKNENPTQRVPARIRLQGEGAKALYEFYPTREMIEDEFTLLWQARRKHARDTIDDAAREAVHKVLFRQRPLKKPKVGKCTFVPTEERLPKALPSVEARVIYETLNHLEILRGLTARKLDKAQRDALAATLLAGDNLPMGKIRKALKLSSDEKINFEEGGRDKLEGSKSAWALSKKGPIGKAWLGWPLERRDALVALLLSEDDDDRLIERLVADFGLTRDQATAAAAITPEEGYARLGKTANAAILAELMAEVVSYDKAVARAGERLGLHWHHSDERDGVILPSLPYYPEVLDRHVLPGDGESEEIFARLGRIPNPTVHICLNQLRRLVNALIEEFDAPDEIVLELARDLKNSQEQKDRLQKENRQNHEASEKRSAFLRDEIDQPDTGENRARLRMFEEQQRAGGGVAHCPYTLRVIGPTDLFSSEVDVDHILPMSRTMDDTRANKILCYRECNRIKRNQTPYEAFGAGWTTAKGARIEWEAIAANAATLQSRLRWRFQPDAMEQFEKDGRDFLARQLNETRYLSRLAKFYVGKICDPDQVWVVTGQMIGLLRGKWGLNDLLVGHNAADATEAAPKNRADHRHHAIDAMVIGAMTRGLVNEIARRAGEAEQRDERLFAGVEPPFAEFRSVVRAALDRMLVSFKPEHGMQGALHEDTAYGFVNDAARTEIGNLVRRKPVESLTAAEIETVRDPLLRAKLLAVRAPFADDKGKVKDAKALQQALRAFSDQENIRRVRVGKTDASVIEIADRKSAAPYKALVPGENHHMDIVQMRDGTWRGYAESLFAVNCKNWRPIWEKDKTGGKLVMRLHKGDMIELTDADGARRVKVVVRLSPSNNVLYLVPHNEGGDFQKRHVDDSDMFRWDFANIAKLKERDARAVRIDEMGRKRPKRSNVD

SEQ ID NO: 5923 - protein, 1431 aa, unidentified
  REGION 1..1431: note = Description of Unknown: Cas Enzyme sequence
MSKIFGLDLGTNSIGWALRNPVLTENQIEKFGVLTFNKGVGLGKTGEYSYAAERTKKRSTRRLYQARKYRLWATLEVLITEGYCPLTIEDLNKWRHYNKEEARKNNNAGRVYPVWNTAFDAWIKLDFDNDGKPDYSSPYQLRKELAETKMDFTQETNRFKLGRALYHIAQRRGFKSSRKGADDNDTKEKNADENEVMDLQYSEKKKNKVIAELFEKYPDAKTIGRLFALLENDKIRIRESIAQYAIRENYKDEIKFIFQFQGLEFNHSLYTKLVETGKNKNDGSIFYKRPLRSQKGLVGKCTLEPNKYRAPISHPAFETFRGWAFLNNIKYKENNEWKQLPLELKQEIYSELFFRKSKAYFPFSEISAFLKKGGKDWQLNYSPKTTVTACPVSARLKDIFGDEYLNIKIGKAKAAKSDKAFYDTEDIWHVLFSYEDQEFVAEFAEQKLKLEPEKVKQFIIAWNALPIGYGMLSLNAINKINVFLQKGLIYTEAVLLANIPEIIGKELWQQKEQFLLDSISGVINENRNQKTILNIVNNLVSKHKNLEINEKFGYKDNNYKLAESDFNDIQAAIEEQFGANKWSGLSEDEKKTISDTVKDCYQAYFSTSGIVRNNGNEERIVTIQSGNKNYYKTESGYYQLPKLIDTLSEFLQLNFNVNNKQIKKIYHPSEINIYPPAKEIDGVLKLGSPKTGSFKNPMAMRTLYELRKLMNYMIETNQIDSETRVVVEVARELNDANKRWAIEAWQRQREAENQEFAEAIKQLLNEDKNVKASAKSNDDIDKIRLFYEQNAEQTLPEVVETEEDEKGKKTKKKSTKKDEAIRWGGHGKKLIDKYRLWKEQGYQCLYTGKYIKLTDLFNENVIDFEHTLPRSKSFDNSLANLTVCYHDYNRTIKKNQIPTQLFNYDKEHDFGGSIGRCSAILPRLDTWKEKVKRINQQIDFWKTKSKKAADKSWKDDAIRQRHLWQMELDYWRNKLDRFTITEITSGFKNSQKVDTQLISKYALHYLKTYFDKVDVQKGSITAEFRKIYQLQIADEKKDRSKHSHHAKDAAVLTLIPVAAKRDEIREKAFILYETTRKQYHEEPYKGFKREFVWSIDDNVLVNNITNNQELTPAKRKVRKRGKEVIVDGKNRWATGDAIRGQLHQETFYGAIKPAKRGEKGNIEKDENGNFIQEENIKFVLRVPFNADFTGEDKIVDEGLKRQIQEHIKRAGNFKKAFEEGIYLLDKTGKPHGNKIRHIRVFKDGEVKEPLPIKKQTNLSDKEYKQHYWAANATNSFFAIYIGQGKKDFDYRNLFDTAKVKSVNPVKKPEDLFEQKLTITKKKSTSELNLAYILGTGKKVLFKNKADEDLKSLSQNEILKRLYVYTNFEKDGRLNFQYHLEARNKIEESYSESEIDFSNPKPTLRFGYSKYDFYVEDYDFEIKMDGTIRWIK

SEQ ID NO: 5924 - protein, 1420 aa, unidentified
  REGION 1..1420: note = Description of Unknown: Cas Enzyme sequence
MTTKTILGLDLGTNSIGWALIQQDFENRQGEILGMGSRIIPMGQELSKFEQGQAQTKNANRRIARGIRKLNKRYKQRRNKLIYVLQQLGMLPGQIKLKEPFGNPLKLDRISILPIDKNQKQYSALDLLELRVKALNEPITLQELGKIIYLFNQLRGYASGGNEPEKEDGNETENDEKKGKGSYVTFGKIQSISDPEKVTIKNKELNKYKVSVETEDGLLEGDTYLDILKVEESFELLVDITVSKKHGETIVFKLPNKTSWRKKMENLEKELTELKKEKGKEVYLSEYFLSILKENKWAKIRNNVVLRSRYQSEFDKIWKTQSENTQGELYKVLQTLSKEKISQILQFIFPGTKETQEKYRQEGIEKGLSHIIRNQIIYYQRELKDQSSLISDCRFEKGEKAVAKSHPVFQEFKIWEQINKLTINTKAEDGKNRKGETRYKYVDRPIPSVLKEWLFDELQEKKEIGFSTLLNKLKKEHGLRDGIDFLNGMNPKAKLRGDETKQLLKKVLGEQLWSALGLANKERQIELWDILYNAKGNEYDLESERTSKGLTFIKKYAEDIENSEQVAIQISKIKFSRSYASLSLKAIEKILPLVRSGRYIDNDFSDTLKEKIIKLLNENVSDPFEKAAQEYLENNVEVLVDGGVMNAYATILVYDKHTAKEYGVNERIDSYQKIQRLTPGELRNPLVEQLISEALMIVKDIWKAYGKPNEIRLELARELKNNADRRANIYKSNKANQKANDEVKNLLIELKQEITLANIEKYKLWLSQENLADEYVKQYKDPSKSEIEKMKLWREQGHVSPYTGQPIPLSDLFNRERYDIDHIIPQSRYFDDSFTNKVICEKAINKEKSNRTAMEYFEVGSSIPSVFSKENFIDHVNQRFEGQKRKNLLATKMPEDPVARQMKETQYISVRVKEELNKIVGNENVKTTTGGVTDYLRNQWGLTDKFKHILRERYERIKDKIAEAEYEKRKDVVGNKDVYIEAYINNLIGKKNNKLIIKGWSKRIDHRHHAIDALIIACTEPAHIKRLNDLNKELQKWLDDNRKELLPDFEGSPSELLDEILNLGETEREKIFKQIEKFKAIDMPWSGFPESAEQEIQKIIVSQKPKDKLLIQPDKSGKLQIKIRGQLHEGTLYGKSQGVESYRITLSKFAGKKFATDKAIEKITNSYLKEAIKEHLKDFDNKKEEAFSAEGILALNKKLAEKKNKKGETAPHTPISSVKVFYRDPTKIKKKKGQEEADEALERLDRKKAFNDTLLVKTGDNYLFAVMEKDGNRVFDLITFFDAVNLLKEEFNKTTDKKSFNKTLVFKNYFEEKNKAKLLFTLKQGDPVYMPTDGEEIIADSQSPFYDSFWNHKNARSKNIHYVTKYSGKQIYFIKHDIADTIVRGKEYGSQNAYEIIDGKSIKNYCIKLNIDRLGNISKV

SEQ ID NO: 5925 - protein, 1301 aa, unidentified
  REGION 1..1301: note = Description of Unknown: Cas Enzyme sequence
MKSRQYLLKLQGDTNQEKLLASWQQHRFYQSALVLGIDIGLEGIGAYLRQGQNELFARTLDLSGVLPEKSDALANRRQMKHARRCRHNRRIRMRRLDELLEKHGLPLQWRDAPEAFRKTDPYKVRHRAIKTDGTGLESKFALANAIRHCVQHRGYDYGRFREEGNFPWGDTAKLGKAITWLKTASLDERTAEDLREMARNRELEVKDKEADEKWDEFIALIDERAAYAQEHDIERVLVEHAKGDKHDNLRKRARGVAFPRGQVWAHLEFIVRRHAHLIEDVEGFLAALGCNPDDSDEFPDIAASTAARERAIFWYNRKTRHEMERHWAKKSKDCPYAERLGFGDDKKTSTRGELSLRLWSMLEFGITRRVEITFLNAERIQAMKERGEKVPSKKPAKELIHSLSPDAVRKLIGMVKKQHGADGTLLPLSNERRTEIKKEARTIIEQDIIDNSSVDVALGPKPAALKDGKDEKWNASFFDQLNDLVAPAPSTLKGTGSLHHETAKRLYEVASSGEKDFTREGFNKRLVDLGFYDWRRESVLDWGVFPQVEFLLGRRVKHGKRRGEVSESCQGFLRKLLRDLVKDGKLPEGTLAPDFCVVEVIGNAPRTQEQKGDILKEQKANRSTRDEQFVKAGRDDSGVASRRRRISLHAQQKGRSPYTGRLLPDDPLSSELEIEHLFPAAMGGLSVDDNLVLTYKTENAAKGDRTPLQWLGAERLEQMIAASKEMKWGGLKREVFAWGMRREDDPSGKWPSHYDEAGKLLIPDFGNTTRVAQLARQLRAAVAHWLGIEKNAEAMAGRIGTPSGWLASQAMRSWLPDYRKDRDDITHHLIDAAVLAHIPPREGMNSIHCGGIFYSERVWLPDEKKPGEQTSRLITRALSGLSPAARLAKWLPGERKEYAECPVQKHRPSKNKQSIGDSTFWRQAEASKPDLAQRPQKPFNAADYKGDPDKLLKELRLMKINERKHRQWCARNKRKGLPPPEFKDVLPSYKDIEVYLEGATATTQAERGQVVEPLRLRDGKNGSKGTPITKIWKWSIKQRLGSLAKPLGMSGKQHTKNGETVFEGLRFLKEANERVELWLGYDWEVASRARKSKTSDWQAKGWRYYKRLIPHSTALRHLKQLGFLFDRNKRVKAPAYMQKKPDQPKTHVSLREKLLGDDLPPFSHKAGQLKKGDVLLLGLNKDGGIAATVDEVIWLAHYSVTAIGGQIEMKPLLFKDKAATPMRTIKRADLDQQPADAAVLASLLNLPSAAVLASELMAKNSKMRIPPEPPAKEKPKFNDPPSDTPRGRGRRADPAGEADLL

SEQ ID NO: 5926 - protein, 1566 aa, unidentified
  REGION 1..1566: note = Description of Unknown: Cas Enzyme sequence
MKKILGLDLGTNSIGWALIDNEQKKILGMGSRIIPMGTDKQDYEKGVGITKNADRRTKRTIRKMNKRYKLRRNKLLYILHELGMLPYQFQFKELNEKDNKGRFLRLVGTKENELFQEKNNGIPVPIKLEELELLPVKKGTLQLDSLAHYTLRAKAIKENVELKELGKILYSYNQLRGYAGGNSDDDTKKKKEDDNDENESVKKYEVFNQKVTIKEVKQSEIKFQGRGKNKGQEFNKFDITVSFDDEELEGETELQNLKEKEGQEEELEIRIKRNKEGETTSIVFALPQKTNWRKQMEKTEEDIKQGNLHVSQLILQDLEQNKWAKIRNRVFLRNRYQAEFDAVWETQSNAHNFLKNCPQETIEKIANYLFPGTSESQKQLREAAIKGGLKYIIKEQVIYYQRPLKQQKELISKCQFEKDEQVLANSHPLFQEFRCWDQINRMFITSKQEVWNEKKKKNVLQYTDRFLTNDEKQKIYEKLQTQKQLGFSEVTKIVNLKNDKTEYLNGLNPKAKLKGCDTQITIKKILGEYFETLFKNDINIVEKIWKAIYDNANNGSEYDPRSIKVSSIKDVLKSLNDETASELALKFAQTIKFPRKYASLSAKAIQNILPLMQLNPSNVSDEIKTKFENIKNLVETGEIVNDIDNNLEDYVISFVQNNPKAIETGGLMYAFASSLVYGKHTAEKIKAQIKDYHEITYNDKIKEERKKLRNPIVEQISNETMQVIKAIWKQHKFNPEELEIRVELARDLKNSAAERDKIWKGQRKNEDTNKKIKDTLQSEGIPITDRNVLKYKLYVQQNFISPYTQNKIIPLSALFDDKLYDIDHIIPKSRYFDDSISNKVVCETNINEEKSNRTAWEYISQQNSKFEIRSVANYIKHINDIFYGKKKKNLLLEKIPTNPVERQLKNTQYITVAVKNELAKVVGSDNVKTSTGEVTDFLRSRWGLKKLFMELTESRFKQMELWDLDENGNPKSEWVKRYVDGNGKNKYEIRNWSKRYDHRHHAIDALVVALTEQSHIQRLNNLNKYLQDELTNRKEEFKLEVKEDENILEVFFNLEEKRREEIQKQIESSRYFEKPFEDLVRQAKEYLETMIISIKPKDKLGIKKDDSGNTQLKIRGALHQETNYGKTKDPKTSLLRDTKTVGISILKAKDISQIIDEVLKKEIDTHRKKYESMKEAFTGEGLKAFNENRFQRKKPTELKPPVYKIKIWYSAKEDEGSTLQRLYDKNEKLSVVTGDNYLFLVVEKEDKNGKERIFDIVSLYDSVFIANRTLKEKKENYRVIIVSEKLELMKSQLKTELEKNRKKLGDKLSKETSKKKKEELQKKIEQIDDDFKLTLLFTLQQNELVYLPEKSDEDIFSNINNIETKKKLVNRIYKAVKFDKSQTAHFVPHNYANVISIAKNLSKTQKDELQKQYGEKKIPKKDLNFVEYGSYRDCSPYPVGEIFIKNLTTTNKNKKIELKKIQETCIKLKIDWLGNISPFSNTKFYPTTSHQPDEAKEGVSYFKTAKISTLQQSEERMLLHTSNMNPEERMAYLQQLRETTQNSNLSEDEKISILSKFKINPTDENS

SEQ ID NO: 5927 - protein, 1042 aa, unidentified
  REGION 1..1042: note = Description of Unknown: Cas Enzyme sequence
MRVLGIDGGIASTGWAIVEISEVEAAGSVIAAGSRTFESPEEPSQNGPKLKNAERRLYRGQRRVVRRRAQRMAKIRALFHQAGLIEEAGRSALEGKGINPWMLRAEGLDRRLTPRELALALGHIAIHRGFRSNSKRDGATNKADESSKMLSAIHTTQARLAQWRTVGEMFAHDPEFVQRRRNRSGDFTRSIMRSDQEAEVRKLFAQQLRLGNGAASDDLMASFSEIAFSQRPLASSEDKVGDCVFEPAEKRTARFAPSFERFRFLSRLVNLRLQAGREERALNPSELALCAEGFGKPAKITFANLRKRLDLDANTRFAGIAKDDEKNDVAARTGSAAAGTAAFIKALQAIGEVEAKTLLSECSRLDRAAEIITFNEDLSAIKKGLAETGLSPEAQDAIVIAIDDGTFDHFKGAAHISAKAARNIAPGLMQGLVYSEACEAVGYDHSARAATTVDSIGSPVARKALSEMLKQVKVLSDEFGPFDRIHVEMARDVGKSIEERTEIERGIRKRTSERDRTREEMQQLLPHLARISGEDLLRFELWKEQNGRCLYTDQAISPDRVVASDNSVQVDHILPWSRFGDDSFVNKTLCFTSANAEKRGNTPYEWFMRAKPGEWDRFAAQVETSKALKGVKKRNYLMRNAEERESQFRERNLNDTRYATRVLLGELKRLYFPDLPHRVAARPGALTAKLRQAWGIEKLKKDKITGERLPDDRHHALDAIVVAVVNERLLQWATKASQQAEMTGANFELGGLPEPWPGFREEVSALHAIIFVSRAEVRRARGKAHDAGIKQVRMIEGEEKVFERKAIEKLTEKDLDLIPVPEPYGKVTDPRKLRDEMVETLRNWIIATKNKQKDEIVPPPRSPKGDVIRKVRVMTKAKPAVRAERFEGSTADRGGIVRVDVFTKPNKRGASEFFLVPVYVHEAATLPEPPNRAVQAYSPENDWPVMTADFSFQYSLYAMSLIEAFKKDGEIIKGYFRGIDRATGAVSISDVSNSSLMRTGIGARTLMKFKKLSVDRLGRVSEITSEVRTWRGGVCISPNPDG

SEQ ID NO: 5928 - protein, 1076 aa, unidentified
  REGION 1..1076: note = Description of Unknown: Cas Enzyme sequence
MQIVENIVLGFDLGIASIGWSLVDTASERILDAGVWTFNAPETDKEKTPKNQKRQETRSIRRTIKHRRQRMNDVRDLLFNADLFPNKDKQIAFEAAKEFKTTPWQLRADSLTRKLSPAEFGLCLYHIARHRGFQTNRKGGEANTEAGEDQKALKAMQGLGDKIAIYQTFGEALNTDSELSYRKRNISGDYGRTPKRDWLRNELKIIFEKQQNFGNPSANDQLLKDFIDTAFFQRPLQDSVNMVGNCPFEQNEKRSSKHAPSFEKFRFLQKLNHITLYMRGCEDWTLTKEQIAKLGNEFGKQGSYTYKTLRKDLDIDKNARFKGISPDDEGNDIATRKARSADGTRALRAALGEKFESVDIAQLDDAMFAIAFHETNESVANALSKIGLNAEIESLLNIAVANNIFKDVKTSAHISAKACRNIIPGLLAGVVYSEACKMAGYDHSAPDASPLMRLKKEVDGQKPSEIRKKLSALLGDPKQHLIASPTARKALIEAIKQFVAIVNNHVALKGQLPGKIHVEVARDVGKSADERRKIESGIEKRNKTLDNVAKEFEQTFGRAPGRGTQDLLIFELANEQGWKCMYSGEAINPQTLFDGQTYQIDHILPWSRFGDDSFANKTLCTARANQAKKHRTPVEWALSRENGAPDLDEYLARVESCKEMKGIKKRNYTLKNATEVEESFRTRNLNDTRWACRLFLQSLELFYPPNVMVNENGKQIRRLYARPGQLTAKARQSWGVERLKKEENGKRKEDDRHHAIDAIVVAAMSEGMLQALTRAHQQAEKIGSARAYEGFEPPWPMFRDDVIVGIEKILVARAEEKRVSGQKHMDTVRGFDKESGTVFERQTPEKLMDWVVKQGDEFKWHEILETRFERPERSRAIIDALAEWERDGRPNTGPLGPTGDKIGKIRVIAPSNKVAVPIRGGTADRGDMARVDVFSKANAKGKRQFFLVPIYPHQVAGDDVPPNRAVAASTPETEWPVMDETFDFEFSIFSKSWVEVVKPDGTVIEGYFRGVNRALGAINISPHLTQTLPNQITNIGARNLHAFCKYQVDRLGTKHLVEKEVRTWRGEEYISAKPPE

SEQ ID NO: 5929 - protein, 1079 aa, unidentified
  REGION 1..1079: note = Description of Unknown: Cas Enzyme sequence
YPVRHSSDTSRMIPNMDEKLVVGLDLGINNVGWAVVRRSPDGVEILEAGTFVFDSPLYDVNKPGDGLKSKKRGEYRRARRTGRRRRQRKKGLYALLRDAGFLPRSMNERVELFCRNKDAKTGQAIHPYALRAAALVRQLTPYELGRVLCHLNQKRGFLSPRDLMLWGIARTDDSNEEEDKNEPGLKGEIQRTAEEMKDFPTIGAYLNHRLEQNLPVRKKKLKAQGKGEVKPSAQKAEDERRFVRADRHMIEAEFWKIMEAQSKDPSWHPGLTANFQEQLYEHIFQQRPLSADKSTRGKCTFFKYELRIPRAGLTAQKFTIAKEVSDLSVSEHPGAEWRKLLPEERVALVHELMNEPDLTWTEVKNVLGIPLTARFNIEPEGKKKSQAGKKEKLRGSQTVERIKKVIGEKWDALGDQAQRDLVGEIVSIRDWYQDAKSNKRKKPAALRRRELFQSKQYGPDKITFTEKEANELATLPLPEGYLSLSLKAIKKIMPHMLKDKGESEAWEALGLNHAEPAGAQGALDRLPYPADKEIGHAVVRTTVRSAVRVLNALHRKYGKPDRIHIELPRDLAASTKQREETEQKIHENEKVRAGITKELVKLGYKPNGLNIRKVQLWRELGGAGLAYEPDIVIPDLISLMTGDYEIDHIVPRSHSLDSAMANLTLCTREFNTQVKGNKTIWEALGQTDPARWATIQAHVRSLKTMPLHKRNRILAKERPEGFTGRHLAATGYISREVLALAQRMVVNKHDVIVAPGRATAEVRNFWGLDDIVPLHPEEQAIVDAWREFMERAEAGKATEEDVKNAKAPGKTRSNFKHHALDAICVALADRKSLQALTTYYQLVESHSEALRDKAHRKLEKAQTLPDPNLRDKVRAAIEAASMVHRPRRKPTGELHKMGPDENVVQNLPNGEPWGTEVVGKHLVRYDQNGKAAQAYPLGNNHHVVIYERLTPNAKGEFERCADVVPTIEAFRRRNLGEPVIRKTDAKPGWRYVMALVKGDMVEMVDGTIGVVSKFSSTAKECVVDMSIWHPFVARQPKNKAGTDPYLVERIQSAKALTRIKSRIVMNPLGEIVYREGDHD

SEQ ID NO: 5930 - protein, 1047 aa, unidentified
  REGION 1..1047: note = Description of Unknown: Cas Enzyme sequence
KRSTRRLYQARKYRLWATLEHLITEGYCPLSIDDLNKWRHYNKEEARKNNNAGRVYPIWNLTFDSWIKLDFNNDGKPDYTSPYQLRKELAETKLDFTQEVNRFKLGRALYHIAQRRGFKSSRKGADDVKEQEVNVVDENETTLQKSEKKKTNKLKELFPEYDSSVPVGVFLANKENQGIRVRLDITQYLVRENYKDEIKYIFQFQELGLEHSLYISMCVVFKTIRNGKVKNYIGGTIFYKRPLRSQKGLIGKCTLEPNKYRVPISHPSFEMFRAWSFLNNIKYKQENGQFEKLPLEIKQKIYTDLFVGRLKAYFSFSDIEKLVNKTTEKKWIFNYKSKTTVTACPVSARLKYIFGDDYLNVKIEKNKAPKSDKSFYDIEDIWHILFSYEDQEFVANFAEGKLKLDAEKTKQFVIAWNACPIGYGMLSLNAINKINVFLQKGLIYTEAVLLANIPEIIGKELWQQNEQLLLDSIGGVITENRDQKTILNIVNSLISKHKNIEVNERQGYRNKDYQLADSDFQDIQATIEEQFGANKWKGFSEEEKKLILDTVKDCYQAYFSKQGIVRDIGREERLVEVKSNGKNYYKIDTGYYRLPKLIDTLKEFLQDNFEHLDEKKLSKIYHPSEINIYPPAKEIDGVLKLGSPKTDSFKNPMAMRTLHELRKLMNYMIETNQIDNETRVVVEVARDLNDANKRWAIETWQREREKENEAIASKLQEFRKNNNVVSDEDIDKARLLLEQQIDINQDNEAFELKVTSRDIYKKVKERNKANDDLIKKYRLWLEQGMQCLYTGKIISLQNLFDENTIDFEHTVPRSKSFDNSLVNLTVSFADYNRGIKENRIPTQLENYDKEAGGYTAIAPRLEAWKDKVERIKQQIDFWKTKSKKAADKTGKDDAIRQRHLWQMELEYWKNKLDRFTITEITSGFKNSQKVDTQLISKYAFHYLKTYFDKVDVQKGSITAVFRKIYQLQVADEKKDRSKHSHHAKDAAVLTLIPVAAKRDEILERYYEAKEKNPKAKFTEEPYKGFKREFVFGIDDSVLINNITNNQE

SEQ ID NO: 5931 - protein, 978 aa, unidentified
  REGION 1..978: note = Description of Unknown: Cas Enzyme sequence
MANTILGLDLGITSIGWALANVDDANPTNNRIIESGIRIFTIAEHPKDGKSLALPRREARSARRTTKRKAQKLRAVKRLLISEKIITTDELENLFIGNKKQIDIWELRKDALYRLLDNKELSRIMIHLVKHRGYASNRKSEEPTDSEGKAVLGGIEKNEKIVQESAYLTIGEYIATKVKKRNGKDSEGKLNYENSISRAMLIKEIETIFEKQKGFENKFVNNELLNNYKDIAFTQRPLKSVEGMVANCPFETDQKRAPKAAYTFEKFRALQKLKNLRIITQDGEVALTKEQINQAIYKAKTTSKFTYKSLKTLFSFDKAVQFKGLTYFDHKTGEIKEPEAAKFLDFSAYQKIQKAFESADNLYWSKIENSDTLLDDIARVLSTQKDDKKSFEELQKIIDNEAVSNALVGVSFSGFSHISTKALRKINPFLEDGLDYDKACEMAGYDFKAIFKGDKSLFLPPLTEQENLEMTNPVVKRAVAQMRLVYNAIARKYGAVDTVHVEFTRDIKKSHKDRNDIKKAQNEFQALKEEAKIHAIEILGKEPSAKELLKFRLWQEQNNECIYSGEKIRPEHLMDDLATQVDHILPYSRSLDDSFNNKVLCFTKQNQDKGNKTPFEYFGANKESKEWQEFSIRVECSKNLKSAKKGRLTKTNFDESSENSFKERNKSDTSYISKFVKNYIEAHALFKESKMKRHVFTMNGMLTTQLRYKWGVGDKNRDNHLHHAEDAIILAFSTQSQVQKLSTVSAAREGFIFKNREEKSKNLKFEPPMEEFGTKVKESVEKIFVSHMPRRKIGGAAHKDTVYSHKTLSVKKSDGKIDSLKGNSVKNNVKLKHGIALNDAMPRVDLFQNKKTKKYYLVPIYVSDFVKPKLPNQAIVAGNKPWIEMDEEYEFLFSFYKSDLIEIKTKKTATKESVQVLGYYDGVDSATSQISLFTHDNINSYRLGVQNLVFIKKYQVNALGNYIEVKNEKRQGTKKEKN

SEQ ID NO: 5932 - protein, 1006 aa, unidentified
  REGION 1..1006: note = Description of Unknown: Cas Enzyme sequence
SIGWAFVIEDEKAPENNQILNMGVRVIPLDTKLEKDEFAKGGSVGTNAKRRQFRGQRRNLHRYKLRRKLLNETLNDLGIIPDESSKRLSAFDLYNLRNRALSEQLTLSEIGRILTHLNVRRGFKSNRKGEEKSESEYKEAIKIREQRLEAEHKTIGQFFAKNLKEKPDFRIRQEIFNRSTYMDEFDQIWGVQSKYYPSILTEKNKRKIRDKGIYYQRTLRSQKGLVGECALEWNYAVDGATQDFIVLPNGLRKIVRPKSAPKSSPLAQLVRIWENIHNIRIEDEKGTPYVLSELEKQAIFNMLQDKKELSEREIFKILNLNASVYSIDELIKEKKLKGNTTRVKILDLLKKHNYSNRDVLNFNLSTESVKGVDYESGDQFDRLQVHGSFAKEPMYQLWHLIYATEDESNLVDLLQQKFGFENELSTDLAQLDFTAEGYSNKSSRAMRRLLPHLMNGMDYYNSCVLAGYNHSNSLTSDENSRRQLLPKLDLLPKNSLRNPVVEKILNQMIHVVNAVLENPALGRPDEIRVELARELKQSAKERKNTFTKNNKREKFRNTIRNQIAELIGIQENSVTKVQIEKWQLWHEVDGFSPYSGKKTELSDFLLGRGVDVEHIIPKSRCFDDSFDNKTICETRFNQEKDKQTALDFMESRNVEGLQPVDAYFRMISNLVKNSSERGENGPGISRAKYNRLMMRAKDIPVDFINRQLRETQYIAKKASSLLKDICINVTATSGSVTDFLRHQWGWDEVIEQDRIKQFRDAGLTQTRKIKSGTIEKEVIPDWSKRKDHRHHALDALTVACTKQSVIQQLNNLNQTYEKLYGTDRRDALRSHGAKKIVNINNAPFPTQVVADAIRSILISFKQGVSVATYSKNKVGKQFTLTPSGPLHEETIYGQIKRYQKVELNARFDAAWLDRMVHPHQAEIVRDRLAKFDNNPKLAFKNIGKEPIFYGANNQKMLKAVTIWSESYVSRKNVDPNITAKQVEKVVDARVRKVLTERLEEHGLKPK

SEQ ID NO: 5933 - protein, 1378 aa, unidentified
  REGION 1..1378: note = Description of Unknown: Cas Enzyme sequence
MEKNLGIDLGTNSIGLTLREDNAFTWYGVYTFKKGIGEGKSGEFSLASERTKHRSSRRLYNARRYRKWETLKILIENDYCPLSIDNLNNWKNYKTGTGHTFPINDILFQEWIKLDFNGDGIPDFSSPYQLRRLLITERLDLSISENRYKIGRALFHIAQRRGFKSSRKNGVNEKTAVYKGSNETKTIGRNEYENLIIEYGSLGAAFAALEDQNIRIRNRYTLRSDYQSEVQKILEFQTIDDSVFCYKIDKAIFYQRPLRSQKGLIGKCTLEPNKPRCPISHPKFEKYRAWSFINNIKYKNTDTNQFEPIPLSLKEKLYQEKFFYKSKRDFPFKEIRKFINTNGGKDWELNYSIKMDTISVPSCYVSARLKSVFGEDWENYQKQISRTNKKGKIDTINYSIEDIWHILFSFEDEEYFIEFLTNILELEEEQIKELTILFNAFPVGYTNLSLKAINNILPFLCEGIIYSESVILAKIPEVMGKELFADNKSEILQSIFDKVEEIRYQKTIVTIANNLIFKYYALDYDQRFAWKDTAYNLVKSDLKDIEVTSKEHFGEKTWNKLNSDFKQHILSDVTILYQDFFKSQKREHIAQPHLVNNIKELLSENFNITNKALNKIYHPSQIDIYPKQEGQPFLLSPKTAAFKNPMAYKTLYRLKDVINYLIEQGIIDNETRIVVEIARELNDSNKRWAIEKYQKDRESENIEFANAIAELIKDPEFSGIADPDSDSDSNKLRLWLEQTKNPEDILKEIQNINKDKQLSVSQKDIRKYRLWKEQNCTCLYTGRTIKMTDLFDTNKVDFEHTIPRSKSFDNSLANLTVCYADYNRNIKKNQMPTELPNYTEDWNGYSAIKPRLEVWEKKIDSLKNQIETQKRNSKLAIDKESKDIAIRLGHVLQMQYDYWKNKVERFNQTEISQGFINSQLTDTQIITKYAYHYLKTVFNKVDVVKGTNTAEFRKIFGIQSKDESKDRSAHSHHAVDAAVLTLIPPAKKREEILRNSYDYEENNCGKQYHEKPFNGFHYTMIEELKKNILINNLAEKDQVLTPGRKIVRKRGRIVWIDKENRIPKIAQGDSIRGELHLQTYYGKIKIAAKDDNGKLLRDDNGNIRYNQVDGKDEIWMVIRKPIDKVNFSSDIIIDEHLSTFLNRQLETGVKQYDLVDFQGNKLRHLRCRVKSARGFMNPDNVTIVKKQTYKSEKDYKNYIYADSGENYVFGLYENKNGREIVSINKFEAADYISALGIPTDKKELFKQKEPVMIKNEESQLIHVFEVGQKVIFYSTIDELKDIESDPQEISKRLYFIKRLHQASVGNILFQHHLEARSDQDLTIAFPKEVFKSAGKDGFSKFQTDFIAPRILFKPSKPNFIIEGKDFEMKLDGTIKFKF

SEQ ID NO: 5934 - protein, 1042 aa, unidentified
  REGION 1..1042: note = Description of Unknown: Cas Enzyme sequence
MARIFGFDIGTTSIGFAVVDLDEKHESGSIRRLGVRIFPEARDPDGTPLNQQRRAKRMMRRQLRRRRKRRRSLNELLAADGLLPAFNSPDWARVMAADPYELRARGLDSPLSAYELGRALYHLSKRRHFQERDLAEAENEAEEDKPSQEEEAEAKTREATIAELKRSGETLGAHLAKIPRLERKRGIHATRAVVREEFDRLCAAQAAHHPVVENAEFRAALEEAIFFQRPVFWRKSTLGKCRFIPGAQLCPKGSWLSQQRRMLEKVNNLAIAGGNARPLDEEERAAILAALETQKSMSWPGVRKALEPVFKARGESAKYVRFNLEYGDEKGGLKGNLVEASLAKIFGTKWPAHPHKEALRAFVPEALWQADYGEIGTQRVVIRPQKERADRRENLIARLTKEFALSQNEAEAIIKLNFPQGWEPFSTKALEIFLPELEKRVRFGALLNGPEWEVWRNANFPDREQPTGEILAKLPSPRADKHATYDQREEAKRIASLRNPTVVRVQNELRKVVNNLIGLYGKPDMIRVELARKVGQSKREREEITAAMRKQEREREAARNELIANGISDPKDRDIEKWLLWRECGGFCPYTNDPIGFNDLFRDNPRFDIEHIWPKSKSLDNSFANKTLCRKDVNLAKGNRIPYDYFSGRPDEWQDTKKRIWEMAAKHGMARKKARRFCAESIPDDFATRQLNDTGFAARQAIAFLKRLWPDVGPTAPVNVQAVSGRATAQLRRLWGLNNILSDDGEKTRADHRHHAIDALTVACAHAGYVKRLSDWFAAEERGERPHLPEPWPSIRNDAGAAVAQIVVSHRVRKKVSGPLHLETAYGDTGEDVRTKSGTYRLFVTRKPVERLSKTELDDIADKRVREIVKNWVGAHGGDPKKAFAAYPRLSENGPEIRKVRLYTKQQLSLMAPVSTGYADLGQNHHIAIYRGADGKCSYEVVSLFEAARRLAKREPVVRKANGASSDFVMSLAPGDTLHFPSGKMEGYWTVQGTWANGQIVLINSRDAQGTSVTRPNPSAILREGGRKVSIDPIGRVCPAND

SEQ ID NO: 5935 - protein, 1052 aa, unidentified
  REGION 1..1052: note = Description of Unknown: Cas Enzyme sequence
MKRILGLDIGTTSVGFALIEHDEQRHLGTILRMGVRIFPEGVTEKDKEPRNKARRQARQIRRQLRRRRLRRRELGMALAEAGLLPRFGTEDWHRVMSADPYDLRAHGVGQSLQLHDVGRALYHLGKRRGFLPARLGTEPTERDTQNEESVVKEAIAGLRREMASTTLGAFLATQQKRRGRHLGRDMVEAEFERLWAAQSEAHPGRLTPELHDKLHRILFHQRPTFWRLKTLGSCRLEPGAPLCAKGSWKGQHYVMLEQLNKLRIAGGNARPLDDEERAVLRALLERQASLTFGAARKALKPLWLARGLPHELKFNLEASEKVLRGNAMEAKLAAVFGKDWANHPARDRIRNEIGSRLRQTDYRQIGNKRIEIRRAPEAEAERRCTAAAMQRDWGITADQAAELSEIAMPAGWLRLSEAAIDKLLVEMERGIGVGELTMSPEWAEWRDRAFPNRVAPTGEIEDRLPAHPRRMPELRNPTVNRALNEVRKVVNNLVALHGTPDLIRVELARDLKRSPRERREVEKRQRDQEKARKAAALELKANGFGTPTRRDVEKWLLWKECNETCPYTGRKISFDDLFSAGRFQVEHIFPRSRSLDNSFANKTLCDTELNKLKGNQTPYEFFASDPERWETVRRQVKSCGLPEAKARRFMRKDFAEAGTEEFAERQLADTRYIAREARDFLKRLYPDIPGGRQQVETCNGSITAQLRRHWGLEGILRAAVNEAAPCALAADDSAITELGGQAPGKNRGDHRHHAIDALAVALTSRAFVKRLSEHYARERVGERPKLPLPWKSLFEDAKAKTEEIVVSHRVQRKVSGALHAQTAYGDTGREIVENGKVYRFFVARKNLREITTSQIKNIRDDDGGFLRKLVEQHVVRFGGGNPRKAFPPYPILPSRNGEPPREVRKVRVLIKQQPELMVQLRRGGKTYADPSANHHMAIFQRGDGSVEFEIVSLFEATRRLRAGAPVVNRSNTGDRRFIMSIAPGDTLEMPNGASRPAYKIVTSVWASGVVVLENHNEASGSVWKRPNAASLIAAGARKVNVDPIGRVRPARD

SEQ ID NO: 5936 - protein, 1080 aa, unidentified
  REGION 1..1080: note = Description of Unknown: Cas Enzyme sequence
MEYQKYVLGLDLGSASLGWALIALNELDQSTHLIRSGVRIFEPGVAGSDLDIQQGKDESKAVARRMARLHRRQLRRRAYRQSQLFRLLQERNLLPRGNGQGSFSEQRHSILNSLDQQLCKNGSHAYDQLPLYHLRKAALDRKLDPHELGRVFYHLSQRRGFKSNRKESAKGDKEKEAGEVKAGIADLERKIKESDARTLGGYFAGLDPHQIGQQVRRRWTARSMYEDEFAQIWQKQVEFYSDLLTEDLRRKIAHLLFFQRPIAAQSHLIGKCELEPDQRRAAWAALEAQRFRILQKVNDLKVIYPGDLIAQPLTAEERKFVFELLDREGDQTFKAVRKALKLNPKSQFNLEKGGETKLRGNRTNSAMLATFGSKWDAIPPETQKLIVEEWRTIETEEALARRGIHWGLDEDSARKWAKTKAEDGYCALSRRAIEKLLPLMMEGLSFKEAETKLYGHRFSGGPVLDLLPSLHVHRKIPGSAEMERLLARLRLGAVRNPAVERALTEMRKVVNAIIRHYGKPYEIHIELARELKKPRQERQSIAKKSRDRERERSEAKAKLLRECGIQNPSRADIEKALLHAECSGICPYTGRSIQLSDLFGQHPQFDVEHIIPLSRYPDDSFQNKTLCWHDENRNRKRNRTPFEAYSADSEAWDAILTRVKAWPIANGGKLKRFMLRSEDELEEFTARQMNDTRYASVLACRLLESLYGGRDARTESGTRQVIFASSGAVTATLRRNWLLESILREAGPSTNGQSKGKARTDHRHHAVDAIVIALTSPKTVQSLARSASLDPNVPQNGHAFRKIQSPWPDFVDSVRPHIEKMVVSHRPEHKMSGALHKDTNYSYSPLRYVNGKTIVHKREPVASLKSGDIDSIVDEAVRRAVREKAESLGNLKKCETTNDWPVLPAKNGDGAVPIKRVRIKKVLDVTAIASGERKRFVALANSHHTAIFALMKDDREVRWKGMPVSLYEAMQRKRRKEPVIQRKHPDGPAWQFKFSMMGGDTVELHRDCDHKNGKCVPDMYRVRTIAGNGQLCLVKVNDARIIKSIKESKEWWSPRADALRKLGCRKVVVDLLGKVHPAND

SEQ ID NO: 5937 - protein, 1252 aa, unidentified
  REGION 1..1252: note = Description of Unknown: Cas Enzyme sequence
MAIWLGLDIGTNSIGSAWVDTEAQTIVLGVSVFPAGVEEREDKRGDPKNKARRLARSQRRSIARRAKRKRQLRKLLIGAKLLPADPQQLRAIFSPTKKEEKEKPERWNPWRLRGEGLERELSPYEFGRVLVHLSQRRGAFGVEVDSEDPDEGKVKKAIEHTDSQLARRTFGQFIADLIEERRKPLSGLEGRFYREAVRNRRGAFEFHATRAMIRDEFHRLWEKQKSFKGELAQLLTDALKRQLDDPEGEAKHQRTWRHQGLLFGQRRTYWDARALGRCDLEPTDRCCPLADRHAQEFRVLETINNIRIEERGKEPRPLNDEERANVLRVLRCQKSATPATLRRALGIDKKDRKAFFTLNVERDPEREINTDWFYREIVHGAFTEDVWRVLTEQQRESVNRAVLKFDLKVDEDAAKLRQGAMTWWGLSAEAADKLIEACRTRPAPDKRVKLSRRAIQNLLPYLRQGLSVTEARKHFAEDADSPATPEQRRRYSLKASALTRAEKHFLEKHPNQLPPAPELSNPVVRKAIHEVRRHLNAYLQRFGRKPDRVIVEMAREARLPGKKANEILALNRKREAIRKGIIEEFKLENLAPNQRARAVERVLLCRQQRNVCAYSDGISTDDKKLGRCPYSGRTITEKMAVEGTGLEVDHIIPLSRSQDNSLSNKVLCFVDSNQDKGNQTPKEWLGDGSEAFRRLEQRMAHFEKAEEVYEYFTKKDYARKWGNLHRDAPDREHFLNSQLTDTAYAARQVAQWLRDVLFQSEMDGTRRVFASKGIYTALLRRDWGLGEDALDRQWHGGDSAKAEEQGMARREKKDRTDHRHHAVDALVIAFCGPERLQDLADLAAKREDAKARIGRWTKGESLPVPKPWSSVEEFRDQVTKVLAWLVVCHRPVKRRIVGALHKDSPYGPVLGSDKHFTKRIRIHGGREYLKPQHLRLPVEETDQQVKQRLFEKLKRKGLSEKEARQRARKLFDSGQFKRRLVDPPPGKSGIVRDLAVRLELRKCLESNEVDGKKVDPDNFSKNEIKSLVDAGKVCMASGVPIRRVVLLRTIDEDSRVDIPGKLQDPVSGRKLRDRATGRYIDDPDPRRRRIYDSQNNHHVEIREDAQGRWHGDVITTYDAARRVRLQKQAAVDASDRNGQRFIISLAEGEMLHMRHPETGQPGFFVVFKIDKGAIHFVHHWDARPAKAKEGQKSREDVGGGITPTALKELGPTQGEPPYKVQVDAIGNICRIDESRHGNSGSLPNREGRSADD

SEQ ID NO: 5938 - protein, 1064 aa, unidentified
  REGION 1..1064: note = Description of Unknown: Cas Enzyme sequence
MSAVNLNGQDKVPYILGIDLGTNSLGWAAVKIGPHGPIGLLDGGLGVRVFQAGLDETGGLGNEESRNRARREARLRRRQVERRARRLRKVFRLLQSYDLLPPGPSSTGAERQKILNQLDSEIVHSKWFEEKVQSGRFPFAHQAVPYVLRTVALDEALPPFYLGRALFHLAQRRGFLSNRVGNEKNRQEQGQVRAAVQELAEKIQQSGARTLGEYLSRLNPAEQRLRGRYTSRSMYLREFDALWTAQARHHPATLTDDRKKQLYQAIFYQRPLWHDPDAVGKCSLEPDQKRAPAYHLAAQRFRMLQRVNDLVVIFPTGQRRQLNEDQRKRLLEELEYHGDLTFATLRRILELPRHTRFNLEEGGETRLPGNRTAAAFYEALGDDWLKLSEHDRQRLVEYVRAFEKPEKLPQAAARKWGFPPEKAQKLSEIVLEDGYLNVSLKAIEKLLPLMEQGIPYGEARKRLYPEQFQPENPVDRLPPVKEVFPDLRNPAVARSLTELRKVVNAIISRWGKPQEIRVELARELRKPKAAREALAKRQRENEKDRKRAEEELRNHGIQRPSSRDIQKYLLASECRWQCPYTGLSISWEKLFGPEPEFEIEHIIPFSRSLDNSFVNLTLCHVQENRQRKGNATPWEAYAGDPDRYREILDRVRQFTSPPAVRAEKLRRFQMDGEALQQFLDEFNNRQLNDTAYASRLAAEYLGRLYGGTVDAAGRRRVLVTGGQVTAFLRNGWQLHAVLGGDGEAGGEAGPKPRNDHRHHAVDALVVALTDQATIQQLSRAAQNVPVGRRKLFGSLEAPWSDFVDSVRQAVQTVITSHRVSRRVRGCLHDETHYAPPDAEGFTRVRKPLNKLSPEEIERIADPRIRELVKQKLAELGAQDPRRAFASPDNLPQLPTRSGSLIPIKRVRLRTSDRPVPVGNGPRTRYVLPSNNHHVEIYATRGPRGERWAGSVVSFLEAYERKRQNRPVVCRDHGPGTRFVFSLAPGEIVRLDREDGPEYWVVRSGSFSEANRRVEIALAPVNDARKKEELRQAGLFLRCGPDRLRAWKARKISLSPLGEPRSAHD

SEQ ID NO: 5939 - protein, 1115 aa, unidentified
  REGION 1..1115: note = Description of Unknown: Cas Enzyme sequence
MRIFGLDIGTTSVGFAVVDLDEERNQGRIVNAGGCPGLGVRIFPEARDADGTPLNQQRRAKRMMRRQLRRRRKRRRLLNELLSERGLLPKLGSAEWQLMMEPKKGEPKQMDPYVLRARGLSEALAPHELGRALYHLSKRRHFKERDLAQGEELDTIIDDEEAPKGKQKRRPKQETKPRNEEEEQKQKRERFVVALKASGQTLGQILASRGPSGPPKGGPPAQRKRNEHATRAIVDEEFSRLVEVQKHHHAALRDDAFVGALHEAIFAQRPVFWRESTLGSCSLIPGAPLCPKGSWLSQQRVMLEKLNNLEIAGGNARRLDKEERVAILAKLAAQGSITWPGVRATLEPLFKARGESAKYVKFNLEYGDEKGSLKGNAVERGLMKIFEPDWDSYPHKSELRAFLPEALREADYGKIGGQIGKRRIVIRPEKERATRRAEVAAKLVREFGTSSEQASALAKLHFPQGWEPFSTKALEIMLPELEAGNRFSALLNSPEWEAWRDANFPDRERPTGEFFNELPSPKDRDEQRRLSSLRNPTVIRVQNELRKVVNNLIRVYGKPDRIRIELARQIGLSKAEREERTKRMRANERRREEAQKDLVSKGIPNPLSDDIDKWLLWKECREQCPYTLDKICFDDLFRTGRFEIEHIWPRSISFDDGLRNKTLCRRDINIAKGNRTPFEYFRDKPHQWMLVKENLDALARDKAMSPGKIRRFVAESIKADFTERQLVDTAYAAREAMAMLKRLWPDEGLQSPVNVEAVTGRATAQLRKLWKLNDIGIVGKGGKKTRANHLHHAIDALVVACTHRNDTQQLSHYFEIEGLHRKGLARKPSEADLPTAPWPTIRQDAEATIGKVIVSHRVRKKVSGPLHDEKPVGYAKEDILKNGTTLGVYVKRVDVQTLTLEALKLERPEQITRTVKFVVRDAGVRQVLATHLNAAGGDPKKAYPPYPRMSVEGPEVRKVRVMTTQQKDLMRPALNGFVDPSNNHHIAIYRLSNGDIDFDTVPLWEAITRLSRREPMIRRDRGDGAAFLMSLSPGEAILFPSGDKEGVWIVQGAWANGQVVLTRHTDARPSTLTEAKRLGVDGKREEFLPAPSGIIQRGGRKISVDPIGRVRPAND

SEQ ID NO: 5940 - protein, 973 aa, unidentified
  REGION 1..973: note = Description of Unknown: Cas Enzyme sequence
MGKKILGLDLGSNSIGWALLEEKEGKPSGIIDLGSRIFTKAVEEKTPTPKNMKRRDARLARRVIQRRARRKSRMLNYLVSLNLLPKELQDNTQPEIILNELGDPYQLRAKALDEALMPFQLGRVLLHLVQRRGFLSNRKTLLGDMIDDPDVLDILNELDDNDDKTVGEEGEFKQDIAILRQTILDSGSRTLGEYLSKFDQHDCKRNRARDGGHKRTDRQMYHEELDQIWLEQKDHHFILSDEVKEKIEEIIFYQRPLKLKADRIGKCSLETSKQRAQIAKLECQRFRYLQDINNLEYFQSQEDKFVKLTSADRENLKDLFEFKTVVTFTQIRNTLGFDKKAEFNLEQGNKKLKGNRTACEIRDVLLKWNAVPQWDDMPEEDQFQLVEDLLTIRKKSVLKKRLLNHWEYDLRTVIDLCLLEFEPSHISLSIKAISNLLPYLDAGQIYSDARQSAGYGYEIKETKVVDKLGMPPEIANPIVSKGLHELRRVVNALIAEYGKPDIIRIEMARDLEMNTKRYKENEQRQKKNSKSNDEATDKFQLMRQKNVHLGLSKYPSRDDKIRYRIWKDQNEMCAYSGTKINLSTLFSADIDIDHIIPYSQSLDNSYMNKVVCMASENRFKGQRTPIDAFGGNEEKWNQITQRIYRWNGGLKSKKDRFYKTAEQVLERDFISSQLNDTRYISRVANDYLKQLGADINVTKGIMTGWLRHQWQLNNLIGFDRTAKDRVDHRHHTIDAVVTACIDRKLYNTLVAQSKELERKSPELHMRDIHFDEPWETLRDDLDVSLSKMIVAHTPQRKISGALHKETGVGYINGLGTVYRVNLDPDFKITQVKDIVDADVRKIVSDHLEKYDNKPKEAFTEGVVLYHKDGKTPIKRVRIVQAKTTFKKLETGKLGIKDRNGKVFRWMAYGNLHHVEIIYDKSTDKFSGKFVTALEASHRVKGIGKPKQSIIKKNHGESFEFVMALHINDLVKAN

SEQ ID NO: 5941 - protein, 1547 aa, unidentified
  REGION 1..1547: note = Description of Unknown: Cas Enzyme sequence
MKKVLGLDLGTNSIGWALVDNDFERKQGEIIDIGSRIIPMSQDVLGKFDTGQSISQTAERTGYRGVRRLYQRDNLRRERLHRVLKILGFLPKHYQQEIDFKNKLGQFKNEVKLNYRINKEGKYEFIFIDAFNEMLAEFNALNKEIKIPYDWTLYYLRKKALTEKISKEELAWVILNFNQKRGYYQLRGEEEETQEGKIKTFETLVVKELIDSGEKIKKTENILYDVYFENGWKYDKQIVKTENWKNKTKEFIVTTSATKDGKTKRTYKAVDSEKDWIAIKEKAQQNIDEFNKQNNTVGTALYIYDTLLNNPTQKIRGKLIKTIERKYYREELAQILNTQIKLHSELQDRNLYQACINELYPRNEAHQNNIKNKGFDYLFIYDIIFYQRPLKSKKSTISGCQFETRIFKKTVVDKDTKEKKEIFITEPIKAISKSHPLYQEFRLWQFLKNLKIYQKEDEDGNIIADKNADITTKLLQTEEDWVDLFNFLNIKKTIEQHQILKYFSDKKLIPKQKKDKGMYKWNYVEDKKYPANETKAQFLSRLSKVTNINDAKSFLTNETEIKLWQIIYSVKDLAEYEKALKTFAKKNNLNEDSFVSSFVKFPPFKNDYGAFSEKAIKKILPLMRRGHYFDENNISSTVKERVQAIMERVNSLNLKQNYTKEDLEKAMLNVVDDDIPTRLVKSFIPFIDKNPLTGLNTYQASYAIYNRHSESGNVQYWKTPQDIDKYLSNFKQHSLRNPIVEQVVTETLRTVRDIWRYHGNGVENFFNEIHIELGREMKNPADKRKQISEKNINNLNTNIRIKAILQELVNSGVSNIKPYSPSQQEILKIYEESVFENAPDNYKNIKLEDIEKIRKKASPTPTEIERYKIWLEQGYVSPYTGKTIPLTKLFTSDYQIEHIIPQSRYFDNSMNNKVICESEVNQLKDNQTAFEFIKNHGGQIVDLGQGNIAEVYKLAQYESHCNAYFKKNRAKLKNLLSEDIPEGFINRQLTDSRYISKLIKSLLSNIVREEGEQEAIAKNIVPVTGAITSKLKKDWGLHNKWNELIAPRFIRLNKLTGTEDFGYWDNKINAFRIQVPDDILNKGFNKKRIDHRHHALDALVIACCTKDHINYITSINTNRKNHSLVSKLRNVEEIEVTNKKTGNKEKRKVAKAYKLPWQSFPVDAKKSLDKTVVSFKQNLRVINKTNNKTMQWVEKKGKYVKQLVSQTKGDNWAIRKPMHKETVSGQVLIDENKEVSFNKAIEDTSLIIDKTIRIIVENSNIENLKERIEHFKKNPIIIDGNKVRKVRVFTRATAVRTSLVDIKTIKHLKKITDKGIQQILKNHLSNYIDEKGNENYEQAFNAVGVEDLNKNIKKINNGKNHQPIYKVRLYEAGSKFAVGYTRNNNTKYVEAAKGTNLFFAVYWDEKTQKRTYETVPFNEVVEHQKQVAHLPKTERTPIPINAKKGAFLFALSPNDLVYVPTDEEIENPNLVDFKNLTKEQIERIYKMVSTSQGKLECIPNTYSSPIKNNEMGSNNKSQNMIDGKTQIKPRCWKLEINRTGKIINIIS

SEQ ID NO: 5942 - protein, 1104 aa, unidentified
  REGION 1..1104: note = Description of Unknown: Cas Enzyme sequence
MRKVLGLDIGSNSIGFSLLELIEKDNKIVFNELVSNSIIFSEPNDASDRREARGSRRRNQRKSARNKNARKSYVDFSIANPNFITDTTNYLHSLNILNNDVYDLRENAISGKLLTKDEFIFSTYPILTDRGYNNMFSTSSEDGAINEAVSKNKQEYLSKSYQIPTMVLTTKRKESESQYQNIPIRNKKDSYENSLDRDMHKEEFQKVVMSQANNKAIFATPLECEKFIEAIVSEEDINTPFYQRPLKSFETMVEFCTFYNKYNPNGKEKRIPLSNIKNIELTLRQKIDNYEVIDSKTGEIQTLSKEDIQKVIDFWINTPSSNEINGNNIFKSVGMKNTKLSIPEKSSQIVLNIQAHRNILDVLSNYNIDFRGADNFFYNELLLQLYYFKNRSSRIEHISKQIEKYGLNLDDKFLDEVASLDGMDGFGSFSLKFINEVLEIIKTENKLYHEVLEKLGYFSKYLDMTSYDYLPPLEPTTADIQWLQENIPYFESKHLFYQPMISPKVKRVISILRKLINDIIKQYGKIDEIRIETAKELNTKKEKEDIDKNQSKAKKKNDEAVKFLKNQNLKESLNNIERVKLWKEQGGFCLYSGREITKDELFDENETEIEHFIPRSVIWINSYKNKILVKKKYNQNKGSLHPIQYLNSIGQWEDFCGRVIQTFMDFKKKDWLTKEDIINSVMKKEHWSDSFLNDTRTATRTIQKYLNHYLYPKENLYGKDEKRSIFSVSGKAISELKYIWGISEIMPKKEDGKKDRDTNYHHTLDAFTVALCSSGAINTLHNYFIKKENKFKTKVLKEKLTINTPVSKDGINVVEHLKNLVEKYETNKLYVCPYNKRKTNMKGFKDGNLKLYVTKDLKDETKEILAEIEKVAIDTSILIKSVGGFPKPRTDEEVRKEIESIQERLDNKKQKNIISAIEIYAKELLDIRSQIVTVEDEIKEVKTTLKNGDKNKEYNTPINEKIKELTEQKNQLLKSMEKLRCSFDTKNGKKQIVRSLKLYKPKREQTKADVIIFPNRQENKIERLSVPNFKKALEEKEPFVTKMNETTLNVELFNTEKRGQAVGLNYFSSIKNDISTKINNRYNDEIVKNSKSDLVLYKSDIIKV

SEQ ID NO: 5943 - protein, 1062 aa, unidentified
  REGION 1..1062: note = Description of Unknown: Cas Enzyme sequence
MRLGLDIGTNSIGWWLYKLEAGEPIAVVDSGVRIFSDGRDPKSKGSLAVDRRVARAARRRRDRFLRRRTVLMERLAEAGLMPADPVEAKKLEELDPYALRASGLDQKLPLTHLGRALFHLNQRRGFKSNRKTDGGDNEAGKIKQGTARLEQAMMAAGARTYGEFLHMRRIAAPTPRAIPSVRTRLTLRQDSEDGKLDMAYDFYPDRSHLEEEFQQLWATQATHHTELTDALSNSLFETIFYQRPLKAPKVGRCLFVDEPRLAKAHPLTQERILHETVNNLRIMADGQPKRPLTKDQRDTVILALNQKKHTKSLRGMSLKLKALGKMLKLNPDETFTLETQTRDAIVCDLVRASLSHPDRFGPNWSKLDEAAQWSLIKRLRDDEDRDALIKWLETEYGLDADNAAATADAPLPEGYGRIGMTATRNILAHLKAEVLTYNEAVEKCGWHHSDSRTGEVLEALPYYGEILDRHVIPGTQEPEDDDINRYGRITNPTVHIGLNQLRRIVNRIIAEYGKPAEIVVELARDLKNSEEQKKKINIEIKKNTSAAIMRGEKLVEELKQPNTGRNRVVLRLWEELGPDPMTRLCPYTGSRISAGMLFTGECDVDHILPYSRTMDDSFSNRTLCLREANREKRNKTPWEAWGDTPLWDKISSNLKNLKGNKAWRFAPDAMEQFEGTKGFLDRQLVDTQYLSRIARQYLDALYTEGGHVWVVPGRLTEMLRRHWGLNSLLPDHNRPTVKKKNRQDHRHHAIDAAVIAATDRALVKKIADMAKQEKEGGLEHFAASVPPPWEGFRDDVKASLDQIIVSHRADHGRVDTSARVSGKDTTAGQLHNDTAYGLTSEVNDNGAALVVTRKPIDNLTPVLIDKIRDPDLQRMLRIATRDREGKDFEAAIKTFITKPGPYQGIRRVRLIEALDVIQINDKSGHAFKGYKGDSNHCYEIWQLPDGKYKPQVITTFEAHQISTPRRPHPAAKRVLRIFKRDMVALDHPKLGPLVCYVQKLTLGNGLFLVPHTESNADARNRNKDDPFKLISMAVGPLIAASIRRVYVDEIGQIRDPRGGNAG

SEQ ID NO: 5944 - protein, 1082 aa, unidentified
  REGION 1..1082: note = Description of Unknown: Cas Enzyme sequence
MSWRLGIDLGTNSLGWAALELGQYEGAYVPIGLKDSGVRIFSDGRNPKDRQSNAAKRREPRSARKNRDRYKRRRARLMRELIEFGLMPKDLNARKALEGGKGIAQSETDPWILRARALDEEITAHQLGRAIFHLHQRRGFKSNRKTDRADSESGKVYDAIKRTREKLEAIGARTLGELFGRPRLEAFIHNQSAAKGSRQAQPLARVRKSGDGAKWQYEYYPTRELTLDEFDQIWDAQKKHHPDILSDTARGRLRDTIEWQHPLKSPPVGKCTLIPTEERAAKALPSSQRSRIFQEVNALRIAPSGKAQYVLTKEQRDQIADRLLRPTSLTAKVKFNQIRKLPGLSIYDGFNTESDKRDHLTGDETAAKMMQNDRWGPSWFDLDLATQDEIIDRLINEEEEDILVAYLIDVHALDKEQALRVADCPLVSGYGRLSKLALDRLMPHLEDGMIYSDAAIAEFGSHSQFGDGVVYDDALPYYGKILERSVAFGTGDPKHMDEKRYGKIANPTVHVALNQIRAVINDLLKRFGPPAQIVIELARDLPLSAKGKGELEKRQKDNQDANDARRKRLADEFKVPDSYDNRMRLRLYEDLDALGKRCVFSGTQIGSHNLFSDEIEIEHILPFSITFDDSYSNKTLATRKANRDKKNQTPYGAFGHSPEGYDWEEVSKRAAELPASKGWRFAPDAMERYEKFEGGFLARQLTDTQYISRLAKAYLEAIYGGQGHKGAKNNVTVIPGRLTADLRWQWGLDSVLRGHNEEASEAQKKNRNDHRHHAIDAIVVGCTDTTTLQQAARQAKQNEREFSDRLMAGIPEPWEGFRNEVENSVRKIIVSHKPDHGIQAAMHNDTAYGIPKGEDGEPDKKGVRMVITRKPLDSESFKKPSDLEKIRDEIIREKLKAATFGLTGSEFKQALISTARAMTPPVYKVRIEENLRVIPFKDKSDRDYKAYKGDGNYCYDIWMNEKGKWTGEVITTYDAYQLSRKDKNWWKNLTGRNGQKLIMRVRKNDYLQIEHEGKTHIVQVNQVTPGKVIMSEHFEANVDARTRNTYEGDDPMKYILKSPGSLQNAKSKCVTVSPSSVIKVYQ

SEQ ID NO: 5945 - protein, 1073 aa, unidentified
  REGION 1..1073: note = Description of Unknown: Cas Enzyme sequence
MNAGIEIALDVGHSSIGWAVLQTDPSVILHGCGVVTFRADDCLASSRRAYRRQRRHIRSTRQRIARMKVVLAHLRVLTKEELDRPGCAWPWQLAARVLRGGKLLAWPELWDVVRWYAHNRGYDGNRRWSAAEAEAAAEDTEKEENAKTLMQKCGVATMAETFCAICGIDPLGKKRSVSLPGNKRPKGQNAAFPRATVEGEVRRLLRAHFGKLQKLDATLERALLGRDTRDKDAWQAVPCPELKLPARYQGGLLFGQLVPRFDNRIISECPVSGEKVPSRNCAEFYNFRWAMQLANIRVVRLRERELSPLTVQERQELDALMRHRGSMGVEEFKKQVRQIAGAIRDNLDTMLMDPDAKEALLLDPVQELIQSNELKAFWPVLPERLQKRARGQWRRGKRISIAKLRQQLVELGGETGTFDVEVDRQLNATNTRGRKRDKQITREDLLNRPFFVKRLDQRAAFGRDLLKQAFEEVMAGKHPKEPGGCLFITQEMRDAQLTRKIAEQTNNHLVRHRLLILERLLVDIIKAYAGGDKARIAKITIEVNRDLRAMSGMTAKQKAQDLGLRIANHHHVVKKLEEDDSLMKVLEKRRAKITAGLIRKARVADDLDWTCPYTGQRFEPVDLITKRVDKDHIVPRSDRTSDALDSLVITFSAINKWKGNRTAWQFIEQEQGKPVPDLPNLSIMSLSRYKGFVEGLESFRGHDDDKRRKKRRKELMLLPTYEQKQFVPRDLTQTSQLVRLGAAALRKAFLGCEDQPIVVSLPGAVTGAVRKSWKVLGCLCLAAPDVLEECGEVKTKNEIRDITHLHHALDACVLGLASHLIPNNGRVWELIVKRRWNPTEERELRALRIFDKDSEGRLQIRDLDDSLKEQIRQRLAEKRVVQHVPARMDGLPVDQNMWRLKGWTAEGKAILEKHSRDVATGSRKLDKAKPGADNKDRLVGWQPEDGCGKLKRLKAVLITNENFGVALTKPDPVVVPFLKVWRHLQALKAANGGKMPLVVRAGSMVEVPRGTHKGSWRIFSIKNNSAGVAFALGLRDALTHDRSKQNVLVRQLLKDGMEVVKAGFTGPPCPNTS

SEQ ID NO: 5946 - protein, 1539 aa, unidentified
  REGION 1..1539: note = Description of Unknown: Cas Enzyme sequence
MKKILGLDLGTNSIGWSLIETNFNKKEGSVKGLGSRIIPMSQDILGKFDSGVSISQTAERTGYRGVRRLLQRNLLRRERLHRVLNVLEFLPKHYANAIDFDKHFGQFKEGIEVKLNYRKNYEGKHEFIFIDSFNEMVKEFDVKGQKTKIPYDWTLYYLRKKALTQKITKEELAWIILNFNQKRGYYQLRGEEEEIIEGKTKEFIFLKVKDVIDTNDTIKKTGDKLYNVIFDNGWEYDKQIVKTENWIGKSKEFIVTSTIKKDGEIKRTYKAVDSEQDWIAIKTKTEQNIAKSDKTVGQYIYEMLLENPTQKIRGKLVKTIERKFYKEEFSQILQTQIKYHNELQDRNLYKSCIEELYPRNEAHQNNIKDKGFDYLFSEDIIFYQRPLKSKKSTISGCPYETRKYKKEEVDVITNKKKIEWVTEPLKTIPKSHPLFQEFRLWQFLKNLKIYQKEDEKGNLLDQDITNSLLQTESDWVKLFDFLNEKSKISQIQIIKYFSDLKLIPKQKKDSENYRWNYVEDKEYPCNETKAQLTTRLKKVTNLDVASFLTADMEYKLWHIVYSVTDKNEFERAIENFALKNNLDKESFEKNFKKFPPYKSDYGAYSEKAIKKLLPLMRRGNYWEETAITKNIKSRAQEIIERVNVLNLIENYTSKDLNKALANVVDDAIPRQLVKSFIEFQNQSPLQGLNTYQACYLVYNRHSEAGNIQNWKRPKDIDNYLLEFKQHSLRNPIVEQVVTETLRTVRDIWKYYGKGSERYFDEIHIELGREMKNSADKRKKMSVQISENENTNKRIKDILQELKNDGVSNIKPYSRSQQEILKIYEEGVFQNPEVEFKNINEYDVIKIRKNNSPTKLDINKYKLWLAQGYVSPYTGQIIPLTKLFTHEYEIEHIIPQSRYFDNSMSNKIICECAVNQLKDNQTGYEFIKNHGTQKADLGQGKSVKIYTLEQYESHCNKYFKKNKTKLKNLLSENIPEGFINRQLNDSRYISTLIKGLLSNLVREDNENEATSKHIVPVTGAITSKLKQDWGLNDKWNELITPRFKRLNELTKSNDFGYWDDKINAFRTQVPDDISKGFNKKRIDHRHHALDALVIACCTKKHTNYLGALNAEKENYGLRDVLLKKSKEGHYTKHFLMPWNGFIVQAKNQLEKTIISFKQNTRIINKTNNKTMQWVEKDGQLKKQLVKQTKGDNWAIRKPMHKETVSGKVVLMREKKTEVPFNKALENWKLLVDKTIKNKIKNAVELFDNDLKKVKGYFKKNPLKINGEDVKKVAVYEQVEATATRTTLNDKFTRKQLESITDTGIQKILENHLKNYIDKEGKEQFNLAFSQEGIEELNKNIVFLNNGKKHQPIYKVRIYEVGNKFNVGLIGNKKYKYVEAAKGTNLFFAIYWNKEKQKREYETIPLNEVIEHQKWRATLTKEERNTTPFIQVKNELKGMPVQFLFSLSPNDLVYVPTNDEIENPTTIDFTNLTKEQVERVYKMVSCTGSRMYAIPSNVAKSIQNKFEFTSLNKLEFDLLGNSLKERCWKLKVDRLGNVSKV

SEQ ID NO: 5947 - protein, 977 aa, unidentified
  REGION 1..977: note = Description of Unknown: Cas Enzyme sequence
MKKILGLDLGTTSIGWAYVQEAENNNEKSSIVDLGVRVIPITTDEESDFQKGKSITINADRTLKRSARRNLDRYQLRRSNLIEILIKEGFIKNNSVLTEAGKNTTFDAYEIRAKAVTEKVNKEEFARILLAINKKRGYKSSRKVQSEDEGTAIDGMDVAKKLYEEDHTPGQYVLQLLQGGKKIIPDFYRSDLEKEFLLVWNFQKQFYPETLTDALKEELKNKNKKQTWAILQDPLKLVGIKREGNALKKKIENYKWRIDGLNKKLEPEYLAIVLQEINGQLKNSSGYLGAISDRSKELYFNKLTVGQYLYNQLRENSHARLKNQVFYRQDYLDEFEAIWQQQAKYYPELNNELKSEIRDIIIFYQRRLKSQKHLISKCEFEKYHKVIPKSSPLFQEYKIWQILNNLELFDKKTRTRIKNNELDIETKQMLFDELNIRNSLKANKILALLVNNPKDYELNYTEIEGNRTNAALYSAYLKIAELSDGEEYNFDKMKSDEINEVVSSVFLDVGIDTSILFFDNTLEGEQFDKQPYYQLWHLLYSYEGDNSKTGNKSLIEKLQNKFGFNKEFAKIMAGVVFQNDYGSLSARAIRKILPHLKEGNTYDVACSYAGYNHSHSMKKEENENRALKDKLDLLKKNSLRNPVVEKILNQMINVINAIITDPQLGKPDEVRIELARELKKSAKERQEMTDSINKATRKHEEIRKILQDEFGIQKVTRNDIIKYKLYEELKGNGYKTLYTNTYIPKQKLFSKEFDIEHIIPQARLFDDSFSNKTLAVRSINIEKGNKTAYDYLKETLSEEEFNQYLARIELFYKNGEIKKTKYNKLLMQETDIPDGFIDRDLRDSQYIAKKAKQILEEAIRNVYTTTGKITDRLRQDWQLVNVLKELNLPKYKALGLVDVIEGKNGQPEERIRDWTKRNDHRHHAMDALTIAFTKPAYVQYLNNMNARSNENHKKYHEVYGIEQKYLYRDKNNSVLNV

SEQ ID NO: 5948 - protein, 1007 aa, unidentified
  REGION 1..1007: note = Description of Unknown: Cas Enzyme sequence
MRYSIGLDIGIASVGFAVMELSEDDRPIKIIRIGSRVFDKPENPKDGASLALPRREARGMRRRIRRRSHRKQRIWQLIENEGILSDVQMEALYNGRISDVYELRCNALDCLVTNEEFARILIHLSQRRGFKSNRRKEAKDAEAGKLLKSVEENKRTMEVSGYRTVGEMFCKDTRYSDHKRNKSENYLNTVSRDMVLDEVQKIFSAQRNFGNSFASESIEEKYVKILAGQRSFDDGPGEGSPYAGNLIERMLGNCTFEKAEKRAPKASYSFELSNLLQKINNIRLTDSRGFTFELTQVQRNKLCAYAHNTEKLTYKKIRKLLDIPTTSILNHVRYDKDKLMDEGILAQEDKTKFEYLKAYHAMRLALKGIHPERISSITIPQRNEIARIFSLYKNEDKLKAALDATDLNVLDKEALLNNLGSFSKFGNLSVKALDKIIPHLEAGMTYDKACEAAGYDFKGRDGVHKNLTISLKHLAEETDNTITSPVVRRSLSQCAKVINAIIREMDEVSPVYINIELAREMAKDFTERGKLEKSMLENQARNERVKNQIKEYGKFDPKGLDIVKLKLWEEQGGTCPYSLKPLAIERLFEVGYAEIDHIIPYSKCFNDGYNNKVLVLAAENQQKGDLLPLQYLPGKKRDDFIIWVNNQHLPQNKKRALLKEKLTPEDETGFIQRNLTDTQTISTFMHNYLSNFLQFSNFVTGRKMHVTAVNGAVTAQVRKRLGITKLREDGDTHHAVDAAVIACITQGMIADITAFSKYKETRYKCRTTAIGPDEHFPRPYEDFVRDLERNLKEVFISRAPSRKVTGAAHKETIKGVDASGHLVKKVALTTLKLDSDNEIKDYYHKESDPMLYDALKNQLLKYNNDPKKAFAEPFYKPKGKGVPDRIVKGVKLLEKSTLNVSVHEGKGKADNDSMVRVDVFHVEGKGGGYYLVPIYVADTLKDELPNRAIVAAKPYEQWEVIDDKDFIFSLYPNDLILAKHKKVLSLNLNKNNKSGTLPTKVEKQKNI

SEQ ID NO: 5949 - protein, 1087 aa, unidentified
  REGION 1..1087: note = Description of Unknown: Cas Enzyme sequence
MYRLSLYMGTNSIGWTALKLNSELKPTEILGMGVRIFPDGREAKTGTPLNEARRNARQMRRQRDRKIRRRKAIFNFLVGNNLMPQDREEQLAIAQLDPYTLRAAALERELQPFELARIMMQFSVRRGFKSGRKVQQEENTAEKEGMLGGIQFLESELQGLTLGQWLCKQREKGNSVRFKAKMEKTKIIYSFYPSREMYETEFSAIREKQEKHFKKINWDRLHWLIFFQRPLKRPERGRCQFYTDEDRAYKAFVSAHRFRILDDITKLRYYSDENKEEKIPSELKLKLFNSFNSHKALSFDRIRKVLGEDYTGTFNLEDSKRDKLKGNETSFDFRKPEFFGSIWDELPIQRQDEIIEKLMLEDDEKIICDFLKPFGLTTEQIKKISGYNLPTGTTGLSSRFMIECSEFMLNEWLPYSEAVNRMGLHHSEKEKREIQRSLPYYGKVLVGQVSGAKGEDYDGIDEELYGRIANPTVHIALNQLRKLVNALIRSFGSPDQIIMEIARELKQSKARKDEIFREQAKNQRDNERIRGELKDIHKFMHVSSEDIKKFKLWEELAPEGIARRCLYCGETISAKQLMSGTVEIEHILPYSRTLLNTRDNLTVAHRKCNQAKGNNSPFEAFGDSPKGFDWNRIMEVTAKLPFKKRRKFFPDAMVRFHEDEGGFLNKQLTDTAYLAKASKDYLSAICDRNSIWVSPGKLTAMLRGLWGFNTLLNRGDDTWFKNRSDHRHHAVDALVIGLCDRNIISDIARFNSGKGYRKLNAPKCPIERLDIEKKLKPLIVSYKQDRGVEGKLYAETALAKHSYVEQINPADLKEDEINRIVPKGIQSDISLLIQKEGFRKAKAIFQKKYNHINVFRDKWVTRAPLESLSERDIPNVADPLIRDEIQKFLESHPLEPGQKLQDVLKQFSEKKKIYSIRYFPKDQVPVCITDNENKAYMPGDYYRVDIWRVPQQKGKYKYDGVFISRPEAMKQKKHGKRSASLRKPHPAAKLIMSLCKNDVIVLSTETEQEFCRVAGFATTRNKIDIRPLYASDTIAAWKKDTNINFTTAFWPSEIEGQYFKSINVLFNEYEVKLVKITVDGRPIYRNK

SEQ ID NO: 5950 - protein, 947 aa, unidentified
  REGION 1..947: note = Description of Unknown: Cas Enzyme sequence
KGQQTENTAEKEGMLGGIQFLESELQGRTLGQWLCEQRGKGNSVRFKAKTEKTKIIYSFYPSREMYETEFSVIREKQEKHFKKINWERLHWLIFFQRPLKRPERGRCQFFTEEERGYRAFVSAHRFRILQDINNLRYYNDENKEEEIPSELKMKLFQTLNSQKSMTFDKIRRLLGENYTGTFNLEDSKRDKLKGNETSVDFRKPELFGPDWDDLDIRKQDEIIEKLMIEDDESAILDFLKPFGLSMEQMKKMSGYNLPVGTTMLSSRFMIECSEFMLKELLPYYEAVKQMGLHHSKKEKRELQRSLPYYGKILVGQVSGAKGENYNGIDEERYGRIANPTVHIALNQLRKLINALVRRFGNPDQIIMEVTRELKLSKARKDEIFREQAKNQRDNERIKGELKDIGLLQVSSEDIKKYKLWEELAPEGIARRCPYCGKTISASQLMSGAVEIEHILPYSRTLLNTRDNLTVAHRECNQAKKNQSPFEAFGKSPQGFDWNHIMEITAKLPFKKRRKFFPDAMVQFQEEEGGFLNKQITDTAYLAKASKEYLSVICDKDSIWVSPGKLTAMLRGLWGFNTLLNRGHDTWFKNRSDHRHHALDALVIGLCDRQIIADAARINSGRGYREIDAPSCPIKRQDIEDMLKPLIVSYKPDHGKGGKLYEDTALAKHSYLEQVNPADLKENEIFRIVPKTIQTEIANLIQKEGFRKAKASIQHRYEYLRIFRDKWVTRKPLESLSERDIPNISDPTIRSELIEYINVNPVQSGQKLQDILKQFSEKKKIYSIRYFHKDQMPVSIGSCDNKAYKLADYYRVDIWRIPQQKGKYKYDGVFISRPEAMQQQLKKRHGHLAAKKILRLCKNDIILLSTETVQEFCRIAGFSATQNKIDIRPLYASDTIKAWKNNTNINFTTAFWPPEIEGQNFKSINVLFNEYEVKLVKITVDGRPIYRS

SEQ ID NO: 5951 - protein, 1047 aa, unidentified
  REGION 1..1047: note = Description of Unknown: Cas Enzyme sequence
MKKILGLDLGTNSIGWALVNEAEHNEEKSSIIRLGVRVNPLTVDEQQNFEKGRSITTNADRTLKRSMRRNLQRYKLRRENLIEILKEHGFIFDDTILSENGNRTTFETYRLRAKAATEEISLGELARVLLMINKKRGYKSSRKAKGTDEGTLIDGMEVAKKLYNEDLTPGQLCLQLLQAGKKYLPDFYRSDLHAEFERIWTKQMEFYPEILTDELKESLRGKNEKATWAICKEPFNIVGVPRTTKGEELKKENFLWRSKVLSEKMDLETLAIVLQKINSQINGSSGYLGAISDRSKELYFNKQTVGQYQMAVLAENPNASLRNMVFYRQDYLDEFNTIWETQAKFHKELTEELKNEIRDVVIFYQRRLKSQKGLIGFCEFESRKIEIEIDGKKKIKTVGSRVIPRSSPLFQEFKIWQILNNLEVSVKGRKTKKQKGTSLFAEQEDLLEICGKRELYPEEKELLATELSIKKELNKEEILKLLFENDKELDLNFKSIQGNITQATLFEAYLKIIEQSGHDIDVGKKTATDIVKTIENVFNAFGYNTDILYFDADKEFDQQPMYQLWHLLYSFEGDNSVTGNENLINKIMELCGFGKEYAGILANVVFQNDYGSLSAKAIRKILPHLKEGFSYGGRKDRPNEPSACFLAGYGKHSKSSETREEIENKILKNKLEILPKNSLRNPVVEKILNQMINVINKIIDAYGKPDEIRIELARELKKNAKEREELTQAISKTTADHEKIREILKGSEFGLSYISRNDIIRYKLYEELKDNGYKTLYSNTYISPAALFSGDFDVEHIIPQSRLFDDSFSNKTLELRSINIEKGNQTAYDYVKEHDGKIIEYNGQKTKIDFQQYENNIDKLFKEKKSKLKKLKMQEKEIPDGFIERDIRDTQYIAKYAKTMLSNLVKRVVSTTGSITDALREDWQLIDVMKELNWEKYDALGLTYYEENREGKPLKRIKDWTKRNDHRHHAMDALTVAFTKDAFIQLFNNMNASLNPNSNEYALKNLHLENGRVKPPIPLNEFRAEAKKHLENTLISIKAKNKVVTQN

SEQ ID NO: 5952 - protein, 1091 aa, unidentified
  REGION 1..1091: note = Description of Unknown: Cas Enzyme sequence
MELRYTLGLDIGIASVGWAVLGKDHIVDIGVRCFDKAETAKEGDPLNLTRRMARLTRHRLAQRAWRLKKLTRELKRSGLIDNKHFFLPSNPVAVSPWRLRVEALDRQLTREEWARVIYHLCKHRGFHWVSRAEEKQAEADAKGEGGRVKQGLAGTQRLMKEKRYRSIAEMVLAEFPEAQRNKQGEYTKALSRVLLGEELKQLFEAQRRHGNPSAGSGLEALVLGNGDRKSGLFWQQNKPLSGAALLNMLGKCTLDKFEYRAPKASFTAERHVWLTRLNNLRIVCAGETRPLSEAERNAALPLPYQQTSDFTYKQLGNALVKSGLLPKDGFRFSGLAYPSDKQKTEGKAKDPESATLIKLPAWQELRSTLKKAGLETEWEGMAGAASCGRPELLDDIARVLSVYKDDDEARAELSKLPLPNRDRMIEALLDVRFDKFHALSLKALYKIVPFMEEGQRYDEACASAGYHHSHLFKAGEGQCRTLPPFYAGRDTNGRMLFSEDADVPRNPVVLRALNQARKVVNAIVRRHGSPMAIHIEMARDLSRPLDERNKIKKEQEEYQVRNERDKALFIEQFGRIPKGGEFEKFRLYREQLGKCPYSQEAIDLARLLEPGYVEVDHALPYSRSFDDGKNNKVLALARENRNKGNRTPYEYLGGAENSPRWQQFVSFVESTKAYRLAKRSRLLRKEFGDKEAQEFRERNLNDTRYICKFFKNHVERYLKLAEGSENKRCVVLSGQTTAFLRARWGINKIRSESDRHHALDAAVVAACSHGMVKRLADYSRSKELAQVHEGFVDTTTGEIVDPVMFQQLKQHFPEPWEHFRHELEARVKLDDPQALRAEMIRLGTYDEYELDALKPLLVSRAVQKRGSGAVHEETIRSAKLIHKNQSYVKTPVEKLKLATLKNVVGASDPRNKALMDLLAKRLEEFDDDGKKAFSEIIRKPANSGQGPVVKTVKMLTTQKNGMRVRGGLADLGEMLAVGVFRAGKHYFIEPEYLAIPEVRITSIAMPPDAEFQFYLRKNDYVEIELGGQIYRGYFVMYESDGRLTLRAHDQPKPDKEYFRKSVAKSQQIRKFHIDILGNIYLAKPEPRRGLA

SEQ ID NO: 5953 - protein, 1080 aa, unidentified
  REGION 1..1080: note = Description of Unknown: Cas Enzyme sequence
MKPTIISGTGNVWSFDIGKGSLGEAVRAGMDFPHVESWLIPEDFARRGPATTAGTPASRYRAWRTREAHLARENRLREVLADAGVEVLQPKQVRRVGKKWEVVHPGDERLTREFPEKGDNTCYTSCLLRIKLLRGEKLEGWQIHKALHSAIQRRGYDADLPWKRKASRKNEENEKEEGETKQRASNFRAQLEAMAPGQAQFHFPCFFDAWRLGLWNSEKPAEMLLRIDHTAKPARNRDGSDIPPLVAPRESVIAEVHALVVAAAKQFPKLAGQADYILHGPGGKAYASYFPQLRKEHDLHEGGTNDWLGILGQKVPRFDNRIIAKCALIPRFNVCKAEIRYEDEEKTKPYPDSLLVSEVVFLLKLKNMQVTPDDKAIRKLTVDEIRAIFNDPERDAEKFNFTESQWKKKCVALGVQPAPGHEEVKEPKTGGRSRFCRPALKILRELILSGETPQTAHARELAKLAGNANPQKGLVERDLDFLKRMGDSWENLYIPDQQHDALLRLREEKGRDVAIRALIGSINDPIVRHRLETFWKRLIALDDKFGEPAEVVLEFVREDFLGKDAKIKLQKFQNDREKARKEAREQAGKVGATSRSAALKYELLKQQGGICLYTGEGLGVTSLDDLEIEHIVPRRQGGPDALVNYVVTKRATNEIKGDRTPHQWLASNGAATWDAYVKRVEKCEKELRRKKVLLLTSPEAPELVSRYTALAETAWIAKLSQTLVALYFGWPINSQTGERRITIISGGVTGRVRRQYRLNSLLAPCPAGEDPREWEEKCDKNRSDKRHHALDAMVLSFLPAWTRDKSKTGFFRLPDDVTRETFAKAIGKVIARNLAFEKPALEATIFGQRTIEGKSYGVSRKPLASIAVNETLGGKRSIRPVDKIDTSVIVDRAIRRDVDAFLQAHPNLDLETWDAWCGTYRRGGKGPHVRKVTITITKPDILDEYRDLSKDGSGQLRRAGKNKGYFVTNEPAPSKKDPDKRKFKVRPVYAHASVFEVSKKLKESGVKIIEYFQPNILVRIEKSIAHDKTPLSPGIYRLKSMRADGYVYVVSSDWNEAAPMSLEKFMAAGFCRADKQKEIS

SEQ ID NO: 5954 - protein, 1449 aa, unidentified
  REGION 1..1449: note = Description of Unknown: Cas Enzyme sequence
MKKILGLDLGTNSIGWALVEHDFEAKNGKILGMGSRIIPMDAAIMGDFDKGNSVSQTAERTGYRGHRRLYERHHQRRERLHRVLNVLGFLPKHYANQIDFEKHLGQFLDEKEPKLVWKQNENGKFEFLFQKSFNEMVEDFKANGQEIKIPYDWTIYYLRKKALTKKIEKEELAWIILNFNQKRGYYQLRGEEEEKTNVKEFVQSLKVISIEKGETDKKNDKKTWYKMTLENGWEYYATFTTEPNWLNAEKEFLVTEEYDDDGSIKIVKDKKTDTTGKEKRRITPLPSFDEINLMSKEQQDKIYKKIKARTEITISNTGKTVGTYIYETLLQKPTQKIRGKLVRTIERKFYKDELIAILKKQIELQPELFTEDLYNDCIRELYRNNEAQQLVLSKRDFVHLFVNDIIFYQRPLRSQKSSIGNCSLEYRKHKNKDGNEITEYLKAIPKSNPLYQEFRLWQWLFNLKIYKKDNDADVTEQFITGVTDKENLFDFLNNRKEIDQKALLKYLKLTDKTYRWNYVEDKTYPCNETGTQIRTRLAKVENFSTDFLTSEFEQKLWHIIYSVTDKNEFEKALKTFANKHNLDEISFVENFKKFPPFKSEYGSFSEKAIKKLLPLMRLGKYWNENDITDVVKNRANSIKNRLEDVSFDEKEIEKISDDDIPKQVLKSFLNVSDFMQGLKLYQASYIVYGRHSEAENTKKWQTIADLEKYLEEFKQHSLRNPIVEQVITETLRVVRDIWKKYGDFSEIHIELGREMKNTADERKRLTNIVTENENTNLRIKALIMELKEYSDIENVRPYSPIQQEILKIYEDGVINSNIEIPEDIVKISKTAQPSKSELQRYKLWLEQKYRSPYTGQIIPLGKLFTEEYQIEHIIPKSRYFDDSLSNKVICEAAVNQLKDKFLGLEFIKNYHGQVVDLGFGKSVKIFEEDAYLDFVKEHYAKNRSKRAKLLLEEIPEKMIERQMNDTRYISKFISQLLSNIVRADKDDDGVNSKNILPGNGKITTTLKQDWGLNDVWNNLILPRFERLNTLTNSTAFTAWNKQYQKFLPTVPLELSKGFQKKRIDHRHHAMDALVIACATCDHINLLNNQSAKSDISRYDLQNKLRNKEKETYFDKTENKQVTKDVFKEFKKPWDNFVVDAKEGLEKIVISFKQNLRVINKATNKYEKIKDGKKVEVKQEGTNWAIRKPLHKETVYAKVDLPHIKVPKGKFITAGRTNLDTSFDLKKIETITDTGIQKILKNYLAAKGNNPELAFSPEGIEEMNNNILIYNAVKNHKPILKVRTYEIGSRFALGTKGNKKDKYVEAAKGTNLFFAIYADENGNRSYETNPLNIVIERLKQGLKEVPEMNEKGNYLLFHLSPNDLVYVPTEDEKENIRAIDWKNLDKEQIKRIYKIVSFTSSRLYAIPVNVSTSIVNKVEFTQLNKIEFIDEKKYCIKLNVDRLGNIKPTF

SEQ ID NO: 5955 - protein, 1184 aa, unidentified
  REGION 1..1184: note = Description of Unknown: Cas Enzyme sequence
MKKILGLDLGTTSIGWAMVNEAENSDEKSSIIQLGSRIINYDNFVSRETGKEIKGDPADAFRAGKGVSPNAARTKSRTARRNLQRYKLRRENLIEILKEHGFISDETILSENGNHTTFETYRLRAKAAMEEISLEEFARVLLMINKKRGYKSSRKAKGQDEGQLIDGMEVAKMLYNENLTPGQLCLQLSKAGKKYLPDFYRSDLQTEFDKIWAKQQEFYPEILTNELKEELRGKKRDVVYAICVKNFVWKEKHTEWDSKEARNIEVEKEHTIVGFKRTGNTNDQKTENLEWRVKGLTEKLKLEELVVVFQEINTKINASSGYLGAISDRSKELYFNQQTVGQYQMSVLAENPNASLRNMVFYRQDYLDEFNTIWETQAKFRRGEPACSPFTEELKNEIRDVIIFYQRRLKSQKGLISFCEFESRQIEVEIDGKKKTKTVGSRVIPRSSPLFQEFKIWQILNNLEVSAKGVKTKRKKKDTIPSLFAEQEDPFEIYGRRELNQEEKEILAKELAIKEKLSKTDILKLLFDNPQDLDLNFPIVQGNLTQATLFESYKTIIERTGHELDLKKSTAEILKNVEEIFVGLGYNTDILQFNSDAGNLDNEPMYKLWHLLYSFEGDNSPTGDKNLINKISELYGFEKEYATILANVVFQDDYGSLSAKAIRKILPHLKEGNKYDVAVEYAGYGRHSKSSETKEEIENKILKDKLEILPKNSLRNPVVEKILNQMINVINTIIDTHGKPDEIRIELARELKKNAKEREELTQAISKTTADHEKIREILKSKDFGLSYVSRNDIIRYKLYEELKDNGYHTLYSNTYISPATLFSGDFDIEHIIPQSRLFDDSFSNKTLELRSINIKKGNKTAYDFVKEEYGEDGLEDYLNRIETLFKEKKNKLRKLKMQEKDIPEDFINRDLGNTQYIAKQALSMLHEICKRVVATTGSITDTLREDWQLIDVMKELNWEKYDVLGLTYYEENREGKPLKRIKDWTKRNDHRHHAMDALTVAFTKDAFIQYFNFMNAKDDTEFSYTKEKWNKIFPYLPMPDKKTNIYAIKNKYFDNGKALPPMPLTEFRAEAKKHLENTLISIKAKNKVVTQNINTTSKQGGKNKKNQQTPRGQLHLETVYGSQKQIVVKEEKIGTTFDEAKISTVSNPTYREALLKRLQENDNDPKKAFGGKNTPAKKPIFIN

SEQ ID NO: 5956 - protein, 1221 aa, unidentified
  REGION 1..1221: note = Description of Unknown: Cas Enzyme sequence
ILKVDESLDLQVNIRTTKKGEETVTFKLPNKTSWRKKMENLEQKLTELSKEKGREVYLSEYFLSVLKDNKWAKIRNNVVLRSRYQSEFDAIWKEQCKHYSFLNDCSQEKLSQLLNFIFPGPKETQEKYRQIGLEKGLYHIIRNQIIYYQRELKDQSSLISECRFEKGEKAVAKSHPVFQEYKIWEQINKLIINTKTENGTTRKGEIKYKYIDRPIPAPLKEWIFDELQEKKEMSFGVIFNKLKKEYNLKEGTEFLNGMNPKAKLKGDETKLMLKKSLGENLWNQLGLSDKNRQIELWDILYNAKGNEYDIDSERTSKVLDFLKKYSDEISNPEQIAILISKIKFSRNYASQSLKAINKILPLVRCGKYFDNELSETLNKKIIYLLNENVSDPFEKAAQEYLENNLDVLVYGGIMNAYATILVYDKHTAKEYSKNEQIDNYKQITRLKQGELRNPLVEQLISETLMVVKDIWKEFKEKPAEIRIELARELKNNADRRAKMYKTNNDNQKANDEVKNLLIELKQEITLANIEKYKIWASQENLEEEYVKRYKDPSKSEIEKMKLWREQGHISPYTKQTIPLSELFDRECYDIDHIIPQSRYFDDSFTNKVICEKSVNKEKSNRTAMEYFETGSSIPSVLSKEDFINHVNKMFQGLKRKNLLATKVPEDPVARQMKETQYISVKVKEELNKIVGNENVKTTTGGVTDYLRNQWGLTDKFKQILKSRYENAQPLLAESEYEKYAVSIKKKQEEYKKLNIPFTDIVLSKENFIESFNNNFLQKKNNKLIIKDWSKRIDHRHHAIDALTIACTEPAYIKRLNDLNKELQTWLDNKKKDILPNFEGTPSELLDEILNLDETKREEIFKQIEKFKSIDLPWKGFPEDAEKAIQQIVVSQKPKDKLLIQNEEKKNNNGNIIKTDKLQIKIRGQLHEGTLYGKSQGVESYRIPLLKLAGKDFATEKTIDKITSEYLKIAIKQHLNDFDNKKEEAFSVEGILALNKKLAEKKNKKGKLAPHTPISSIKVFYRDPAKIKKKKGQEEIEEALQRLDRKKAYNETLLVKTGGNYLFAVMEKNGERIFDLITFFDATNLLKEAFNKASDKKAFNKEHFFKSYFEEKNGAKLLFTLKQGDVVYMPKENEEVITNPQSPLYNDFWNDKVARSENIYYVTKYSGSEIYFIKHSVANPIINKKEFGSQNAYQNIDGLSIKKYCIKLNIDRLGNITPQLTN

SEQ ID NO: 5957 - protein, 1054 aa, unidentified
  REGION 1..1054: note = Description of Unknown: Cas Enzyme sequence
AIYHLAQRRGFKSGRKDQPAEGEENSSAKAKELKGLKKEIDDLTGTLTKSGLTLGQHFFNEIKAGRKVRKQHTGRVEHYEKEWAKIATIQGLEKALSDKIARALFWQRPLREQSHLVGKCPLEPKRNRAQIGHPDFEEFRALSFVNNIRLVDGEEKTKLNDEQRAVAAECFIRKSPFEFKSIRTDLGRAFKELKNATFNYEDTVSLSPSKITAALMDVLPDGANRQTAFDALTFFDDNEKLKNWAQDKLGLSSEAADKFVKIRIPEGRAGYSLHAIRRINRFLRKGVELSEAIFLAKLPEVIPDFDAKEGDIIAKVHEHNELYRENKRAAYHDSSTENRIGVLSLEKRLGSWLEEDYGIGTKVFDTLYFRDPKADSSYASVKPGGTVLPPVNLGMIRNPLVQRSMTMLRRLVNELRRNGTIDKDTRIHIELARDVNSRNDRMAIQEWQKQNEKKRDDAKAKLEELGIHPTDTDILKYVLAQEQDWKCPYTGKQISLGGSGAPFPGFDIEHTIPRSRSGDDSQANKTLCDIDFNRNIKKGLMPSELPDHDDILIRLRPWKKNIDELKKLKEKQAKIAKGVSKENPEARSKARQKLLVSKLDLKYWEDKYYRFTKKPDDVTPSFISRQLVDTGIMTRHAVALLKTVYPDVYPVNGQAVAFARKLWKVQAEDVVKDRSDHTHHAKDALVIAALSRDRFQKICAELKTDEEKKNPKFTVAPPFDGFAQAVYDATASILVKHVTRHNELKQTRRKSIRLSSPKKTANGIITSAPTGGNTVRGQLHNETFYGKIRKPGETETVCVIRKELTSANFPQASALEKIIDPVVRKAIQDEVALRGDDFKKALDAGGFKMPGERGAPIKKVRVEASVTNPKELRQHIATPSELPYKKPYWVQAASGSNFRLAVYDGRNASGENTGLLFIAENILDFAQGKIVSPSNPLIGYILPGAMAIAYQHDGEWNEQGFNVSKRLYDVVKFTESNSTMTLRFHKEARRMKDLSSELILSGKKGAGQSSVDFEKPHELLLLNLKKAWSSFLFEGIHFEMGLDGTITFKETISC

SEQ ID NO: 5958 - protein, 1149 aa, unidentified
  REGION 1..1149: note = Description of Unknown: Cas Enzyme sequence
SIEINRFKLGRALYHIAQRRGVKSSKGETLKEQEETKKENLDLENIDITTLKKSEEKKSKDLFEFQKENNLSTIGCAFYQLEKEGIRIRGSIYQAVRSQYRDEIKYIFEFQKQLDTNSDFFRRIYSDKKEGSIFYKRPLRSQKGLVGKCTLEPSKYRCPISHPEFEKFRAFAFINNIQYRKSIDAEWENMSADQKLRLYNDKFLRTKNNFTFSEIREWLEKDIFQKLPPYHEQKSKSLINYKDKTNVSGCPISGRLKNLLGNNWESFNQKNKENEQINYSMEDIWHICFSYDDDERVAEFAKNKLGFDDKQTKSFINLWVAIPQGYSMLSLKAIENINKFLVPDINKIGYNGLIYTDAALLAKIPEILGKDLWAKNEQLFLKEIGNLTIKNRSEKRILNIANSLIANYKTLEYDEQFAYKNTDYKLDNSDLKDIEKYTIEAFGSKTWETIENKDEIINEVKEKYQQFFATSKRDYFKLPKLGDTIKQFLQDKFNFLDEKKLNKLYHPSMIEFYKSAKEKQIEYNGTLLSKKLLESPIIGAFKNPMAMRTLHELRKLVNYLLLEDKIEEDTRIVVETARDLNDANMRWAIETYQRERQKENEEIFKIIKELRGEEINDDDIDKVRLLIEQDPDYMFDKARYEAELETEDNSNKKKKKKTSGKTIDFQYKKDITKYKLWLEQGMKCIYTGDFINLTTLFSENNLVEIEHTIPRSLSFDDSLANKTICFTNFNRYIKKNQIPTQLSNYEEIKLRLEPWEEKVEQLKNNVEFWKQKSKQLQTKNKKDDAIRQRHLWQMELDYWQNKLSRFTMTEVTSGFKSSQLNDTRLITKYAYHYLKSVFNHVEVQKGEITSSFRKMLGIQSLNEKKDRSKHSHHAIDAAILSCIPVAAKRDRMLELFYKKEEEEKLNGQGTELFNQLGNELEKEKLSCNIGDISNLTQHIEENILINHVSKDQTLTPAKRKARKRGKEVFVKNENGELVTKWIQGDCIRGQLHKDSLFGAIKYPVIKDGKLKKDEHGRFVYPKDNEGKDVFLMVIRVPITSFASEKDFEKIIDPNVKKSIQVTIQQRITNGKTFKEAINEPIWLLDKNNQEKKVDKKGKAISPIRHIRCKVAAGKGFFTKDKAIQIKEQTYKSTKNLFHLQDREQKKHYY

SEQ ID NO: 5959 - protein, 972 aa, unidentified
  REGION 1..972: note = Description of Unknown: Cas Enzyme sequence
KDKNFKFEEIRRFLDRKFGKFKKYNYPLDKKQKNDLEKYTDGVYDTSVSGMPICKGLIGVLGEQALHALNEIEFFNNSNAPKIVEQYSIYDLWHILFAFDENTTKEKNFLEKFAVEKLKIENKKDKNGKEYNPFAKLKTNIMQGYADLSLKAMCKIIPFLKNGYLYNEAVILAKMPELFSEKWEESKEKIFNAIKEANKFYEWNKIVVDITNNLIDKWKGEKEEEQIPHKKNIEHLLDNYDLNSIEETSEGYFGEKSWEKRQDKNEIINAVKEKYQEFCNDETRSYRKLITLTEIFDEKLKEQNIIIGREQLYHHSNIENKYLKKCKIDTETEKRILPKAENKFGNKVDILPQAIIDSIKNPMFNKSMSILRKLINELIKNDEIDKETEIVIELARELNDNNKRIAIERYQKERENNREKYREFLKEFNTKEQRNLNIEESIPTFELWTEQIFEETEDENGNKVTNQNRHEILREKEAIKRYELWAEQKGQCLYTGKMISLSQLFSNQIDIEHTIPRSILPDNTMANQTICYAWYNRDKKKNQLPTQCANFYEDADTWGTRIELRLDNWRKIRDNFKKQYEDRLKAKGNEDENTKNKRIQDKHYYKLHFDYWNDKLERFEATEVKDSWARRQLVDTQMVSKYAREFLKTYFMKVSVQKGIVTSDFRKIFGFQDEDEIKSRNKHTHHAIDALVLTLIPTNSSHRERILKEYYKAKEENREDDIKPLKNNELWQNFNVQKLITEIENSTLIFNYEKDKILKQTNKIVRKRGIKQYLKDKNGKYILDKNNNKILLKAKGDTVRSELFAQTYLGKIKDVERFDDGQPKRENGNWKYKQGKDEFVYVVRKSINDVLSKIDDIIDPNIRELIRKQKDNAVIKDFQGNVIRHVRIRVKAGKEVKERINYRSKHEYKNKFYSESGSIPYAVFLQKHSKNGVERKMIPVRSFEIAKVYKKAGKFDIENFIRENYSEFNDCN

SEQ ID NO: 5960 - protein, 904 aa, unidentified
  REGION 1..904: note = Description of Unknown: Cas Enzyme sequence
FAYKNTDYKLDGLDLKEIENYTKEAFGAITWETTENKNEILNDVKEKYQQFFATSKRDYFKLPKLGDTIKQFLSDNFTFLSEKQLDKLYHPSMVEFYKPAKEKQVEYKGIKLSKKLLESPVIGAFKNPMAMRTLHELRRLVNSLLLEGKIDEDTRIVVETARDLNDANMRWAIEAYQREKEAENKSIKEAIKELRGEERDGDDIDKARLLIEQNPDYMFDKVRYDIEKEQEDENKKKKKVSGKTKDFQYKKDVTKYKLWLEQGMRCIYTGKIISISNLFDENATDFEHTIPRSISFDNSLANLTVCDAHYNRHIKKNQIPTQLPNYDKSATINGVEYSAIKPRLQAWEEKVEQLKNNVDFWKQKSKQAQTKDDKDSAIRQRHLWQMELDYWQNKLDRFTMTEVTSGFKSSQLNDTRLITKYAYHYLKSVFSKVEVQKGSITADFRKMLGIQSADEKKNRDKHSHHAIDAAILSCIPVAAKRDRMLELFYKIQENKKLNLPTDYEERELEKEKRSCNIGNISNLNQYIEENILVNHVSKDQTLTPAKRKTRKRGKEVFVKNENGELITKWIQGDSIRGQLHKDSLFGAIKYPVIKDEKLEKDEQGYFVYPKDKDGKEVFLMVMRVPIASFASEKDFEKIIDPNVKKSIQIAVQQRITNGKTFKEAINEPIWLLDKNNQEKKVDKKGKAISPVRHVRCKVAAGKGFFTKDKAIQIKEQTYKSTKKLFHLQDREHKKYYYAQNDGNYLCLLYEFENQKKKQTERKFRLINFFEIAELKLKNADDILNESYFRTIKEKDKNFELKAIIKVGTRILMKKDKEECLQELEPKELNKRLFVVYKLNTTSSDNIYLQNHIEARKDADIKDSYSEFNSTEYQARLQLVANNLNCLIENIDFEINLDGTINFLN

SEQ ID NO: 5961 - protein, 909 aa, unidentified
  REGION 1..909: note = Description of Unknown: Cas Enzyme sequence
DGKEFFVGPKVAPKSSPLFQLAKIWENVNNIKLSSKRGETVELILEEKQKVFEYLNNNEKLTATDLFKILGKSKNEFTVTKQLEKGIQGNITKNAIVKIFGENETYKKLLQLDLKIIETDKFGYLFSKKTGEVLGEKPVKYIDAKVENEPFYQLWHTIYSINDTQECSNALQKRFGIDSETADKLAAIDFSKFAFGNKSVKVIRKILPYLMEGNMYSEAMSYAGYEHSNSLTKEENIGRKLLDKLKPIEKNSLRQPIVEKILNQMVNVVNAIIEKYGKLDEVRIELARELKQSKEERNETDKAMSKRQRENEVIANRLAEYGLRATRNNIIKWRLFEEIDNQDKKLNAICVYCGQPISLTEAIKGTEVDVEHIIPKSKLFDDSQSNKTLAHRRCNSTKGDMTAYDFMKTKSQQEFDAYVERVNSLFSNKIIGKAKRDKLLMSEDKIPDNFIDRQLRESQHIAKKAREILQTICHNVWSTSGTVTAELRHLWGWDDVTMNLQMPKYKELGLTEMIEWESELGRNKHSKEIIKDWTKRDDHRHHALDALTIACTKQGFIQRFNTLNASKTREDMQREVEQRSEQYKEKLSLLEKFIVSQTPLSVSEVENAVSQILISFKSGKKVAVFGKRKVGKRGNKKVVQSGIIVPRGSLSEESVYGKIKTIEKNKPVKYLFENPHLIFKPYIKNLVEQRLGKFENDAKKSLASLKKEPIYLNKEKSKVLEYGTCFKGEFVIKYTVDTNFNKVDKVIDGKIKEILQNRQSKFGGKPKDAFKDVQKDEKSLKWYEDEGLERPIHSVRCFTGLSAVVPVKKDESGNEIGFVKPGNNHHIAIYFDKDGNPKEHICTFWHAVERKKHGMPIIIKNTNEVWDKILEQSENTYSESFLEQLPKPNLEMVLSMQQNEMFVLGMTEE

SEQ ID NO: 5962 - protein, 1049 aa, unidentified
  REGION 1..1049: note = Description of Unknown: Cas Enzyme sequence
MERYALGLDLGPTSIGWAAIKLDKRGKPIGFADLHDGDSLFPAIGVRIFPLTVENYGQGKMREAPKNKKRRESRSRRRILRRKRARRMKLIQLLQSKKMIPIESSKLDTIQKKNPYELRAKAISEKIDLYDLGRIFLHFAKRRGFKSNRKKPEKPEESGKIKDGIKKLKSELGYNTLGEFWHKKLSKKPNEGIRNKNSYKWIAERELYRDELAHIWRTQQKFYTNILTHQLHNEISKILFDQIPFELSKRKKRKVIGTCKLIKGKLRCPLSDRRAQEFRFLQKVNDLRITRRGREIESWKKNKPDLIKKLSISKEVNFKQIRKILGLAETDRINFEYEVNDKLIGNEIDNKLKIIFGEKAWLKLEEEQKEGIWKEILNYFNKEEITTQQIEDKIKSNFVLSVLNGKSIENIELPKGYISYSKEALEKILPFMREGKDLYTAIQEAGFKQSWQSLKKLPLPDKNHGFSINNPTVGAVMFQLRKIVNSLISELGKPERIVVEFARDLKSSKERRAEIIKEQAGNKKEREKAKKAIQEYHNWTEDAEVSPIDIDKYRLWEEQNHYCPYRGCLIPINKLLSRETEIDHILPRSLSLDNSLNNKVVCFADENQDKGQRTPFDWLGENSERWTRVLHVIDHWNPERKRNIKKSKVNIPSGEQVEKIKPNKQKWERFFVTSDQIAEEYTPNHLLNDTSYISREVRNYLKRLYSTEKAESSVKTTKGGITAELRRWWDLNRILGSANNEKSRTDLCHHAIDAIVIAVTSASMIKNITNCLKKAWPKRRPKEIYVDRPWEGFELNIEAVIDYINISHRVQRGLKGGLHKETNFWKEENGPYAGKFITRKPLDGKFTKNFAEHICDETAKKLVFERMVKNDFDPKKAFAEPIYLKNNAGNDVPIKKIRVWTESSNMVPIRENIYVEPGSNHHVEIFEYTEGEHKGKRDGQVITMFEAVRRNRKGEPVIKRDHGPDKKFIFSLAQNEMFIIKLDGEKVLHRVQKITQSGKSISIILRSHTYGGKLSDYDKPPTIQRKSPNTLKGRKVTIDPLGRIRWAND

SEQ ID NO: 5963 - protein, 1234 aa, unidentified
  REGION 1..1234: note = Description of Unknown: Cas Enzyme sequence
MKRILGLDLGSASIGWAVIEEKDDTTKIVALGSRIIPYDGTEGQDFAKGTGESRNALRTKARTARKGYDRYQLRRQFLVDTLVRNDMMPDENLKKMPKMQLWELRNKAITENITKQEFGRLLLWLNQKRGYKSSRSDTNLGKKDTEYVVAVKSRYEMIQEKNLTIGQYFYNELKTNEYFRVKENIFPREAYIEEFDKICAKQKQYLGLTDDLIGKIRNEIIYYQRPLKSQKGLVSVCEFEGFLTKNKEGKEFFVGPRVAPKSSPLFQIAKIWENVNNIKLSSKRGETIELTLEEKQKVFKHLDNNEKLTSTDLFKILGIRKNEFTVTKQLEKGIQGNITKNTIINILGNNEAYQRLLKFDLNIVVTDKISYLYSKQTGEVFDEIPVRCIDAGVENEPFYQLWHTIYSINDTQECSNALQKRFGIDAETADKLAAIDFRKFGFGNKSAKAIRKSLPYLIEGHKYSDAMSYAGYDHSNSLTKDENFRRKLRDKLEPIKKNSLRQPIVEKILNQMVNVVNAIIENHGKPDEIRIELARELKQSKEERNETDKAMNKRQRENETIEKRLAEYGLRATRNNIIKWRLYEEIDNQDKKLNAICVYCGQPISITEAIKGSEVDVEHIIPKSKLFDDSQSNKTLAHRRCNANKGDTTAYDFMKSKSPREFEAYVERVNSLFANKIIGKAKRDKLLMSEDKIPDNFIDRQLRESQYIAKKAREILQTICHEVWSTSGTVTSELRHLWGWDDVTMNLQMPKYKELGLTETVEWESEHGKNKHSKEVIKGWTKRDDHRHHAIDALTIACTKQGFIQRFNTLNASKTREDMQKEIEQRSEEYKEKLSLLEKYIISQCPIHVSDVEKAVANILISFKSGKKVAVLGKRKVGKRGNKKVVQEKIIVPRGELHEAYIYGKIKTIEKNKPVKYLFENPHLIFKPHIKKMVEQRLEEFENDTKKALISVKKEPIYLDKEKSKVLEYGTCFKEEFVKKYDVDINFNKVDKVIDEKIKEILQNRLSKFGGKPKEAFKDVQKDEKSLKWYEDEGLERPILSVRCFTGLSAVVPVKKDESGCEIGFVKPGNNHHIAIYTDKEGKKSECVCSFWHAAERKKYGIPVIIKNTNEVWDIIFKQPDNTYPQSFLEQLPNPNLEMVLSIQQNEMIVLGMNEEDFKVAVECGDYKQISNGLYRVQKIGSYDYTFRHHLETQLIDDDNSYKSKRVYRIRSFKTLFSLNPFKVKIDCLGSIKL

SEQ ID NO: 5964 - protein, 1447 aa, unidentified
  REGION 1..1447: note = Description of Unknown: Cas Enzyme sequence
MKKILGLDLGTNSIGWALIESNAETKSGKILGMGSRIIPMGQELSKFEQGQAQTKNANRRIARGTRKLNKRYKQRRNKLIFVLQQLNMLPEQIKLSESFENPLKLDRVSILPIDKKQKQYSALDLLELRVRALAQPISLKEFGKIIYLFNQLRGYSGGGNEPEKEENDDENTENENKKGNESFVIFGKVLSISEPENITYKGKELKKYKIAIETEEDVLEGETFLDILKVDESLDLQVNIRTTKKGEETVTFKLPNKTSWRKKMENLEKELTELSKEKGREVYLSEYFLSILKDNKWAKIRNNVVLRSRYQSEFDAIWKEQCKHYSFLNSCSQEKLSQLLNFIFPGTKETQEKYRQIGLEKGLCHIIRNQIIYYQRELKDQSSLISECRFEKGEKAVAKSHPVFQEYKIWEQINKLIINTKTENGTTRKGEIKYKYIDRPIPAPLKEWIFDELQEKKEMSFGVIFNKLKKEYNLKEGTEFLNGMNPKAKLKGDETKLMLKKSLGVNLWNQLGLPDKNRQIELWDILYNAKGNEYDIDSERTSKVLNFLKKYSDEILSPEQTAILISKIKFSRNYASQSLKAIEKILPLVRCGKYFDNELSETLSEKIIYLLNENVSDPFEKAAQEYLENNLDVLVYGGIMNAYATILVYDKHTTKEYTKNEQISNYQQITRLKQGELRNPLVEQLISETLMVVKDIWKEFKEKPNEIRIELARELKNNADRRAKIYKSNNDNQKANDEVKNLLIELKQEITLANIEKYKIWASQENLEEEYVKRYKDPSKSEIEKMKLWREQGHISPYTKQTIPLSELFDRERYDIDHIIPQSRYFDDSFTNKVICEKSVNKEKSNRTAMEYFETGSSIPSVLSKEDFIDHVNKMFQGLKRKNLLATKVPEDPVARQMKETQYISVRVKEELNKIVGNENVKTTTGGVTDYLRNQWGLTDKFKQILKSRYENVQPLLAESEYEKYAVSIKKKQEEYEKLNIPFTDIVLSKEIFIESFNSNFLQKKNNKLVIKDWSKRIDHRHHAIDALTIACTEPAYIKRLNDLNKELQTWLDNHKKEILPDFEGTPSELLDEILNLDETKREEIFKQIEKFKSIDVPWKGFPEDAEKAIQQIVVSQKPKDRLLIQPDKNGKLQIKIRGQLHEGTLYGKSQGVESYRIPLSKLAIKDFATEKTIDKITNEFLKIAIKEHLNDFKNKKEEAFSVEGILTLNKKLTEKERKKEWKRKGKKKKVGENAPHTPISSIKVFYRDPAKIKTKKGKEEIEEALQRLDRKTAYNDKLYVATGGNYLFAIMEKNEVRIFDLITFFDATNLLKDAFNKATNKKTFSKDNVFKNYFEEKNNANLLFTLKQGDAVYMPKNNEEVITDTQSPLYNGFWSDKAARSENIHYVTKYSGSQIYFIKNSIANTILKGKEFGSQNAYEMVDGLSIKKHCIKLDIDRLGNIKPLNL

SEQ ID NO: 5965 - protein, 1115 aa, unidentified
  REGION 1..1115: note = Description of Unknown: Cas Enzyme sequence
CRSDANLSKKDTEYVVAVKNRYEMIQEKNLTIGQYFCNELKNNEYFRVKENIFPREAYIEEFDKICTKQKEHLGLSDELIDTIRNKIIYYQRPLKSQKGLVSICEFEGFWTKNKDGKVFFVGPKVSPKSSPLFQIAKIWENVNNIKLSSRRGETIELKLEEKQKVFEHLNNNEKLTPTDLFKILGKSKNEFTVTKQLEKGIHGNITKNAISKIFCDNEKYNNLLKLDLNIVETDKSAYLYSKKTGEVLGEKPIKYVDAGVENEPFYQLWHTIYSISDEQECSNALQKRFGIDIETAAKLARLDFSKYAFGNKSVKAIRKILPYLMEGNMYSEAMSYAGYDHSNSLTKDENLGRKLLDKLKPIEKNSLRQPIVEKILNQMVNIVNAIINEYGKPDEIRIELARELKQSKEERNETDKKMSQRQRENETIEKRLAEYGLRATRNNIIKWRLYEEIDNQDKKLNAICVYCGQPISITEAIKGTEVDVEHIIPKSKLFDDSQSNKTLSHRRCNSTKGDMTAYDFMKTKSRQEFETYVERVNSLFTNKVINKAKRDKLLMPEDKIPDDFIDRQLLESQYIAKKAREILRTICHNVWSTSGTVTAELRHLWGWDDITMNLQMPKYKELEETTGQKFIEMVEWESEHGKNKHSKEVIKDWSKRDDHRHHAVDALTIACTKQGFIQRFNTLSASKTREDMQKEIEQCSEQYKEKLSLLEKYIISQCPVNVSDVEKAVGNVLISFKSGKKVAVFGKRKIGKRGNKKVVQTGIIVPRGSLSEESVYGKIKTIDKNKPVKYLFENPHLIFKPYIKSLVEQRLEKFENDMKKALSSLKKEPVYLDKEKSKVLEYGTCFKEEFVIKYTVDTNFNKVDKVIDEKIKEILQNRLSKFEGKPKEAFKDVQKDEKSLKWYEDEGLERPIHSVRCFTGLSAVVPVKKDENGTEIGFVKPGNNHHIAIYTDKEGNKSEYVCSFWHAVERKKYGVPVVIKNTNEVWDKILQQPENTYSESFLEQLPLADLELNLSMQQNEMFVLGMTEEDVKVAIETNDNKQISEYLYRVQKISLKPSSGQIDIVFRHHLETKLVDDANSKISKRYFNVQSLKALFSLNPFKVNIDYLGNITPTY

SEQ ID NO: 5966 - protein, 1252 aa, unidentified
  REGION 1..1252: note = Description of Unknown: Cas Enzyme sequence
PLFDWKDKVRDFIVTTDLNNDGTVKIDKEGNEKRSFRAPSEDDWTLLKKKTEADIDKSQKTVGTYIYETLLKNPNQKIRGKLVRTIERKFHKEELIAILKKQIELQPELFTEELYNDCVRELYRNNEAHQLALNKRDFVHLFVNDIIFYQRPLKSQKSSIGNCTLEYKKYQDKDGNEIKEYLKAIPKSNPLYQEFRLWQWLFNLKIFKKDNDADVTTAFITCVIDKENLFDFLNNRKEIDQKALLKYFKLTDKMHRWNYVEDKTYPCNETGTQIRTRLSKVENLPTDFLTSETEQKLWHIIYSVTDKNEFEKALKTFADKHNLDETSFMENFKKFPPFKSEYGSFSEKAIKKLLPLMRIGKYWDWETIDLKTKDRIDKILTGEYDEKIKERVREKAVNLTNEKNFQGLQLWLAQYIVYDRHSEAGTLGKWKTVADLEKYLEEFKQHSLRNPIVEQVVTETLRIVRDIWKKYGDFSEIHIELGREMKNTAEDRKRITNFVTENENTNLRIKALIMELKENSDGKLFVEDVRPYSPIQQEALKIYEEGVLNSNIVIDDDILKISKTAQPSKSELQRYKLWLEQKYRSPYTGQVIPLGKLFTSEYQIEHIIPKARYFDDSLNNKVICESAVNQLKDKQLGFEFIKNHHGEKVECSMGKEVEIFSEEAYQIFVKEHYAKNRTKKNNLLLEDIPDKMIERQMNDTRYISKFISALLSNIVREETGDDGVNSKNILPGNGKITSTLKQDWGLNDVWNDLILPRFERMNELTNTENFTSINQQGRKIPAIPLELSKGFQKKRIDHRHHAMDALIIACATRDHVNLLNNQSAKSETSRYDLQNKLRNKEKETYFDKKENKQTTRDVFKGFKMPWNTFTVDARNELEKIVISFKQNLRVINKTTNKYEKYIEQNGKKAKVAQTKGDSWAIRKPLHKDTVFGKVSLRKIKKVRLSEALKGWKMIVDKELKQEIKRLITLYGGEFKADVINKYFKDRKYLFRDVDISKVEIYYFETENAAVRKPLDTSFTEKTIRESVTDSGIQKILLNHLWTKENKPESAFSPEGIEEMNKNIAQLNDGKFHQPIYKVRVYEPIGNKFQAGNVGNKKDKYVEAAKGTNLFFAIYADENGKRSYETIPLNIVIERLKQGLKEVPETNEKGHSLLFHLSPNDLVYVPTEDERENSHAIDWGNLGKEQLKRIYKMVSSSGNQCFFIRHDVATSIVNKAEFSPLNKMERSIEGIMIKDSCIKLTIDRLGGIKKSAY

SEQ ID NO: 5967 - protein, 934 aa, unidentified
  REGION 1..934: note = Description of Unknown: Cas Enzyme sequence
VKKILGLDLGTNSIGWAVIEQDFEAKTGRILGMGSRIIPMDQGVLGDFDKGNSVSQTAERTRYRMARRLRERHLLRRERLHRVLNVLGFLPKHYANQIDFEKHFGQFISETEPKLVYDANNQFIFQNSFKEMMNDFRQHQPQIMVNKKGEPALIPYDWTIYYLRKKALSRKIEKEELAWILLNFNQKRGYYQLRGEEEEKTNVKEFVQLLKIVSVEKGDVDKKNDKKTWYKMAFDNGWEYSATFTTKPNWLNTEKEFLITEEYDENGNIKIVKDKRTDTIGKEKRRITPLPSFDEIDLMSPEQKDRMYKKIKARTEITISNSQKTVGTYIYETLLQNSTQKIRGKLIRTIERKFYKEELEAILKKQIELQPELFTEDLYYDTIRELYRNNEVHQISLNNRNCFVHLFVNDIIFYQRPLRSQKSSTGNCSLEKWPMKDKNGILVKDENGLQVRKSLKAIPKSNPWYQEFRLWQWLFNLKVYRRDDDADVTDQIITDKEKLFDFLNSRKEIEQKALLKHFKLTEKTHRWNYVEDKKYPCNETKTMISSRLDKVDGVSANFLTSEIEQKLWHIIYSVTDKNEFEKALKTFANKHKLNVNSFVENFKKIPPFKSEYGSFSEKAIKKLLPLMRLGKYWNWEAIDAKTQDRINKIITGEYDEEIQNRVREKTINLECTNDFQGLQLWVAQYIVYGRHSEADSTDKWETVADLEKYLKEFKQHSLRNPIVEQVITETLRVVRDIWKEYGDFSEIHIELGREMKNTADERKRLTDIIAENENTNLRIKALIMELNECSDVKNVRPYSPIQQEVLKIYEEYAVSNIEENDTEKEFIQKISKTAQPSKSELQRYKLWLEQKYRSPYTGQMIPLGELFTEKYQIEHIIPKARYFDDSLSNKVICEAAVNQKKDKQLGFEFIKNHHGEKIECGIGKVATVFSEEEY

SEQ ID NO: 5968 - protein, 1052 aa, unidentified
  REGION 1..1052: note = Description of Unknown: Cas Enzyme sequence
MARIFGFDIGTTSIGFAVVDLDEKHESGSIRRLGVRIFPEARDPDGTPLNQQRRAKRMMRRQLRRRRKRRRSLNELLAADGLLPAFNSPDWARVMAADPYELRARGLDSPLSAYELGRALYHLSKRRHFQERDLAEAENEAEEDKPSQEEEAEAKTREATIAELKRSGETLGAHLAKIPRLERKRGIHATRAVVREEFDRLCAAQAAHHPVVENAEFRAALEEAIFFQRPVFWRKSTLGKCRFIPGAQLCPKGSWLSQQRRMLEKVNNLAIAGGNARPLDEEERTAILAALETQKSMSWPGVRKALEPVFKARGESAKYVRFNLEYGDEKGGLKGNLVEASLAKIFGTKWPAHPHKEALRAFVPEALWQADYGEIGTQRVVIRPQKERADRRENLIARLTKEFALSQNEVEAIIKLNFPQGWEPFSTKALEILLPELEKRVRFGALLNGPEWEVWRNANFPDREQPTGEILAKLPSPRADKHATYDQREEAKRIASLRNPTVVRVQNELRKVVNNLIGLYGKPDMIRVELARKVGQSKRERDKMQSDRDKNKHRRAEAREDLESKGIANPSRDDVEKWLLWKESQERCPYTGDQIGFDDLFRSGRYQIEHIWPRSLSLDDSFRNKTLCRKDINIAKGNRTPYQYFLGREAEWNAVKDRISKMVGRDGMAPGKAKRFAAESIPDDFASRQLNDTGFAARQAIAFLKRLWPDVGPTAPVNVQAVSGRATAQLRRLWGLNNILSDDGEKTRADHRHHAIDALTVACAHAGYVKRLSDWFAAEERGERPHLPEPWPSIRNDAGAAVAQIVVSHRVRKKVSGPLHKDTIYGDTKEDVISSRISYRLIVNRTPITELSIEDIRADDIALSKNVIRDPGIRRILREHVSTFGGDLKKAFATPPLISASGPFIQKVRVLSKRQIDGLVSTHNGLSDPEAKHHVAVFRMPDGTYKPEIVSLFEARKRIARKTSLVSGPNGDGSVFIMSLSKGDMLVLNDPRAQYWVVRELKSNGQITLVPHTEARPTKQALAFKPTVPGLMKLSPRKVSVDPIGRVCPAND

SEQ ID NO: 5969 - protein, 1042 aa, unidentified
  REGION 1..1042: note = Description of Unknown: Cas Enzyme sequence
MTLIFGFDIGTTSIGFAVVNHDNDGESGRILRLGVRIFPEARDSDGTPLNQQRHAKRMVRRQLRRRRERRRSINGLLAAHGLLPDFNSPEWAKVMAANPYELRARGLNAPLSAYELGRAVYHLAKRRHFQERDLAETDDQTFEAGKLTPEEEEEAKTCDAILEALEKSGETLGSYLAKIPLSMRKRGVHATRAIVRREFEQLCNAQVPHHRLLGDPSFRNSLEEAIFAQRPVFWRKSTLGKCCFVPGAPLCPKGSWLSQQRRMLEKVNNLAIAGGNARHLDQEERRAIIAALETQKSMSWPGVRKALEPVFKMRGESAKDIRFNLEYGDEKGGLKGNLVEAALSKIFGAKWAFHPFKTALRTFVPQKLWEADYGEIGAQRVVIRPQPDRAKRREALATRLINDFGLSQEEAKATIKLNFPQGWEPYSVKALEIFLPELEKNVRFGALLNSPEWEAWRDKKFPNRERPTGELVHKLPSPRADKHASCDQRKESRRIASLRNPTVVRVQNELRKVVNNLIDLYGKPDMIRVELARQVGKSKREREEMTAAMRKQERRRLEARKDLESKRIRNPSNEDITKWLLWKESQERCPYTGDHICFDDLFRTGRYQIEHIWPRSRSLDDSFRNKTLCRKDVNIEKGNRTPFEFFRGREDEWSAVKQRISKMVGRDNMPPGKAKRFIAEEMPDDFAARQLNDTGYAARQAIAFLRRLWPDAGPNAPVNVQVVSGRVTAQLRKLWGLNNVLSKTGEKTRADHRHHAIDALAVACAHAGYVKRLSDWFAAEDRGEHPRLREPWPSIRKDAEAAVKEIVVSHRVRKKVSGPLHLETIYGDTGEDVKTKSGAYRLFVTRKPVERLSKGELDDIVDLQVRKIVKEWVSTHGGDPKKAFADYPRLNEKGPEIRKVRLRTKQQLSLMAPVSTGYADLGLNHHIAIYRGTNNKIEFDVVSLFAAARRLAKREPVVCKDRGDGSTFLMSLAPGDALNFSSGKMQGYWIVQGTWANGQIVLIDSNDAQRTSVTRPNPSTILRDNGRKVSIDPIGRVRLAND

SEQ ID NO: 5970 - protein, 1087 aa, unidentified
  REGION 1..1087: note = Description of Unknown: Cas Enzyme sequence
APMWRLSLDMGTNSIGWSALEIENPENVKLLDMGVRIFPDGREPQKGTPLNEARRNARQMRRQRDRKIRRKKAMLNFLINNKLMPKEREEQQTIAQLDPYTLRNAALERKLKPFELGRIMMQFSVRRGFKSGRKEQQTENTAEREGMLGGIQALETELQGLTLGQWLCKQRENGNSVRFKAKMEKTKVIYSFYPSREMYETEFTAIKNKQEKYYKEINWDRLHWLIFFQRPLKRPERGRCQFYTEEERGYRAFPSAHRFRILQEINNLRYYNEENIEEIIPSELKLKLFEALNTQKSLTFNQIRKKLGENYTGSFNIEDSKRDKLKGNETSVDFRKPELFGLAWDKLDFKKQDEIIEKLMIEDDESVIYDFLKPFVLSEKQIKKISGYNLPVGTTMLSSHFMIDCSEIMLKEWLLYSEAVKKMGLHHSKKEKQDIQRSLPYYGKILTGLVSGAKGENYKGNDEECYGRIANPTVHIALNQLRKLVNALIRRFGNPDQIIMEVARELKLSKTRKDELFKEQSKNQKENERIEKELKDLGLLKISSEDKKKYKLWEELAVEGIARLCPYCGKTISAKQLISGNVEIEHILPYSRTLLNSRDNLTVAHRACNQAKKNQSPFEAFGNSPKGFDWNRIIELTKKLPIKKQRKFYPDAMVKFNEDEGGFIKRQITDTAYLSTASKDYLSAICDSNAIWVSSGRLTAMLRGLWGFNTLLNKGHDTWYKNRSDHRHHALDAIVIGLCHRHLITEAARINSGRGYSEIDAPPCPVKRNDIEEKLKSIVVSYKQDHGKEGKLYAETALAKHSYVEQIVPEDLGEKEINRIVPKKIQADIALLVQKEGFRKAKSLIQSKYKHINVFRDKWVTRAPLESFSERDISNIADPVIREQVQKFIKSHPVKAGQKLQDVLNRFSEKTGIYSLRYFPKDQKSVISIDSCNNKAYMPGDYYRVDIWRIPQQKGKYKYEGVFIPRPKVMQQDLCGNNLTSLRHKHPAAKLIMRLCKNDIVVLSNETEQELCRVASFSATDNRIDIQPIYASDTIIAWKKNTNISLCSDFWPSNIKGQYYNTINVLFNEYKIKQVKITVDGRPIYRS

SEQ ID NO: 5971 - protein, 1046 aa, unidentified
  REGION 1..1046: note = Description of Unknown: Cas Enzyme sequence
REYSNDCKRKDRQYKENGEKIKDEPFSIINCELRVNALKTKIDLKDLGKIFFQFNQLRGYSGGTNDDEKKKKQKSEDENDGDTKKKAYEVITQKVEILSVEKSDETFIVKGGKNKGEKQNYFDVTVELEGEEKEGKTKLQNLQEKVGQEEELEIRIRRNKKGEETSIEIALPQKTNWRKNMEATEKILKEENLFISELHLRDLKQSKWTKIRNRVFLRNRYKEEFDKVWDTQAEYYSILNDCPKETLEKIADYIFPGTSESQQRLKKQAIEGGLKYIIKEQIIYYQRPLKPQTELISNCKFEKEEKVIATSHPLFQEFRCWKQINNLYVTSKQEVYNEKKRKNVFQYTDRYLTNEQKQNIYNKLQVQKQVSFNDVKKIVEIKDDKTQYLNGLNVKAKLTGCETFISIKKHFGEHFENLITKEEKIVEKIWEVIFDVRNHEGSEYETTSKRVSSIIEILQKYTDQETATDLSLKLAQNIRFPRKYASLSAKAIQNILPLMKLNPENISEQVKSKFENIKQLIETGEITDNVDYKLEDYVIDFVKNNPNALENGGLMEYLAISLIYSKHTAETVEAQIKNYHDIKYEKRNLRNPIVEQLISETMQVIKAIWKQYKFNPEDLEIRVELARDLKNSAEEREKIYKGQLKNQKINENVKKRLLELKQEPSTRNIDLYKLWGKQCIEEYPKQSKEPTKEEIEKLRHWEEKKCISPYTGKPIPLSKLFTKFYDIDHIIPKSRYYDDSFSNKVVCETHINEEKSNRTAWEYITQQNSKYKNEEGKSAIRSVEDYIQHVNDNYFGKKKKNLLAEKIPLNPVERQLKDTQYISIAVKNELAKIVGSQNVKTSTGEVTDFLRSRWGLKKLFMELTENRFKQMEFWDLDENGNPKTEWIKKYFDKDNNKNIYEIKNWSKRYDHRHHAIDALIVALTEQSHIQRLNNLNKYVQEELEKRKDEFKIEKKEDESILDAFFNLDEKRRDEILQKMESSRKFEIPFSGLKEQVQEHLESMIVSHKSKDKLGIKIDEKTKKKQLKIRGALHEETYYGKLDGKDT

SEQ ID NO: 5972 - protein, 1062 aa, unidentified
  REGION 1..1062: note = Description of Unknown: Cas Enzyme sequence
VPSIETTDYVLGIDLGSNSLGWAIIGLIDGELAQLIRAGVRIFEAGMDGDLESGQEESRNKARRDARLHRRQLWRRARRLVKVARLLQRFGLLPAGNLHPPDARQDYFNRLDAEILASPWFSAKEQSGAFPEPRQTLPYILRASALNEPLEPYFLGRAFYHLAQRRGFLSNRLRPAKKNDDEGVVKQGIHDLRTRMQAADARALGEYFARMSPALRPFEEHIRGRDRWTARDMYKEEFEKIWEAQAPHHPNLLTPERKKALHNAIFYQRPLWFDENTIGGCELEPGCRRAPAYLLLSQRFRLLQTVNNIRVIPPGETERPLTPEDRQKLIDELELKGDLTYAKIRKLLGLTKDYTLNLERAKNESIKGNRTNADFYAVFGERWLRMTPEERDQVVEYVHAFQKPDKLRESAQKRWGLSEEAAEKLSEITLETDYMNLSRQAMAKLLPLLESGITFAEARRQLYPEKFEAVQPAALLPMVKEALPEVRNPAVMRSLTELRKLVNAIIRRYGKPREMRIELARELRKSKKQRDTLTKKNRENEAARKQAAKRIEEITGDANPSRDDIRRVLLLDECGCHCVYCGEPISGTNFLGKESQIDIDHIIPFSRSLDDSFTNLVLCHSHCNRLKGNQTPYEAFAGDPERYERILDRVRKFSGDRRTAAEKLRRFKLNDEELSRFLEDFRNRQLNDTAYAARLAASYLGLLYGGMADAEGNRRVYATSGQATSYLRSLWKLNSILGDGATSNGGRRAKERTDHRHHAVDAVVIGLTDAGMMKRLSDAAQRAPLEGRRRFAGLEAPWLNFVDAVRQQIEQIVVSHRVSKKVSGALHEETIYSPPFPDQKVRVRKWLKDLTKSEVEDIADPVVKKLVLEKLGDGDPKKVFASEANLPCFETRDGRRIPIRRTRVVKATPVFTLGEGRTARHVTSESNHHIEIYAAVDEHGNESRWDGEVVSLYEAYQRKKEGKPIVQRDHGPLVKFKFSLAPGEVIECDGEQGQRRLLVVRSVTQLSAGQIVIGLAPVNDARKKSDMQKSRDWVWKVPNTLRECHARKVSVSPVGEVAEAHD

SEQ ID NO: 5973 - protein, 1569 aa, unidentified
  REGION 1..1569: note = Description of Unknown: Cas Enzyme sequence
MKKILGLDLGTNSIGWALVENDFDSKSGKILGMGSRIIPMSQDILGNFDSGNSVSQTAERTGYRGTRRLRERNLLRRERLHRVLNVLGFLPEHYANQIDFEKHLGQFLDEKEPKLAWKQNENGKFEFLFHKSFTEMVEDFKANGQDIKIPYDWTIYYLRKKALTKKIEKEELAWLILNYNQKRGYYQLRGEEEEDATKTAKTRKYFDRQVIKNIVDTNEIYKGLKVLLVELENGSKGKIFKKEIPQWIGLEKNIIATVDIDKDGNDRYEENGLLSQRFSIPTDAEWETEWKLIKLKTEKDLRDSGKTVGTYIYETLLQNPTQKIRGKLVRTIERKFYKDELIAILKKQVELQPELFTEDLYNDCARELYRSNEAHQSELTKRNDFVLLFVNDIIFYQRPLKSQKSSIGNCGLEYNKHKINKKDEKGNPIKNVFEKDANGKDIEIKEYLKGIPKSNPYYQEFRVWQWLYNLKIYLREDDKDVTTDFLKNADDYVSLFDFLMSRKKIDNKALITYFLNLQGIKGKNADKELKKYRWNYVFDNSKDKEENKSKEYPCNKTGSHIKTRLEKVENVPADFLKIIDKKEVEIKKGKDKGKKIIVSLGTREYQLWNIIHSVTDINEFKTALGKFAQKYNLDETSFVENFKNLVFEENDYGSFSEKAIKKLLPLMRLGKYWNENEISETVKERANSIKERLDNIDYDEKLLEGVADDDVMKRVLKSFIKQKNLSFISGLQLYQASYLVYGRHSEAENVNTWKMSYDIQDYLYEFRQHSLRNPIVEQIITETLRVVKDIWEHYALENNVECVEIYDEKKKKNVKSFGKFFDEIHIELGREMKNTAEDRAKMTNQVSDNENTNLRIKAMLMEFAEDDFFKTKIEKDDGSIVTINPVRPYSQNQQDILKIYEEDVLRKYSEQELKNEKTELKDKEGKEITIYNISKKSTPTDKEIQKYKLWLEQKYRSPYTGQMISLSRLFTADYEIEHIIPQSRYFDDSLSNKVICEAAVNKLKDRYLGFEFIKKHAGEKVECGMGKVVEIFTEDSYTEFVKEHYKNNNAKRKKLLLEEIPDKMIDRQLNDTRHISKFVSKLLSNIVREEKDDDGVNSKNLISGNGKITSTLKQNWGLNEVWNALILPRFERMNELKNTESFTSKNTEGHTIPAIPMELSKGFQKKRIDHRHHALDALIIACMTREHVQYLNNENAKSQKFHLQKGLAKTLRKYETIEKTIQEKDENGVWRIKIDENGKQITKPIEVPKEYFMPWGNFVVDVKEKLEKIVISFKQNLRVINKTKFAGLTYKESKEKSNNQNWAIRKQLHEETVSGIVNLPWVKLGKGEVTMATRKALDASYSENKIKKITDTGIQKILINYLSSKNNDTELAFSPEGIEEMNKNIAQYNEGKFHQPILKVRIYEKGKGRFVLGSTGNKKSKYVQGAPNLFFAIYADENGNRSYETIPLNIVIERLKQGLKEVPDMNEKGHKLLFYLSPNDLVYIPTEDEKENIRAIDWKNLDKEQLKRIYKMVSSSGSQCFFVQQLVANSIVNKVEFSALNKMEKNIENVMIKEVCIKLNIDRLGNIKT

SEQ ID NO: 5974 - protein, 1372 aa, unidentified
  REGION 1..1372: note = Description of Unknown: Cas Enzyme sequence
MGNNVGCYYIGLDIGTNSVGWAVTDQDYNILKLKGKSAWGIHLFDPGNTAEERRMKRTSRRRVERRKQRIKLLRELFDKEICSVDPNFFARLDESSLHNEDRTSGEKYTLFGDPYLDKKYYANYPTIYHLRKELMETQSKPDIRLLYLAIHNIIKYRGHFLFEGIGEGEIPIFQEVLLETLQMAKEFGIELEATDVKEIERILTDKYLGVREKGTLLVKLFEAEEKNEKAFAEMLAGKKVSMGALFSDDIDDEGSEAENLSIDFKSAGFEEKEDEYADILGTERMTFLKSMKSIYDWSILTKILVGSKSLSDMMVKRYEQHRSDLKGLKKAVKENCDKNEYRKMFNSDSPIGYNAYIGQYKNSSVKQCSQEDICKQIKKLLCIEDKETGESRWKVGISEDMQKRVTNGTFLPKQTTKDNSLIPNVLHRKELEQILKNAERFYPFLSEKDMDGFSTSEKILKTQRFRIPYYVGPLNKSSERAWFVRKSDGAINPWNFEERVNLDESAEVFINNLTNECSYLIGEEVLPKNSIVYQRFELLNEINKIRIDGTHIPVEVKNDIVQGLFEKAPSVKKVTKKDIMAYLQKRCMCSGNEVITGIDDPVKSGSRSLIQLRAIIGDKTKDREMCERIIRIITVFGDEPKRLKLRLEKEFSDKLTKEEISKLAGLKLKGWGNLSKKLLTGISHECDDLGEPRNILSMLQNTNMNMMEIINSPIFSYMEQIKAINRDQTSELTTELNYDLVDELYVSPAVKRGIWRALRIVDEIIGIIGHPPNKFFIETTRSEDTENKGKKIPSRKAALIELFKNCKNQEYEWFREHGWSEEIERSDERELRGRSLYLYYTQLGRCMYCGERLDLNSINNPMVCDRDHIYPQSKTTDDSVHNNLVLCCHICNQNKSDRYPLSLDIQTKMRQHWKYLKENGFITPTKYERLMRTKEFSEDELSGFISRQLVETSQSTKAVAKILEKLYKDNPNLSEKSDIIYVKAENVNRFRHENGFQLFANGKLRDNKEDRDSDLKVLEFVKCREVNDYHHAKDAYLNVVVGNIFDIMFSSNPILFIRSKEGQSYNIKLEKMLKRNISRKGVTAWVAGSDGTMKTVMKHMQRNDILFTRMQIVKKGEFYNQLAVKPKSKLNPIKGGRDPLKYGGYDSENPAYLSLVEYSKGKKRERTLQVVPIHIAKGDSTDRILEYFREKGLSDPKIIRQIIRINSLFELNGFKIHLRGGKDYMNAEQLVLSDETYNYCKKVTKYLENVREKRWPPTRTDELSSEKNYSAFSELVSKFDGHYDTSFYRPLKEQLSASAERFRGESIEVQAKIIGEILKVFQCNPSRGDFSKIGCTAEGRITISNIMNNDPVMINQSITGIFENRFNLNKDK

SEQ ID NO: 5975 - protein, 1700 aa, unidentified
  REGION 1..1700: note = Description of Unknown: Cas Enzyme sequence
LQKIFCMIAKNKKILGLDLGTNSIGWALVEIDHEKKIVRIIGLGSRILTMDTEEIRKFESGGKLLSSAAQRTDSRSPRRLNERFLLRRDRLHCVLNLLQCLPEHYKLSIEFENEKGERSGKFKKGIEEKFAYIKDENGKSHFLFMDSYKEMRKEFEQLHPELFYTKRNGKQTQIPYDWTLYYLRKKALQEKNNKLTKEELAWITLSFNQKRGYEKVIGQDEKEQKEGELRETFTGKVKSVKKVEGKDEFKILLVDFNDENVELYNYTEESKIQITFKDDLKEVEIISKYDEDGNVNDATAEYIINEIKENLRVVNVKNTNRKNKENFIFEIELETGWLKEQQSKFTPKWKGIRRDFIIKTKYDKNGNRILKEQDKGRSINIPKEEDWTLMKLKTETSISAFNVKNETVGVAPFIYYNLLQNPNQKIKNGLVTVIEREFYEKELEAIYTAQEKYHPELKNRELYKQAVELLYPNNENHRQILSHLDFKDLIGTDILFYQRDLKSKKSLISDCEYETENYTHIDTKTGKSYKRPLKAIHKSNPLYQEFRLWQFIKRLKIFKLEEIVNEEILLNQDVSKELLTPEIKEKLFEFLNNKEDITQKQLLKHLEKLHNQSISWSDYKWNFPIYDDEDKKVEHKEVCNPTRYSFILRTKRIKGFDWEKFLTAKNEYLLWHFFYSVKKRDEFVKGLNSLIFNLLKDEKNSFPLDYKADLVKNFSSFVGYNNDYGTYSEKAIKKLLPFMRIGKYWNSDEIEKILATRTHEIENKAEKMLNKVIEKENINGEITDFQGLWLSSACYLVYGRYSEVGDVQFWDSPYDIENYIRNEFKQHSLNNPVVERILRETLHIVKDIWMYYGEKDGEDEQKRPIYKKLFDEIHIELGREMKKNNKQKEKEYNRNKENRKTNERIIELLKEFKNEYIGVQEKSPFQQAKLKILEEDLLSSIEYDKDSKVYTNDNYPSFQITKKEIKEIVAKDASKISKSDIERYRLWLDQRYQSPYTGKMISLSNLFDRKKYEIEHIFPQERVTLNALSNKVICETEVNKAKEAYTGYEFILKAKSKPIFCAAYNKEVEILSVEKYEELVKRNFTDKKKQEILLSKDIPDEFSNSQGNNSQYIAKMAMKLMSNIVREKDEDTFRSKHVLATNGAITSELKRHWQLNEMWNEIVSPRYKRLNDLTNSSLFGDYQLINGHKIFVNDNQIPKQIDNNFDPKRIDHRHHALDALIIALTTENHVNYLNNISSQDDADKLQTRKAIKFQLTNSRKSFNDEKEWYFLPPAQTKTREGIVNYKYEYKNEQGNVFKDIAKISLEDTIATFKQKNRIIRQRWNKYLNCGEGNLNVEKEKNLNDKRKFAVRQSLHKDTFYGKVNLSCKTKTISLKDALENNCDIVDTYFSEQIVQMKKQMSIKEIVAKLSNPSVQVYEKFVASRYGNELESFANISSDKIIKVIENVTDTGIQQILKNHLKNYDNNPQQAFSYDGIKAMNEAIAMPEHGLTKKSKPHKPIYKVRLSDAMGTKFQVSEEGTKNTKYVVTKEGSNVFCGVYENKEKERKFYIPTLRESIECLKQGLSPCPENHPKNQEFKFIFALQPNDLVYVPNEDEVVVDINHFTAEQYKRIYKFRDASENKKGGIQVNFMPANFATMIYKQSQNGEKIILNSGKELKGEITLTSDKDKTQNLLENTNIQIRSVCIKLNIDRLGNIKPTL

SEQ ID NO: 5976 - protein, 1414 aa, unidentified
  REGION 1..1414: note = Description of Unknown: Cas Enzyme sequence
MKKILGLDLGTNSIGWALVDKDTQTILGMNSRIIPMGTDKQDYEKGIGITKNATRREKRTTRKMNKRYKLRRNKLLFILDILGMLPDQFQFKNGLPEPKKLQELELLPIKKGTLQLDSLGQYELCVKALKNKIELKEFGKILYKLNQLRGYSGGNNDEDTKKKQNDEDENDDDTKKKLYEVITQKVEILNVEKSDETFTIKGGVNKGEKQNYFIVTIKLDDEEKEGKTELQNLAEKINQEEELEVRIRRNKKTGEETSVVFALPQKSNWRKAMEADEKILKEENLFISELRLRDLKQSKWTKIRNRVFLRNRYKEEFEKVWGTQAKYYPILNDCPKDILEKIANYIFPGESESQQQLKKQAIDNGLKYIIKEQIIYYQRPLKPQTELISNCRFEKDEKVIATSNPLFQEFRCWKQINNLYVTSKSKNAKTKFVYQNRYLTDEEKQIIYEKLQTQKEVGFGVVIDVLNLNKRKEEKLDKEQKDYFLNGLNVKAKLKGCDTLISIKKHLGEHFEKFITQESQIVEILWNVIFDVRNHEGSEYETTSKRISSIIGVLQNYTDKETAIDLSLKLAQNIKFPRKYASLSAKAIQNILPLMQLNPQNVSEQIKTKYENIKNLIETGEIVDNVDYGLEEYVIDFVKSNPNVLSTGGLMEYLAISLVYGRHTAETIKAQIKNYHDIKYEKRNLRNPIVEQLSNETMQVIKAIWKHYKINPEDLEIRVELARNLKNNAQERDKIYKGQLKNQRINDSVKKRLQEEGIALTDENILKYRLYEQQKYLSPYSGNTLTVAEFNTYQIDHIIPRQRYYDDSFSNKVLVEGTLNEEKSNRTAWEYITQQNSKFELRSVEDYVRHINENFYGKKKKNLLAEKIPTNPVERQLKDTQYISVAIKNELAKIVGSENVKTSTGEVTDFLRSRWGLKKLFMELTESRFKQMEFWDLDENGNPKTRWIEKYVDEDGKNIYNIKNWSKRYDHRHHAIDALIVALTEQTHIQRLNNLNKYVQEELEKRKDEFKIEQKEDESILDAFFNLEEKRRDEILLSMESSRKFEIPFPDLVKQVKEHLESIVVSHKPKDKLGIKTDENTNKKQLKIRGALHEETYYGKLNGKDTKTIEISKLKAKDVDKIIDDVLKEEIDNHRKKYDSMKEAFTGEGLKLFNENRFQRKQPTRLKPPVFKVKVWYNTKETTNSSLQRLYDNNERQSVITGDNYLFLVMEKGGKRIFDIASLYDSVEIANAALKENNTDFKRKITEDFRIKHKEKPDKVLFTLQQNELVYLPTDSEDSILRMSNNEFEEWIKNQENKKAFCKRIYKVVKFTGKDCFFIPNNYANSISVAKDLSDEDKKKLKEKYQDKTIPKQEKNYEEFGSFGISAKTEVNENFVKELVLKKEFDGDKPLKIQDTCIKIQIDWLGNIKLLKYI

SEQ ID NO: 5977 - protein, 1090 aa, unidentified
  REGION 1..1090: note = Description of Unknown: Cas Enzyme sequence
MSQSRAHKRYCVGIDVGLNSVGLAAIEVDEEGTPVSILNMETIIHDGGIDPTANKSAGTRKAVSGAARRVRRLYRQRRRRLADLDRKLAELGWPIVDLEKISDPWYPWAVRAGLVKTRIDDPAALAEAVSVAIRHMARHRGWRNPYVSVKSLKSVTEPSKELVALTQSIGKRLGRDPGELAHLTVAEMVSLARRLNLREWAEPTVDRRTGEITGQTVYLDVSDTLRGAARLGKDGGRRAGLLEGKVHQSDNVRELRRIWDVQDLPEALFDSIVDVVFQAKSPKGSARERVAEDALDRSQRRAEKASLAFQRYRIVNILANLRILESGRERPLTPRERRSVLDMLWESAESTAGETTWADVAAHLGVDRRALRGTAKETEDGDRASARPPVNVTATRVLACGVKELVREWTTADEGYQEALIEVLGNGSGSGADQALVMRAEEFMSGLPEDMLAKVEGVRLPEGRAAYSVRTLARLTERMLTTEDDLSAARKAVFDTPDDWRPEPDPIGQPVGNPAVDRVLTIVNRYLLACEREWGAPLSVNIEHTREGLMSDAQAKKIDRENDARFARNREIEGEIAAYLNAQGEAVAAGLDDSFEENPESVVTGRAIGRSRGDIDRWRALVRQNQTCLYCGEPLSFPVFEMDHIVPRAERGATNSQVNLAAVCRECNHSKGRQPFAVWAKSGIRPQVNLGDALKRADGFRFFGPESTPAYSARFKREVKSRLLRTDLDDPLDGRSIESVGWMASELRHRIEAHFARSPQGTPHRTTVGVYRGWITAEARKAAGIEDRIILIGGSKGKSRLDRRHHAVDAATIALLRQGAAQSMTVQSRVRLDAEWAASERIAREEGMVGWDISNVLAIRDNLRRTNQIDPRTETDWRNYKGSNPALFDAWREHMRRLADLVSCRAADDGIPVFELLRLRPGSSAGHEDTVRPLASVRVGDEMPSELIDRSATPQQWIALVRQPGYEPGKGLPMDPGRRLRVLNRWYEPREELPFFPTGAGCVAVRGGYAELGSSFHHARVYRCTKRLRSGASQVFFAMMRVYNLDLLPYRGSARDVFTVDLPPQCISRRTAEGRLREALDCGDAEYVGW

SEQ ID NO: 5978 - protein, 1086 aa, unidentified
  REGION 1..1086: note = Description of Unknown: Cas Enzyme sequence
VGVKREGKADDQKKENLEWRIKGLTEKLKLEQLVVVFQEINTKINGSSGYLGAISDRSKELYFNKQTVGQYQMEVLDKNPNTSLRNMVFYRQDYLDEFNTIWDKQVEYHKELTEELKTEIRDVVIFYQRRLKSQKGLISFCEFESRKIEVEIDGKKKTKTVGNRVIPRSSPLFQEFKIWQILNNLEVSTKGRKTKKQKLPSLFVEQEDPLDIYGKRELYQEEKERLAAELSVKEKLTKTEILKLLFDNPQELDLNFPSVQGNLTQAKLFEAYIKIIEHSTGEIIDTKKSASEILKNIEDTFKILNYNIDILHFNSDRELDKQLMFQLWHLLYSFEGDNSNTGNEKLINKITEFCGFEKEYATILANVTFQDDYGSLSAKAIRKILPYLKEGNKYDIACEYAGYRHSKSSLTKEEIENKILKDKLEILPKNSLRNPVVEKILNQMINVINTIIDVYGKPDEIRIELARELKKNAKEREELTQAISKTTVEHEKIREILKGKDFGLSYISRNDIIRYKLYEELRDNGYKTLYSNTYISPGAVFSGDFDVEHIIPQSRLFDDSFSNKTLELKSINLEKGNKTAYDFVKEKYGEDALEDYLNRIEMLFKDMKTKLRKLKMQEKDIPDGFINRDLGNTQYIAKYAKTMLSDLVRRVISTTGSITDALREDWQLIDVMKELNWDKYNVLGLTYYEENREGKQLKRIKDWTKRNDHRHHAMDALTVAFTKDAFIQLFNNMNASSKPNSNEFALKNLYVENGKVKPPMPLNEFRAEAKKHLENTLISIKAKNKVVTQNINTTKKSGGTNKKIQQTPRGQLHLETVYGSQKQYVSKEEKVGTTFDEAKIRTVSKPAYQEALLKRLQENGNDPKKAFGGKNASAKNPIFINETEQLPEKVKTVTFETVYTIRKEISPDLKLEKVIDVGVRKILENRLKEFGNDPKKAFSDLDENPIWLNKEKGISIKRVTISGISNAESLHEKCDKDGNLILDENGNKQPVDFVNTGNNHHVAVYRDADSNLQENVVSFFEAVSRKNLRMPIIDKDYKRDEGYEFLFSMKQNEYFVFPNEKTGFNPKEIDLLNPENYALISPNLFR

SEQ ID NO: 5979 - protein, 1022 aa, unidentified
  REGION 1..1022: note = Description of Unknown: Cas Enzyme sequence
MIAKNKKILGLDLGTNSIGWALVENDFDSKNGKILGMGSRIIPMSQDILGNFDAGNSVSQTAERTGYRGTRRLHERNLLRRERLHRVLNVLGFLPEHYANQIDFEKHLGQFLDETEPKIAWKQNENGKFEFLFHKSFTEMVEDFKANGQNIKISYDWTIYYLRKKALSQKIEKEELAWLILNFNQKRGYYQLRGEEDEDATKTAKTRKYFDRQIIKTIVDTNEIYKGLKVLLVELENGSKGKIFKKEIPQWIGLEKNIIATVDIDKDGNDRYEENGLLSQRFSIPTDTEWETEWKLIKLKTEKDLRDSGKTVGTYIYETLLQNLAQKIRGKLVRTIERKFYKEELIAILKKQIELQPELFTEDLYNDCVRELYRSNEAHQSELTKRNDFVHLFVNDIIFYQRPLKSQKSSIGNCSLEFRIFKDKDGKIVKEYLKCVPKSNPLYQEFRLWQWLFNLKIHKKDNDFDMTNDFLKTTEDYENLFDFLNNRKEIEQKPLLKYLLEQKDFKGKLLNLEIEKYRWNYVEDKKYPCNETKTTIVNRLEKVENVPTDFLTSETEQKLWHIIYSVTDKNEFEKALKSFANKHNLDEVSFVENFKKFPPFPSEYGSFSEKAIKKLLPLMRLGKYWKWENIKTETQDRIDKIITGEYDEKIKERVREKAIDLTENEHFQGLPLWLASYIVYGRHSEAETAEKWDSVADLEKYLENFKQHSLRNPIVEQVITETLRVVRDIWKKYGDFSEIHVELGREMKNTAEERKRLTNTVTENENTNLRIKALIMELKESADVENVRPYSPIQQEILKIYEDGILNSNIEIPEDILKISKTAQPTKSELQRYKLWLEQKYRSPYTGAIIPLGKLFTAEYEIEHIIPQSRYFDDSLSNKVICEATINKLKDRKLALEFIKNHHGQIVDLGFGKTVKIFDEDAYQTFVKEHYSKNYKKRNNLLLEDIPEKMIERQMNDTRYISKFVSQILSNIVRADKDDDGINSKNLVSCNGKITAELKQDWGLNDVWNELILPRFERMNEL

SEQ ID NO: 5980 - protein, 1141 aa, unidentified
  REGION 1..1141: note = Description of Unknown: Cas Enzyme sequence
MPNLLGLSIDVNGIGWALLDKESLSIKAMGSRVFPIGCENFGSGKRELSKKAYKRFKRTTRFRYQRTRKRKIKVLEMLIQHGMCPLSQKGLNEWKIKKQFPLDELKEWFSMNPYQLRRKAVSESITLNEMGRILYQISIHRGFPVSERNRGMKENAIYVGIPQMDRRGINHTQNNITNSSLGVYLNHLLPKENESYQFSNERIRNRFLSREMFQNELENIWNFQQQFHDCLTSELKIELIGNQEEVSPNKGAVFFQRPLKSQKFRVGHCSFEPTKTKCCVSSLIYQEVLAYRWANSLKVDGVTLNDSDRSLAVEFFMTHRKFDFGRVKRILQNPEGNYSIKDQELIKGSFVNASLSHYTIFGEDWFHLNEKAKEDIWHSLYFFDNQEKLKTNAMDKWNLSEQNASKFAELQLDKNYAPISKKAARNILYFLKKGINYDLSVILGGVKNSLGSSWENIAKKDINYVINRVLTLYKENKVYGFIPKLKSFLEDEMQFDSVQIKKLYGQFSKGEEIKLESKFLIDKETDKEINNLKNPLLVKAVFQLRRIINDLIDSYGPIDEIKAELSADLKVNKYQRYLYRLDQKRQQRLRSKYISLLGERKENITPMNLTKYELWEECKQTCPYTGAHIPLDDLFTEAIQVVYIQPWRFSLNDSSWNKTLCVKSFTENILDKSPYEFFNNNVQSDWDIIVKRAARLFSSTKDFPSAYRKFKRFVKKYNHRDPLKHQMEDSNMLSKEVMCFLSKVVPEVKVAPGHVSELFIEKWRLHQMFDSYVFENPQKDFRYRALLAYINANRTEEFIKLLAEDNKYNPSQTKKVFPKPYAGYHDDLEYHLHSILVSHKKENKLITTRIHNSRNGDKSFSNFCVSVRGSLHKESVYGKRKTLHSLEEAYHIRKPLDSIQTEKQVLKIVDPVVRASVLEAIENAGGFSGDTVPRNAFFYTNNEGFKIPKVFLPNAKGDPVPIKKVRIKEALTGAVQLKSELNQHVNLRNNHHVLIYLNDQENYKEEVITFWEAVRRKSLNEPVYQLPEDGHQFITSLEINDLFIMGVDDPSMDITQESNSFLAKHLYRVQKLSSKFYEFRLVHDNQITETESPNYIRINNFGERKTGWLTHNPIKVWMNSIGRLEYKDELNLFNKVQKTYV

SEQ ID NO: 5981 - protein, 1277 aa, unidentified
  REGION 1..1277: note = Description of Unknown: Cas Enzyme sequence
MESKNTMESKNTMESKNTKESKNTKVRFGLDIGIASVGWSVIECDESGYAVDIVAAGSRVFTAAEVPGSDEGLGEARRSARGARRSARGARRRNRRHKFRLHRAKRLIVESGMLSQQQLDNLYDNSQPKQDIYEIRYRALDSVLTNQEFAKLLIHLLQRRGYKSNAKDTKVLDSQTDESKKAKAKATESEKTDDEAALKSIANNKIILSQYRSVGEMIYNDSKFRLNVGGNQVSVKGNYVFKARNSTGDYKFVMLRAWIVDEIKLIFERQFALGNHQYANPQLKDKYLEIFESQRHYSEGPGGIESKYGIEGINYHRQKQGLQPLISLIEKMTGKCTFEPQEERAVKASYSFEKFRLYQDFNHISIVDGRKNSRQHLTQEQFDALVKHAHDKEKITYKDIRKVLNLSQDCKFSNVDYKPKVKKDKDGNPIQDDQSKDPESDAKILGLPKYHAIKRVLKGVSIDITTLTTAQLNCIATVVSKYKDDNDLVEKLETELVKNGLDSVVAHNISQASLELSFSGVGHLSIKAVDKILDVWQVGDTYDQAVTRAGYDFKSEWTGERFKKLSLLEHAENGGTKPINNPVVRRSVGQVIKVVNSLVETYGSPIGINIELARDMAKSKKERQDIEKANKQNRERNERAKQEAVELRKSNSKLDSNPTGLDIVKINLYRQQNCICMYSGKSIDNTRLLEDGYVEVDHIVPYSISFNDSYQNKVLVFGEENQQKGNRLPLQYLTGEKRERYIANVERIFGKNLGKRSRLLKTVITDEDRNKFIERNLNDTRYATKVIANTLKNYLLFDEVVHTKDTQKKRVITVNGTMTSYIRARFGLNKVRNNGDTHHALDAIVVACTTDSYIQQISKYNKLIENKYRKPDITNQIDLETGEIIATIEEWVDYETGEVLTKEEYFKRGLHTKQTNSHVKKELERQLFDNEMSPLSNYKATQFRNLVTQLIEQSQGLHDGNPVHVDGKDTHINKIFVSRKLNRKATGQGHQETTFGKVAKIKSSEVGVCKDRVQENEQLDPTLMVKRTELKNLKLDKDGEIDNYYKPDSDKLLYQALKQYLKEQSKLPEKDKFKEPFYKPIRNQDGTMTFGNVVLKVNTIEKKSSFVTLKNNGAAANGGMIRIDVFKVENAPKKGDNGYYWVPVYVNDFVKHTLPNLARPSLKEMKDEDFIFSLYPNDCIYVKHKDNMEFTREDEVVEGDKVVKNISKTTCNDVYIYYVKAGISGGAITVKSHDSLYNLSSLGVKGLKEISKCSVDTLGNITKITTKQVREKFPNQK

SEQ ID NO: 5982 - protein, 1496 aa, unidentified
  REGION 1..1496: note = Description of Unknown: Cas Enzyme sequence
MKKILGLDLGTNSIGWALLAPDEQKVLGIGNRIIPMGTDKQDYEKGVGITKNAKRREKRISRRMSKRYKLRRNKLLFILHTLGMLPNKFQFKTLSEDILLNKNIQGIPIPEKLQELELLPIKKGTLQLDSSEQYELCVKALREKVEVNELGKILYKFNQLRGYSGGTNDDEKKKKQKTEDENEGDTKKKTYEVITQKVKILSVEKSDEIFIVKGGKNKGDKQNYFDVTIELDGEEKEGKTKLQNFQEKIGQEEELEIRIRRNKKGEETSVEFALPQKTSWRKNMEEAEKILKEEKLFISELRLRDLRQSKWTKIRNRVFLRNRYKDEFDKVWDTQAKYYSILNDCPKETLEKIADYIFPGKSETQQKLKKEAIREGLNHIIKEQIIYYQRPLKPQAELISNCRFEKEEKVIATSHPLFQEFRCWKQINNLYVTSKREIYDKKKQKNVFQYIDSYLTNEQKQNIYNKLQIQKKVSFNDVKKMVGIKDDKTEYLNGLNVKAKLIGCDTFILIKKHIGEHFEKLVAQEPKIVEKIWDVIFDVRNHEGNEYEITSKRVSSIIEILQNYTDKETAIDLSLKLAQNIRFPRKYASLSLKAIQNILPLMKLNPQNISEQVKIKFESIKKMVETGEIVDNVDYDLEDYVIDFVKNNPTALEAGGLMEYLAISLIYSKHTAETIKAQIKDYHDIKYEKRNLRNPIVEQLISETMQVIKAIWKQYKFNPEDLEIRVELARDLKNSAEERDKIYKNQLKNQKINERVKKRLQEEGITLTDKNILKYRLYEQQKYMSPYTNKIIPLAALFDDKKYDIDHIIPVSRYYDDSFSNKVVCETHINGEKNNRTAWEYITQQNSKFGIFDVESFVNHINKNFFGKKKKNLLAEKIPLNPVERQLKDTQYISVAIKNELAKIVGSQNVKTSTGEVTAFLRSRWGLRKLFMKLTENRFKQMELWDLDENGNPKTKWIKDYFDKESNKNVYEIKNWSKRYDHRHHAIDALVVALTEQSHIQRLNNLNKYVQEELEKNKEEFKIEKKEDESILDAFFNLDEKRRDEILQKMESSRKFEIPFSGLKEQVQEHLESMIVSHKSKDKLGIKIDEKTKKKQLKIRGALHEETYYGKLDGKDTKVIEIGELSIGDIPKIVDEVLSDEIKNHREKYETMREAFTGEGLKTFNERRWRQKKLSELKIKNISDIEDENIKKDIQIHIEQYKSIKEAFNKEGLDKFNSGREIKIDNVLLLILNPIPVYKVKVWYSTKETTESTKETTKSSLKQLYGNGKQSVITGDNYMFLVMERDGERVFDIVSLYDSVKIAKNALKENEQDFKRRIIEERRSSYGIRNKIKGKPQKNPDKVLFTLQQNELVYLPTNSDDPVLKMPIKEFEEWIKNKENKKVFSKQIYKVVKFTGKDCSFIPHNYANTISVPKDLTDEEKENLRKKYGEKKIPKQEKNYEEFGSYGNSIKTEINENFIKKMVMKKEFNDDKLTKIQDTCIKIQVDWLGNVKIVRI

SEQ ID NO: 5983 - protein, 1346 aa, unidentified
  REGION 1..1346: note = Description of Unknown: Cas Enzyme sequence
MKKILGLDLGTNSIGWALVNEAENDGEKSSIIRLGVRVNPLTVDELTNFEKGKSITTNAERTLKRSMRRNLQRYKLRRENLIEILKEYRFISDETILSENGNKTTFETYSLRAKAATEEISLEQFARVLLMINKKRGYKSSRKAKNKDEDGALIDGMEVARKLYDENLTPGQYCLQLLEKGNKYLPDFYRSDLQTEFDKIWETQAKYHKELTDELKDKLREKNETQTWAICKVPFNIVGIGRTTKGEEKRKENFAWRVKSLFEKMELEALAVVLQKINSQINSSSGYLGAISDRSKELYFNKQTVGQYQMAVLNKNPNASLRNMVFYRQDYLDEFNAIWETQAKYHKELTDELKCKIRDVVIFYQRRLKSQKGLISFCEFENHKKEVIIDGKKKVINVGLKVIPRSSPLFQEFKIWQILNNIKIADKSTGEGEVTLLEQGEKEKLFAKLQITESLTTKEALEVLFEKRAKNYLLLNYEEKIEGNKTRAKIYEVLGENLTDENLNELWHLLYSWEGENKDLAEKITKKYGYPADIAKKLSNLTFPDDYGSLSSKAIKKIIPHLKQGNQYDKACELAGYAFSKNSLTKEQIENKVLKNKLDILSKNSLRNPVVEKILNQMIHIVNGVIDTYGKPNEIRIELARELKKNAKEREELTKSIADATRLHKEYRGILTKPPFNLSYVSRNDIIRYKLYKELKDNGYKTLYSNTYISQENLFSGDFDIEHIIPQSRLFDDSFSNKTLELRVVNTEKGNLTAYDFVKEKYGEDALENYLSRIEDLFKQGIISRAKYNKLKMQGKNIPDGFINRDLANTQYITKYAKTMLGDLVKFVISTTGSITERLREDWQLVDVMKELNWDKYKSLGLTEEFINEEGHKIRKIKDWTKRNDHRHHAMDALTVAFTKRQFIQYLNNLNARRTNEEQNISNTEKEEQDNFAITSEDIILKTKDVFGIERKELYKDKKGKLRFKPPMPLDEFRIESKKHLENILISIKTKNKVVTRNVNKIKKKNETNKKIQQTPRGQLHMETIYGSQRQCVVKEEVVNAKFDEAKILTVTKPVYKYALLKRLRENENSPKKAFTGKNGLEKDPIWLNELHALKVPEKVKTLSFETIYTIRKEISPDLNVDKIIDVKIKDILKKRLNEFKGDAKNAFTNLDKNPIWLNKEKGISIKCVTIIGVSNAEALHNKYDKSGKKQAVDFVNTGNNHHVAIYRDASGNLQENVVSFFETVKRANMGLPIIDKKYKQDEGWGFIFSLKQNEYFVFPNEKIGFNPKEMDLMNPENYGLISPNLFRVQKIASKDYWFRHHLETSVTNDIKDISYKRVSSLSFAESVVKVRINHIGQIVFVGEYD

SEQ ID NO: 5984 - protein, 1109 aa, unidentified
  REGION 1..1109: note = Description of Unknown: Cas Enzyme sequence
MLELVKYFNKKGVLLMAYPWRLGLNLGTDSIGWSALEIRKNGNLRLIDAGVRSFPDSREPDGTPLNEVRRTARLVRRQRDRKNRRKKMALNFLIKNGLMPQEDKARLIVASYDPYKLRAEALERQLSPFELGRIMMHFAIRRGFKSNRIYDLAAKDEKTDENKGMLEAVENLQKQLENKTLGQWLYEQKKNNNPIRFQPATEKHKNSYSYFPSREMYEQEFQKILDFQKEYFSKKLNWNILHDIIFNQRPLKPQIRGFCQYYTDKPRAYKCFPSYQIFKILQNINGLKYYDKDNVEQEVSCDMKKRLFHELSGKPHLTFKQIRKIFKDKKISTFNLEDEKKDKIFGNQTSSEMQKNEYFGSVWNELPLKRQDEIIELLITEDDPNVIYSKLKIPSLKLSDTQINNISNYIFPKKIIFYSSDFMIDVSNIMYDQWLPLSKAVKLLNLKNIPSFECSRLHTLSYYGKILSNLSRNAKESGEKTGKNNDETTYGRFSNPTLHVAFNQIRKVVNGLIRRFGKPEEIIIEATRNLKVSLAEKNLLIKEQNIQQKNSERIKKELVEKGIISPSKKLIKKYKLWEELSTDPLLRRCPYCGKTIELQELLSDEIEIEHILPYSRTLINSMDNLTVAHKICNQIKKDLSPYEAFGNNQKGFEWNTITEISSNLPYKKRRKFFSNAMNRFHEETGGFIDKQINDTSYISISAKNYLSSICDSNKILINSGKITSLLCGLWELNPLLNKGNSSWALNTEDKRHHALNSIIIGLCNRQIVSELSRYNKSKGYDNLKAPPFPLDKKDVEKVLKNIVVSYKQDHGYEGCILKETAMGKHTYLVEVETKDIDENDITRIVPKHIKNEFIELVKKSGFKKAKQLFQKQHDCVKVYRDKFVTRAPVVSLTLRDIYNIADNNIRNDLINYLEKHPFQNETEYKNQLQDYCELNKIHSVRYFPKDQKPIQISSYNKYYMPNDFFQVNIWRIPVSNSKYVYKGEYITRLEAYKKQKNKQPSKNRHPAAKFIGSLHKNDIIFVSNAFHKEYCKITCFSSTNNCIDIQPLYPESSISAWKEKTNPRLLNSFWNKDCKAQNFKNINTLFQDYSIILMKITACGELVKSRILS

SEQ ID NO: 5985 - protein, 1087 aa, unidentified
  REGION 1..1087: note = Description of Unknown: Cas Enzyme sequence
MWRMSLDLGTNSIGWTALELENPKDPNKVKILNMGVRIFPDGREPQKGTPLNEERRNARQMRRQRDRKIRRKRAMLNFLINNKLMPKEKEEQLSVAQLDPYTLRVAALERKLEPFELGRIMMHFSVRRGFKSGRKEQQTENTAEREGMLGGIQALETELQGLTLGQWLFKQREDGNSVRFKAKMEKTKIIYSFYPSREMYETEFAAIRNKQEKYYKEINWDRLHWLIFFQRPLKRPERGRCQFYTEKERGYRAFPSAHRFRILQDINNLRYYNEENREELIPSELKQKLFEALNSQKSLSFDRIRKLLGENYTGSFNLEDSKRDKLKGNETSVEFRKPEFFGTKWDELDIKKQDEIIEKLMIEDDENVIYDFLKPFGLSKEQIQKISGYNLPVGTTMLSSDFMIDCSEIMLKEWLPYSEAVKKMGLHHSKKEKQDIQRSLPYYGKILTGLVSGAKGENYNDNDEDCYGRIANPTVHIALNQLRKLVNALIRRFGNPDQIIMEVARELKLSKTQKDELFREQSKNQKENERIKKELTDLGVVQVSSEYIKKYKLWEELAVEGIARLCPYCGKTISAKQLISGSVEIDHVLPYSRTLLNSRDNLTVAHRECNQAKKNQSPFEAFGNSPKGFDWNRIMELAAKLPFNKRRKFYPDAMVRFHEDEGGFIDRQITDTAYLSKASKDYLSVICDSNAIWVSPGRLTSMLRGLWGFNTILNRGHDTWFKNRSDHRHHALDALVIGLCNRHLIAEAARINSSRGYSEIDAPPCPIKRNDIEEQLKSIVVSYKQDHGKEGKLYAETALAKHSYVEQIAPDDLGEKEINRIVPQKIQADIALLVQKEGFRKAKVLIQKKYKHLNVFRDKWVTRAPLESFSERDITNIADPVIREQVQKFIKSHPVKAEQKLQDVLNRFSEKTGIYSLRYFPKDQIPVSINSCNNKAYMPGDYYKVDIWRIPQPKGKYKYEGVFVSRPEAMRQQLHGDNEVYLKKPHPAAKLIMSLCKNDIITLSNETEQELCRIAGFATTRNKIDIRPLYASDTIAIWKKDTNINLCSDFWPSDIDGQNFKSINVLFNEYKIKLVKITVDGRIIYRS

SEQ ID NO: 5986 - protein, 1333 aa, unidentified
  REGION 1..1333: note = Description of Unknown: Cas Enzyme sequence
MKKILGLDLGTNSIGWALVNEAENDGEKSSIIRLGVRVNPLTVDELTNFEKGKSITTNAERTLKRSMRRNLQRYKLRRENLIEILKEYRFISNETILSENGNKTTFETYHLRAKAATEEISLEQFARVLLMINKKRGYKSSRKAKNKDEDGALIDGMEVAKKLYNENLTPGQYCFQLLEKGNKHLPDFYRSDLQTEFDRVWETQAKFHKELTDELKDKLREKNETQTWAICKDPFNIVGIRRTTKGEEQKKENFAWRVKALFEKMELEDLAIVLQKINSQINSSSGYLGAISDRSKELYFNKQTVGQYQMAILNKNPNASLRNMVFYRQDYLDEFDKIWESQTKFHNELTVKLKNEIRDIVIFYQRRLKSQKGLISFCEFESHRKEVTIDGKKKAITVGSKVIPRSSPLFQEFKIWQILNNIEIADKSADEGEVTLLEQSEKEKLFAKLQITESLTPKEALEILFEKKAKNYLLLNYEEKIEGNKTRAKICEVLGENLTDENLNKLWHLLYSWEGENKDLAEKITKKYVYPIEIAKKLSNLTFPDDYGSLSSKAIKKILPHLKQGNQYDKACELAGYVFSKKSLTKEQIENKVLKNKIDILPKNSLRNPVVEKILNQMIHIVNGVIDIYGKPNEIRIELARELKKNAKEREELTKSIAETTKLHEEYRRILTKPPFNLSYVSRNDIIRYKLYRELECNGYKTLYSNTCISKENLFSGDFDVEHIIPQSRLFDDSFANKTLELRSVNIEKGNLTAYDFVKEKYGEDALEDYLSKIEDLYKRDIISRSKYNKLKIQGKNIPDGFINRDLANTQYITKCAKTMLGDLVKFVISTTGSITERLREDWQLIDVMKELNWDKYKNLGLTEEFVNEEGHKIRKIKDWTKRNDHRHHAMDALTVAFTKRQFIQYLNNLNARRTNEEQNISNTEKEEQDNFAITSEDVILKTRDILGIERKELHKDKKGKLRFKPPMPLDEFRIESKKHLENILVSIKTKNKVITKNINKIKKKNETNKKIQQTPRGQLHLETIYGSQRQCVVKEEVVNAKFDEIKILTVTKLVYKDALLKRLRENENDPKKAFTGKNNLEKNPIWLDELHTLKVPEKVKTLSFETIYTIRKEISPELNIDKIIDVKIKRILEKRLNEFKEDAKSAFTNLDRNPIWLNKEKGISIKRVTITGVSNAEALHCKCDKDGNLVLNKDGKKQAVDFVQTGNNHHVAIYRDANGNLQENVVSFYETVKRVNMGLKVIDKKYKQDEGWEFLFSMKQNEYFVFPNEKTGFNPKEIDLMNPENYHLISPNLFRVRKLQSGEYVFQHHLETKAVDLSAKNPLKNIAFYIIY

SEQ ID NO: 5987 - protein, 1483 aa, unidentified
  REGION 1..1483: note = Description of Unknown: Cas Enzyme sequence
MKKILGLDLGTNSIGWVLVEQDFEAKIGKILGNGVRIIPMSQEVLDNFGGGNPSKSQTAERTDFRKTRRLRERHLLRRERLHRVLNILGFLPKHYASQIDFENRLGQFLDETEPKIAWKEIWNEQKNKNNFEFIFQKSFYEMVDDFKQMGLEIKIPYDWTIYYLRKKALTKKIEKEELAWIILNFNQKRGYYQLRGEEEEENPNKLVEFHSLKIIDVVADEKPNSKGDTWYSLHLENGWIYRRSSKMPLFDWKDKVRDFIVTTDLKDDGTIKTDKDGYEKRSFRAPSEDDWTLLKKKTEANIEHSQKNVGTYIYETILENPSQKIRGKLVRTIERRFYKEELIAILKKQIELQPELFTEDLYNDCIRELYRNNEAHQLALSKRDFEHLFVNDIIFYQRPLKSQKSSIGNCTLEYRKHKDKDGNEIIEYLKAIPKSNPLYQEFRLWQWFFNLKIYKRDDDTDVTEQFITNITDKEKLFDFLNNRKEIDQKALLKYFKLTEKTYRWNFVEDKNYPCNETRTQIKTRLEKVKNISADFLTSEMEQKLWHIIYSVTDKNEFEKGLKTFAVKHNLDENSFVENFKKFPPFKSEYGSFSEKAIKKLLPLMRLGKYWNLKLIDTKTRDRISKIITGEYDEAIKNQVRDKAIDLKSENDFQGLQLWLAQYIVYDTPTANKWNSVTDLEKYLKEFKQHFLRNPIVEQVITETLRVVRDIWKEYGNFSEIHIELGREMKHTAEERKRLTNIVTENENTNLRIKALIMELKGYPDVEDVRPYSPIQQEKLKIYEEYAVSNIEENDTEKEFIQKISKVAQPSKSELQRYKLWLEQKYCSPYTGQTIPLGKLFTEEYQVEHIIPQSRYFDDSLSNKVICEAAVNQLKDKQLGLEFIKNHHGEKIDCGLRKKVEIFSEEAYLDFVKKHYAKNYTKRNKLLLEEIPEKMIERQLNDTRYISKFVSQLLSNIVREDKNDDGVNSKNLIAGNGKITTILKRDWGLNEVWNTLILPRFKRMNELTGTEDFTSKNQEGHIIPSIPLKLSKGFQKKRIDHRHHAMDALVIACATRDHINLLNNQSAKSENSRYDLQYKLRNTEKRTYFDKRENKQVTRDVFTEFKKPWDKFMDDARKELEKIVVSFKQNLRIINKTTNKYYTYDNGKKILKKQEKGDSRVIRKPLHKDTIFAKVYLLHKTREMTLQKALEKVKELKDVNIIVEKMLRKKIAEYFIENDIDINLALKDEYLKSNQRIKVFEIQTASRKSLDTSFTEKIIKESVTDTGIQKILLKHLLIEKNNPEVAFSPEGIEKMNKNIIKLNDEKYHQPIYKVRKYESLGNKFQVGITGNKRDKYVEAEKGTNLFFAIYVDKDGKRSYETIPLNIVIKRMKQGLNAVPERNDKEDDLLFYLSPNDLVYVPTEKENGHTIDWNNLDKEQLNRIYKMVSCTGNQCFFIRHSVATSIVNKVEFSPLNKMEKSIDEVMIKECCIKLKIDRLGCIKQL

SEQ ID NO: 5988 - protein, 1314 aa, unidentified
  REGION 1..1314: note = Description of Unknown: Cas Enzyme sequence
MKKILGLDLGTNSIGWALVNEAENDGEKSSIIRLGVRVNPLTVDELTNFEKGKSITTNAERTLKRSMRRNLQRYKLRRENLIEILKEHRFISDETILSENGNKTTFETYRLRANAATEEISLEQFARVLLMINKKRGYKSSRKAKNKDEDGALIDGMEVAKKLYDENLTPGQYCFQLLNDGKKFLPDFYRSDLQAEFNNIWKKQKEFYPEILTDELKDKLHEKNENQTWAICKEPFDIKGIPRTTKGEEQKKENFAWRVKALFEKMEPEALAIVLQKINSQINGSSGYLGAISDRSKELYFNKQTVGQYQMAVLNKNPNASLRNMVFYRQDYLDEFDKIWETQSKFQKELTDELKSEIRDVVIFYQRRLKSQKGLISFCEFENHKKEVTIDGKKKVITVGLKVIPRSSPLFQEFKIWQILNNVEIADKSTDDGEVTLLEQGEKEKLFAKLQITESLTPKEALEVLFEKKAKNYSLLNYKEKIEGNKTRAKIYEILGENLTDENLNELWHLLYSWEGENKDLAEKITKKYSYPIDIAKKLSNLTFPDDYGSLSSKAIKKILPYLKQGNQYDKACELAGYVFSKNSLTKEQIENKVLKDKLEVLPKNSLRNPVVEKILNQMIHIVNGVIDTYGKPNEIRIELARELKKNAKEREELTKSIADTTKLHEEYRGILTKPPFNLSYVSRNDIIRYKLYKELEGNGYKTLYSNTYISKENLFSGDFDVEHIIPQSRLFDDSFANKTLELRVVNIEKGNLTAYDFVKEKYGEEALENYLSKIENLYKREIISRAKYNKLKTQGKNIPDGFINRDLANTQYITKYAKTILGDLVKFVISTTGSITERLREDWQLIEMMKELNWDKYKNLGLTEEFVNEEGHKIRKIKDWTKRNDHRHHAMDALTVAFTKRQFIQYLNNLNARRTNEEQNISNTEKEAQDNFAITLEDIILKTKDVLGIEQKELYKDKKGKLRFKPPMLLDEFRAESKKHLEIILISIKAKNKVVTKNVNKIKKKNETNKKIQQTPRGQLHLETIYGSQRQCVVKEEVVNAKFDEAKILTVTKPVYKDALLKRLRENGNDPKKAFTGKNSLEKNPIWLNELHTLKVSEKVKTLSFETIYTIRKEISPGLKIDKVIDVKIRRILEKRLDEFKGDAKIAFTNLDKNPIWLNKEKGIFIKSVTITGVNNAEALHSKYDNDGKKQAVDFVNTGNNHHVAIYQDANGNLQENVVSFFEAVKRANMGLPIIDKKYKQDEGWKFFFSLKQNEYFVFPNEKTGFNPKEIDLMDLENYGLISPNLFRVQKIASKNYMFRHHLETKVSFETKE

SEQ ID NO: 5989 - protein, 1542 aa, unidentified
  REGION 1..1542: note = Description of Unknown: Cas Enzyme sequence
MKKILGLDLGTNSIGWMLIEQDFEAKIGKILGKGVRIIPMSQEVLDNFGGGKPSKSQTAERTGFRRTRRLRERHLLRRERLHRILNILGFLPKHYASHIDFRKRLGQFLDEKEPKIAWKEILNEQKNKNDFEFIFQKSFYEMVDDFKTIGQSTKIPYDWTIYYLRKKALTKKIEKEELAWLILNFNQKRGYYQLRGEEEEKTDVKEYCALLKVVSVEKGEKDKNNDKKTWYKFTFENGWEYSATFVTEPNWLNTEREFLITEEYDEDGNIKIVKDKKSDTTGKEKRRITPLPSFDEIDLMSKEQQDKIYKKIKARTEITISNSKKTVGTYIYENILKNPTQKIRGKLVRTIERKFYKDELIAILKKQIELQPELFTEDLYNDCIRELYRNNEVHRLVLSKRDFVHLFVNDIIFYQRPLKSQKSSIGNCILEFVEHKINQKDEKGKTIKNVFEKDKNGNDIVIKEYLKGVPKSNPYYQEFRVWQWLYNLKIYTREDDKDVTNEFIKDIADLEKLFEFLMTKKEVGNKDVVEFLIEENNKNKVEQQIRELYPKLNDEKINQKVKTELAKKIKELLPKYRWNYVFDNTKEKEEDKSKKYPCNSTGYEIRRRLKDVSNVPDGFLKIIDMKEVEYTKKNEQGIREKTGKTGIESLGTREYQIWHIIYSVTDKKEYETALRNFAVKYNLDENSFVENFKNFKPFKSEYGSFSEKAIKKLLPLMRLGKYWNWESIGAKIKDRIGKIITGEYDETVKNLVREKAIDLKSENAFQGLQLWLAQYIVYNRHSESANADKWNSVADLEKYLEEFKQHSLRNPIVEQVIMETLRVVRDIWKEYGNFSEIHIELGREMKNTAEERKHLTNIVTENENANLRIKALIMELKGYPDVEDVRPYSPIQQEKLKIYEEYAVSNIKENDTEKEFIQKISKMAQPSKSELQRYKLWLEQKYCSPYTGQTIPLGKLFTEEYQVEHIIPQSRYFDDSFSNKVICEAAVNQLKDRQLGLEFIKNHYGEKIDCGLGKKVEIFSEEAYKYFVKGHYANNDAKRNKLLLEEIPEKMIERQMNDTRYISKFVCQLLSNIVRENENDDGVNSKNLIACNGKITTILKQDWGLNEVWNSLILPRFERMNKLTDTEEFTSKNQEGHIIPSIPLELSKGFQKKRIDHRHHAMDALVIACATRDHINLLNNQSAKSENSRYYLQNKLRKTEKKTYFDKNENKQVTRDVFTEFKKPWDKFTDEARKELEKIVVSFKQNLRIINKTTNKYYTYDNGKKILKKQEKGDNRVIRKPLHKDFVFGKVNLPRIKVPNGKIAVAIRRSLDTSFDLKKIETITDTGIQKILKNYLAVKNNDVQSAFSPEGIEEMNNNIAVYNDGKMHKPIVKVRTFEIGSRFALGIKGNKKDKYVEAAKSTNLFFAVYVDKDGKRSYETIQLNKIIDKLKQKLPAVPEVNENGCKLLFYLNPNDLVYVPKNDEIESKKFEIDRNRIYRFTDSSGSTANFVPANIAKVIFDYSKDKQKRIDYKIQNEIGLGSLRSKNENTITGEQQIKSVCL

SEQ ID NO: 5990 - protein, 1092 aa, unidentified
  REGION 1..1092: note = Description of Unknown: Cas Enzyme sequence
MHRFAFDLGTNSIGWTVLDIFQPKVPKILDMGVRVFPDGREAKTGTPLNEARRNARQMRRQRDRKIRRKNAMLKFLVDNKLMPYERDDQQDIARLDPYVLRAAALERKLEPFELGRIMMQFSIRRGFKSGRKEQQTENSAEREGMLGGIQSLEGELQGLTLGQWLCKKREEGNPVRFKPKMEKTKIIYRFYPSREMYEAEFTAIKEKQGKYFKKINWDRLHWLIFFQRPLKRPERGRCQFYTEEDRGYKAFPSAHRFRILQDISDLRYYNEENREEEIPSELKSLLFESLNSQKSLSFDRIRKLLGENYTGSFNLEDSKRDKLKGNETSVDLRKPEFFGPAWDKLSFQKQDEIIEKLMVEDDENVIRDFLKNLGLNKEQIRKISGYNLPTGTKMLSSRFMIECSDIMLKEWIPYYAAVERMGLHHSKKEKREIRRSLPYYGKILTGQVSGARGENYNGNDEERYGRIANPTVHIALNQLRKLVNVLIRHFGNPDQIIMEVTRELKLSKARKDEIFREQAKNQRDNERIKKELTDLKLLQISTEDIRKYRLWEELALEGINRRCPYCGRTISAQQLMSGAVEIEHILPYSGTLLNTRDNLTVAHRECNRAKRNQSPFEAFGKSPKGFDWNLIMELTAKLPFKKRRKFFPDAMVRFHEEEGGFLDKQLTDTAYLSKASKDYLSAICDSNAIWVSPGKLTAMLRGFWGFNTLLNRGHDTWYKNRSDHRHHALDALIIGLCDRSIIADAARLNSGKGYKEVNAPPCPVKREDLEERLKSIIVSYKQDHGKEGKLYAETAMSKHSYLEQINPADLLEKEIIRIVPKAIQNDIVLLVQKEGFRKAKTLIQSKYKYLRVFRDKWVTRAPLESLSERDLPNVSDPVIRDEVLEFVKAHPVQSEEKLQDVLKRFSEKKQIYSIRYFPKDQVPIRIEDSKNKAYMPGDYYRVDIWRIPQQKGKYKYEGVFVSRPEAMRQQLYGKDFVSLRKPHPAAKLIMRLCKNDIIALSNETERELCRIAGFSTTRNNIDIRPLYASDTIAAWKKETNINLSAAFWPSDVDGQYFKSINMLFNEYKIKLVKITVDGRFMPILIGDDTQNC

SEQ ID NO: 5991 - protein, 1025 aa, unidentified
  REGION 1..1025: note = Description of Unknown: Cas Enzyme sequence
MRRFAFDLGTNSIGWTVLDMSQPKTPKILDMGVRIFPDGREAKTGTPLNEARRNARQMRRQRERKIRRKKAMLKFLVNNKLMPYNREEQQAVAQLDPYMLRSAALERKLEPFELGRIMMQFSIRRGFKSGRKQQAESTVEQEGMLGGIQSLESELKGVTLGQWLYRQREAGNPVRFKPTIEKTKIIYSIYPSREMYETEFTEIRKKQEKHFKKINWDRLHWLIFFQRPLKRPERGRCQFYTEEDRGYKAFSSAHRFRILQDINNLRYYNEENREEEIPSELKLRLFEALNSQKSLSFDKIRKLLGENYTGSFNLEDSKRDKLKGNETSVDLRKPEYFGQGWDKLSAQKQDEIIEKLMTEDDESIICDFLKIFGLSDDQIQKVSGYNLPTGTTMLSSRFMIECSEIMLKEWLPYYAAVERMGLHHSKKEKREILRTLPYYGKILTGQVSSAKGESYKGNDEERYGRIANPTVHIALNQLRKLVNALIRRFGNPDQIIMEVARELKLSKARKDEIFREQTKNQKDNERIEKELKEHGLLQIKPDDKKKYKLWEELAPEGINRRCPYCGKTISAKQLMSGAVEIDHILPYSRTLLNTRDNLTVAHRECNQAKKNKSPFEAFGKSPHGFDWNLIMELIAKLPFKKRQKFFPDAMIRFHEEEGGFLDKQLTDTAYLSKASKDYLSSICDSNAIWVSPGKLTAMLRGFWGFNTLLNRGHDTWYKNRSDHRHHALDALVIGLCDRRIIAEAARLNSGKGYSEINAPPCPVKREDIEDGLKSLIVSYKQDHGKEGKLYAETAMAKHSYLVQINPADLLEKEIYRVVPKTIQNEIVILVQKEGFKKAKTSIQGKYKFLRVFRDKWVTRAPLASLSERDLPNISDPIIRDEVLEFVKVHSAQSGEKLQDVLKQFSEKKQIYSIRYFPKDQIPVCIEDNDNKAYMPGDYYRVDIWRIPQQKGKYKYDGVFISRPLAVKQQIYGDDSACLKRPHPAAKLIMSLCKNDIIVLSNKTEQELCRIAGFSTTQNKIDIRPL

SEQ ID NO: 5992 - protein, 948 aa, unidentified
  REGION 1..948: note = Description of Unknown: Cas Enzyme sequence
MWRLALDMGTNSIGWSVLDIENQENVKILDMGVRIFPDGREPKTGTPLNEARRNARQMRRQRDRKIHRKKAMLSFLVNNGLMPKEREEQQIIAQLDPYTLRTTALERKLKPFEFGRIMMQFSVRRGFKSGRKEQQAENTAEREGMLGSIQSLETELRGLTLGQWLCKQREAGNSVRFKAKVEKTKIIYSFYPSREMYENEFAAIRNKQEKHYKEINWDRLHWLIFFQRPLKRPERGRCQFYTEEERGYRAFSSAHRFRILQEINNLRYYNEENIEEIIPVELKLKLFEALNMQKSLTFNQIRKKLGENYTGSFNFEDSKRDKLKGNETSVDFRKPELFGTSWDKLDFKKQDEIIEKLMIEDDENAIYDFLKPFGLSEKQIQKISGYNLPVGTTMLSSHFMIDCSEIMLKEWLPYSEAVKKMGLHHSKKEKQKRRHSLPYYGKILTGLVSGAKGENYKGDDEDRYGRIANPTVHIALNQLRKLVNALIRRFGNPDQIIMEVARELKLSKTRKEELFREQSKNQKENERIEKELKDLGLLKISSEDKKKYKLWEELAVEGIARLCPYCGKTISAKQLISGDVEVEHILPYSRTLLNSRDNLTVAHRNCNQAKKNQSPFEAFGNSPKGFDWNRIIELAAKLPFNKRRKFYPDAMVRFHEDEGGFIDRQITDTAYLSTASKDYLSAICDSNAIWVSPGRLTAMLRGLWGFNTLLNRGHDTWFKNRSDHRHHALDALVIGLCNRHLIAEAARINSNRGYSEIDAPPCPVKRIDIEEQLKSIVVSYKQDHGKEGKLYAETALAKHSYVEQINPEDLGEKEINRIVPKKIQVDIALLVQKEGFRKAKTLIQKKYKHINVFRDKWVTRALLESLSERDIPNIADPIISEQIQKFIKTHPTKTGQKLQDVLIRFSEKTGIYSLRYFPKDQIPVSINSCNNKAYMPGDYYRVDIWRIP

SEQ ID NO: 5993 - protein, 1106 aa, unidentified
  REGION 1..1106: note = Description of Unknown: Cas Enzyme sequence
MWRLALDLGTNSIGWTALELENPKDPNKVKILDMGVRIFPDGREPKTGTPLNEARRNARQMRRQRDRKIRRKKAMLNFLINNSLMPKEREEQQAIAKLDPYTLRAAALERKLEPFELGRIMMHFSVRRGFKSGRKNRQEVSESSNNKEKSKSKDKQTESNTDKEGMLGGIEFLETELRGLTLGQWLCKRREDGNTIRFKAKMEKTKIIYSFYPSREMYETEFAAIRNKQEKYYKEINWDRLHWLIFFQRPLKRPERGRCQFYIEKERGYRAFPSAHRFRILQELNNLKYYNEENREEIIPPELKLKLFETLNTQKSLTFNQIRKKLGENYTGLFNLEDSKRDKLKGNETSAEFRKPEFFGTKWDELDLKKQDEIIEKLMIEDDENVIYDFLKPFGLSKEQIKKISGYNFPVGTTMLSSDFMIDCSEIMLKEWLPYSEAVEKMGLHHSKKEKQDIQRSLPYYGKILTGLVSGAKGESYKDNDEKCYGRITNPTVHIALNQLRKLVNALIRRFGNPNQIIIEVARELKLSRFRKKEIQNEQSKNQKENERIKKELTNLGVIQVSSEYIKKYKLWEELGVERTARLCPYCGKTIPGKQLVSGSVEIEHILPYSRTLLNSRDNLTVAHRECNQAKKNKSPFEAFGNSPKGFDWNRIIEITKKFPTKEKRQKFYPDAMVRFNEAGEGFIKRQITDTAYLSKASKDYLSVICDINAIWVSPGRLTSMLRGLWGFNTLLNRGHDTWFKNRSDHRHHALDALVIGLCNRDLIAEAARINSSRGYSEIDAPPCPIKRNDIEEQLKSIVVSYKQDHGKEGKLYAETALAKHSYVEQIAPDDLGEKEINRIVPKKIQADIALLVQKEGFRKAKVSIQKKYKHLNVFRDKWVTRAPLESLSERDIPNIADPVIRDQVQKFVKSHPVKAGQKLQDVLNRFSEKTGIYSLRYFPKDQIPVSINSCNNKAYMPGDYYRVDVWQIPQPKGKYKYDGVFVSRPEAMRQQLHGDNEVYLQKPHPAAKLIISLCKNDIVALSNETEQELCRIAGFSTTQNKIDIRPLYASDTIAKWKKDTNINLCSDFWPSDTEGQYFKSINTLFNEYKIKQVKITVDGRSIYRS

SEQ ID NO: 5994 - protein, 1023 aa, unidentified
  REGION 1..1023: note = Description of Unknown: Cas Enzyme sequence
MWRLALDMGTSSIGWTALDIENPENLKILDMGVRIFPDGREPKTGTPLNEARRNARQMRRQRDRKIRRKRAMLNFLINNKLMPKEQKEQQAVAQLDPYTLRAAALERKLKPCELGRIMMQFSIRRGFKSGRKDQQAVNAAEREGMLGGIQSLEMELHGLTLGQWLCKQRDTGNPVRFIPTMEKTKINYSFYPSREMYEIEFATIRSKQEKYYKEINWDRLHWLIFFQRPLKRPERGRCQFYTEEERGYRAYPSAHRFRILQEINNLKYYNEENKEEFIPADLKLKLFEALNTQKSLTFNQIRKKLGENYTGSFNLEDSKRDKLKGNETSVDFRKPELFGPAWDELDIQKQDEIIEKLMIEDDENVIYDFLKPFGITEEQIQKISGYNLPVGTTMLSSRFMIDCSKIMLEKWLPYYDAVKEMGLHHSKKEKQDIQRSLPYYGKILTGLVSGAKGESYNGNDEERYGFIANPTVHIALNQLRKLVNALIRRFGNPDQIIMEVARELKLSRSRKDELFREQSKNQKENERIRKELTDLGLIKISSEDIKKYKLWEELATDGIARLCPYCGKTISAKQLISSAVEIEHILPYSRTLLNSRDNLTVAHRKCNQEKKNQSPFEAFGKNTKGFDWNRIMELAAKLPFNKRRKFYPDAMVRFHEEEGGFIDRQITDTAYLSKASKDYLSAICNCNAIMVSPGRLTAMLRGSWGFNTLLNRGHDTWFKNRSDHRHHALDAIVIGLCNRHLIAEAARINSGKGYSEIDTPQCPIKRNDIEDRLKSIIISYKQDHGKEGKLYAETAMAKHSYLEQINPEDLAEKEINRIVPKKIQADIVFLVQTEGFRKAKTLIQKKYKYLNVFRDKWVTRTTLESLSDRDIPNIADPLIREQIQKFVKSHPVQTGQKLQDVLTRFSEKTGIYSLRYFPKDQIPVSINSCNNKAYMPGDYYRVDIWRLPRPKGKYKYEGVFVSRPEAMRQQLHGDDVVSLQKPHPAAKLIMSLCKNDIVALSNETEQEFCRIAGFSTTQNKVDI

SEQ ID NO: 5995 - protein, 1087 aa, unidentified
  REGION 1..1087: note = Description of Unknown: Cas Enzyme sequence
MWRLSLDLGTNSIGWTALSLERPKDPNKIKILDMGVRIFPDGREPQKGTPLNEARRNARQMRRQRDRKIRRKKAMLNFLINNKLMLKEREEQQAVALLDPYTLRTAALERKLKPFELGRIMMQFSIRRGFKSGRKEQQAKNAAEREGMLGGIQSLETELNDLTLGQWLCKQRDAGNPVRFAPTMEKTKIIYSFYPSREMYETEFAAIRNKQEKYYKEINWDRLHWLVFFQRPLKRPERGRCQFYTEEERGYRAFPSAHRFRILQDINNLRYYNEENREEVIPSELKLKLFEALNSQKTLTFDKIRRLLGEDYTGSFNLEDSKRDKLKGNETSVDFRKPELFGPAWDRLDIQKQDEIIEKLMIEDDEAIICDFLKPFGLSKEQIQEISGYHLPVGTTMLSSRFMIDCSEFMLKEWLPYSGAVKKMGLHHSEKEKQDRQRSLPYYGKILAGLVSGAKGESYEGNDEARYGRIANPTVHIALNQLRKLVNALIRRFGNPDQIIMEVARELKLSKTRKDELFREQSKNQKENERIKKELTDLGLIKISSEDIKKYKLWQELATDGIARLCPYCGKTISAKQLVSGAVEIEHILPYSRTLLNSRDNLTVAHRKCNQEKRNKSPFEAFGGNPKGFDWNYIMELAAKLPFNKRRKFYPDAMVRFHEDEGGFIDRQITDTAYLSKASKDYLSVICDSNAIIVSPGRLTAMLRGSWGFNTLLNRGHDTWFKNRSDHRHHAVDALVIGLCNRNLIAEAARINSDRGYSEIDAPPCPIKRTDIEERLKSIIVSYKQDHGKEGKLYAETALAKHSYVEQINPEDLGEKEINRIVPKTIQTDIALLVQKEGFRKAKTLIQKKYKHLNVFRDKWVTRAPLESLSERDIPNIADPLIREQIQKFVKSHPIQTGQKLQDVLARFSKKTGIYSLRYFPKDQIPVSINSCNNKAYMPGDYYRVDIWRIPQSKGKCKYEGVFVSRPEAMRQQLNGDDAVSLQKPHPAAKFIMSLCKNDIIALSNEMEQELCRIAGFSTTQNKVDIRPLYASDTIAAWKKDTNINLCSAFWPSDIEGNYFKSINVLFNEYKINLVKITVDGRLIYRS

SEQ ID NO: 5996 - protein, 1200 aa, unidentified
  REGION 1..1200: note = Description of Unknown: Cas Enzyme sequence
MQKILGLDLGTNSIGWALIEQDFEAKSGKISGMGSRIIPMSQDILGNFDAGNSVSQTAERTNFRGIRRLRERHLLRRERLHRVLNVLGFLPEQYANQIDFEKRLGQFLDETEPKIAWKEIWNEQKNKNDFEFIFQKSFLEMVADFNAMGQSTKIPYDWTIYYLRKKALTEKIEKEELAWIILNFNQKRGYYQLRGEEEEENPNKLVAFHSLKIVDVVADEKPNNKGETWYSLHLENGWIYRRSSKTPLFDWKDKVRDFIVTTDLNDDGTIKTDKEGCEKRSFRAPSEDDWTLLKKKTEADIEHSKKTVGTYIYENLLKNPSQKIRGKLVRTIERKFYKDELIAILKKQIELQPELFTEDLYNDCIRELYRNNETHQLALSKRDFVHLFVNDIIFYQRPLKSQKSAIGNCTLEYRKHKDKDGNEIKEYLKAVPKSNPLYQEFRLWQWIFNLKIYKRDDDTDVTELFITSIDDKEKLFNFLNNRKEVDQKALLKHFKLTEKTYRWNFVEDKAYPCNETGTQIRTRLAKIENVPTDFLTPEIEQKLWHIIYSVTDKNEFETALKTFAIKHNLDEKTFVENFKKFPPFKSEYGSFSEKAIKKLLPLMRLGKYWNLELIDAKTKDRIDKILTGEYDETIKNRVRDKAIHLKSENDFQGLQLWLAQYIVYDRHSEAEFAGKWKTVADLEKYLEEFKQHSLRNPIVEQVITETLRVVRDIWKKHGDFSEIHIELGREMKNTAEDRKRLTNMVTENENTNLRIKALIMELKDCADVENVRPYSPIQQEILKIYEEGVINSNIEIPEDIAKISKTAQPSKSELQRYKLWLEQKYRSPYTGQIIPLGKLFTEEYQIEHIIPQSRYFDDSLNNKVICEAAVNQLKDKQLGFEFIKNHHGQIVETGFGKSVKILEEDGYQEFIKEHYAKNRSKRNKLLLEDIPEKMIERQLNDTRYISKFVSQLLSNIVREDKEDDGINSKNLIAGNGKITTTLKQDWGLNDVWNDLILPRFERMNMLTKSTSFTAWNEQYQKFLPTVPLEFSKGFQKKRIDHRHHAMDALVIACATRDHINLLNNQSAKSEISRYDLQNKLRNKEKRTFFNKTENKQVTQDIFTEFKKPWDNFTVDARNELDKIVVSFKQNLRVINKTTNTYQAYDNGKKVLKKQEKGDSWAIRKPLHKDTVFAKVSLRKIKSVRLSEALKDWKMIVNKEL

SEQ ID NO: 5997 - protein, 956 aa, unidentified
  REGION 1..956: note = Description of Unknown: Cas Enzyme sequence
NNAEREGMLGGIQSLETELNGLTLGQWLCKQRDTGNPVRFVPTMEKTKIIYSFYPSREMYETEFAAIRNKQEKYYKEINWGNKENKENKDGLYWLIFDQRSLKRPERGRCQFYTEEERGYRAFPSAHRFRILQDINNLRYCNDENREEIIPSELKQKLFEALNSQKSLSFNKIRKLLGENYTNSFNLENDKRKELKGNETSFEFRKPEFFGTIWDELDIKKQDEIIEKLMIDDDESMICDFLKPFGLSKEQIQKISGYNLPVGTTMLSSHFMIDCSKIMLEKWLPYYDAVKEMGLHHSKKEKQDIRRSLPYYGKILTGLVSGAKGEKYKGNDEECYGRIANPTVHIALNQLRKLVNALIRRFGNPDQIIMEIARELKLSKTRKDELFREQSKNQKENERIRKELTDLGLIKINSEDIKKYKLWEELAAEGIARLCPYCGKTISAKQLVSGTVEIEHILPYSRTLLNSRDNLTVAHRKCNQEKRNQSPYEAFGSSPKGFDWNRIIELAAKLPFNKRRKFYPDAMDRFHEDKGGFIDRQITDTAYLSKASKDYLSAICDSNAIIVSPGRLTARLRGSWGFNTLLNRGHDTWFKNRSDHRHHALDALVIGLCNRHLIAEAARINGGRGYSEIDAPPCPIRRNDIEERLKSIIVSYKQDHGKEGKLYAETALAKHSYVEQINPEDLEEKEINRIVPKTIQADVVLLVQKEGFRKAKTLIQKKYKHLNVFRDKWVTRAPLESLSERDIPNIADPIIREQVQKFIKSHPVQTGQKLQDVLARFSKKTGIYSLRYFPKDQIPVSINSCKNKAYMPGDYYRVDIWRVLQPKGKYKYEGVFVSRPEAMRQQLHGDDAVSLQKPHPAAKFIISLCKNDIIVLSNETEQELCRIAGFSTTQNKVDIRPLYASDTIAAWKKDTNNNLCSAFWPSDIEGQYFKSINILFSEYKINLVKITVDGIVIYRS

SEQ ID NO: 5998 - protein, 954 aa, unidentified
  REGION 1..954: note = Description of Unknown: Cas Enzyme sequence
MWRLALDLGTNSIGWTALELENPKDPNKVKILNMGVRTFPDGREPKTGTPLNEARRNARQMRRQRDRKIRRKRAMLNFLINNKLMPKEKEEQLPVAQLDPYTLRVAALERKLEPFELGRIMMHFSVRRGFKSGRKEQQTENTAEREGMLGGIQALETKLQGLTLGQWLFKQREDGNSVRFKAKMEKTKIIYSFYPSREMYETEFTAIRNKQEKYYKEINWDRLHWLIFFQRPLKRPERGRCQFYTEKERGYRAFPSAHRFRILQDINNLRYYNEENREELIHSELKQKLFEALNSQKSLSFNKIRKILGENYTNSFNLEDDKRKELKGNETSFEFRKPEFFGTIWDELDIKKQDEIIEKLMIEDDENIIHDFLKPFGLSKEQIQKISGYNLPVGTTMLSSDFMIDCSEIMLKEWLPYSEAVKKMGLHHSKKEKQDIQRSLPYYGKILTGLVSGAKGENYNDNDEDCYGRIANPTVHIALNQLRKLVNALIRRFGNPNQIIIEVARKLKLSKFRKKEIQNEQSKNQKENERIKKELTDLGVIQVSSEYIKKYKLWEELGVERTARLCPYCGKTISAKQLISGSVEIDHILPYSRTLLNSRDNLTVAHKTCNQAKKNQSPFEAFGNSPKGFDWNRIVELAAKLPFNKRRKFYPDAMVRFHEDEGGFIDRQITDTAYLSKASKDYLSAICDNNAIWVSPGRLTAMLRGLWGFNTLLNRGHDTWFKNRSDHRHHALDALVIGLCNRHLIAEAARINSNRGYSEIDAPPCPIKRNDIEEQLKSIVVSYKQDYGKEGKLYAETALAKHSYVEQIAPDDLGEKEINRIVPKKIQADIALLVQKEGFRKAKVSIQKKYKHLNVFRDKWVTRAPLESLSKDDIPNIADPIIRKQVQEFIKSHPIETGQKLQDVLNRFSEKTGIYSLRYFPKDQVPVSINSCNNKAYMPGDYYKVDIWRIPQPK

SEQ ID NO: 5999 - protein, 1067 aa, unidentified
  REGION 1..1067: note = Description of Unknown: Cas Enzyme sequence
MNKGYILGLDIGVTSVGWGIIDQDHEIVDAGVRLFEEANASMNEKRREKRHARRVKRRKTQRIIEMKRHLLRHNIIGEGFKPMGNPYELRVKGLKEKLEDEEMATALLHLVKRRGSTLDTVDVTEDKEELKSKEQLSINTKKLKDEHKHVSEVQLERYNERKSIRGEDNIFKTEDYIAETTAILNTQDKSEAFNEKVIELISRKRHYSDGPGSKDSPSPYGKFRLNEEGEVEEVNLIEEMRGHCSVYKDELRAPLESFSAELFNFLNDLNNLKIIHREEEKLTVNEKETIIDKIREKGYLSPKAKPHEAIAKILNIEPETLSGFRINTKKNPIITEFKGYQKLLKVFNKHEESLIGKDKILDTISEILTSHKKPSERIEAFESLGLNELLIKDLSNLPGFEKYHSMSFKAIYEITLELLETTKNQMEIITENNLVVPEAPNKLTLDENLILSPIAKRAHRESLRVIERLTHKYGDFDKIVIETTRAKNTKEEKDDIKKLQKIREQRNEEVQELLKGYGEQANRIKGKKALKIRLYKQQDGKCAYTHNPLSLDAIVNNRDSYEIDHVLPYSVSMDNSLNNQVLCEHKANQIKGNKTPYIYFKSGQAYGEVKTFEAFKTLVLSNTKYPRRKKELLLKEEDITRFDVMQEFTERNLVDTSYAIRSLMRTLKSFYKYHEKPTKVFTVRGKVTNLYRNRAKGLFAYDHPDADFNPMEKDRSQYRHHAIDALIAARLSEQKLIKELMYMDRTKKVDIDTGEILEDDNPMFDEKLIRFLKQLSKVDDSDLKFSWKVDKKPNRPFSDETIYSTRTVNDKEWVVKKHKDIYSMESKDIKKKLIDKAKKVNLLVYKHDPKSYEKLVKAYEQYSQEKYPFAVFKDNHGYITKYSKKGNGPELKQLKYLDGKLGNHTSITHNYNSPDKKVVLLQISPYRTDFYKNADGTIKFVTVRRKDLKPINNNKQFVMDETLYEQKKLEKGITKDAAFINSFNRNEIIEITSKDKEGVKKKQYRFIATSNDTSNSIEVKPISSESLKPQIMLTIGRKTLDITKYAVSPIGEMSKIEKESLKLIINA

SEQ ID NO: 6000 - protein, 1055 aa, unidentified
  REGION 1..1055: note = Description of Unknown: Cas Enzyme sequence
KLKGLFMNYRLSIDMGATSLGWCLLTVANNEPNSIACMGVRIFPDGRDAKSREPMAVTRRAARGARRRRDRTQKRQRVLMDFLIKNGFMPDDAKERKKIEKYDPYELRARALDGQVSLYELGRTFFHLSQRRGFKSNRISDRGNDEKGAINTGIENLQEKMSGFRTLGEYLFHSEQKRARPHTEKGKNSYVFYPDRSMYLDEIQQILKKQKQFHSELTEDTCQCLINIIFYQRPLKAPKIGLCTFETQNKESRARLAYSEVQNYRIWQEVNNLDLKRYAEDDPMLTNEDRQKIAKALQNKKDMSFAGIRKLLNFSRDMVFNLESNKRKKLLGNDTQFYLQQEECFGVEWQKLSDDKKNEIIDLLMEEDDEAEIISALTGKYGLTQEQAVKTADIPLKDGYGRLSIKAIRKILPYLQQGEIYSKACELAGYHHSQRETGEIFDRLPYYGEVLEDAVIGGSFDPEDRKTPEKYFGKINNPTVHIALNQLQKLVNEIIATYGHPDSIHVELARDLKCGQKQLKEINLRQAKETKDNERITAELIKLNVKQNYANRMIYKLWEDLSADPAKRCCPFTGKQIAVHKLFSGDFEVEHLLPFSRSYNDSRANKVLACKTANRRKAGRSPFDAFGQSPEWNDILARVENLPEDKKWRFQENAWEIAKGEGEDLIARQLSDTQYMSRISKRYLSKVCDPRRVVGIPGQLTAMLRRKWGLNDLLSDGDLKDRTDHRHHAIDAFVVGCTTRSLLQRISAEARRFYDDSDLYERRLKLVASMPDAFPDFYEQLGQNLDNIVVSYKPDHGNAYKAQKNGKTTGKLHEDTAYGFVKESDKKGKAIYVVRKPIDSFKDQKGVKAIVDDTIRNKLLEATSGMNGVAFIDAVQAYARKNNHRRFRIHVEKSKNAMIGISRAGKEVQHTTPYKYYATGGNYCAEIYCSDKGPKAGKWQCEIISTYDAHKPGVMSEWRKNHPTAKLIMRLQIDDMVAYEDGDETKICRVKKMTGGLVYLRNHKIAKEDGDQFSWAASPNLMQQSNARKVSVDILGRVRDPAGRIAYKKSGVAVA

SEQ ID NO: 6001 - protein, 1126 aa, unidentified
  REGION 1..1126: note = Description of Unknown: Cas Enzyme sequence
MQNDSYTLGLDIGIASVGWCILGEDRIIDLGVRAFDKAETADKGESLNLTRRNARLMRRRLRRRAWRLTKLARLLKREGLIENARMFQTQQPFSQSLWRLRVAGLDRRLDDEEWARVIYHLCKHRGFYWISRAEEKQAETDGKSEGGKVKKGLAATARLMAEKGYRSAAEMVLAEFPDAQRNKQGDYGKALSRVLLGKELALLFEKQRESGNPHTSVEFEAKILGNAGLFWAQEPALTGEKLQEMLGRCTFEKLGGPDGNGEYRSPKASFTAERHVWLTRLNNLRIVEDGCTRPLNEQERQFALPLPYQQASDFSYKQLRSALVKAGCLPESVRFAGFSYPSENQKAAGKVKDPEAATLVKLPAWQELRLTLKKAGLETEWQGMAGAAIDGRPELLDRITWVLSVYKDDNEVAEELRKLPLPNAEKMIQALLDVRFDKFHALSLKALRRIVPLMETGLRYDEAVARIPEYGHHSQLVKNDEDKQKYLPPLYSGRDKDGRMLFNEDMDVPRNPVVLRALNQARKVVNAIVRQHGAPMAVHIEMARDLTRPLDERNKIRKAQDEFRERNEKDWKEFVKNARQLGLTELPIREKHGRHFAKWQLYNEQQCKCAYSIEPIDLNRLLEPGYVEVDHALPWSRSYDDSKNNKVLVLAKENRDKGNRTPYEYLGGAEDSPRWRQFVAYVESNKSYRQAKRNRLLKKDFGDKEAEGFKERNLIDTRYICKFFKNYVERYLQLAEDSEAKRCVVLSGQLTTFLRARWGLVKMRGDSDRHHALDATVVAACSHGMVKRLSDYARRKELDQVRDGFVDPETGEIVNPAMFQQLHQHFPDPWQYFREELETRLKIDDPAVLRADIERLGTYPAGALEALRPLFVSRAPQRRNGGAAHKDTIYAQPERLKAQGGVTQKVPLANLRLPDLDNLIDPHRNEKLYAAIRARLEAHGGKGEKAFPPDNPLHKPDRDGNLTGPVVRTVTMMIDKLSGISVRGGIAKNDSMLRVDVFTKAGKFHLVPVYVHHSVAKVLPDRAIVAHKDEDEWPLIDDSFGFCFSLYPNDLIRITQKQGVFVGYYAGCDRGSGNINIWAHDRNQQVGKDGLIRGIGVKTALTVEKFHVNVLGNIHPAKPEPRRGLA

SEQ ID NO: 6002 - protein, 1057 aa, unidentified
  REGION 1..1057: note = Description of Unknown: Cas Enzyme sequence
MAASQKPYILGLDLGVQSVGWSAIDTDKHGQPCGVRLAGVRCFDSGVGSETEIASGKDESQNIRRRQMRLQRRQLWRRGRRLKKTFLLLQKAGLLPPGETRTPEQRHELLKKLDAELAKQFLPEGDRVAGHLLPYRLRALALDQALPPFALGRALFHLGQRRGFLSNRKSDARDDNETSTVKAGIAELWDKMNAASARTLGEYFSTLDPEQERIRKRWTARQMYLDEFERIWTAQASHHPTLTDEWKKWIHNAIFHQRPLKPQSGLIGMCELEPGCRRAPRACVEAQRFRYLQKVNDLEIVTPTGELWAMTDPRHADLRQKLIELLDTNEKIEFKSLRSKLGLKKSNGSDVDYSFNLEAGGEKRLKGNATAVKLRKVLGDDYGKLSPEQLTGVVEDLLEYEKPDALARRLTNRYGIAPPKAEALAEVTLEPNYASLSREAMRKLLPLMEQGFRFAEAKKKVYGEYAGRLRLRDFLPPVLDAVPALRNPVVCRGLTELRKVVNALIREHGKPEFVRIELARDLKRSRKQREDLTKQNRENEKSRDAARRKVAERLQCSEDAVSPLDILKVRLAEECNWECPYTGKSIAIEALVGKHSQFDIEHIIPFSRSLDNSFSNKTLCQHEENRHVKRNQTPFEAYASNEPRWQEIIGRVKRFHGSAAHVKLRKFLQEKPDEDFAARMLQDTRYMSRLATEYLGLLYGGTVDGDGKLRVQVSAGRMTAYLRDEWGLNAILADGDEDEKNRSNHRHHAVDAAVIALTDRATVENLSRSAEVAAERGRRLFALDEIQKPWPTFFDDLRRAIDAVNISYRVNRRVSGALHEETNYSKPRQGSDKNGKRVECHCVRKPLALMTADMIENIVDDTVRMRVKEKIAQLGGFRKGMFTEDASHPCLKTQDGRLVPIHKARIKRKIDARLIGKGSSLRYVKTETNHHVEIVARVEDGKDRLWEGEIVDLREAVVRVRLGKDVVQRQGHGEGREFRFSLAKNEYVEMEYEPGELQLYRVDSISEGDLEFRLHTDSRPTKMEGRKRVRGGPSRLFKAKARKVVVDPLGNILPAND

SEQ ID NO: 6003 - protein, 1388 aa, unidentified
  REGION 1..1388: note = Description of Unknown: Cas Enzyme sequence
MKKILGLDLGTTSIGWALVNEAENDYEHSEIIKLGVRVNPLSTDEQTDFEKGNPLSVNADRTLKRGARRNLQRYKQRRKNLQDLLTKSGIITKDTVLTEEGSFTTHETWRLRSLSASDKIEKEEFARVLLAINKKRGYKSSRKAKNEEEGCVIDGMAIAKELYDNQLTPGQYVLNLLKDGKMYIPDFYRSDLKAEFDAIWNCQKQYYPDILTDEFYKKLEGKNKTQTWTICQKPFDIVGIKLKGTANEKRFDRYMWRSEALNHKLDLEYLAIVLQEINNNLNQSSGYLGAISDRSKELYFKKETIGQNLYRQLQENFHGSLKNKVFYRQDYLDEFEQIWETQAQHHKELTPELKEEVRDVVIFYQRKLKSQKHLISNCEFEPKHKAIPKSSPLFQEFKIWCLVNSVELQNQKSKEQRKLDEMERLLLFEELNVRGDLSHDQVLKCLELPKKEWKLNYKEGLSGNTTNQQLYGVYQLVAEYEGYGFDWAKKSAREINEELKAIFSEIGLSEDLLRFDANIKGNEFDKQAAYQLWHLIYSVEDDEKISEEDQFVYGNSAVALKKKLHKGFGFQPQYATMLANLNLQQDYGQLSARAIKKIYPYLKKGLLYSEACEKAGYNHSHSLTAEQLAKRDLNEKLNLLPKNSLRNPVVEKILNQMVNLVNQVIEVYGKPDEVRIELARELKKSADERKRMTQGINDAKKRNEEIVRILRKAPYNLANPTRNDITKYRLYQELSEIGYKTIFTNRYISPSELFSKNIDIEHIIPKAKLFDDSFTNKTLAYRKVNLEKGDSTALDFISEKYHSDLPDYKDRVESLYAAWLKTHNTKQVKGISKAKYEKLLMKEVDLPKDFIERDLRNSQYIAKKAKQMLMEVIRTVNTTSGSVTDRLREDWGLVNVMKELNFPKYKALGLTEEQERKDNKKVLVIKDWTKRNDHRHHAMDALTVAFTSHSHVQYLNNLHASGNAQSELHGIRKKVTELQETKSGNSKRVFKAPMENFRHEAKNHLEQILISFKAKNKVVTQNVNHYRKSGETFKKVQLTPRGQLHKETVYGRIIEQGVKEEKIGAKMTYETALKVCKPKYKDAILRRLAEFGNDAKKAFTGKNAIAKNPVYTDAAKQEQVPEKVKIHVAEENYTIRKEIGPDLKLDKVIDEGVKRILSARLEEFGGNAKEAFSNLDKNPIWLNEKAGIAMKRVKISGIKNAEALHDQKDHNGNLILDAEGKTKPADFVSTGNNHHVAIYRDHNGKLQEQVISFYEAVARVNAGVSVIDYDYKKKEGWQFLFTMKQNEMFVFPAEGFDPNDVDLLDERNSKVVSKHLFRVQKIGTKDYWFRHHLESQIVDDKALKGVAYKRLQNINALIGVVKIRTNHLGQIVHVGEEVQQKQEVEMSI

SEQ ID NO: 6004 - protein, 1370 aa, unidentified
  REGION 1..1370: note = Description of Unknown: Cas Enzyme sequence
MNKPYSIGLDIGTNSVGWSIITDDYKVPAKKMRVLGNTDKEYIKKNLIGALLFDGGNTAADRRLKRTARRRYTRRRNRILYLQEIFAEEMSKVDDSFFHRLEDSFLVEEDKRGSKYPIFATLHEEKDYHEKFSTIYHLRKELADKKEKADLRLIYIALAHIIKFRGHFLIEDDSFDVRNTDISKQYQDFLEIFNTTFENNDLLSQNVDVEAILTDKISKSAKKDRILAQYPNQKSTGIFAEFLKLIVGNQADFKKYFNLEDKTPLQFAKDSYDEDLENLLGQIGDEFADLFSAAKKLYDSVLLSGILTVIDLSTKAPLSASMIQRYDEHREDLKQLKQFVKASLPEKYQEIFADSSKDGYAGYIEGKTNQEAFYKYLSKLLTKQEDSENFLEKIKNEDFLRKQRTFDNGSIPHQVHLTELKAIIRRQSEYYPFLKENQDRIEKILTFRIPYYIGPLAREKSDFAWMTRKTDDSIRPWNFEDLVDKEKSAEAFIHRMTNNDFYLPEEKVLPKHSLIYEKFTVYNELTKVRYKNEQGETYFFDSNIKQEIFDGVFKEHRKVSKKKLLDFLAKEYEEFRIVDVIGLDKENKAFNASLGTYHDLEKILDKDFLDNPDNESILEDIVQTLTLFEDREMIKKRLENYKDLFTESQLKKLYRRHYTGWGRLSAKLINGIRDKESQKTILDYLIDDGRSNRNFMQLINDDGLSFKSIISKAQAGSHSDNLKEVVGELAGSPAIKKGILQSLKIVDELVKVMGYEPEQIVVEMARENQTTNQGRRNSRQRYKLLDDGVKNLASDLNGNILKEYPTDNQALQNERLFLYYLQNGRDMYTGEALDIDNLSQYDIDHIIPQAFIKDDSIDNRVLVSSAKNRGKSDDVPSLEIVKDCKVFWKKLLDAKLMSQRKYDNLTKAERGGLTSDDKARFIQRQLVETRQITKHVARILDERFNNELDSKGRRIRKVKIVTLKSNLVSNFRKEFGFYKIREVNNYHHAHDAYLNAVVAKAILTKYPQLEPEFVYGDYPKYNSYKTRKSATEKLFFYSNIMNFFKTKVTLADGTVVVKDDIEVNNDTGEIVWDKKKHFATVRKVLSYPQNNIVKKTEIQTGGFSKESILAHGNSDKLIPRKTKDIYLDPKKYGGFDSPIVAYSVLVVADIKKGKAQKLKTVTELLGITIMERSRFEKNPSAFLESKGYLNIRADKLIILPKYSLFELENGRRRLLASAGELQKGNELALPTQFMKFLYLASRYNESKGKPEEIEKKQEFVNQHVSYFDDILQLINDFSKRVILADANLEKINKLYQDNKENISVDELANNIINLFTFTSLGAPAAFKFFDKIVDRKRYTSTKEVLNSTLIHQSITGLYETRIDLGKLGED

SEQ ID NO: 6005 - protein, 1337 aa, unidentified
  REGION 1..1337: note = Description of Unknown: Cas Enzyme sequence
MKKDYVIGLDIGTNSVGWAVMTEDYQLVKKKMPIYGNTEKKKIKKNFWGVRLFEEGHTAEDRRLKRTARRRISRRRNRLRYLQAFFEEAMTDLDENFFARLQESFLVPEDKKWHRHPIFAKLEDEVAYHETYPTIYHLRKKLADSSEQADLRLIYLALAHIVKYRGHFLIEGKLSTENISVKEQFQQFMIIYNQTFVNGESRLVSAPLPESVLIEEELTEKASRTKKSEKVLQQFPQEKANGLFGQFLKLMVGNKADFKKVFGLEEEAKITYASESYEEDLEGILAKVGDEYSDVFLAAKNVYDAVELSTILADSDKKSHAKLSSSMIVRFTEHQEDLKKFKRFIRENCPDEYDNLFKNEQKDGYAGYIAHAGKVSQLKFYQYVKKIIQDIAGAEYFLEKIAQENFLRKQRTFDNGVIPHQIHLAELQAIIHRQAAYYPFLKENQEKIEQLVTFRIPYYVGPLSKGDASTFAWLKRQSEEPIRPWNLQETVDLDQSATAFIERMTNFDTYLPSEKVLPKHSLLYEKFMVFNELTKISYTDDRGIKANFSGKEKEKIFDYLFKTRRKVKKKDIIQFYRNEYNTEIVTLSGLEEDQFNASFSTYQDLLKCGLTRAELDHPDNAEKLEDIIKILTIFEDRQRIRTQLSTFKGQFSAEVLKKLERKHYTGWGRLSKKLINGIYDKESGKTILDYLVKDDGVSKHYNRNFMQLINDSQLSFKNAIQKAQSSEHEETLSETVNELAGSPAIKKGIYQSLKIVDELVAIMGYAPKRIVVEMARENQTTSTGKRRSIQRLKIVEKAMAEIGSNLLKEQPTTNEQLRDTRLFLYYMQNGKDMYTGDELSLHRLSHYDIDHIIPQSFMKDDSLDNLVLVGSTENRGKSDDVPSKEVVKDMKAYWEKLYAAGLISQRKFQRLTKGEQGGLTLEDKAHFIQRQLVETRQITKNVAGILNQRYNANSKEKKVQIITLKASLTSQFRSIFGLYKVREVNDYHHGQDAYLNCVVATTLLKVYPNLAPEFVYGEYPKFQTFKENKATAKAIIYTNLLRFFTEDEPRFTKDGEILWSNSYLKTIKKELNYHQMNIVKKVEVQKGGFSKESIKPKGPSNKLIPVKNGLDPQKYGGFDSPVVAYTVLFTHEKGKKPLIKQEILGITIMEKTRFEQNPILFLEEKGFLRPRVLMKLPKYTLYEFPEGRRRLLASAKEAQKGNQMVLPEHLLTLLYHAKQCLLPNQSESLAYVEQHQPEFQEILERVVDFAEVHTLAKSKVQQIVKLFEANQTADVKEIAASFIQLMQFNAMGAPSTFKFFQKDIERARYTSIKEIFDATIIYQSTTGLYETRRKVVD

SEQ ID NO: 6006 - protein, 1117 aa, unidentified
  REGION 1..1117: note = Description of Unknown: Cas Enzyme sequence
VQTKNLLYTLGLDIGIASVGWCVLGEDRIIDLGVRCFDKAETPDRGESLNKVRRDARLMRRRLRRRAWRLTKLARLLKHAGLIESTRIVRDRSDGRASPWQLRVEGLDRKLAPEEWARVIYHVVKHRGFHWISRAEEKKAESDKGEGGKVKQGLSATKQLMVEKNYRSAAEMVLTEFPGAQRNKRGEYTKALSRILLAAEMTTLFERQRELGNPHAGPDLQTKILGNGDRKSGLLWMQKPPLSGSDLLKMLGKCTFEREEYRAPKASFTAERHVWLTKLNNLRVLVDGVTRPLNDPERRLALSLPYQQASDFTYKQLRAALCKNGLLPDSFQFSGLAYPTGAQQPDGKAKNPENDRLVKLPAWQEFRKTLRDAGLETEWESIAGMAAAGQPELLDQIAWVLSVFKDGDEVLRELRKIPLPGGEKMVQALSGVSFDTFHNLSLKALHKIVPHMEAGLRYDEACLAAGYHHSDLRKDTDERSLYLPPLYCGRTTDGRMVFRGDIDVPRNPVVLRAINQARTVVNSVVRRYGSPSSVHIEMARDLSRPWDERNKIKRAQEEYRDRNERLKIDFATEYGIAPKSREFEKFLLYREQSGKCAYSLKPLDLDRVLRDLGYAEVDHALPYSRSFDDSKNNKVLVLAEENRNKGNRTPYEYLDGASESPRWREFKAFVETNKAYRLAKRIRLLRKDFSGKESEEFRDRNLNDTRYICKFFKNYVERFLKLADESDARTCVVLSGQLTAFLRSRWGLSKVRSDSDRHHALDAAVIAACSRSMVKRLSDYARRHELENVRTGFVDFETGEIVDAGKYRQIERHFPSPWPYFRDELLARLNTDDPAELRARMQGLGTYPPQALETLRPLFVSRAAQRRNGGAAHKDTIYRQTERLKKEGSVTQKVPLAALNLRDIENLVDPHRNEKLYAAIRARLEAHGGKGDKAFPPENPLRKPDRDGNPTGPIVRTVTLVIDKMSGIPVRGGVAKNDTMLRVDVFRNKNDGKFHLVPLYVHHAVAKQLPTKAVIAYKGESEWTPINNHDFDFLFALYPNDLVRITLKKERHFGYYAGCNRATGAVSIWAHDRNQRIGKDGFLDGIGVKTALSVEKFHVDTLGNVYPAPPETRRGLA

SEQ ID NO: 6007 - protein, 1271 aa, unidentified
  REGION 1..1271: note = Description of Unknown: Cas Enzyme sequence
MFRITGYGNIIYQKVIIEGNKMGNEYFLGLDCGTGSVGWAVTDKNYRILRFHGKSMWGSRLFENANTAADRRATRCARRRYGRQKQRIELLNELFKNEISQLDPGFFARLDDSGYVSLDKRDVQKNSLFNDKNFKDKDFFRTYPTIFHLRKALIDDTAPVDVRLLYLAIHQMYKNRGHFLFQGQTLSAIQSVRPLIDELCLLAKDVMDLDINISDKDKVEDIIKRYKGNQRVSRLEELITTNEPKQLKKLLKALAGQKVSANSLFDSEDLVIDENEIKIDFQKSDFDVVELAKLEELLDPDSYHIVELLKGIYDWALLSQVMAGYSYLSYAKVDQFNANKEDLKKLKYVFKTYFAESEYEKLFHSNESKSFSSYIGTMHDQRKHESVRRCSVDDFYKTIRQPIEKNIRAKEDPAAQEILDKIANGTFLNLLISPRNSLIPYQVHMMELEKILSNAEKHYPFLSVKDKDGLSVSEKLKSIMTFRIPYYVGPLVDQSKGGDYIKYAWMERKEEGKIYPWNFDKKVDVDASAEKFIMRMVNDCTYLPGEKVLPKNSFLYSEFMVLNELNNLKINGQKPTVEQKQVIVEGLFKKRKKVTQKMLLSFVRAEGWYGANEKLVIEGIDGDFKSAMTTYIAFKPFLDSGKISVADAEKVIYYDTVFEAGGDILDKKIDALLSERLSNQELKSIKQIKATGWGRFSSKFLTGIQGTQISSGEMHSIMYYLRNTNRNLMELLSSEFDFVDIIEEAQSGTISDLDYSVVDKLAVSPSVKRQIWQTFKVVKEVEHVMGNPPRKVFMEFAREEGEKKRTVSRKNKLIELYDSIKNPDEDDLKLREAINGYSETQIAKNDRLYLYFLQKGRCMYSQKVINIEDINNNNIYDIDHIVPQSKVKDDSIHNRVLVLRHVNEMKSDNYPLSADIQNSRKAFWQFLKDQNLISESKLLRLTRTTPLLDSELADFINRQLVETRQSTKACAQILKKYFGEETKIVYSKAGNVSDFKNAFRIPKVRMINDLHHAKDAYLNIVVGNCYDTKFSRKGFIESHEKYNLSKLFNYAIPGAWNPEDTIVAVKKTLRKNDILFTRQTFCKSGKLFDLMPLKGNEKNGMLPRKSSDYKLIAKLAQAEDKQACVDAWVKQYGGYNSLAVSYFALVQCSMGKKEKVSMIGIPVMLSRIINSKESLQSYLIDNLHMNNPKVLINRVPINTLMEYNGFKVHLSGKTGNGLLCKSAVPLYLNLRFEQYAKNIEKANNRRKNIQILIDLFPKKMEFPQKKHRIVR

SEQ ID NO: 6008 - protein, 1023 aa, unidentified
  REGION 1..1023: note = Description of Unknown: Cas Enzyme sequence
RAKRLRELDTYLESLGWPLVDLEKEKDPYFPWRVRAQLLRQRVSDDDLRQKMLSVAVCHMARHRGWRSPYSRTESLLQLQPASDLLIALRERVEEVIGFPMEYDAYPAQIVDTLLTYKLHQKMRGPQGILGGKLMQSDNAAEILEICSVQGVSEETTHELVLKIFAAQSARGSARGRVAKDALPGQGAHPRAERAHPAFQKFRIVSVLANLRISEGGTRRVLTRDELEGLTDFLMSDPGKDNPTWQDVAENLGVDRADLHGTAAQGPDGAPASAQPPIDVTNQKICALKKIPALVAWWKEADDELRGAFVDACSNVGSGEDSAASAIVDEFLSERSEDELAVIEGLNLTGGRSAYSVDSLQRLTRVMLEECCDLHEARKKEFGVDDSWTPPAEPINGQTGNPAVDRVTKQVARWLSACERRWGAPEAINIEHVRSALGSERMARELMSENRRREAQNLKIIDAMNTHLGIGKARPSDVIRYRALTRQNGQCLYCGTPITFQTLEMDHIVPRKNSGSTNTRTNLAAVCRSCNLSKSNIPFAVWAGKSENPNISLAAALKRVRGFIADPDMRGKEAAKFKKAVADRLKATKPDAEFDGRSMESVAWMANELRHRIENHFKRSSAETRVCVYRGALTAEARKASKFEGRVNLIGGGGKTRFDRRHHAMDALTIALMREGISQTLALRINMRESQYNLGTEQTWKQFTGASEGARRTWEQWSEGMLRASELFNIALNEDAIPIVENSRLRFGSGKVHEDSMRPLMKLPLGEELSVEMIDRAATPALWCALTRHPGFDAKKGLPADPHREIRVNGRRITGEEKIDFFPTGAACIAVRSGYCELGSSFHHSRIYRMWTAKGKEFYGQVRVYQVDLVKHQKEDLFSVELPPQSISVRTAEPKVREALVAGRCEYIGWLVVGDEIEVDISSFSSGAISELAEAYPMCTRWKVAGFFGPQQLRLRPILLSAEGMPEETSEAIKGIIAGSGWRPTVNILFSTATLRAIRRTALGEERWHEHGSLPSSFEVDGR

SEQ ID NO: 6009 - protein, 1358 aa, unidentified
  REGION 1..1358: note = Description of Unknown: Cas Enzyme sequence
MEYYIGLDIGSASVGWAVCDESYNLCKYKKKDMWGIRLFEIAKTADVRRVNRANRRRRERKKQRIDLLQEIFADEMAKVDESFFIRLNESRLQKEDKSVDSIYTLFNDENYKDIDFYKEYPTLYHLRKDLIESNKEFDVRLVYLALHHIIKNRGHFLIEGNMESVKDFFGVFNELLAYLTDEFNVNVYIEESKKLKFRDILKNKNIAKSNKVKDLTALFEMSEIPEDKISLKEKKSILEEICKLIVGNKGNIAKIFSKDKEELEFASFSFAEGNYEETIRPKLDEELLDKAYLIDLIKLIYDWKILDDILNDEKYISFSKVKAYENHGKELDDFRYLLLKYCDKSIYNDFFNTAIDDKKPSYSSYIGAVKKNGKKFKLKQCSREDFIKRLKQILDDIKDNIKTEDIDIFTSLIKKLDDDEIFLLQRNKDNGVIPHQVHEMELNKILENASKYLTFLSAKDEENISNIDKIKSLFKFRIPYFVGPLSDRHRDKGSNTWMVRKEDGRIYPWNFEKMVDLEKSNEAFIRRMTNKCTYLVGEDVIAKNSLLYSKFMVLNELNNLKIRGNKISVESKQQIFKDLFENYNKITGKKLLEYLRKDMPEIEKEDLSGFDIDFKTTLSSYLDFKKSVFGNKIEDKNIKNIIENIIKWLTIYGADKKMLKNIVGKEYKDIISTDELNAISKLSYNGWGNFSERFLKGIIGVDKESGESFSIIEALWCTNNNLMQLLSNNFTFTEEIEKLNREKMGEMKSISYDNILRNSYASPSVKRSIWQSIEIVEEIKKIMGNEPTKIFLEMARGEEENKKGKRTISKKEYLKALYQNCEKDIRDSFLKEIDDIDESKFNSRKLFLYYTQMGKCMYTGADIDLEELMHGNGKWDKDHIYPQSKIKDDSIDNLVLVDKPSNSEKRDKVLAPEIQARMQGFWCMLLSKGFISKKKYDRLMKTGDFTEEELAGFINRQLVETRQASKILADIFKSIYRNSELIYVKANLVSDFRHNNINMLKSRRINDYHHAKDAYLNIVVGNVYNAKFTSNPIKWLKENKNVNYNINKIFEYDVYKGNKKVWNADKSKGSISVVRDVMKGNNILYTERTYEEKGKLFVATIQKKNENASIPLKTGLDIRKYGGYNTPTSSYFSLIEFKDEEGEKIRNIIAVPLYVANMMEHNDRAFIDYCENVKGIKDVKVLIEKIKKNTLLIVDGFPLRIRGENENSNSLKLNMQLKLEYKYEEIIRKIEKYLEKKLDYEISEKVDKITSQDMDILYDLLLNKFNTIYKKRPANQYKELCKAKDKFVSDLSLVDKMKCINNILNMLRCDATTTADLSMIGLRRNVGNIAYRKNTLGKSKVLMVNQSVTGLFETRIKL

SEQ ID NO: 6010 - protein, 1357 aa, unidentified
  REGION 1..1357: note = Description of Unknown: Cas Enzyme sequence
LVKLICEEILKEVGNMRKNYSIGLDIGTNSIGYSVIFDDNYKVPVKTAKVLGNTNKKSIRKNLMGSVLFDSGETAMARRMKRTNRRRIERRRNRIRYLQEIFAPFMMQVDENFFARLQDSFLWEEDKPHTKYPFFGNVEQEVAFHDNYKTIYHLRKKLADGKEKADLRLVYLALAHIVKFRGHFLIEGNVDIENNDIQQLFDEFLAFYSAYFEDSSVLEKKMEVREILTEKISKSAKKDKIVQTYSLDKKSPFIEFLKLIVGNSGEFKKIFDLEEKSSLQFSKESYEDDLTALLEQVGDEVADVFLAAKKVYDSVVLANILSIKDKNTKAPLSAAMIERYENHEEELAELKQFFKATLERETYKEFFNDPKKDGYAGYIDGSTTQEAFYKQLKKLFEATEAPELFKEKLEREDFLRKQRTFDNGSIPHQIHQKEFEAIIERQGAFYPFLLENKDKLVKIFEFRIPYYVGPLAKNQRSPFAWATYHTDEPVRPWNFEEIVDTKVAAEEFIHRMTNYDIYLPDQKVLPKHSYLYELFTVYNELTKIKFVDDQGNDSYFNAKAKKDIIDNVFKKERKVTYEKLMNYLRVAYADFRIESIVGLSKDTKAFNASLGTYHDLLKLKVDKDFLDNESNLPIIEDIILTLTIFEDRKMIRERLSQYTSYFDEKVMKRLERRHYTGWGRLSKKFIDGIRDNGKTILDYLKDDPAGNRNFMQLIRDDYLTFKKQIAEAQVVGEKDSLVEQVQSLAGSPAIKKGILQTMKIVDELIKIMGYKPTSIVIEMARENQTTAQGLKQSRTRFKKLSEGLKLLSSKLLEEQNITNKELMKEKLYLYCLQNGRDMYTDEPLDISRLSDYDVDHIIPRSFLPDDSIDNKVLVSSKLNRGKSDDVPSIEVVNRMDTYWGVLLNAKLISESKYNRLTKARHGGLTDKDKEGFIHRQLVETRQITKHIARMLDERWNSSVDDSGKKIYEVKIVTLKSNLVSNFRKMFDIPKIRDLNHYHHAHDAYLNAVVGNLLIKKYPRLAPEFIYGQHLYINRKVKDEEKATKKVVLYSNVLKFLQDEGEQKDSTENVIWNKNQHIGMIKKVIFNNQVTIVKKTEIQSGGFTNETVEKKGTSDKLIPRKNGWDTNKYGGVKGENTAYSVMFEYEKTKGKKHVKVKDIIGISIMNQKQFEENPNVFLEELDYTNIQKDSIIILPKYTLFELENGKRRRLASHQELQKANELTLSADFTLLLFHALHRDDEENKKHREYLDQHRSDFKDLFDVIIEKSEQWIVKPTAVAKLRKIMDKNYEQASIDELSLAILSLLTFTQAGASAAFQFFGEQIDRQRYSTVTEILTGTLIYQSVTGFYETRIDLKLEK

SEQ ID NO: 6011 - protein, 1327 aa, unidentified
  REGION 1..1327: note = Description of Unknown: Cas Enzyme sequence
MEGKEYYIGLDIGTNSIGWAVTDTNYNILKKNRKFLYGVRLFEEAKTAVERRVNRNSRRRLKRRNDRLKFLKNSFEKYILEKDFLFFERLEDSFFYEEDKRTKQKNTLFNDENFKDKDFHYKYPTIYHLRYELMNSKEEHDIREVYLAIAHIMKSRGHFLFENFEVSDSEKTDNKDALKELVINFEDYISTLEDIDFEINDIDKFCDILLDSSIRRKDKETNLKSLVNGKDKIIIRLLIGFETQLDKIYINNENIVENKVKINFSDSKYDEKYSEVESILGEDIELIDKSKEIYDYVILQKILKDSNSISESKVKSYIKYKEDLVKVKYFIKKYFGDEDYKLIFSSKDYRKKVLEIKEAKFKELEIEDEDKELADYIINSISEGTLLEVQKSISNSVIPMQLHLYELKKILENASNYLTFLNEVDSTNLSLKEKIIQIFKFRVPYFIGPMNDKSEFSWLERNNYKSKVYPWNFNEVINIKKSAENFITRMTRKCTYLHNENALAKNSLLYSKFMVLNELNNVKINGERLSTDLKQKIYRQCYLLNEKMSKNKLKKMLQLNNLYNDIEITGVDELNATLKPHIDMYKILGEDFNRDSYKELAENVIFWVTVYNGDKKMISEKITEVYSDMLTKDQINKLSTLKYSGWGNLSRKFLTEVEHYGEETGGAYINIIDMMWEHSLNLMELLSNKYKFLESLDEIKEVKVINKLNYENIMEDLVLSPSVKRSVWQTLRIIEEIKKIMKYDPKKVFVEVTRKEDIVKTTKDKRKKQLEDKYKDIKDVDKNILDELKNTDSKEFRRKKLFLYFSQMGRCMYSGENIHLEDLFNSNIYDIDHIYPRSLTKDDSWNNLVLVRKDINGAKSNDYPLPSDVRTSRYAFWTLLKNKKLISDIKYERLIGSEKLSPEILEKFVARQLVETSQTIKNVIEVLKTMFINTQMCYVKAEGVSEFRKRYNYLKVREINDLHHAHDAYLNIIVGNVYDEKFTRNPILWLRKNRDETKNGKNDYNLERMFDNDIVVKDRKIFDKIEVNKKIKRFLYQKLPLVTKRTKEEKGAISDLQLISKKSVDLKNMYIPIKGNNSILANNLEKYGAFNKVSGSYFVLVSHILKKKRVRTLETVPIYISKEIKSKKDLILYFKEKMKLIETEILIDKIPIGSIFKINGCYYTLRGRTGGDIVYNLNVQLKLKQDKTNYMKYIVKFNETGINRKDKNDNFLITEELNKLLFEEIVNKITNTIFYYRNSKGKENSILKILDKDKFNDLDLKNQCSSIVKILGYFSNSRDLFDLSDFGGASQSGTIKFSKNIENIEEIKLISKSITGIYEDEIDLKKL

SEQ ID NO: 6012 - protein, 1366 aa, unidentified
  REGION 1..1366: note = Description of Unknown: Cas Enzyme sequence
MDKNYYLGLDIGTNSVGWAVTDESYNLCKFRNKDMWGIRLFESAHTASERRLKRNARRRLRRRNQRIKLLQEIFSQEIANVDNTFFIRLNESKLHMEDKYVKEKHPLFIGEDYNDIHYYEQYPTVYHLRKELIENENPHDPRLVYLAIHHILKSRGHFLIEGNLGEAKDFNIAFDKLNDALKENLAWEGETETVKEQIKSILTDRSKAKSEKVKEIKECLKITDNLLSKDEVRRQNGITEIIFKLIVGNRGDVEKLFNLEKKSLTKGSFSFAESNYEEDVRPDMESEIPNFIHIIDLAKGVYDWRVLMEILQGEHYISNAKVTQYEKHKNNLKDIKKLIHENFGRDVYKSFFMDKNDKSYSSYIGAANKNGKKITVKKNQTDNFLKELRKKLEAIGEEDYGYEIAKKFLEAEQIEDILPLQRNKSNGVVPNQIHKAELIKILENAAKYMPFLNEKDDEGISNKNKIVSIFEFRIPYFVGPLSDRHRKQGSNNWMVRKDGQNGKIYPWNIEKIVDYNKSNEAFIQRMTNKCTYLVGEDVLPKNSLLYSKYMVLNELNNLRIRGNKVSVKTKQDIYRNLFQNRAKVTGKMVLEYLKKDLPGLQKEDLSGFDNDFHTSLKSYMDFKKQIFPEEGLDKSEIQTMIEDIIRWITIYGDDSKMIRRVIEKEYPNKLTEEQLKKVCKFRYSGWGNFSRKFLKGIDGADIESGETFKLIEAMWETNENLMQLLSERFTFRKEIEKENDKVTEKIEKISYEELVDTMYVSPATKRAIWQSVQISEEIKKVMGCPPEKIFVEMARGGGEKGKRTVSRKKALEELYKSCKEDVRYLSEKLEAFEERDLNSMKLYLYFTQWGKCMYTGERIDLEELMKKNSKWDRDHIYPQSKIKDDSIDNLVLVNKAVNARKSNDVLDGEIQKKMIGYWKALLEKGFISKKKYNRLTRKGGFTEEELAGFISRQIVETRQSSKAVAELLKRINEDTEIVYVKASLASQFRKKPLNVLKSRRINDYHHGKDAYLNIVVGDVYNAKFTSNPILWFKKNKKEEYSLNRIFSFDVKRGDKIIWEKCIEDEEGVGYGGTIDRVRKIMKQDNLLHTEYTYCGKGELFDANPISKDNKNLNIKLKAGLDSNKYGGYRGAGTSYFAQIEFDNKKGKRVKNIIGVPIYVASQLKHNPKAFEDYCKEVKGLKNVEIIVPKIKKNTLMEINGFPMRIRGEDERNLQFKGAIQLRLDGENTEILRAVEKYLDKNEGKKEEHKISESLDKLSNEKVNKLYDKLKEKLSKIYKNRPANPIQKICDNQEMFKDSDDLYKKIKTINEILNLLRCDVAPSADLKFINGSENAGVMSVNKNTVGGGKVTIINQSVTGLFETREEI

SEQ ID NO: 6013 - protein, 1101 aa, unidentified
  REGION 1..1101: note = Description of Unknown: Cas Enzyme sequence
MKYSIGLDIGTTSIGWAIIDEDNKRIEKVGVRIFEKPENPKDGKSLSEARRTARSARRRLKRRRQRLNFIKRFFRDNNLLTKEQIEKLLKPENKLDPYKIREKALNEKISNEELFIGLYHIAKRRGYKSNQKSAEENDKEKSKVLSAISKNEKLLKEYKTVASALNSNEKFIAHKRNKAEDYSNSFVRANFEDEAKLILKIQKEFGLKLSDEKINFLLFGNEKEGNFNGIFSQRPFMTSELIMKMRGKCSLEKSEFRAPKASYSFEMFRLAENLAHLRVVINNKERSLTEEEISKIIEKAKDIKVLKYQHVREVLGYKKDENFSFPANMIRGEIKKDSKNNGEENKFGELSFYHKVKAALSNTPEDWQKVCDNNYRMLDELGEILSCNKDDENLRKEISKLNLSEDAVEALMMINVSGFGHLSFKALRKILPFLLKGNIYSDALKNAGYDTKQQLSGDKNKLPPLSKGESAQITNPVVKRAVSQTIKVVNAIIREYGAPYQIKIEAAGDLAKNFKEREKIKKVQKANASYNESIKERLQNEFNVPLPTGLQITKFKLYEQQNGKCAYSGKRLVLENLFSNEHYAEIDHIIPFSRCGNDSLMNKVLVFTEENRQKGNLTPFEAWGANESQWADFEARINSMNLPFRKKERLLAKVPPKEDWNSRALNDTRYISKFLSRYLRKNLKFAKFENENPAQRVIVPNGSITSYLRRIWRVGSKDREENNLHHATDACIIAAIDQSAIQKISRLNKYFELFKYSVEDEVIDKITGEISSRTDFEQTFEDIEPWKDFGKEVRKRTAHYESPMELRNELIGLENYDEEFRNKTTPIFVSRMPKRSGKGSINKETIRSPKIVEEYIDSKGKPAVARKQRVRLTSVDLKTLYDSPVRETDPALYEILKARLNEFDNKPEKAFGDLSNPVYKPTKNGGRGNIVRSIKIYDTQNSKSGFLINKGKAFVNNGDTIRLDVFKRKNYKGEFEYYFSPIYAHLLNAKKVEILPTPNGRSAAEKADFNKIRDENGKIFATEENGFVKQFSLYPNDYARIYAENKIVEGYYVGYDIDSSRISLIGHDKADKKSTDRISGGMITLIERYDISVLGDNYRWI

SEQ ID NO: 6014 - protein, 1103 aa, unidentified
  REGION 1..1103: note = Description of Unknown: Cas Enzyme sequence
MDPKELKYVVGLDIGITSVGWATLLLDSQDEPVRILDLNSRIFDKAEVPKTGASLAAPRRMARGVRRRLRRRKFRLHRVRQYILRHHILDKAGLECLYKPKTDIDIFALRTAGLDRLLEPEEWARILLYMAKHRGFKSNRKSTAVAGGEDGVMLKAIQQNKEVLSKYRSVGEMFDKDEKFSDHKRNKGGSYEFTVARSMLEDEIKLLFEKQRDFGSAFAEKDAEEEYIDLFSAQRNFDEGPGGDSPYGGNQIEKMIGLCTFEGKNGEKRAPKASYAFMATNLWQKINQIRIIEKGTERPLIAEEAGKIYEKAWNKEAMTYKDIRSEISLGDEASFKGLPYKWTETDKEETEGKAKFSWVKEYHTLRKVLDKVEKNRILQLSHDNIDNIAYIFSVYKNDDKIREALEETDLDSKDIDVLIEKLGTFSKFGHLSLKACYKILPYLEQGMVYSDACTAAGYDFKKSAQGSIADIPNPVVKRAISQTMKVLKAIKQKYGCPPVEIHIEMARELAKSFDERQKMTKSIEENQSHNERIKERLQKEFNVPYPSGQDIVKLKLYEEQNEICAYSQKHIDAAKLFHDPNYAEVDHIIPYSRSFDDTYNNKVLVLTAENRQKGNRTPMEYLSGDEARKKQFVAWVKSDIKKPRKRENLLREKFTTDAENDWKARHLQDTQYISRFMLNYLQNNYELTPGNTDRKRRIIPVNGAVTAYVRKRLGISKIRENGDLHHAVDAAVIAAVTQGVVNSVSKYSKRHELQYHVDEHGNCVDLVTGELMGDAFKENHKIKGFPEPWPQFRAELEARVSENAAEAIRILKLPTYSPDEEIKTPFVSRMVRHKTTGQAHEDTVRGKSNVADNVYVKKVALTELKLKDGEIEGYYNPSSDRLLYEALKKRLEQFGGKGKDAFKEPFHKPKADGSPGPIVKKCKVIDKINLAVQVHGGKGATANANGSMIRVDIFKVQEKNGKSYYYAVPIYVADTVKSELPKKAVYRRPYDEWPEMKEADFAFSLYPNDVVYIGGKEIKMNVMPGCTLESEKSMRDEVLYFKGLDIATGTIRVVNHDGTYKQKSLGIKQLSIIEKYEVSVLGDLVKAMYSPRETFKHKAQRAK

SEQ ID NO: 6015 - protein, 1217 aa, unidentified
  REGION 1..1217: note = Description of Unknown: Cas Enzyme sequence
MKKQILGLDTGTNSLGWAVVDRDEYDNYTLVKHGGLIFQEGVKIEKKVESSKAAERTGYRSLRKHYFRRRLRKIEVLRVLVKYNLCPYLSDELLHAWHVHKTYPKIDDFMLWQRTSDNDDKNPYYYRHLCLHQKLDLERQDERYILGRAFYHLAQRRGFLSNRLDSTPEQETGKVQKGISDLTREMEAAGCEYLGDYFYQIYSDPNNHERIRTRYTDREQHYKKEFHAICEMQQLSSELVAELNKALYFQRPLKSQRKGVGKCTFEPKCPRCAESHPDFEEFRMLSFINNIKIKTPRDLELRCLSLEEKAKIQSLFYRVSKPNFDFEDIAKALAGKGQYQYIKETGDKPYKFNYRMTQGVPACPTTAQLIKIFGDDWKNAIAETYRLNNTRFGQKSVAQMVDDVLNVLSTFSTDSKLQLWAEKNLQLNEEQCKKFAGIELSHGFASLSLKAIHKILPFLRQGYIYSHAVELANIPTIVGEEIWNNIDKQRFIVRNIQDMLLYQDQCTKDFCIKDFLLDNFNLNPGTVDKLYHPSMIETYKNAEQKEGIYQLGSPRTNAIRNPMAMRSLHEIRKVVNKLLKDKIIDSNTEVHIEYARGLNDANMRKAIADYQRGQDKKHKKYETDIKDLYLQETGKNIDPTETDIRKFELWEEQSHKCLYTGAEIGIADFLGDNPKYDIEHTIPRSIGGDSIMENLTLCDSRYNRDVKKAKMPSELANHEEILTRIEGWKKNYETLTYQIDKCRTHAGMSKEQKDPIIQKRHRLKIERNYWKDKYERFTMTEPPSDFSRRQGAGIGLISKYAGLYLKSLFHDPKNRNKSRVFTVKGTTTAEFRRMWGLQSEYEKKSRDNHCHHCIDAITIACIGKKQYEEMASFYHDEELYDDGRGKKPQFRKPWPTFTEDVLNLEKSLIIVHDTPNNMPKKARKYVRTANGKFLAKGDCARGSLHKETYYGAIERDGKIEYVVRKALASFEKETELDNIVDDTVREIVRNAVRGKTFKEAIAQPIYMNKEKGILIRKVRCYARRMTTPLNIRLHRDASSKDYKQAFHVANDTNYCMAIYEGMVKGKVKRDFELVKTIDAATYFKDSTSKAEFPTLVPSKTNSQLPLKSIIKIGTMVLLYENTPAEIDFVDKKDLARRLYKVVGLSSLSTKTNVYGRISIKYHQEARESKDLKLQNGIYKNGEQYCPSILLLHTQFNALVEGLDFHINAIGEVELLNQ

SEQ ID NO: 6016 - protein, 1367 aa, unidentified
  REGION 1..1367: note = Description of Unknown: Cas Enzyme sequence
MKKQQFSDYYLGFDIGTNSVGWCVTDLNYNVLRFNKKDMWGSRLFDEAKTAAERRVQRNSRRRLKRRKWRLNLLEEIFSNEILRVDSNFFRRLKESSLWLEDKSSKEKFTLFNDDNYKDYDFYKQYPTIFHLRNELVKNPEKKDIRLVYLALHSIFKSRGHFLFEGQNLKDIKNFEILYNNLMAFLEDNDIYKNIDNNYIGNLENIICDSKKGLKDKEKEFKEIFNSDKQLVAFFKLSVGSSVSLNDLFDTDEYKKGEVEKEKISFREQIYEDDKPIYYSILGEKIEFLDIAKSFYDFMVLNNILADSQYISEAKVKLYDEHKRDLKNLKYIIRKYNKENYDKLFKDKNESNYSAYIGLNKEKGKKEIIEKSRLKIDDFAKIIKGYLPKTEKIDEKDRSIFNEILDKIELKTILPKQRISDNGTLPYQIHEAELEKILENQAKYYDFLNHEENGVSTKDKLLMTFKFRIPYYVGPLNSYHKNKGGNSWIVRKEEGKILPWNFEQKIDIEKSAEEFIKRMTNKCTYLNGEDVIPKDSFLYSEYIILNELNKVQVNDEFLNKEIKNKIIENLFKKNKKISEKNFREYLLVNQIANKTVELKGVKDAFNSNYVSYIKFKDILGDKLNLDVYKEISEKSILWKCLYGDDKKIFEKKIKSEYGDILTKDEIKKINSFKFNTWGRLSEKLLTGIEFIDLETGECYSSVMDALRRTNYNLMELLSSKFTLQENIDNENKEVSEFSYRDLVEESYVSPSLKRAILQTLKIYEEIRKITGRIPKKVFIEMARGGDETMKNKKIPARQEQLKKLYDSCGKDISNFSIDIKEMKNSLNSYDNNSLRQKKLYLYYLQFGKCMYTGKEIDLNRLLQNNDTYDIDHIYPRSKVIKDDSFDNLVLVLKNENAEKSNEYPLKKEIQEKMKSFWKFLKEKNFISDEKYKRLTGKDEFELRGFMARQLVNVRQTTKEVGKILQQIEPEIKIVYSKAEIASSFREMFDFIKVRELNDTHHAKDAYLNIVAGNVYNTKFTEKPYRYLQEIKENYDVKKIYNYDIKNAWDKEKSLEIVKKNMEKNTVNITRFIKEEKGQLFDLNPIRKGETSNEIIAIKPKFYEGSAEKLNEKYGYYNSLNPAYFIYVEHKEKNKITRSFERVNLVDVNNTKNKEGLIKYLIENKGLIEPKVIKKIYKNQCILIDDYPYLMNGMDSTKKLEFKNNKVLYLDKKDEKILKNAIKFLEDNQGKSEENYKFIYLKKRDRNEKNETIDSVKERYNIEFNEMYDKFLEKLDSKDYKNYMNNKKLEELSNGKEKFIKLNLFDKALILRSFLKIFTKETIADFSKLNLSKTLGRLNGKSSNVLSKNELYLIEESVTGLFVKKIKL

SEQ ID NO: 6017 - protein, 1507 aa, unidentified
  REGION 1..1507: note = Description of Unknown: Cas Enzyme sequence
MKTILGLDLGPNSIGWAKVEVDDKGNYLRNIKLGSRIIPMDQGILGKFDSGVTESQTAIRTNFRGVRRLRERHLQRRERLHRVLHALKFLPKHYEDAIGWDRNEPAIYGKFINNSEPKLAWERQEDGSMHFLFMESFYEMMADFAKMQPSLVSGEKKIPLDWTIYYLRKKALTQQIKKEELAWILLNFNQKRGYYQLRGEEEEDNPTKRKEYYKLKVIGVEADGAPKAGKIWYNIHLENGWTARCQSKVPLDNWVGNIKEYVVTTEYEADGETPKYDKEGKIKRSFKSPEKGDWQLIKTRTEKFIESSNKTVGTFIYDHLLKEPFDKIRGKYIRTIERKYYKNELYKILCEQAKYHKELDSLDTLNACAKELYKNNQQHQEYLLKKDMKYLLLDDLIFYQRPLKSKKSLIADCPYEVYKYNYKQTGKKEQKKIKCIAKSNPYYQEFRLWQFISNIHLFNVTDGKDVTSEYLKTKEDYVRLFTYLNDRKEIKQETLLKGFLKLKKETIGSEKIYPIRWNYIEDANKSYPCNTTRHELLLAFDRAGIQRELLDVEGREYRLWHLLYSIESKDKTESALRRLKSNKAFSDLNIDDAFVNSFLKIKPFKKEYGAYSEKAIKKLLAVMRRGSLWKEADICEATKQNIAKILQNDIDEKLKKKIEAAVSSFNKLSDFQGLPTWLACYVVYGRHSEAAQIQCWQSPEDLKTYINKFKQHSLRNPIVEQCLLETLRTVYDIWKDAGQIDEIHIELGRNMKSTAEQRARKTNEFLRNENTNLRIKNLLMELKNDDKIENVRPYSPSQQEILRIYEEGALQELSKEDEMYEDISKISKMAQPSPTELSRYKLWLEQKYRSPYTGRVIPLSKLFTTAYQIEHIIPQSRYFDDSFNNKVICESEVNSLKDNMLGYEFIKECGGQKVHCTLLDGNVEIFTEEEYKTFVTKHYVGNPRKKDNLLLEDIPQEFSARQLNDSRYISKMVQTVLSNIVRTKDEQEAISKFVVSCNGMITDRLKKDWGLNDVWNTIVCPRFKRLNEITKTNAFGHWEDKAGKHVFQTIVPLELQRGFSKKRIDHRHHAMDALVIACASRNIVNYLNNESANSPEKREDLRKKLCDEKRKIRKPWKTFTQDTREALSDVVVSFKNYVRVINKATNYYEHYSSSGNKVMISQKGNDMWAIRKPLHKESFFGHVNLRRKATVSLKKALENIPAICDKTLRDYINALVEKHFNTRQLLAHFKSINYRLNRKRVDKVEVWQFSDEKIEMVARRKPLDTSFDAKQISFITDTGIQKILLNYLQSKEGNAEIAFTPEGIEEMNKNISIYNDGKAHQPILNVRVATPKGMKYPVGQTGNKATKFVVAEKGTNLYFAIYENELGERSYDTIPLDIVIKRLKEGQSPVPQINKVGIPLKFYLSPNDLVYVPTKENEDELCRDRIYKFVDSSGTTANFVPHTSANTIYNVDKEYAKKYCNGAVILNEYGLGSPQSKNQKDLDGEMIKEICWKLKVDRLGNIIKVIK

SEQ ID NO: 6018 - protein, 1483 aa, unidentified
  REGION 1..1483: note = Description of Unknown: Cas Enzyme sequence
MKTILGLDLGTNSIGWAKVIVDDNENYLRDIQLGSRIIPMSQDVLGKFDKGVTESQTAIRTNFRGIRRLRERTLQRRERLHRVLHTLHYLPPHYDSAIGWDRKAPTTYGKFLNHGEPKLAWERREDGTMQFLFMDAFHEMIADFAKHQPALVANGKKVPLDWTIYYLRKKALTQAIKKEELAWILLNFNQKRGYYQLRGEEDEEHAAKHEEYHELKVVGVEADEAGKGDNTWYNVKLENGWIYRRQSKIPLDDWVGKVRAFIVTTEYEKDGTTPKKDKEGNVKRSFRSPNENDWGLRKKQTEHSLEASGIPVGAFIYDHLLKEPSDKIRGKFIHTIERKYYKQELAAILREQSKHHEELCSKDMLKACVEELYPNNPLHRESLLKKDMTYLLIEDLIFYQRPLKSKKSLIAECPYEAYSYVDKETGEVKRQGIKCIARSNPYYQEFRLWQLIANLRLRNRADERDVTAEYLPHQEDYVRLFTYLNDRKEINQETLLKDFFKLKKVAIGGEKVFPIRWNYIEDKEKKYPCNATRHELLLALDRAGMEHDWLDNRDLAYRLWHLLYSVDSKDETERALRKLKDDDAFVESFLKIKPFEKEYGAYSEKAIKKLLPVMRRGSLWNEADLCPSTKERIANILQGTIDEKLKKKIGAFISSCQQVSDFQGLPEWLACYVVYGRHSEATAIQHWETPEQLLAYIHGFKQYSLRNPIVEQCILETLRTVYDIWKEAGQIDEIHVELGREMKKTSEQRAHLTENVLRNENTNLRIKSLLMELKNDADMKDVRPHSPMQQEILRIYEEGALQTLSKDDAAFTEIMKISKMAQPSTSELKRYRLWLEQKYRSPYTGKPIALSKLFTSAYQIEHIIPKKRYFDDSFSNKVICEAEVNGAKGSMLAYEFIKDCGGNVIHCTTLGDVTILSEAEYKALVTELYANNTSKKEKLLMEDIPQEFVNRQLNDSRYISRVVMTLLSNIVRIEGEEEATSKFVIPCSGGITDKLKKDWGLNDVWNNIVYPRFERLNALTNTTDFGQWENKEGKRVFQTSVPLELQRGYQKKRIDHRHHAMDALVIACASRNIINYLNNQEANDPTKQENARKQLCIKSRIIRKPWETFTQDAHKALDNIVVSFKNYVRVINKATNYYERYHADGKKVVDEQKGETMWAIRKPMHKDTVFGHVNLRRKAVVKLKDALENIPAICDKTLRHYIQDLQKKHFNTKQLLAHFKSINYRLNKQAVDKVEVWQYSDNKEQLAATRKPLDTSFDAKRIATITDTGIQKILLNYLQAKGGDPAIAFTPEGIAEINRNIAVYNGGKQHQPILKVRIAEPMGAKYPIGETGNKGAKYVEAQKGTNLYFAIYEDEEGNRTYDTVALNVVAERLKQGLTPVPEKNEKGVALKFYLSPNDLVYVPTADELLSKECSLDKNRIYKMVSATKSQCFFLSHRVAKTIYDKVEFEALNKMERALTGEMIKSVCWKIEVDRLGHIINIIK

SEQ ID NO: 6019 - protein, 1111 aa, unidentified
  REGION 1..1111: note = Description of Unknown: Cas Enzyme sequence
MMNKLVLGLDIGITSVGYGVIDIENSRFVDYGVRLFKEGKASDNEIRRTKRGSRRLKRRKQTRLKDMNNLLIQLGIKNDNYHPIGNPYEIRVRGLKEKLSYDELTCALLHITKHRGSSVENIEEDESKDAENTKLILRENNNLLFDGKFICEIQYERLINNNKVRGINNNFKTIDYIKEVEQILEQQTLSEEAKKEIIKIISRKRQYYDGPGSEKSPTPYGRWVDFGVEPIDLIEKMRGKCSIFPEESRAPKSSYTAELFNLLNDLNNLSIHNEKISFEQKNKIIDWVNEKGNITPKQLAKLLEEDLENIKGFRIDKKDNPLLTEFKGYRKIKKVFDEFQDSSYKTNKDIVDGVIEILTKSKDVVDRYNRIKENYPQLSDELVERLSHIVGISQYHSLSLKAMKIINEEMLVSPYNQMQIIHSNGLLNKNRKSLKGEKLIFADDTAILSPVAKKAQRETFKVINALRERYGEFESIVIETTRSKNSDEEKKRIDDNIKYYENVNKEVDALLKEKGYDPARINSKTKLKIRLYQEQNGKSAYTMQPIELNEIISNPNAFEIDHIIPISISLDDSINNKVLATHEENQVKGNLTPIQAYLKGKFSGLGCDLKKYQIQIFSNKNISKKKKAYLLYEKDITKYSTLKEFIARNLVDTSYANRVVLNTLNQYFKDNDIATTVHTIKGRATHMFRKRIHLEKDREQDYMHHAIDALIVASLKKLHLLNSYLLNYDFNDLYNEDTGEIIKVEDDNKLLDPKYIQFISNLKKIQEESFRYYNGIIKRDEMIFQPIKISHKIDTKPNRKVADETIYSTRHIDGVDKVVKKYADIYKDNFDKLTNDIINDKYQEKYLMYRNDPKTFQIIKNIIMNHFTMYKDDKNIYTSSVKSGKIIYSLKGRNNPLYLYKEENGKVHKYSKKNNGPEITSMKYYDREYGSGIDISKYYQVTDKKVVLQQISPYRTDFYKSNEGKYKFVTVRYNNVFFKKSINKYVIDHQWYENQKKLKGIDSNWTFVCSLHHDELIGISKSDGSEYVYDLTTEVDKSLKSRCFDGDIELLKFTATNDDKKGKIEVKPIYTYCQKQLMVYVSTLTRVQKYSTDVLGNLYKVTHNVLKLEFD

SEQ ID NO: 6020 - protein, 1363 aa, unidentified
  REGION 1..1363: note = Description of Unknown: Cas Enzyme sequence
MANNNKEKYYLGLDMGTGSIGWAVTDKNYEIIKKHGKALWGIRLFESANTAEERRKYRTDRRRRERSKNRLALLQEIFAEEISKKDPGFFQRMKESKYYPEDKRDLNGNIPPLPYTLFADEEFTDADFHQKFHTIYHLRNALMKQPENKPDIRLLYLALHHIIKHRGHFLFEGKKISEVTDFSNTVKVLTECAEENDIVITLDSTQINKFENIMQNKDISRTEKKKQISELIMENNMKSAKENTKQIKALAGLLAGCSTKLSDLFADKSLDEEEHSTISFSDNNYEESISSIELILTDRFLLILAAKAIFDWSVLNDILGSSTCLSEAKIQIYEKHKKDLENLKELLKTESSVYHQVFGVPESDKTTNYSSYIGMVRKNGKKQPIAKKCSKEDFYAFLKKILNNFSCSDEKKPIMEKILTEMEKGTLLPKQVIRDNGVIPYQLHERELNKILENASRYYPFLNEKDADGYSAIEKIQSIFHFRIPYYVGPINTYHSKLGGNSWAIRRDVTGKIYPWNFSEKIDEEKSVEKFVLRMTNKCTYLIGEDVLPKESLLYAKYSVLNELNNLRIDGEPASVEIKQKIYNDVFKHSRNVTGKKVKDYLVREGIIEKGQELSGFDQNFKSSLKAYHDFKQIVGEISLSEAEKEDIIKDITLFADSQRMLKKRLRLKYPALSDKQISQLAEKKYSGWGRLSRKFLEEIESVNTETGEIFNIITALWETNDNLMQLLSKKYDFVKSIENQNSQNTSEGAITYEDVENLYVSPAVKRPIWQTLKIVKEIEHIMGCAPERIFVEMAREPGQKGERKISRRTALQQLYRSCQKEVPELYNSLSQSRDDNAFRSDKLYLYYAQLGRCMYSNEVIDFNDLFTNRYDIDHIYPQSKIMDDSMDNRVLVKRELNSNKSDAFPVPLDYVNNAKDLWQTLLQKKLITKEKYHRLTRREGFDDNELAGFIARQLVETRQSTKAVTQLLKKAYPETEIVYAKAAAVSSFRQKFDFIKVRDINDYHHAKDAYLNIVVGNTYFVKFTKNAAWFVKNNPGRTYNLKKMFEQETVKNNNETAWISGEAGTIRTVKKWMKKNNILFTRRAYEGTGELFDQQILKKGKGQVPIKNTASDTRLASIEKYGAYNKASGAYFILVQSEDKKGNLIWSMKHVPIYLAKNLESSPENMLQYCEKEFGLKKPAILIPKIKMDSLFEVDGFRMHLSGRSNNRLVFKNANQLVVSDAAQRTLKKSAKYCADYKINKNAQISDKTQLNEQDLQEVYKEFQYKLQNTIYGKRLGTQLQTLEKGKEKFDSLTREEKCLILNEILHLFQCQSTTANLTLIDGPGHAGILLLNNDISKLEHISIINQSITGFYEQAIDLKAL

SEQ ID NO: 6021 - protein, 1389 aa, unidentified
  REGION 1..1389: note = Description of Unknown: Cas Enzyme sequence
MNLRNVGEYNIGLDIGTGSVGWSVTDEDGNLLHFKGKPTWGSRIFPSAEPASEARTHRGQRRRYTRRRWRLDLLEVLFQPEVSEVDPDFFTRLRQTRLLKGDRDSQFADCAGMIFPQAEFSEKDYFKKFPTVYHLRQWLMNTDEKADIRLVYLALHNIVKHRGNFLQQENEGLTSQNSSVKNSVDRFCYELQSYCDALDAPCDAQNVVDDVVAILGDTASSKSGLQEKISGKLGIGEAGLLDKQAAKRLSKALAAAIVGLKADMAHIFFVGEEVPEGVATGIYLSNDEQVETFETALPDEGRALFEAMWAVYSSYVLQEILSSKPGEGISANKVEDYNRYGEDLHLLKSLVKQYVPEKYDEFFRGAFCAPTPLHPQKHVYDKYGKDQIKGYTRYNEIRKTKYEDFKKEVEALFKGTSAIDDPRYRVMMERFGSERFLRRLKTSDNGAIPFQLHLEEMRTIIDNQAKFYPFLRQERAKLESLVSFRIPYYVGPLTKKNARKAADGKLRFAWVERQEGKEDERIYPWNWEEIVDKDRSATAFIQRMTSTCTYLHGEPVLPKCSLVYEEYCVLNELNGAKLTQDGDREHRLDYKDRTEAVEQLFRRGRVTYKKMEEWLRKRGVSNPHVSGGQGEAGFESKMSSYIFFAKDVFNVDEIPASDYPMIEEVILWSTLFEDRSIFREKLKRNYGDRLTDEQIKKIVRKRFAGWGKLSKTLLCEVKADTDCGPRSIMDVLREGNPNSDKPSRAMVLMEILRDDNLGFEKLIEARNREHMSDVGMSLEELPGSPALRRSVNQALSIVDEIAGVAGHAPTNIFIEVTRDEDPRKKGSRTKRRYDDLKDKLAALKQGAPEWWSSNVSRELADCAKANAELSEKLTLYFMQGGKSLYSGKPLEIERLSEYQVDHIIPQTYIKDDSFENKALVLSSENQSKSDQLLLSDEVRRKMKSYWGALHDAKLIGDKKHRNLLRDSISEQQMKGFIARQLVETSQILKVVQNFLRETYPDTRVMPVKAALSSELRHEIGLVKCREANDFHHAHDALLASEMGRFILKRHAAMYENPIGYTHVMRNFVRAESGQVKRGKMPGSASFVVASFMRSGFDEETGELFRDDWSVEREISRLKRYFNYRQCFISRMPEETSGAFWDATVYSPRDAGKNMTLPLKKGLDAEKYGSYSREQFAYFFIYKAEKKGREVLEFAPVPVSVASAVGQNPEALVEYAQGLARGKGLAFVEVVRPKVYKYQLMEIDGSKLYLTGAREVRNAEQFAFNLEETTALRGLYEETVVAEHILEGLFSHIANSLERYSPKLFSSLGIPEWRNEFASLSYEEKTELLKVLIAIGNGKSNMADLRSVGKGKYAGNIRLSFGSLLAKGDGITFIDQSVTGMFERRTHIGL

SEQ ID NO: 6022 - protein, 1146 aa, unidentified
  REGION 1..1146: note = Description of Unknown: Cas Enzyme sequence
MALRYILGIDLGISSIGTALIKIAPEAKDLNDINSYEKILDAGVRICSCPEGAEKRRILRSQRKSKKHRKARKKQLIQLLQEYNLLPKERSDLELGLRSAPYALRAKAMQEPLNSAHELGFCIMHTAKLRGAGFIEEADEEEKSEKSLNRYQLLEQALNKEKTTLSEYLYKQLQENGCIRQRKEFIADKVPFSVPRYLVKRDYCDLMSRQAPHFNISDEQIKKIYDCIFMDFPRAPYANAPCSLLPETGGRLPKMHRLAEQLRIYQQCNNIRYKTENSTQKLTREMRDKLAAMLMQGESLNKTLIKKTLQTYTDEKILSINVYAEDEEIKAIKPFAHIKAFADIPAFWQLSEEEQDGLMEFIADPVNPKANPAKPVLYDEEDFLHICMEKLNLSGIEDERKLYACLNSLPKDRTMLGKEASRQILKKLIEGYEENGIWQAPTYYEAVKACGFTRENQEQKRYDELPYYGEILHDEILPIHPWHLERTAKEEKIGRIANPVVHSILNQLRKVINEIIRLYGKPEMIKLEVARDFGMSKKKRDKLEKQRLANEKYNKIIDEELLKNGYAVTDKNRKKYKLLKEQGYKDIYTQANLRISDLNAYEIDHIIPQTAGGTNSFCNLVLTTVNNVKSDTFAYDFIRQNFADREEAIKKHLETLPENKAWRFTAEAKDRFILLGDEKDEDYADRRLQDSRYMAKAALRYLHAVCPDILAIRGGMTAQLRRLWGFDGMEFELMGLDIPKYLTNNETGEVYCDENGKLSKNSDWEKKPRIDHRHHAIDAMVLCAVTRSLALKMYKARKQGKEIDESIINMPFRLSPKNPDHKSFRELVLETLKEIRISHKAEHDTNTQLHNDTAIRILDYDEKKGLHTATYMRSLGNIDSFGKLEKIAVAENLGTSPDVQKIRKRCAEIIKAVNAQKFAAEQSLMEKNAENRLQGLKETAMTEQNLVQEAIRLARVGKKYPVGKKFTLVNIREKQQCGYEPDSNHHVDFYVHTEGKQKGKIGWECVKSIDAANPNFKPGWQQENAKLIWSVCKDDILELRFTEQQLQEYNVPKAFVSKISKNGQQEYTMLAKILKFSPGVLVFVSIYDARTGTKNALKEHPENFLLWTSGNLGLNSYCELQARKVSLSPFGKINGKHKKLWNGKKI

SEQ ID NO: 6023 - protein, 1319 aa, unidentified
  REGION 1..1319: note = Description of Unknown: Cas Enzyme sequence
MSENTEKEYFLGLDIGTDSVGWAVTDPEYHVLRRKGKALWGVRLFDAANTAAERRTFRTNRRRIQRRKQRIRLLQQLFAEEMARIDPGFFQRMSDSALWQEDKQDQQIYSLFSGNVKPGVEGSENEDGVKCPEKYTDVDYYREYPTIYHLRSALIKEKKAFDLRLVYLAIHHLMKHRGHFLFNGSISNVTSFHMTFQTFADCLSDEFGVELECDSEEQFAEILKDKRSRKTTKCSALEELCHVEKTDRQMKELFKLVTGMKASLSIIFGDEDLAEIEHNKIGFSESSYDEVRLALEDEIQERTGILDIFHAVYSWAVLADILEGGEYEGSSYLSVAKVSSYQKHGNDLRILRALVREYCPDSYKAFFSSVGTDNYCAYAGSLKKNGKKYPVKRCGQEDFYKALKKLLNKMPADLSEVKDILLEIENGTFLPLQVSKDNGVIPYQVNKIELEKILQNAEEYLPFLKNLDDECGKTVREKIIDLFEFRIPYYVGPLNTARGENCWMVRKGEGRIYPWNFEAKVDCDRSAEEFIRRMTNQCTYLIHEDVVPKNSLLYSEFMVLNELNNVKIRSEKLPVDLKQEIVSDLFKRHKQVTGKKLLNYLNANGYDVKKEELAGFDGNFKASLSPYIVLRDKIFGDELEKYNIQQMAEEIILWITLYGEDQKMLRRVIKRHYEQKLSEKQIEALVKLKFQGWGRLSKRFLNELEGVDCETGECMTIMQGLRNTQNNLMQLLSQQYTFMETIEEENGGYHVDEITYDSLIKDLVISPSVKRAVWQTVQIVEEIQDVMDGQPKKIFVEMARSEDEKKRTTSRKDKLIEAYAAIKDEAHQWQEELQKYSDGDFKAIKLYLYYTQMGQCMYTGKKIDLSQLNDATIWDRDHIYPQSKTKDDSLDNLVLVDRRVNAKKSDGMLSPEIQQRMGAVWKFLKEKKLISEKKYERLTRTSPLTDEELAGFINRQLVETRQSSKAVATLLKRVYEDAEIVYVKAGSVSDFRKEKLSYVKVRDLNDYHHAKDAYQNVVVGNVYHEKFTSNPLRWIKENPNTKYSLNQMFNFDLEKNGKVIWKKGRDGSIKCVNDTLSRNDILFTRYAFCNKGGFFNQMLSEAPEDKKKAKGLIPIKKGMETWKYGGYTSVTPSHFMLVASEDKKGREIRTIETVPLYRKKEFEKNPDALIEYCEEFYGLKNPRVIIPCIKKNARLVVNGFPMHLKGSTGKQLILQGAVQLCLDKEKVSYLKKVTKYLEDNAKRKDRRTSLEVRAISGINREDNIGLYDLFINKLSNTIYQYRPANPKENLVKGRDKFIELDLAEQCVVLGEVLHLFQCK

SEQ ID NO: 6024 - protein, 1102 aa, unidentified
  REGION 1..1102: note = Description of Unknown: Cas Enzyme sequence
FGEDDLAEIEHNKISFSESSYDDVRLALEDEIHEKTGILDIFHAVYSWAVLADILEGGEYEGNSYLSVAKVSAYQKHGSDLQRLRTLVREYCPDHYKSFFSAPGKDNYCAYVGNSKKNGKKQQVKHCTQEEFYKALKKLLNQMPADHPEVKDILLEIENGTFMPLQVSKDNGVIPYQVNKMELEKILQNAEEYLPFLKETDEECRKTVSEKIIDLFEFRIPYYVGPLNTAKGENCWMVRKDEEGKIYPWNFEEKVDRDQSAEKFIRRMTNQCTYLIREDVVPKNSLLYSEFMVLNELNNVKIRSEKLPVELKQEIVSNLFKKQKQITGKKLLNYLNANGYDVQKEDLSGFDGNFKASMSSYLTLKKVFGEELEKYHVQQMAEDIILWITLYGDDQKMLRRVIRNHCGQQLSEEQIISLSKLKFQGWGRLSRRFLNELEGADCETGECMTIMQGLRNTQNNLMQLLSQQYTFMDMIEEENGGYHVDEITYDHLVKDMVISPSVKRAVWQTVQIVEEIREIMGGQPKKIFVEMARSEEEKKRTVSRKDRLLEAYEAIKDEARQWQEELQKYSDGDFKAIKLYLYYTQMGQCMYTGRKIDLSQLNDATVWDRDHIYPQSKTKDDSLDNLVLVDRRVNAKKSDGMLSPEIQQRMGATWKYLKEKKLISEKKYERLTRVSPLTDEELAGFINRQLVETRQSSKAVATLLKRVYEEAEIVYVKAGAVSDFRKDYLEYIKVRDLNDYHHAKDAYQNIVVGNVYHEKFTSNPLRWLKENPNTKYSLNKIFNFDLEKNGEVIWRRGKDGSIKCVNETLKRNDILFTRYAFCNKGGLFNQMLVAAPEDKAKAKGLVPIKKGMETWKYGGYNSVTPSHFMLVASEDKKGNEIRTIETVPLYRKKEFEKNPDALLQYCREFYGLKNPRVIIPCIKKNACLIVNGFPMHLKGSTGKQLILQGAVQLCLEKEIAAYLKKITKYLEDNAQRRDKRTLLEVKDITGIYKCENMKLYDLFLDKLSKTIYQYRPANPKDTLLKGREKFEELDLAEQCVVLGEILHLFQCKPLCANLVLIGASPHTGVITIGKKVSNCDSVKLVSQSVTGMKERVIDLLRV

SEQ ID NO: 6025 - protein, 1353 aa, unidentified
  REGION 1..1353: note = Description of Unknown: Cas Enzyme sequence
MEKNYYLGLDMGTSSVGWAVTDENYNLMRKKGKDLWGVRLFKEAKTSAERRVKRTSRRRLQREKARIGYLKELFADEINKVDAGFYQRMEDSKFISDDKTVHQKFTLFSDTNYTDEDYYNDYPTIFHLRKKLIESDDEYDVRMVFLALLNMYKHRGHFLNANLSDNGMGDINEQYDRLKELCSEYLNVEWENKPDKFEEILKECNCSNSLRNERLLETFNLKKTDKEKCEMLKLICGLSGTLSKIFKDLDDDSETKKMTISFRSSNYDEEAINVEEIIGSENFEIIAVLKEIHDWSMLANIMRGKKYLSVARVEEYEKHKDDLKILKKVIKEYSIEEYNNFFRVMADNNYSAYVNSVNSNKESTRRGAKCDNDTFFKEIKKIVNKCYDSEEKEYILKEIEKGTFLPKQIISSNGVIPNQVHKIEMKKILQNAEKYLPFLTEKDDSGLSVSERILQMFSFQIPYYIGPISGKIGSDEKSKNSWSVRKEKGRIYPWNFKDKIDEKESAEKFIERMVNHCTYLNNEMVLPKNSLLYEKFMVLNELNNLKINNENISVELKQSLYNNLFKTGKKVTAKGIKSYLERNGLCEPNEDINLTGIDGDFTNRLSNYAKFKGIFNTDELTYEQWNMAEKIIKWSTIYGDSKKFLEEKIRNEYSEKLDSQQIKRILGIKFRDWGRLSEELLNMEGADVNTGEIKSVIGRMWDENYNLMELIATDNFTYKQVIKEKQNGLDKSLSEIDYDDLDELYVSAPVKRMIWQTLLIIKELVSVIGYEPTRVFVEMAKDVNTEKKRTDSRKKKFLDLYKQCEKDERDFWIKEIDDKSEAEFRKKKLYLYYTQKGRCMYTGEQINPLDLTNDNLYDIDHIYPRHFVKDDSIENNLVLVKKEKNAHKSDTFPIEDDIRKNQYAFWKMLYEKNFITKVKYQRLTRKEPFSDEEKANFIMRQIVETRQGTKVITDILEKSFDKTQIVYVKAGNVSLFRQKYECIKCREINDFHHANDAYLNIVVGNVYDTKFTSDPRNFIKEYRKNPQKNEYHMYKLFDYNVQRGDRVAWTASNGESMKVVKGTLKKNTPLVTFMSYEEHGGLYDQNIISAKDIEKVKGKGYLPIKSSDSRLNNTEKYGGYAKVSGAYFFVVEHTVKNVRIRTIEPMPCYLTKVLTTKEKIEDYCCNILKYDSPVVKYEKIKMYSLIKVNGYPMYLTGRTGNQLIVSNGIQLVLSYDEAKYIKDLLKINQEEFDQNRLENLGINKFRNEKLYDTLNKKYTNEIYKKRPNSMGNKMIEWKNTFQNLSIKDQTEVLLQLIQLGQKQNSGVNLEKLGASKKTGVSLVSKKITDKESFELINKSITGLYENKVDLLRV

SEQ ID NO: 6026 - protein, 1433 aa, unidentified
  REGION 1..1433: note = Description of Unknown: Cas Enzyme sequence
MKTILGLDLGCNSIGWALVNEAENTEEVSSIIKLGVRVNPLTVDEMQNFEKGKSITTNADRTLKRSMRRNLQRYKLRRDTLIEVLKEHGFITDSTLLSEHGNKTTFETYRLRAKAAVEEVSLEEFARVLLMINKKRGYKSSRKAKGSEDGVLIDGMDVARKLYEEDLTPGELCLQMLETGKRTLPDFYRSDLQDEFDRIWNFQKQFNPELFCDIAKEEIRSKNRSQTWAVLAKYFVWSEKETVWNEEEARTEEIMKEYKLVGLKRDTKGNDLKLENYSWRVQALSKQLNPEIIAIVLQEINGQISASSGYLGAISDRSKQLYFNRQTVGQYLMSELEKDPNVSLRNRVFYRQDYLDEFDKIWEKQAEFHEELTAKLKKEIRDIIIFYQRRLKSQKGLISFCEFEKREVIVEKDGRKLNKTVGCRVIPRSHPLFQEFRIWQTLNDIEVFAWDKQSKRKKADKSSTLFDNTEDALLVEGKRSLYQEEKELLAKELFVKESMKKAEVLKLLFENFQELDMNFKQIDGNHTGFTLFSAYSKMIEKYGYEPVDFKKPADEIIEKLETIFTNLGWNTELLSIDLSKEDKELDRQPYFRLWHLLYSFEGDNTPTGNGKLLEKIMQLCDVEKEYAVELANVSFQEDYGSLSAKAIKKILPYLKEGNQYDVACDYAGYRHSKSSLTKDEIENKILKDKLEILPKNSLRNPVVEKILNQMVNLINTIIDTYGKPDEIHVELARELKKNAKEREELTKSIARNTREHDEIRQLLRTEFGMMNVSRNDIIRYKLYEELKDNGYKTLYSNEYIPREKIFSKEIDIEHIIPQARIFDDSLSNKTLEYRAINIEKGNKTAYDFVKEKYGDDGLEKFLNRCEALFKNKKTKLRKLKMEEKDIPEGFIDRDLRNTQYISKKALAMLNEISHRVVATTGAITDKLREDWQLVDLMKELNLPKYEKLGMVEMLEDKDGRKIKKITDWTKRNDHRHHAMDALTVAFTKDVFIQYYNNKNAAWMPASKEHANIIGIKARYFENGKALAPMPLAQFRAEAKLHLENLLVSIKAKNKVITSNVNRTNKKNGENRKLQQTPRGQLHLETVYGSHRQYATKIEKVNATFDVAKIATVSKLAYQNALLKRLEAFGNDPKKAFTGKNTLEKNPLYLDEKQTEMVPEKVQTVEFETVYTIRKPIDPNLSIDKVIDVKIRSVLEKRLKEYGGDAKKAFVNLDENPIWLNEAKGISIKRVSIRGISNAQSLHEKKDKDGNLILDKEGRKIPVDFVNTGNNHHVAVYKKPVLDKVGQIVLDEEGNPKYELDEVVVSFFDAVTRVNLGQPIIDKDYRRSEGWQFLFSMKQNEYFVFPNEKTGFNPKEVDLLNPENYALISPNLFRVQKFAYKNYVFRHHLETTIKDTSSTLKGITWTDFRSSKGLDKIVKVRVDHIGQIVSLGEY

SEQ ID NO: 6027 - protein, 1084 aa, unidentified
  REGION 1..1084: note = Description of Unknown: Cas Enzyme sequence
MKYSIGLDIGISSVGWSVINLDRERIERMGARLFDAAENPKNGSSLAAPRRDARSARRRLRRRRYRVGKVRRFIIDKGLLTHGQADQLFDWKDGDLDIWLIRVNAMERLLTDREFARVLIHIAKNRGYRSNRKSEAKVGENGQVLSHIKANKELMEEKGYQTVAEMLVSEPEKFAGRKRNRGGEYTHMIARGELESEIHLIFAKQRAFGNRFATEANEDTYVSIWKAQRPVATKEDILKKIGDCTLEKGEKRAPKASFAFQYFRALDKLNRLRILSFREPSRELTDEERNRIIPALFDHDKQKYFDLRKILQLRDDQKFNELFYDPGKSLKDNENKTFLSLVEQFKIRKVIKDVQGKEALLQYRPIDLDTIAYSLTVFKDDQDTRDYLSNDYVNENGKQLANLANRVFDTELIEGLLSLSFAKFGHLSLKALHKLIPQMEQGLSYSDACKEVGYHDNEQVGKDKQHLLPVIPADEIRNPVVIRSLSQTRKVINAIIKRYGSPAFMYIELAREMGRPYNERRDLEKQYNKNRTVNDSAIDQIHELYPEISAPRGHDILKYKLWQQQDCKCAYSLEPIPAEKIFEPGYAEVDHIIPYSRSFDDSNSNKVLVLSRMNQKKKDRTPYEWFGGDEHRWKKFESYVNALKVNRKKKSLLTKKNMDTEEENTFKSRHLNDTRYITRFIKSFVEDNLLFREVEGAKQHVFTVNGAYTSLMRKRWGFNKNRDESDLHHSVDAVIIAVSHPFRYEVSTYFKHREVSLHQLMKRKWDYFPEPWEGFVKELRARTIQDPEKMKLALESMELESYDHDFIEEMKPIFISRMPKRSIKGQIHDETLRRKRGTTKDGFVKVVTRTRLENITFDKNGDFPMYGRESDPKTYQAIKQRYLENGMDKKKAFIDPLYKPAKDPNKASLIRSVKIEDKANQVVSLRDEAVAANSSIVRTEVYQNKETGKFYLAPVYVSDVFAGREPKKFITQSKPYEKWVNITNDYIFKFNIFPNDVLHIKMKHAKKAKSNLGEILNWQEGYVYFKATDIHTGAISIIDHMNSFSDRIGTQNLQVFEKYLVDPLGSLSRVHGEKQYGVPALSHS

SEQ ID NO: 6028 - protein, 912 aa, unidentified
  REGION 1..912: note = Description of Unknown: Cas Enzyme sequence
MWRLALDMGTSSIGWTALDIEKPENIQILDMGVRIFPDGREPKTGTPLNEARRNARQMRRQRDRKIRRKKAMLNFLINNGLMPKEKDEQQSVAKLDPYTLRNEALERKLKPFELGRIMMQFSVRRGFKSGRKEQQAENTAEREGMLGGIQSLEAELQGLTLGQWLCKQREAGNSVRFTPRMEKTKIIYSFYPSREMYETEFAAIKEKQEKYYKEINWDRLHWLVFFQRPLKRPERGRCQFYTEEDRGYKAFPSAHRFRILQDINNLKYYNEENREEIIPPELKLRIFEALDSQKSLSFDRIRRLLGENYTGSFNLEDNRRDKLKGNETSVDFRKPELFGHVWDELDIQKQDEIIEKLMIEDDESVIHDFLKPFGLSEEQIKETSGKNLPVGTTMLSSRFMIDCSEIMMKEWLPYFEAVKKLGLHHSKKKKQKIRRSLPYYGEILTGLVSGAKGASYNGNDEEKYGRIANPTVHIALNQLRKLVNALIRRFGNPDQIIMEVARELKMSKARKDELFREQLKNQKDNERIKKELTDLGLIKISSEDIKKYKLWEELAVEGIARLCPYCGKTISAKQLISGNVEIEHILPYSRTLLNSRDNLTIAHRECNQAKKNMSPFEAFGNSPKGFDWNRITELAAKLPYNKRRKFYPDAMDRFNQDEEGKGGFIDRQITDTQYLSKASKDYLSAICDSNAIWVSPGRLTAMLRGSWGFNTLLNRGHDTWFKNRSDHRHHALDALVIGLCNRHLISEAARINSGRGYSEIDAPQCPINRSDIEDRLKSIIVSYKQDHGKEGKLYAETALAKHSYIEQISPEDIEEKEINRIVPKNIQSDVTLLVQKEGFRKAKALIQKKYKHLNVFRDKWVTRVPLESLSEQEIQNIADPLIREKIQNYIESHSIRTKQELQYALSRFSDKS

SEQ ID NO: 6029 - protein, 1214 aa, unidentified
  REGION 1..1214: note = Description of Unknown: Cas Enzyme sequence
NSLVENDKDLINELYKEKFFRISKPNFEFSEIYDWLKKKNGHDNWDLNYNLKTNIAACPVGARLQKLFGPAWHQYNFTTDKFRESRKSSENIKHTVTYGIDDIWHVLIESNDEDFIKEYAEKLKINGDDLINLWYAMPVGYAQLSLKAINNILPFLREGHIYTDAVLLAKVPDILGEQLWTENKKLITEALKKEVIEKNRQEKRILNIVNNLIAQYKTNGIKERKDYIIGSLDHMLPVGSKERDSIQIQTAIEEAFGKVSWKTLPENEKNRLKTKVTQYYQQFFDSLEQAFYPLPRLGDAMKKFLANNFTELLYCPNTFNNDTTEKCHCEKCTRLNSLYHPSMMDIYPKAKTRYYQHGDIQKRMVMLGTPKIGSFKNPMAMRTLHELKKLVNYYIATGEIDEDTRVVVEVGRELVDTNKRWAYETYNRIREEENKEFAEAIKELVNKDAINANPDSASDIDKFRLWYEMVESPEGYEDKSKKFISVDEDRIYGEAKIKSGKNKKEKKNIEPSESEQNKKERYYSFNENHFDKIKKETWLKLKRAKDNIEDRYRLWKEQQFVCIYTGKLINITDLFNPNLIDIEHTIPRSISFDNSLANKTVCYADYNRNTKKNKIPSMLPDLDYNAIKQRIEKWTQKVKDLEVRVEYWKGKSKQASTKDYKDTCIRQRHLWQFELDYWRNKVERFMMTEVKAGFKNSQLKDTQLISKYAFHYLKSFFNRVDVQKGTVTAEFRKIFDIQDTGTKKDRSKHSHHAKDAIVLSIIPVVTIRDKMLEVWYKMDEQKKLLSSSLRKEKLFMEQDIKLLEEELEQLKLQCKLPKGLNSTINKLDETLLINNIARNRSLLPASKKMKVKGKIKIATGDAIRGQLHLDTFYGKIRIVERDENDKPLRNDDGSWKFAEGDKDFKFVLRKEVDKTLNIDKIVDPELKKIIKKQVGKRSLSQTLGEDRGLYMLRRDGSKANKIRHIRCFSDDVSDPVCVKEHLLIGSKDHKNYYWAKNGENILCVLYQKMVKSKKTGEDRPDRTLEIISLKDAADFLKTGLIKTINDVENNLFRKDSKGNVIIDDDGRKEKPYAILKPDMKVIFYDETLDELKQQSNESVYDYNKRINYRTYKIVKFTGGQLTFQHHLEARIDKELDIAYPERIVYKTDERKNKEITYGGRGTSGFTEKVSDALKYNSYNNYEPWPKLLYTVNWLNIAIEGKHFEINPDGKIEWI

SEQ ID NO: 6030 - protein, 1452 aa, unidentified
  REGION 1..1452: note = Description of Unknown: Cas Enzyme sequence
MNKKILGFDLGTNSIGWALIEQNFEEKKGEIWGMGSRIIPMSQDILGEFGKGNSISQTAERTGYRSVRRLRERHLLRRERLHRVLNVLGFLPKHYAAEIDFEKRLGKFLDDKEPKIAYNNNQFIFKSSFVEMLADFRIQQPQLLKNEKGEDKLIPYDWTIYYLRKKALTKKIEKEELAWIILNFNQKRGYYQLRGEEEEENPNKLVEFHSLKITDVIADDKPNNKGEIWHSLVLENGWVYRRSSKISLIDWKEKTRDFIVTTDLNDDGTIKTDKEGKEKRSFRAPGEDDWTLLKKKTEQEIDASYKTVGTYIYDALLQNPKQKIKGKLVRTIERKFYKEELKQILEVQKQFYTELQNEDLYNDCVRELYKNNEAHQLLLSKRDFTHLFVEDILFYQRPLKSKKSSVSNCTLEYRKYKDAEGNEKTEYLKAIPKSHPLYQEFRLWQWIYNLGIYKREDDTNVTTEFLTNIEDFENLFGFLNNKKEIKQDVLIKYFLEQKHGLKGKLLNNEAAKYRWNFVDDKEKTYPCNETKVLIISRLSKVKNIADDFLNDEIEKQLWHIIYSVTDKTDYEKALNSFAAKNNLNENSFVENFKKFPPFKNEYGTYSEKAIKKLLPLIRTGKYWNWDALNEKTKNRIDRIITGEYDEDIKDRVRDKAIHLTEHNHFQGLQLWLAGYIVYGRHSEATNITKWNSVADLENYLQDFKQHSLRNPIVEQVVIETLRVIKDIWQQYGNGVKDFFDEIHIELGREMKNPADERKKITNQITENENTNLRIKALLAELKNDKDVLNVIPYSPMQQEALKIYEDGVLNSDIEIPEDIQKISKTAQPTSSELQRYKLWLEQKYRSPYTGETIPLSRLFTTDYEIEHIIPQSRFFDDSFSNKVICESAVNKLKDNQVGLEFIKNHHGEIVETGNGKKVKVFEVAAYEDFVKQHYSKNRSKRNKLLLEDIPEKMIERQINDTRYISKFISSILSNIVREEKNDDGINSKNIIPGNGKITTALKQDWGLNDIWNELILPRFERMNQLTNSTAFTSYNERHQKYLPTVPIEYSKDFQKKRIDHRHHAMDALVIACATREHVNFMNNKHALDKKKTSEEKQKFRYDLRAILCDKKYNDNSNENYKWLFKKPWNNFTIEAKNELEKIVISFKQNLRVINKTTNKHEKWVKKDGIKTKELVPQTKGDSWAIRKAMHKDTVSGEVKLNRIKVPKGKILTATRKSIDTSFDLKTIESITDTGIQKILKNYLFSKGNNPELAFSPEGIEDLNKNIEKYNDGKKHQPIYKVRIFELGSKFPLGQTGNKKTKFVEAAKGTNLFFAIYQDENGKRNYETIPLNIVIERQKQGLSSVPETNESGEKLLFHLSPNDLVYIPNEEEKITPALIDWKNLTKEQVNNIYKVVSFTGNQIFFVRQDIATSIVNKNEFSSLNKTERSIDGKMIKESCIKLKTDRLGNISKA

SEQ ID NO: 6031 - protein, 1221 aa, unidentified
  REGION 1..1221: note = Description of Unknown: Cas Enzyme sequence
MKKILGLDLGVGSIGWSLINADKDNKPIAILGLGSRIISLSPDESSEFTSGNAASKNQKRTQKRTARKGYDRYQMRRQALTDKLRKLKMLPDEHLIKLPVLDLWTLRARAATPGEKLTLPEIGRVLYHINQKRGYRHSRSDDSADKEQREYVQAINKRFQEIREEGVTIGQHFVKKLKESEVVTDKGAFYNYRIKEQVFPRDAYVAEFDRVMDCQKVFYPEELSEANINEFRNEIIFYQRNLKSCKHLVSRCEFMTRSFMDEEHRPVLDASGKLVISGPKVAPKSSPIFQVCKIWEEINNLSIRNKENDELHISPEQKKEIFEYLDNNEKITSAALYKILGIGKGDGWSVDKALSKGFTGNTTKVAISKALGKANDAKKRDLLRFDLRLKENGVNKDTGEIICEIDPECENEPLYKLWHVIYSINDKDAQRHALTSQFGINDEASLAELSKIDFVKQGYGSRSVKFMRKLLPSLMDGAKYSEACDVIGVNHSGSLTKSENEARELLQRIPQLQKNELRQPVVEKILNQMINVVNAVIEKFGGVDEIRVEMARELKLSKEGRAATAKNIRDREKENKEIAEKIIELGVTPSKNKILKYRLWQEAGQKCFYCGQPVGATEFLNGLDVEIEHVVPKALLFDDSFSNKVCACRKCNAEKRNSTAYDYMKSKGENAFNDYLRRVDTAFSEHKISFTKRSRLLTPADKIPKDFISRQLVQTQYISRKAMEILKQVCHNVYGSSGEVTSYLRRIWGYDEILHSLDLPRYREGGMTAEVSYEHRGQTHTEERIKDWSKRLDHRHHAIDALTIACTRQSVIQRLNNLSSMTAVAGEAMSLDKWTLAQPHFSVQEVSDKVGGILVSFKAGKKVTTPGKRYTYRGGKRILAQDGLLIPRGALSEESVYGRISALEKNVLVKKLFERVEDIVKPGIRAVVEDRLMACDNDVNAACTSLKKEPLYLDAEKTIPLEYGTCYKAKYVMKYALSALKPKDVEYIVDEHIRKVVSERLSEYGNDPKKAFAEPLYADDAETIPVRTVRCYTGLDQVVPVKRDVAGNDIGFVKPGNNHHIAIYRDADGKFHECVVTFWDAVERKKCGIPVIVRNPDEVWDVVIDKNVPEELAAGLPALGWSFVMSLQQNEMFILGMEDDEFRDAMAEADYKALGAHLYRVQKLTGSDYYFRSHYETLLDDSAGARIMKKFYRVRSFNALFNLHPRKVAVSLLGEMSLKND

SEQ ID NO: 6032 - protein, 1531 aa, unidentified
  REGION 1..1531: note = Description of Unknown: Cas Enzyme sequence
MKPKHILGLDLGTNSIGWAVINASKNEEDKEQLDGINCDGVRIIPMDASVLGDFDKGNSKSQTADRTKSRSVRRLYERNKLRRERLHRILDLLGFLPSHYSQQLDRYGKFITGTEPKLPWYKNEQGHWSFIFQDSFDEMLADFYQKHPDFISKGQKVPYDWTIYYLRKKALTQKVNKEELAWILLNFNQKRGYYQLREEEQQERPSKTRLYFDSQIVTDIIDTKQTYKGMKVFSAILEDGTRGKIFKKEIPDWIGQKKDIIVTIDLDKDGKDKYDETGELSCRFKIPSEQEWEEQWELIKTKTQKDLDDSGKTVGAYIYDTLLQMPKQKIRGKLVRTIERKYYKEELRRILEKQKEFHPEFQDRTLYEACLEELYPQNDAHRNLISNRDLVYLLVEDILFYQRPLKSKKSLISDCPFEEYTHVDKETGEVCYYHPKCIAKSHPLFQEFRLWQFLSNLRIYQKEKMVNGKLCLDVDVTSDFLKNEEDYTDLFDWLNRQKSIKQDSFFKCPLFGLKKKDITNYRWNYVEDKTYPGNETRALILGRLEKAGITADFLTLEIEKALWHILYSISDKRELEKALNSFARQHSLGEKFVKEFLGIPPFEKEYGSYSAKAIKKLLPLMRTGKYWNETCIDEQTCDRIDKIISGEYDEGIQARVREKAIHLNDMSSFKGLPLWLACYVVYNRHSEAKDIQKWEKPSDIDAYLKSFKQHSLHNPIVEQIILETLRTVRDIWKQVGHIDEIHVELGREMKNPSEKRKKMAQQIQENENTNLRIKALLTEFMNPEFEIENVHPYSPGQQDLLRIYEEGVWNSVDEVPNEIATIIKKLNESDIKKRPTTSEVLRYKLWLEQKYRSPYTGEMIPLSKLFTPAYEIEHIIPQARYFDDSFSNKVICESEVNKLKSNMLGYEFINKHHGEKVQVTGGKSVKIFSVGSYEQFIKDNYSRNAAKMKRLLMDDIPEQFIARQLNDSRYISKLVKSLLSNIVREAGEQEEMSKNVIVCTGSITDRLKKDWGINDVWNRIILPRFLRLNELTESNRFTSVTASGNVIPAMPLELQKGFNKKRIDHRHHAMDAIVIACANRNIVNYLNNESASKNAQTSRYDLQHLLCDKQKTDDKGNYRWFIKKPWDTFTQDVYTALQEIIVSFKQNLRIINKTTNHYQHYEAGKKTIISQKKGDNWAIRKPMHKDTVFGEVNLRSIKTVPLKEALINPKAVVEKDLKKKLKELLMQHLNEKQIKKYFEDNKDTWQDVDLKKIKVYCFSKETKDRFFAVRKPIDSSFDKKKIMGNVTDTSIQKILLRHLEANENNPEWAFSPEGIETMNKNIIELNDGKWHQPIYKVRVYEKADKFAVGQNGNKSTKYVEAAKGTNLFFAIYETEQEDQSTGEVIKKRSYATIPLNIVIDRQKHGLPPAPEDENGNPPKFVLSPNDLVYVPTEEEIQNGKLSSTLNPRQIYKLVDSSDSTANFVPQSSANILFSLPKEIAKTFCQGENLIQNEYGLGSPQAKNQRAITGEMIKEICIPIQVDRLGNIIQKL

SEQ ID NO: 6033 - protein, 1508 aa, unidentified
  REGION 1..1508: note = Description of Unknown: Cas Enzyme sequence
MKRILGLDLGTNSIGSALVEGIVTDNGKEELSNIRYCGSRIIPMDAAKLGDFERGNSVSQTADRTKYRSTRHLYERSKLRRERLHRVLDLMGFLPAHYSNSLTRYGKFRDDVECKLPWVKDDTGVYHFLFEESFQEMLADFSKHQPQLVCDDKKVPYDWTIYYLRKKALSEKITKEELAWVLLNFNQKRGYYQLREEESDVRSDNKLEAYYSLKVVKVEALDEKKGKAIKYNVEFENGMIWSRFSNVPLDWKGKIKDIIVTTTLDKDGNPKKNKDGEIICSFRNPDENDWSLLKIRTEDEIKNSQETVGAYIYDTLLKNRHQKIRGKLVHTIERKFYKEELNKILESQKRFHEELNDRQLFLNCLEELYPNNEGHRNVRSGKGLAEFLVDDILFYQRPLKSKKSLISDCPYEFHTCIDKATGEKKRVGIKCISSSHPLFQEFRLWQFVSNLRIYQKEKRVNGKLEQDVDVTSEFIKSDEDKALLFEWLNDKRNINQKAFLKYKGFGLGKHAEEYRWNYVEDDTKKYPCNDTRALLLDYLAKANVPSSFLTKEKELALWHLLYSIEDKQELEKALGTFAQREGFDEDSFVDVFKKFPAFKKDYGAYSAKAISKLLSLMRCGKYWSEDAIDENTRLRIQHIIDGECDESIRNRVREKTMHLTDISCFKSLPLWLACYVVYDRHSEVKEVTKWNSPEDIDKYLHEFKQHSLRNPIVEQVLTETLRVVRDVWKQYGTIDEIHIELGREMNGTADKKKKWSEQSIKNENTNLRVKALLMDFMNPEFEVENVRPYSPSQQELLRIYEDGVFDSVGDDVPEDISGILKKFAQTDVNKKPSRTEVLRYKLWLDQKYVSPYTGEPIPLGKLFTSAYEIEHVIPQSLYFDDSFNNKVICEAEVNKRKSNQLGYEFIKNHHGEKIELSFGRTVTVLSVEGYEQLLKNCFSHNHAKRRNLLLEDVPEKFIQRQMNDTRYVSREIMRLLSNIVRDEDEQESKSKHVIPCNGGITDYLKKDWGLNDVWNSIILPRFERLNRLTGKEQFTSRNTNNKLIPDMPLDLQKGFKKKRIDHRHHAIDAIVIACANINIVNYLNNSSACHDAKTSRYDLRKLLCHKCKSDADGNSNWVIDKPWPTFTQDVQEAIQQIVVSFKQNLRVINRTSNYYQHYDSEGKKEYVPQTNGDSWAIRKPLHKETLYGEVNLRKVKEVSLAEAIKSVQNVRNKDLKKRLGLMLHQGYDLKQMKRYFEDNKDVWQDINLSKIEIYYFTQNTNDRYFASRASVDTTFNRKKIEEKITDTGIQKIMIRHLESKEENPELAFSPDGIDEMNQNIIALNNGAFHHPIYKVRVYEKAEKFAVGKKGNKGSKFVEAAKGTNLFFAIYEEEKTDEATGEVKRVRSYATIPLNVAIERQKQGLSSAPDKDGIPAKYVLSPNDLVYVPTQDELEKGIVMSNIDKDRIYKMVSSSGPQCFFVKANVAKSIVDKFEFSPLNKMERALSSEMIKEICVPLKVDRLGNISID

SEQ ID NO: 6034 - protein, 1561 aa, unidentified
  REGION 1..1561: note = Description of Unknown: Cas Enzyme sequence
MKNSNNSKKYYLGLDMGTDSCGWCVTDDKYNIIRSHKKTYGPDGKLIKREGCHLWGARLFGPAKTAKNRRLNRTARRRFARRRRRILLLRELFQPEMDKIDPNFFRRLDQSNLWNEDKDKELQMEHNFLFNDKDLTDKEYYKDFPTIYHLRKAMVNGLTINGHYYDPKKQFDIREVYLVLAHMIKYRGNFLMKGDVKGSVVDPTYLKQCFDNIDAILISLNNGEDDENEDDKIDTSECCFNVDEKKASKLANEIFKKINKVPYLEDEEGKLFGKFNSKDIRKKILKLINGGSGVKLKDFLPKEILVAYDGDDEYGDKKIDLSSETLEDDINGYGLPESYIEIILEAKKIYDFRTLAYLLHGKRLLCDAMFHVYEEHKEQLAALKRLYKKFATKEQYYFMFRDSRILDGDDSDDKEDKEESNKEESKDKKKKASYVSYIGYTKTNSKAKYTGAHITSEKNISDLIKQIKKDLKFDYLKSKVDDLSQQNELSEQDISDIQCIEEAIESKTFLPRQNSRNNGVFPYQLNLNEMKTIIENQSKYYPFLKDKAPSFPDGKTEEYKIVSLLKFKMPYYIGPLSQPNNYVRDDKRDNHWVQFKGENNQGIINPWNFSQIVDLEGTADKFISNLTNYCTYIFGENTLPKESLIFQAYKVLNDLNNLKVNGSLISKEDKDYIIQNVYLKKKKIKGKDIVNALKNKYKLSDEDPTVTTKGSGKSIGEDEVDLTMFNSSLSSFIDMSNPNAFGPEFYKDSAKFELAEKVIELITIVEDKELLKERLKKLELSDNQVNYLFKQNYSGWAPLSRKLLDGITIDCVNENTGEVYPVTIIDVMRDTPLNFMEIYKTKGSQFSGFKEKVAELNDEKDICRDDLIEESYASPAMKRSVRQTFKVIDELKNTLNIDHFDRIFVEATRAPGEAGKMVKSRKKQLQEAYDAAKDLVDQELRDDLEKQTDDQLRRKKVYLYFMQLGRSVYSGEKIDLDKLDENYDIDHIIPQAKLKDDSFNNIVLVERELNNKKQDEYPIPSTIISEQGRKWIQILANIKDKNKRSYFMPKDKANRLLRPESKQLTSDELNGFINRQLTLTNQSVKAVCDILKMTEKGSEIVYSKANFVSDFRKLCGDLRPSYDAFVKVRDINDFHHANDAYLNIVVGNVYYEKFKNFYINNRIDYDNNGKKDLSVLASKLFTKTQADDKTGNIYWEAHFHNEKETDSNGKERTIKVRDEGTESTFDKIEHYMELNDPLVTQMQYTLSGRQGFFNKITLKTKAKDNEDNSDKLFPLKQHLRSDSNKVMDVNKYGGYSDMITPYFMLVKSEGRKGKHIYSLESIPTIYLKSFKKKEEKIKYLTEVNSLKNPIIIVDKLLMKSILEIPQVSNEGNTCGYAKLAFTGRTNDNLILINLSELHLTVEWKKYYKAISNFYGTNDSAAKNNNKFDVFEEQMKKDPTSDLRRGNTVLTQLNNKCFYSYLIDHVFNKAMYKGIPTIGSSFAKLKDKYEVFCNLNTLEQGKVLIGLIKLLSCKSVRGTDLSLIGLSKHLGLISMSKTLKEGSIIAQESATGMNKYVIYVVE

SEQ ID NO: 6035 - protein, 1197 aa, unidentified
  REGION 1..1197: note = Description of Unknown: Cas Enzyme sequence
MKNDKFVLGLDIGISSVGWALVNIDDDGKPTKIKDVGVRIFTPGENVKTGESKTQDRRLKRGVRRVLRRRAFRVNCIRMLLAENNFLPKPKSNIQSEKFNELKVFYVKIVNDYYKSKDTNPFILKVEALDRKLSGEELSIILVHYAKHRGYKSNRDENDSDTGKVKSAITENEKLMSEKKYRTVSEMLIKDDKFKDKIHNTSDDYKMSVTRSMIEEEINKVLDSQIKFGLITEDFKSKYLETWSSQRHFSEGPGGNSKYGGDLIARMTGLCKFTNEPRAPKQAPSSEIFVALTKLVNTKIKINNEEEYRPLTEEEIDKILNSALKKKTFTYNDIRKCLNTETLVVNNLDLTTKEFTKVLKEFKNKILKRDDEERVDFSLISDENKAVFEEMKSKEKLNKKFIEFKSISEFKSKFNAFGSEEWNNLLNNIEVLDEIAVILTNNKTEESVKKAVKDSNLIDNKYIETILSLPNLKDHMNLSLSLIRKLNKIMINGITYDKAMEQLGYNHSDLINEENKKNLLVPVNINKDLRNQRVIRSLSQTRKVLNAIIKKYGMPYKINIETAGELAKDKKERDRIKKRNEDNKDNNEKLKKQILELKSNTIFKSESDISGFDLLKFKLWNEQQGICAYSGKTISIDELFDNNIVQVDHILPYSRTYDDSYNNKTLVLTKENQDKKNRTPYEWLKNTERWEKFKKYINSLETINEKKKNNYLLTNLTPDIENQMRNQNINDTKYITRYLTSFLKAYLNVPVVDSVNGIITAKLRARWGFNNITHSLQSTTYYIKDVDENNDVNKNRENHLHHALDACIIACTNKSLIQNITNYEKYKNYIESQAFHNANNNIDNEFITKIDDKYVDVETGEIIETSQFKEYYNELLEKNYIIKNNNKVRVMFPKPYDDFDIDVRARIFERNPEQLKFMLEGMKKYSEKEINEITPIIPSFAKNKVSGSLHEETLKGVKTINDVKYSTLRTSVLSLTDKNIEKIFDKENGNKVIYKSLKEWLNGYKTGEEAYKQKGYPKDTDGNIIKKVKLQEEFSNKGHKVGTSIAEKGNIYKILMFKDRSNGSLYFAGLDLFDILNIKKNKDYEITVWKSRTQKDVIKYADASVLYEYNDNYLMKNDFVEIIKNDNKCAFCYITGFSQGKIEISSYLGDAYDLIGNNKLFTNFYAGGQYPITISTIKSIKKINLSVLGKITKSKTE

SEQ ID NO: 6036 - protein, 1502 aa, unidentified
  REGION 1..1502: note = Description of Unknown: Cas Enzyme sequence
MKKILGLDLGTNSIGWAVINQENVNDKDTLTGIECTGSRIIPMDAATLGDFDKGNTKSQTTERTKFRSTRRLIERSHLRRERLNRVLAAMDWLPDHYSECLDRYGKLLKGKEPQIPWRKGIDGKSEFIFMTSFNEMLDDFMTAHPEMAEKGMKVPYDWTLYYLRKKALTEPVTNYELSWILHSFNQKRGYYQRGEEEKEQANKKIEYLSLKVKEVQETGEIKGTDKWYEIVMENGLKYKRTFKEMPDWTGKTLELIVTTDLDKNGNPVIKEDGAPKCSIRAPKEDDWTLVKERTQSDILKSGKTVGCYIYDALICKPDIKIRGKLVRTIEREFYREELEQILKKQQEFNPDLRDRELYNECLGLLYPNNDTHRKEISNKDFAYLFLNDIIFYQRPLKSKKSLVNDCPYEERVYIDKITKEKLLSPIKCIPKSHPAYQEFRLWQFLSYLKIYEKESVEFGKTKTDTDITNILLPDNESYAALFKKLNDEAEIKQDKILKYFPQLKKNIENFRWNYPEDKTYPGNTTRAEMLKRLKKAKIDSGFLTEENQTALWHILYSVNDKAELKKALLHFAKRHGIDEESFLIAFEKYPPFKSEYGAYSFKATNKLLSLMRRGCYWNEENINDSTRERIEKIISGEYDPEINDRVREKAINLNNISDFQGLPTWLACYVVYGRHSEIKDITKWEKPSDIDNYLKQFKQHSLRNPIVEQVILETLRTVRDIWKQVGRIDEIHIELGREMKNSASERKRIAEQISKNENTNLRIKAMLTEFLNPEFEIDAIRPFSPSQQEILKIYEDGVLNSGVEINEDIKKFLSSFDKAENKPTRAEFLKYKLWLDQKYISPYTGQPIPLSKLFTSEYEIEHIIPQSRYFDDSLSNKVICEAAVNKLKGYHLGYEFIKEHNGQIVDLGWGKTARISSVKTYEEHVRKNYGHNKAKQKKLLLEEIPDKFIERQLNDSRYISKVIKTILSNIVREDDEAEAISKNVITCTGQITDRLKHDWGINDVWNGIILPRFRRMEQMLPDKKFTAANTNGKLIPYMPLEYQKGFSPKRIDHRHHAMDAIVIACANRNIVNYLNNESARSDAKINRYDLRNLICEKNKQDGAGNYTWTIKIPWNTFIPDMRKILENIIVSFKQNIRVINKSSNHITKYVDGQKKRVPQSKGDNWSIRKSLHKDTVFGLVNLREKKTVSLSEALKKPDRIVDNVLKHKIKEFKTAGKTDTDIKKILKNEPDKVDIYYFSEEKSIGKEKAKHYYAARTTILSLGMDKSKSYEKAINTINSITDSGIRKILTNHLKANGNDPSKAFSADGIDEMNKNIILLNGGKSHKPIYSVRKYEEANKFAVGEIGCKSKKFVEADKGGNLYFAVYKQDDNSRTFRTIPLNEVIDRLKNKMSPVPETDENGNKLIFRLSPNDLVYLPTADEVENGRVSLPLDRNRIYKMVSATEKRAYFIQYFIAKSLIDKEEFTKLNKMERAITGEMIKETCIPLKTDRLGNIIDFDGRIL

SEQ ID NO: 6037 - protein, 261 aa, unidentified
  REGION 1..261: note = Description of Unknown: Cas Enzyme sequence
MEPKHILGLDLGTNSIGWAVINASKNEENKEQLDGINCDGVRIIPMDAAVLGDFDKGNSKSQTADRTKYRSMRRLYERCHLRRERLHRVLALLNFLPSHYSRQLDRYGKFIAASEPKLLWCKDEQGRWSFIFQESFDEMLADFYQNQPGLLSEGQKVPYDWTIYYLRKKALTQKIRKEELAWILLNFNQKRGYYQLRGEEEQERPSKTRQYFDSQVVTNIIDTNQTDKGKKVFSVILENGMKGKISTKEVPDWIGQKKISS

SEQ ID NO: 6038 - protein, 1251 aa, unidentified
  REGION 1..1251: note = Description of Unknown: Cas Enzyme sequence
VIVDLDKDGNDKYDEAGELSCRFKIPTEKEWEEQWELIKAKTQNDLDTSGKTVGAYIYDTLLQTPKQKIRGKLVRTIERRYYKDELRQILAKQKEFHPELRDRALYEACLEELYPQNDAHRNLIANRDLIYLLVDDILFYQRPLKSKKSLIADCPYEEYIHTDKHTGEIQHFGIKCIAKSHPLFQEFRLWQFLSNLRIYQKEKTVEGKLYLDVDVTSEFLKDEEDYADLFDWLNQQKSIKQDTFLKCPLFGLKKNDMANYRWNYVEDKPYPGNETRALILGRLEKAGIPADFLTRKKEEALWHILYSVSDKEELGKALISFAEKQQLGENFVEVFLKTPPFDKEYGSYSAKAVKKLLPLMRMGKYWNENDIDGQTRDRIDKIISGEYDEAIRTRVREKAIHLDKVSSFKGLPLWLACYVVYNRHSEAKDIQKWENPSDIDDYLKRFKQHSLHNPIVEQVILETLRTVRDIWKQVGHIDEIHVELGREMKKTKDERAKMTRQIQENENTNLRIKALLTEFMNPEFEIENVRPYSPGQQDLLRIYEEGVWNSVDEVPDEIATIIKKFNESDVRKRPTTSEVLRYKLWLEQKYRSPYTGEMIPLGKLFTPAYEIEHIIPQARYFDDSFSNKVICEAEVNKLKSNMLGYEFIRKNQGRKVEISFGRAPVEIQTIEAYEQFVKDNYSHNSAKKKKLLMEDIPEQFIARQLNDSRYISRLVKSLLSNIVREEGEQEEVSKNVIVCTGSVTDRLKKDWGINEVWNKIILPRFLRLNELTESNRFTSVNTSGNVIPAMPLELQKGFSKKRIDHRHHAMDAIVIACANRNIVNYLNNESASKDAKISRHDLQRLLCDKQKTDDRGNYRWFIKKPWDTFTQDVYKALQDIVVSFKQNLRVINKTTNYYQHYKDGKKTMLPQKKGDSWAIRKPMHKETVFGEVNLRGITTVTLKEALKNPKVIVEKDLKKKLKELLKQNLNEKQIKKYFEDNKYVWQDVDLKKIKVYYFSKDTKDRFFAVRKPLDTAFDKKKIMGSVTDTGIQKILLRHLEANGNDAELAFSPEGVEAMNKNIVALNDGKWHQPIYKVRVYEKADKFAVGQTGNKSAKYVEAAKGTNLFFAIYETEVEDKNTSEIIKKRSYATIPLNVVIDRQKCGLPSAPEDENGNLPKFVLSPNDLVYVPTKEEIQNGNTIPLDKTRIYKMVSCTGNQCFFIQFHVANVIVDKYEYSAMNKMERAITGEMIKEICIPIQIDRLGNIIKKI

SEQ ID NO: 6039 - protein, 1501 aa, unidentified
  REGION 1..1501: note = Description of Unknown: Cas Enzyme sequence
MKKILGLDLGTNSIGWAIINQETINDKDIVNGIECTGSRIIPMDAATMGNYDKGNPQSQTAERTKFRSTRKLIERSHIRRERLNRVLMTMGWLPEHYSDSLDRYGKLSKGTEPKIAWKKNGNGDYEFIFKDSFNEMLADIKTAHPDMAKKGMKVPYDWTIYYLRKKALTQPVTNQELAWILHSFNQKRGYYQRGEEEEQQPNKKTEYLPLKVKEIRETREVKGSDKWFELILENGLVYKRTFKEKPDWTGKTLELIVTTDLDKNGNPVIKEDGEPKRSIRAPKEDDWTLVKERTQSDILKSGKTVGCYIYDTLIYKPDIKIRGKLVRTIEREFYRDELEKILTRQKEFNPDLRNKELYNECIGVLYPNNDTYRREIANRDFTYLFINDIIFYQRPLKSKKSLISDCPYEERIYINKTTREKLSSPIKCIPKSHPAYQEFRLWQFLSYLKIYEKERTEFGKTQTDIDITDILLPDNESYAALFKKLNDEAEIKQDKILKYFPQLKKNIKNFRWNYPEDKTYPGNTTRAEMLKRLKKANLDSDFLTTEQETALWHILYSVNDKVELGKALHTFANKHGIEEEPFLKEFVKFPPFKSDYGAYSFKATNKLLSLMRRGCYWDEENIDSNTKERIEKIISGEYDPEINDRVREKTINLNGISDFQGLPTWLACYVIYGRHSEIKDITKWEKPSDIDNYLKHFKQHSLRNPIVEQVVLETLRTVRDIWEQVGRIDEIHIELGREMKNSASERKRISEQISKNEITNLRIKAILTEFLNPEFEIDNVRPYSPTQQEILKIYEDGVLNSGIELDEEVKKFLKSFDKAENRPTRAEFLKYKLWLDQKYISPYTGQPIPLSKLFTSEYEIEHIIPQSRFFDDSLSNKVICEAKVNSEKGARLGHEFIKGCHEQIIDLGFGKTVKILSIEAYEEHVRKNYGHNKAKQKKLMLDEIPDTFIERQLNDSRYISKLVKTLLSNIVRENDEAEAISKNVITCTGQVTDRLKHDWGVNDVWNGIILPRFQRMEKLPLGKKFTATNTNGKLIPYMPLEYQKGFSSKRIDHRHHAMDAIVIACANRNIVNYLNNESARSDAKISRYDLRNLLCDKKKQDSTGNYAWIIKIPWNTFIPDMRKALEGIIVSFKQNLRVINKSSNHITKYVDGQKKRVPQSKGDNWSIRKSLHKDTVFGLVNLREKKTVSLSEALKKPDRIVDKALKHKIKEFKTAGKTDKDIKNFLKNGPDKVEIYYFSEEKNFGKENSRHYYATRNTILSLGMDKLSCEKAKDTINSITDSGIRKILTNHLEANGNDPSKAFSADGIDEMNKNIILLNGGKNHKPIYSVRKYEEANKFAVGEIGCKSQKFVEADKGGNLYFAVYKKDDNSRSFRTIPLNEVIDRLKNKMSPVPGTDEMGNRLIFWLSPNDLVYLPTADEVENGRVTLPLDKDRIYKMVSSSGTQCCFILHSVAKTIVEKQEFTRHNKSERAITGEMIKETCIPLKTDRLGNIIDFDGRIL

SEQ ID NO: 6040 - protein, 1177 aa, unidentified
  REGION 1..1177: note = Description of Unknown: Cas Enzyme sequence
MKKILGLDVGTNSIGWAVINASIDEEGKEHLNKIECAGSRIIPMDAAVLGDFDKGNSKSQTADRTQSRGVRRLYERARLRRERLHRVLNVLGFLPSHYACYIDRYGKFINSAEPKLPWRRDEKEKPVFIFQDSFDEMLADFRRSQPDMLSDGRRIPYDWTIYYLRKKALTQKIRKEELAWILLNFNQKRGYYQLREKTESKQSSKTRQYFDSQVVADIVDTGQIYKEMKVLVVVLKDGSKGKIFKKEIPEWIGLKKDIIATVDLDKDGNDKYDENGDLSCRFKVPTEQEWDEEWELIKAKTQSELNATGKTVGAYIYDTLLQMPNQKIRGKLVRTIEREYYKSELHQILEKQKEFHEEFQNKDLFLACVNELYPQNEAHRNEISGRDLVYLFIEDILFYQRPLKSKKSLISDCPYEEYVHADEKTGEEKHFGVKCIAKSHPLYQEFRLWQFISNLRIYQREKVIEGKKCFDVDVTSVFLKTEDDYTDLFDWLNKQKSIKQDAFLKYAAFGLKKNEANNYRWNYVEDKVYPCNETHAFLLERLNKAGVASDFLNSREEEFLWHILYSISDKEELDKALGKFAAKYGLDGKFVEVFRTAPPFEKDYGAYSAKAIKKLLPLMRMGKYWDEKSIDEHTRERIGKLVLGEYDGAIHMRVREKSIHLTDVSSFRGLPLWLACYVVYNRHSESRDLQKWQTPADIDGYLRKFKQHSLHNPIVEQVILETLRVVRDIWKQVGHIDEIHVELGREMKNPKDKRARITRQIQENENTNLRIKAMLVEFMNPEFGIENVRPYSPSQQDLLRIYEEGVLNSVNELPDEIADIIKRFTDSDVKKRPSRSEVLRYKLWLEQKYRSPYTGEMIPLGKLFTPAYEIEHIIPQSRYFDDSFSNKVICEAEVNKLKDNLLGHEFIVKFHGAKVSLSGGSSVNVFSVSDYEQFVKDNYSRNQTKLKKLMMDDIPEQFIARQLNDSRYISKLVKSLLSNIVREENEQEETSKNLLVCTGGVTDRLKKDWGINDVWNKIILPRFQRLNELTDTTRFTALNASGHAIPSMPLELQKGFNKKRIDHRHHAMDAIIIACAGRNIVSYLNNESACKGAKISRYDLQRLLCDKQKTDEMGNYRWMIKKPWDSFTQDVYVVLQNIIVSFKQNLRVINKTVNYCQHYVDGKKKMVKQEKGDSWAI

SEQ ID NO: 6041 - protein, 1397 aa, unidentified
  REGION 1..1397: note = Description of Unknown: Cas Enzyme sequence
MKKILGLDLGTGSIGWAVVNEAENPDEKSSIIKIGVRVNPLESKEKDNFEKGKSITTNSDRTLKRSMRRNLQRYKLRRNALMEIMKEQGWITDDTILAEQGNNSTYSTLNLRAKAATEEISLEDLAKVLLMINKKRGYKSSRKVKNEEEEGQAVDSMETARQLHDTGMTPGEFAYRIISEGNFNLPDFYRSDLQDEFDRIWEKQREYYPEILTDSLKEELKDKNEKQTWKICEEPFDIEGIKRTVKGKELIKENYEWRTKALTEMLDMESLAIVLQKINGQIKNAGGYLGNISDRSKELYFNGQTVGQCLAEQIKKDPNTSLKNQVYYRQDYMDEFDRIWETQAAFHPELTPALKKEIKDTIIFWQRPLKSQKGLVNICEFEHWETETASDGKSRMKTVGPKVCPKSSPLFQEFKIWQIINNLKVNGRDLEQSDKEKLATELSIREKMSGSEVLKFLYKNPKQLNLNYREVDGNRTGAALFKAFAKIMELSGHGEYDEIMKLPSEETLKMAEEVFNMLGINAGILHFDSSLSGAEMENQPMFRLWHLLYSYEGDKSRSGNDSLIDKISELFGFEREYAKIVANVTFAPDYSSLSSKAIRKILPYMKDGMEYSMACEYAGYRHSAKSLTKEELASKAYKDRLELLPKNSLRNPVVEKILNQMANVVNGIIEEYGKPDEIRIELARELKKSQQERKAMTEAISKSSSENERIEKLLQDKFGIARPSRNDIIRYKLYEELESNGYKTLYTGTYIPEEKLFSKEFDIEHIIPQAKLFDDSMSNKTLESRQANIEKGNSTALDYVKSKFGESGVEQYRARIEKLFKDGKISRTKQKNLLTEEKDIPSDFINRDLRDSQYIAKKAKEMLEDVVGQVVTTTGTVTDRLREDWQLVDVMKELNWEKYDMLGLTETYKDKDGRTIRKIKDWTKRNDHRHHAMDALTIAFTKRSYIQYLNNLNARIPKEARPSGQLSLFEMNDTPADDRTEAVISIEKSQLYRDSKGKLRFIPPIPLDTFRAEAKRHLENTLVSIKAKNKVVTRNVNISKKKGGVNRKVQLTPRGELHNETIYGSICKYSAKEEKVGSGFTFEKIQSIAKPLYRKALEKRLALFGNDPKKAFTGKNSLDKSPLFADEMHTIRVPSTVKTITEEVVYTVRKEINPTNFKDAKTIEKVVDLQVRRILLKRLEEFGGNAAKAFSNLDENPIWLNEKKGISIKRVTITGKSNVIALHDRHDHLGHPISDEHGGKLPSDYVSTGNNHHIAIFRDADGNLQEEVVPFFDAVERMNQGLPVINREYKKDEGWEFLFTMKQNEYFVFPNPDTGFNPQEIDLLNPDNYAIISPNLFRVQKLATKNYHFRHHLETTVDDKSELRNITWKSIRSTNDLKSIVKVRINHLGQIVQTGEY

SEQ ID NO: 6042 - protein, 1586 aa, unidentified
  REGION 1..1586: note = Description of Unknown: Cas Enzyme sequence
RGNLMFSQRNNPYCDLLQISENKGKEKVRKDKFCRRKFIALGKNKKAMELKHILGLDLGTNSIGWAVIDASRNEEDKEQLDGINCDGVRIIPMDAAVLGDFDKGNSKSQTADRTQYRGIRRLYERGKLRRERLHRVLALLNFLPLHYSRQLDRYGKFIAATEPKLPWHKDEQGRWQFIFQKSFDEMLADFYQNQPELLSKGQKIPYDWTIYYLRKKALTQKIRKEELAWILLNFNQKRGYYQLRGEEEQERPSKTRQYFDRQTVTDIIDTNQIYKGMKVLSVVLENGTKGKIFKKEIPDWAGQKKDIIATVDLDKDGNDKYNENGELSCRFKIPTEQEWEEQWELIKAKTQNDLDASGKTVGAYIYDTLLQMPKQKIRGKLVRTIERKYYKEELRQILEKQKEFHPEFQDRALYETCLEELYPQNDAHRNLISTRDLVYLFVDDILFYQRPLKSKKSLIADCPYEEHIHTDKDTGEVRHFGIKCIAKSHPLFQEFRLWQFLSYLRIYQKEKTVDGKLCLDVDVTSEFLKDEEDYTALFDWLNRQKSVKQDSFLRCPLFGLKKNDIGKYHWNYVEDKPYPGNETRALILSHLEKAGIAADFLIREKEEALWHILYSISDKEELRKALTSFAERQDLGDVFVEVFLKIPPFDKDYGSYSAKAIKKLLPLMRIGKYWNENEIDEQTRNRIDKIISGEYDENIRTRVREKAIHLDKVSSFKGLPLWLACYVVYDRHSEARDVRKWENPSDIDDYLKKFKQHSLHNPIVEQIILETLRTVRDIWKQVGHIDEIHVELGREMKNPGEQRKKMTQQIQENENANLRIKALLTEFMNPEFEIENVRPYSPGQQDLLRIYEEGVWNSVDEMPDEIAAIIKKFNESDVKKRPTTSEVLRYKLWLEQKYRSPYTGEMIPLGKLFTPAYEIEHIIPQARYFDDSFSNKVICEAEVNRLKSNMLGYEFVNKHHGEKLLLTGGKCVEIFSIESYEQFVKDNYSRNPAKKKKLLMEDIPEQFIARQLNDSRYISKLVKSLLSNIVREEGEQEEMSKNVVVCTGSVTDRLKKDWGINDVWNKIILPRFLRLNELTGSNRFTSINTNGNIIPAMPLELQKGFNKKRIDHRHHAMDAIVIACVNRNIVNYLNNESASKNAQISRYDLQRLLCDKQKTDDKGNYRWFIKKPWDTFTQDVYRALQDIIVSFKQNLRVINKTTNHYQHYENGKKTMILQTKGDSWAIRKPMHKETVSGEVNLREIKTVTLKEALKNPKAIVEKDLKKKLKELLAQNLNEKQIKKYFEDNKDIWQDVDLKKIRVYYFSKETKNRFFATRFGNDLVSVFKDCKDIDKVKDKIKKITDTGIRQILLRHLEICGGNVEQAFSSEGIEEMNKNIVALNNGKQHQPIYKVRTYEKADNKFAVGQTGNKSTKFVEAADSTNLFFAVYKMDDKRIYCTVALSDMIKIQKSCRTKGEWIAELDNYLKNLKTEDKIPNRAIFLFLLSPNDMVYVPSSSEISNKQINYPLDKSRIFAVNDFSGNTIYFRPQSHAKALDDKEVDMRYDYNKNKIVGSYTDKTANFDGMQIKEICIPIKVDRLGNIIKKL

SEQ ID NO: 6043 - protein, 1133 aa, unidentified
  REGION 1..1133: note = Description of Unknown: Cas Enzyme sequence
MNKKILSLDLGITSIGYSVLTEHDSDRYSLQNYGVSMFDKPINKDGKSKKLLHSESISTTKLYTLRKERKQNLAKLFEEFKLSLSATLLTQEKENIYKNKWELRAKKVFKEKLEVGELFTIFYTLAKHRGYKSLGKEDLLEELCEELGIELKQGKSKKDDDERGKIKSALKSVEELRIASPDKTVAQIIYERELLQKTPTFRNHDNYNYMIRREYINDEIEKIILSQQKLGFFSDSFDVQGFIKRVIDTIDDQEESTNDMSLFGFCEYYQGRGEKVAHQYSLLSDIFKMYEAVSNITFNAKPTLKISPDQIKSVADDFFAKIKKGKKIEDIKYKDIRKILKLDDTIKIFDKEDSYSNKGKKQERSIIKFHFVNNLSKINNQFIIDILAKENRYELLKEIFDVLAYEKSPKSIYEKLKSKIKDEKSIIDLIRCKDGNSLRISHYAMIKFIPYFEKGLTTDEIKKELALERKEDYSDFQKGIKYLHLKQFEEDDKLEINNHPVKYVVSATLRLIKHLHSIHGAFDEIRVESTRELSQNEQTKKDIDKANKALEKEITAIVEDEEYQKIAAQYGKNLRKYARKILLYKEQEGRDIYSGDGIELSDIFTNVVDLDHIVPQSLGGLSVKHNFVLVHRDTNIKKSNRLPLDFIQNKQDFINRVEYLFKQHKINWKKRKNLLATSLDETYKDTFESKALRATSYIEALTAQVLKRYYPFPDEKKQADGSSVRHIQGRATSNIRKLLGVKTKVRDTNIHHAIDAILIGFTNHSWLQKLSNTFRENMGLIDDEARKRIKKEIPIIELIVGDEVEYLSPKELCERIEESYNEFGEDSVFYRDVWGEVKVVNYWVSKKPMVSKIHKDTIYAKKRDGLFTVRESIISKFVSLKITSTTSSQKFIKNFEKDILKKMYLYKTNPKDVICQVVQNRAEEIATLLDTFVGIDTKNKEQMNGAKEQLEALVHSDLIDNNGNTIRKVKFYQTNLTGFEIRGGLATKEKTFIGFRAWLEGEKLHYERIDAANFATIQKESSNSFKVFKNDVLFFVMPDGSFRGGKIVSFLEEKIQGAFSNAKFPAIISAQPHSFVTLFNGKANSHKQFSLGKSIAIIKLNLDITGKIKSYSSIGNTKSELLSFIKGIFYERT

SEQ ID NO: 6044 - protein, 1149 aa, unidentified
  REGION 1..1149: note = Description of Unknown: Cas Enzyme sequence
MNTRSPRDYLVGIDVGLNSVGLAAIEVDDSGMPMDILSIETVVHDGGVDPTANKTAGTRKAVSGAARRMRRLVRRRKQRLLKLDETIASLGWPLVNLEEVSDPYYPWKARRDLLTARIDDPEELRKKLSVAVRHIARHRGWRNPYSSVESLKAATEPSPEFHALIEQLNKRVGADRFDTRTPVASIVCATLESDPSLRVRGTRVRKDGTSVAPLLEGKIHQSDNVRELRRIWELQDLPIDQFNTIVAAVFAQRSPKGSAAARIGKDPLPGMHSQPRAEKASLAFQRFRIVDKVANLRIRDEFNRDGRVLTEEERRAAIEFLWTSDDVTWDDVALLLGVSRRALAGTAKPTELGERGGGRPPVNVTDARIRQSRIKELVQYWDSIDEVEKEALLVVISNGSGSGDQDDRARDAEARAAEFLERLSEKALSQLDGLKLPEGRAAYSAKSMRLLSRRMEESGDDLHAARKYCFPTIDDHWKPPADPIGQPVGNPAVDRVTKIVARYLAATERMWGPPKAVNVEHTREGLVSEVQARLQARERNRNAAENAKAREDIPLEFLAAGGQTTDDALGEPSGPPRYGARQSDVYRWRAVQRQKGRCLYCGATLRWGAFEMDHIVPRSGQGATNTQTNLAAVCRECNHAKGKLPFAVWARSESAVSRGVSLEAAVARVEDYFDIAAKKDSNRRKPHTREGRIIKGARDRLRRTEADEEIDNRSIESVGWMANELHRRIEAHYRDELGVSTTVRVYRGWLTSEARKAAGIERRVTLIGDEDRNRAGKNRLDRRHHAIDAATIALLSPGIAQALAVRDNLRATAQILGPSADIDWKHYRGANPDLFETWQARMERLARLLQVKLDADAVPVFEFLRLRLGSSVGHEDTIRQLKKAKIEDAWTLERIDRSATPAQWVALMRQPDVDARAGLPADPTRRLRIHGTWFDPEDELAYFPTGAGCVAIRGGYAELGSSFHHARIYRCTQPQRAGRTRSFYAMLRVYQVDLLRHAKEDLFSIEIPPQAISRRAAEGRLREALDHGMAEYVGWLVLGDELLLDMSSQLGRGQVGEVLAAYPGTVRWVCDGFFSESKIRLRPRGLSGEGLSASAADGVRTIVAGVGWRPSVDVVFGACKARVIRRDILGRPRLSSSYGLPTCWAGDMP

SEQ ID NO: 6045 - protein, 1260 aa, unidentified
  REGION 1..1260: note = Description of Unknown: Cas Enzyme sequence
MSTKDYTLKPAPGTEPAYDWMNDPFYRSAIVLGIDIGIEGIGIWLRKGLTPIYTRTFLFEIPDAAPLEGRRGLRAGRRCRQAEQRREVMLKKFCADFGLPWVEITDKGHDDGPFRFRWIATRKDVAGLRDARAFSACLRHIIRHRGYDWHAPEDGGAYPWGDEAKAKDAIEWAKTAFCQKEHADKLRYSLTDCGWTDKERQAFETALNQAVDKYNTKGIDAVLAEHFSKAKNNLRDAARRHNFPREMVWAHLTAIVEKHSHFVGGVNRVKEALNQLHTIINDHRKEPGALALRKVNRCPLAGILFNGPVPQCDSSKNRHIRRFKLLEFLATRTFVRKDGTRILANAEVFSWLLNELLEADVQALESNGKLQRTKIDRREFKKQFVAKHDASGDTELAGDTQSHNGEYFTQLMDLLWPKMSELGGRASLCGRSAEALFDHAVKEGLAADRIAARLKDKRFERAGKKMSFYEIRQSAAAGFGIYKQVEFLLGRWTKKGDRLAVPGKLRQVFAQLIKDGILPPDKTAPDYVIVETVGDIPRNKEQAKEIQKEQTARRAFKDKLFADCDKKTPAGMDRNEAHKRLIFFDQQRGLCPYTGDSLGDNPLAHDLEIDHVFPRSRGGISEMVNLVLTHRKTNGESKKEQTPYEAFGGKTNSPQWRKIQERVLMMQWNGQKREFFLRAEDTPPDWGNMTRVAQLARQLRFEVARWMDIADDDAKVRQFIGTPTGYQTSVCREAWGGKLPEDFYPKKNRNILRHHMWDAAILSHIPPGKGLNHVRCHGIFLSETSQGNIKMLALLQLGPDLQQFEKETASLCLVEKIQPAHNKQSRFQQTIYSPPDKDGLMWARDPIDKLADKPKLLELLRDAGIDERQLPTSHFNEWQEKRQAQFFTREEALAAVEALTLPPDHQIPLPVFEEWWSDRLKGDKKRVTDKSLGALLAKARVPKGTVSEQQLAGALINRGNPGPLTRKDDTIIRGISGSASNMTPMAVIPHRNHAGETIGFKLATESFIRAEIWTTEKRDKKGEVVKGKDGKPELEYHRRLIPHPRGLKNLQLRVMQSTGERLSWERALTDAEIVELGLADNADVKNLRKDYEKAMKLYEKAASKAKGAKEELALTKSDGTIVTKPKPPVISLRKIFTGLPPHAKRLTNSNGTDISRFAKGDLLRVPLTQDAEICEPGQAVYREFWFRIAALQTNGQVKLLIAEHKPAKPLTEQERKDGKQLTADQEWLIKAGLKQPGDDAVIAYLLRHTRCHDQPPHPAK

SEQ ID NO: 6046 - protein, 1504 aa, unidentified
  REGION 1..1504: note = Description of Unknown: Cas Enzyme sequence
MKKILGLDLGTNSIGWALIEQDFENKEGQILGMGSRIIPMTQDIKDEFGKGNSISQTADRTRFRGIRRIRERALLRRERLHRVLNIMGFLPKHFAEQIDFTKRFGKFINESEPKLAYNNNDFIFKKAFEEMLGEFKIHQTELVSNGKLIPYDWTIYYLRKKALTEKLAKEELAWLILNFNQKRGYYQLRGEEEEKENISEYCEVLKIVSVEKGEVDKKNNKRTWYKITFENGWEYSATFTSEPLWLNTEREFLITEEFDEDGNIKIVKDKRTDTTGKEKRKITPLPSFDEINLMSKKDQDKIYKKIKARTEITIQNSNKTVGSYIYDTLLQNPNQKIIGKLVRTIERKFYKDELQQILKKQVELQPELFSEESYNDCVRELYKNNEAHQLQLSKQDFVHLFLNDIIFYQRPLRSQKSSIGECSLEFRWRKVPKKDSNGAIIKNEFEKDEQGNDIKIKEYLKVISKSHPLYQEFRLWQWLYNLKIKDAEDDNKDLTSEFIQSIDDLESLFELLNNRKEIKQDTLIEYLLKRKLELKKVPKTELAKYRWNYVVDKVYPCNETKAQITSRLEKIENVPANFLSKEIETQLWHIIYSVTDKIEFEKALTSFAKKHQLDEISFVENFKRFKPFPSEYGAYSEKAIKKLLPLMRLGKYWNWNNINETVKERIDKILTGECDEDIKTRVREKAIHLTKEEDFQGLQLWLAQYIVYDRHSEAEISGKWKSVSDLERYLQEFKQHSLRNPIVEQVVTETLRVVKDIWVQYGKSAENFFDEIHIELGREMKNTADERKRLTNTVTENENTNLRIKAMLVELMNDSSVENVRPHSPMQQEALKIYEEGVLKSGIEVPEEISKISKSAQPTKAEFQKYKLWLEQKYKSPYTGQMIPLNKLFTSEYQIEHIIPQSRYFDDSLSNKVICESAVNQLKDKQLGFEFIKNHGGQIVETGFGKSVAILKESDYTDFVKEHYKNNRSKRNKLLLEEIPDKMIERQLNDTRYISKFISNLLSNFVRSETNDDGINSKNILPGNGKITTQLKQEWGLNDVWNDLVLPRFERMNELSNSSDFTTKNKEGHTIPAIPLELSKGFQKKRIDHRHHAMDALVIACATRDHVNLLNNQSAKSETSRYDLQRKLRKTEKWTDKEGKERNKFTDFIKPWNTFTKDAKNELEKIIVSFKQNLRVINKASNQYEKIVNGKKVMVKQEGINWAIRQSLHEETVSGLVNLPWVQLGKGEITTATRKALDKSFNLDKIKKITDTGIQKILSNYLIQEKFKIINDKGEVSYNTEVAFSPEGIEELNKNIAQYNGGKFHQPIFKVRVYEKGSGRFKLGVKGKKRDKYVQGAPNLFFAIYTNEQQQCKGADKKPTNRCFETIPLNIVIEHQKQGLNSVPEINEASEKLLFYLSPDDLIYVPTEDERENLNAIDFSNLSKDQIKRVFFVNDFSGSTCYFRPNRLAKAIINKEVDMNYDEKKNKITGSFDTKTASFEGKQIKEICIKLNIDRLGNISKSVV

SEQ ID NO: 6047 - protein, 981 aa, unidentified
  REGION 1..981: note = Description of Unknown: Cas Enzyme sequence
LLLDKNIIDCIEYNFYVEEQTPYHYRVKGLEEKLSKRDLAIALYHLAKRRGLHEFSGFEEENEKASEFSTKQVLFENEKLTKNKYICEIQLERLLNGDIDLVNGRVRGVKNRFRTCDYVKEAKKILETQKTYYQEIDEEFMTKYINLLEQRRNYYDGPGRQANRDLSPYGWEKGEFLERLMGKCKYFPTELRISKASYTAQLFNLLNDLNNLSIKREGDNKLSFEEKNKIVEVCKKQKSISLTKIAKELNVKKEDILGYRVDKSNKALFTSLSSYNEINKYIECDDSNILDDISKIITVAQSPMEKSEELKKYLGKTDYKVDDKIIEEMAKDLNYSGTHSLSKKAIDLVLEELWETSKNQMQIYNDLGLIPYKMDFKGKKKIPKDYIDEWILSPVVKRSMSQAINVINLVIKKYGIPEEIVIELAREKNSEDKRKFLNDLQKKNEKENNEIRDLLKNRRADKNLFFKLKYWKNQDGKCMYSNEHIRIEHIINYPENYEIDHIIPRSISFDDSQNNKVLVKRVENQNKGNLSPYMYLKSGKGKISYEVYKSNIMEHYKSKRISKTKRDMLLFEDELNKYAAKFIARNLVDTRYATRELMNMLKKYFIDNEQQVKIKSINGKVTSQIRKMWKFPKNRELSHKHHAQDALIVLGAEKLSNRLRWVKDYFGGENEKIDLRTGEILDDKEFRELFEKDYKYGESIKLYTDYKYSNLVEKRPNRQLMKETVYSTRTVKTEDKRARVKEDEYYIGKISNIYDERDDKPKKFVTDKKKREQLLIYHNDKQSFQIMEKICEQYPKSKNPFAEFKKEHGFIKKYSKKDNGPIIKNLKYRVKKLGAHFDISNKYGDFQKPKDKKVVMLSMPTYRMDVYKKNNEFKFVSVTYLMVKDRGKYYEIDIDEYNRKKKDKKIDDNFEYQFSLYKGDRVEITKENKDKELIIEKVKFKGVNNETRNCIEVDFISKNYSNYINLIKEIKNKIKKIGIEN

SEQ ID NO: 6048 - protein, 1279 aa, unidentified
  REGION 1..1279: note = Description of Unknown: Cas Enzyme sequence
MKTLGLDLGTNSIGWALIETNGSDVRLLHKGVHIFEKGVGENQKGEFSRASERTKHRAARRIKMRRKWRKQVTLRVLIENGYCPGVTGADIKRWRDENIFPESREFRDWLQTKEFTKDGEPAGPYYYRWLAATERMDLSNPNIRYQLGRAFYHLAQRRGYKSNRVSGEERDGTVNAAIEELDEKRGNRTLGQYYYEECLGKIPVRGGAHYTSRKQYEEEFDTICRRQALPDSFRDALYKAIFTQRPLRSQKGTVGTCPFEPTKNRVPISHPAYERYRALQMISNIRLAAPEESELRPLTDEQRQTALDWMLILTKHKNFKDLAKKIVPKKAALEFGGLREERAPDSWVFNFREDADVSPCPVTARLVKFFGSDWREEIARRYTKAENKTFAQIEDDVWHVLFSYKDREKLVEFGHDRLGLSEKEAQEFSDSVPQGYANLSLNAVRKIIPCMEKGMIYSHAVFMANLPTVLKKRELDWSAEEAVLANEIKSILETHAMDTNCAKAVNAVLEDLKAAGRNPTNMKATPATWSRLRSDVEEAMMFQTGRWHWERMPLEERNRRIEQSLEDICRLYRTDGYAEIPTLEQRIKSLLQNRYGATEKELNKLYHPSAIETYPPAQLGEDGHWKLGSPRIPSIKNPVFMRTMTRLRHLINSLLKEGLIDPDTRVRIEMARDLNTHNERTAISREQKARAKERKEYREKIEEANFPATDTNVLKYRLWIEQDGRCLYTGNKIGLTEFLGENPVYDIEHTIPRSRTLDNSRSNLTLCERRFNRDIKQNRIPSELENADEIIERARALWSPKIAELEVMVQKRQNAAKRTPDKKNKDKNIADAHFYRNQLRYWRRKLRAFEIDEIPDMFTNSQLVDTRIICKYARLYLKSLFPKVYSVKASVVHGVKEIWGLKKKDRDNHIHHCVDALTVACLRPDFYQQLASYYREVERHERQNAPMPSAPEPWDGFAKYVHDCMEKEVLCVHYAKNNLLKKTFKRLRQRGKIKRTEQGQPIMLRGNSARGSLHKDTIYGVIQEPPTGKNNESVKICVVRKQLGKEFTDYDEIVDPHVAKLVNAQRERIEKGETVWFDEEKGIPIKSVRVRVGNIPENLIRLGEHAYASKHEYKRRQCAANDGNYITGLYRGMVNGKPKADKTVIQNYEAVEASRRGTWDVLLPATDDQGLRLRHVLKSGSVVLFYEKTPKELTAATDKDLWNRLYRVTVMEGSRIKLVHHACAQAVKDLGAGSSRIEFRGEPHSNLRLSVNKINMFVCGQDFILGPLGNITWLERSDA

SEQ ID NO: 6049 - protein, 1281 aa, unidentified
  REGION 1..1281: note = Description of Unknown: Cas Enzyme sequence
MKTLGLDLGTSSIGWALVESNGNHVELIDKGVHVFEKGVGEEKGSEVSRAAERSSFRAARRIKMRRKWRKQQTLRVLCSFGFCPGLTEEEIDQWRFNKVYPSSPDFRSWLQTCEVTLDGKPAGPYYFRWLAATQKLDLSASENRFLLGRAFYHLAQRRGYKSNRISGEDKDGAVAGAIKALEENMQGRTLGQYYYEDCLGKEPVRGTQHYTSRKNYEDEFAAICALQEIPPELRKELHKAIFFQRPLKSQKGSVGKCALEPKKPRAPASHPLFERYRALQSLNHIRVTEPRTAEARPLNATERAIAQKWLLSRSNAESFDKLARKLTPSKAKIEYGGKEREDERTWLFNYRADMKLAPCKTLARFESLFGQDWQDELMRRYTKADGKTPDQVIDDVWHALFSYADEAKLQEYGETRLGLSPEEAVRFAKPLPQGYANLSLCAIRKIVPFLEKGLIYSHAVFMANLPTILKNYIDSWESEEPAVLALVGEILDGHHQDVAVEKGITEILHRYKEDRQALEAMKTSPATQQQFTEEISRCLETQLGSRAWDEIPLEQRDALIQSVGKGVEQNVWRNNDHVKVKTIKDRICAALAEKYRINGENLEKVYHPSAIETYPKVEDATDGRLRLGSPRIEAIKNPVFMRTMHQLRSVVNALLDEGMIDQDTRIRIEMARDLNTANQRAAIYRYQRELERQRAKYRTEMEEAGYHPTESDVLKYQLWEEQHHKCLYTNANIALSQFLGDNPVFDIEHTIPRSKRLDNSQANLTLCDSDFNRRVKRNRLPSELPDAEDIQAQAKALWEPEIAQLESLVEKRKATGRAAGDKAAKDKARQEFHYYQHKLRYLRAKLRNFMIEEPPDGFTNAQLVDTRIICKYSVQYLKSLFERVYPLKAGVVNGVKEIWGLDDKTRENHVHHGIDAVITACLTPRFYEELAQYYHAYERYELTDAPKPHPPEPWEGFAEYLNCRIDKEVLVVHQAADNLLKPTFKKLRIRGRIERNAHGQPTLQRGNSARGALHKESVYGMVLEPPQAGNDQPGELFCVIRKKLADVKDFSTIVDPAIRRIVEKNKALVENGETVWFDEAAGIPIKKVRVRCSHVKPETIITLKAHRDVSRQEHKRHQYVDNAGNHITALYRGTVNGKPKADWKVVSNIKAVKAQRTGTWDQVLPEVDDKGLQMRHILKSGTQVLFYRKSPEELRNTSSIVLARRLYKVTQMAGRRIVFDHNACAVAPNKLGHGVGAIDWNSDLHENRLRLSVNGINILVEGTDFKLNPLGHVTWLERDHA

SEQ ID NO: 6050 - protein, 1521 aa, unidentified
  REGION 1..1521: note = Description of Unknown: Cas Enzyme sequence
MKILGLDLGTNSIGWAVVDKDNNNILDAGVRIFPEGIEPTTIGQGDKEKSKNATRRDNRQMRRQFYRKRLRKIKLLEVLIEQGMCPLTIKELRKWKNWDNIRKNDGRKFPETKEFTEWLSQNPYELRSKAISEKVSLHELGRIFYHMIQRRGFLSNRKSKEESAIFTKGKPDENILPINLTREKIGNSTLGNYLHSISYTKGQPYYTIKDDDGVEIRVRGRYTTRDMYVNEFERIWAKQETFHYLSGIYVESKKIREFKGTLSGSRIAKKIKHLKTIFGDENVKIEDSINGRIKVSTISPMPLKEYLGGKIEVLIAEDGNPKLQFKSNDSVLFWQRPLRSQKGLLANCRFENNLPVIRKNGDILLRDNGEPQTRSKKPCPLSHPDFELFRALQFINNIVYGKNNRLTKEQRSIVLDLINRNDKNFYFKKVPEVLKLTYEKFNYSNEQKIAGNFTIKALKPLFEKDVWEQHYEDIWHCFYFYEDNDKLFQKVKTDYRYNGDIEKIKSIKLKDGYGSISLKAIRNILPFLEMGFTYDRAVILGGVKNTFGKRWEYFKNSHDEIIREIIGILKEDNKEGEAITKIKDYLSSPVFDYGFVKDDPRFQYLYHHSEAIEVDSRIDEKVPEVDNLRNPIVQQALHETRRLVNNLLDKYRASFSADFKFDRIHVEMGRNLRNNKDGRREMGIRISENEKKNDEARERLAEFGLKPSRDNIQKYLMFKEIEERAGKAHCPYTGKIISVSDLLGRDNTVQIEHIVPYSISLDDSFGNKTLCEANFNREKGEKTPWQYYMANPDPKLWGANSWEEVQDRAFRLLPYRKAKKFIVKREFEKSDFIQRQLNDSRYIARKAVELLSRVCNDVRVMPGQLTAELRHLWGLNNILQPALDISEHSFSVNDSQAVPYYALISENRELLSLHIKYNERPKTKSDEFLAQGYVKKEEFHSKFFNLTFNVSEMADGKYWAKLKVTEPIEILPVYADRPDTDESQIVMRGIVEKGYFKNDNLGRIQTNVEEGTYWAKLKVLNQKFEMPARHEQPKTKRNQILLFGDVKDGIFKSYIYSCTTNLPDDKYWIIIDIDPACVEFIRAVNPRPEITNNQILVKGTVDEEGNFGADTDADYVVKTSVKKGKYYILLELTSNYPEFYKIENEPPKPEKDQQLVEGSIWVDKFTGEIKFDPKKNRDDHRHHAIDAVTIALTEQGYLQRLSTYNAQRKEKLRQKLDSTEHFPEPWGGFVSDVQKVVSGIMVSHKKDNKTITKTRKGWGVRGQLHKDNVFGKRKAPCQAEAYHRRVKITELKNHKHVDKVVDDTIRDLIRRHLQKNCNVEVDDPKGYVVPNDAFYKDGNWRLFLPNNKKGGQPVPIKKIRKKEEMGNAVQLKSGINQYVNPRKNHHVVIYKDEAGNMHEDVVQFWTIVERMLQNEKIYQLPEGGDSIIAILEINDMYLLGIDTEDFYSNRLDNEFLSKHLYKVEAISSKYYEFRHHLESSQKRGYSPYYYIISSLETGIKGWITFNPIKVKVNIFGDIIQG

SEQ ID NO: 6051 - protein, 1347 aa, unidentified
  REGION 1..1347: note = Description of Unknown: Cas Enzyme sequence
MTKILGLDLGTNSIGWAIVEKDGGEQFKLIEKGVRIFQEGVKIEKGIEGSKAAERTGFRSTRRIKFRRKLRKIEVLKVLSTNGFCPPLTIEELDNWRFNKKYPKSEAFKEWYLTNEEDYKSPYYYRYLAVSKLLNLNKQKDRYILGRALYHMTQRRGFLSNRLEGTKESEGAVKKEIAEISQAKGEKTLGHFFWNKIQLGEKVRDTYTHREDHYLEEFNRICDFQKIEPDLKAKLFRAIFFQRPLKSQKGLIGKCVFETNKQRCSASRPEYEEYRMLCFINNIKIKTPYDEKLRFLGDDEKEKIKSLFYRKSKNHFDFEDIAKKLAPKNQFKYFKDSRKSPEDWLFNYQMSTSVSGCPISARLIEIFGHGFMDIGFPYVRESDRKEAVIDINDIWHVLYTFESDEKLRDFADKRLKLTDEQIDNFISIRPTKEFASLSLKAICKIIPWLRKGLIYAHAVFLANMEQIIPHEIWNNPEDKELIIKEISQIINTQNEDKAIREIVNGLIKTYKDDNVIWSEVASEIFKKELIRKLQDHFGENSYKLFPEKERFQMETSAFELFSAFMKKNMGRGEFVSMKRIDERIKEFLTDNFALDETKLQKLYHPSAIDVYKPLIKKEDGSYYLGSPMVSSIRNPMAMRGLHQLRKVINEMIRSNLIDENTKLNIELARDLMNANERKAYQAWQRGNESKRKDYAAKIKEHLKSGDEPSENDILKYQLWEEQNHKCIYTGNEIAIHEFLSENPKYDIEHTIPRSVSFDNSQKNKTLCDNEFNRKIKRNKVPASLANHADIVDRIQHWKDNYESLHSQMQVATRQAKNAIDKDSKDKAIQKRHRLRYEYDYWKSKHSRFLMNDVPTGFKNSQIVDTGIITKYARLYLKTYFNKVYTVKGNTVADFRKIWGLQEEYEKKARINHAHHCIDAITIACITKENYENLAAYYHKWEEYYQKGVDKLPPVEKPWPTFTQDVKKIEQEILVSHYTPDVFPKQSKKKLRKRGRIQYSKNGEPVYLQGDSVRGSLHQQTFYGAIEQEVQGNNGETEKKIRYVVRKKLEDIEDSNLKNIVDPAVKEIVTNARIAEKSLRQDIETLKKRLSKAEEKEETEIKAEIAKIESNILNLYVMPNRRGAPIQIKKARVFTPVTNPLQLKEHRDKSRKIRKPHKEHLHVANDGNYLMAIYEGIDKKGNIKRDFEVVNRIDAGQFFKFSVQKVLKPQGLGFVENLVPNNKTDKNIDLQLKAILKIGKLVILWEKSPDEIWELANFEIRKRLYKIIGLSNQRIVRPTGKIDEYATIVLRFHQTALPSKDLKIQDGKFQANEEIKQQRKLNHNQFNALVEGVDFTLNSLGELRKIKK

SEQ ID NO: 6052 - protein, 1065 aa, unidentified
  REGION 1..1065: note = Description of Unknown: Cas Enzyme sequence
MRYRLALDLGTASVGLVAYELNDDDAPVGIAYHAVRVFDEPVMPSKSSSVGEPKKAARRLARQQRRQHGRRARRLRGLAQVLRDALSLDLTAIPPDPGQRIHALRSAAAHGRVELPHLFNVLMHLAKRRGYSGGFRDTDADEDAGVVQSGISQLRAEMAEHGCTTLGDYLHWRAGKGQTLRLKNAGLYADRKLVRDEFEHIWLEQAKYHAVIAKGGATLREQVAERIFHQRPLRSPAPLVGNCPLEPSLRRSPMAQPAAQAFRIEKQIADLRWTNGRWSSPLSAEQKSIVRELLEQHPQQTFTQIYHEFQRRDCPRPSIGWLNLDRSSRDTVTGNRTVAAMARLGLAEAWAALDPGHQITVINLLADIGSPEVLSRAGWHEQLLTGGKEPRRRVLHEAVVRFIDALAAKPKFGRLTAMGFDSGRSAYSIKALRRLTAVMYEQGCDEHAAIAQCYPSRHEQRQAPGPELPPPRQTGNTVVDVALRQVRCAVNVAIRALGTTPAQVIIELSRDMALGITRRREIEGRIDKNRRARQKAAAAIAAHGGDVTQSAIRRYLLWQEQDEQWCPYCDRPINLADALDGSVTHYEHIYPKSLTRIGKQRDFLVLAHRECNDAKGSRTPWQAWGQGQDPERWRSVQQRAARFKETKRYGKAKQLLAEETADRAIDDDVIKDFSARQFHESSWIAKEAASWLRTICTDVMVSRGMLTAHLRRNWGLETVIPEARLAEGLRLKDTDGNEIASDDFDLYRRYWNGDKSGARTDRELDKRIDHRHHLIDALVIGLCDRRLYQRMARDFKQAMERGEARLSLVTKPPLRDLRTVARHLVDHCNLTRKPDRFVSGNFFKGTAYGRTADGTHLLLRKAVSELGGGAKATLDKVRKDIANIAHDSTRDLVQQTFERRIAAGLSPARAITDPIEHPAYGTVLKRVLLMDQRAQDAKMVTHGKRNPNLSKHLKPDGYACLELFSGEDGSPKTSLLPHHVAHTTLARCGSRRYFKGDMVRDPKDGAIFVVGQIKAEDNGSLMLARVTETAKIEQLKGTKGFRKVSGRQIARLEVLTDVCSSRTAH

SEQ ID NO: 6053 - protein, 1079 aa, unidentified
  REGION 1..1079: note = Description of Unknown: Cas Enzyme sequence
MYRFAFDLGTNSLGWAVYRLDDHSLPAALEKLGVRIFPNGRDPQSKESNAAGRRGPRGSRRRQDRRLGRGRRLLDDLIEFGLLPSDADARSAVFAANPIKARAKAAREQVALEQLGRALWHMSKHRGFKSNRLADKEADEKGKIATASNALMERLKSEGHPTYGAFLHARLARGEGTRIRPTGDGAKLSYEFYPTRALLEAEFDHIWAIQAGFHLSLTEAMRERLRDTIFFQRPLRPVRPGKCIFFPDQDRLARWHPAAQEFLILSQLNHLRIVDDHGEQPLDITARDLVARTLMAGTKLSWSGLKKTLKLPSQAEFNLEKGGLKELARNDLAARLLGDTKKPGPLATLWPTLDNATQEEILWQISEVADPEELICWLMERLGISREVAERAEKIPLPDGHLRFCKTATQAIVEELRSDVIPYDEAVRRAPLLGGAGLDHSDFQAEEGVDTLPPYNRLPVLQRMIGNGTGDPNDPELLRYGRITNPTVHIALGQFRRVMNALIAEYGKPAQVAIEATRDMAKSAEELNKIEKTIRDNEKRNDRWRAELQQAGLLAEGARIGDRFLRMRLWEEMGRGPADRLCPYTGRPIALHQLHSDEIEIDHILPFEETFDDSPANKTLCFREANRRKGKLSPAEAADQQPDFFDLAAIIGRTKHLPANKSWRFLPGAMQKWEQTRGFEDRQLNATGYLARVVRTYAEALFVKTDDEGKRRSHVWVLPGRMTAMLRHRWGLNLGDHNRKSRNDHRHHAIDAAVVGVIDRRMIQVLQTHARNMGVERLDRVLPAPPEPFDGFRDAVLSAVEKVNVSHRAQHGSTDPNDPSQTSGRLHEDSVFGLVRDVPENQAERTIGNVVVRKPVSGLTEKEIGQVRDVKLRLSLQEATSSARDKSLPETERKKRLSEALAKWVQETGHRKLRILKPEAGVRPVHDREGRPYKWLVPGEISWLDILEGPDGTWFQHATDIWAANSGGAEPWHAAHPGAQFIMRVHKNDTIQLFDWDDKNKCVIEGSNQIKRIVRLSPSNSVIYLVGINDSGDYQKRHSDADDPFRWDFANIGKLKLRRARRVRIDELGRVHTIPHGTL

SEQ ID NO: 6054 - protein, 1413 aa, unidentified
  REGION 1..1413: note = Description of Unknown: Cas Enzyme sequence
MNKTKLGLDIGTNSIGWAVLEKEDKKYKFFERENASGNSIPSKGSYIFPKGTEANEKSKAATRRGFRSARRRIDRIRRRKVATLKVLSENKMCPPLSALELNDWRYSKKYPCNNEDFIEWQRTGRKGGDIETEKYKQPYYLRYIVATKEGLMNSQHGRYQLGRAIYHLAQRRGYKSIDEEQTEDVIEQFKIAVRKLLEEYTNPVPFSEPFNAVAETYKSDKKVKSLAGKIKRQLKKETSFQLIADFIEQEFDKKENLGKVASGINELSEEIEKSGQPTLGCYFHSVYAKTKDDGTTERIRGRYIDREKHYLKEFNFICDKQELDQDLRDTLQFALFYQRPLKSQKGLVAKCPFEPKRKRIAISHPLYEEFRMWESINRIKIKTENDPRLRPLNKNEKDLIKNEFEQIGDVEFKKIAEKLSLGQDFRYIKDREKESAEVEFNFPMTTTFSGCPTITRIKKVLGKDDKGEYFYNNFPLLNSGFKNEKNKEKISIEDIWHCLFVDSFGNKDKIEGRKEFAKKHINWIDVEVFSKIKLKKGYGNLSKAAIKKILPYLKKGYHYSHAVFMANIPKVLGQTPTEKEEMAILNCIVKALKAKDFEKSVNAIVNNYIDKYKNEENGFGKEPESIRVHKNGIVNEIEEWFSEDDLEAMTESKQKLFENECWTKFETAVKDKRPKEVSYYSSSTIPELILEQLKSAKDLSVNGINIDKLYHPSAMETYPKAEGKLGNPEISSIKNPVFNKAMHQIKNLVNKLIEEGLVNEDTEVNIEMAREINSASYRRALALYQNDQKAIRNWARNKIIECYPEEQQENINPTDDQIVKYIFYAEQNQHCLYTGKTITPRKFFTEQKYDIEHTIPRSKTNDNSLVNKTLANADFNRNYKKDELPANLDLSYNGEKLNGETIIQNRDTWLKSYYIANNEIQFNVSLPSLKDELRKYRKAVKAATTDAEAHDSLMDKVHYTRMKLNYLAQKYRTFEREEIPTKFTNANLVDTRLITKYARAYLNSYFKKVNVINGQITDTLRKIWGLQGQYEEKDRSNHIHHCIDAVTVACIEKGTVNRMSEAFHKYEREYFEENESAKVYLPEPMNDFAGKMKRLKDEVFIYHKQVDRIKPMLDELKKDNPELSTLRGALNSQNPYGIRKNNNGRYFYVQRKSITKIKEKDITNIADKRIQERIQNLCDTSGKKIEKLVSENGDFLFLPEYEAPDKTGKVAKSGPMVIKKLRMISSKTKLAPYKKVREIDRTEKADQEYRHDFYFDKEAGSNYEAIIYGDLVTDEKGKLNRAYRLINHFNIVKNVFVKEPSLPILFKIHSDDMFLIFNKHYDEINWEDKKDLQQRLFKMVKFDENEKFTLERHNYADGDVDHAIGVSEENLKDLKGVVLRRRASTFKGIPTKVDGLGRIDIEYSKKFIEKHLK

SEQ ID NO: 6055 - protein, 1015 aa, unidentified
  REGION 1..1015: note = Description of Unknown: Cas Enzyme sequence
VGLSRLPPVTYTLGIDIGIASTGFAGVQGGGQALLFHGVRIFDKGEQPNGDPLAKPRRDARLARRVTHRRARRKKDIRALLARHGLRDLAAIDEKPRDSVWGLRAAGLERALTDGEFARVLFHIAKRRGFQSMRKGAEPNDLEGKKALGAAKDLEESRRRSGRATIGAYLAAQDKQRNSPGAYDNFVERRHLRAEVADLFAAQRRLVNAKATPALEAAYADIAFFQRPLRAVADKVGPCALLEGEKRAPRYAYSAELFVLWQKLNNARIRPLRGPERDLTQDEKNRLADLAHKNSGGLTYAQARKALEMDEDARFKMSYAGPKPEAAVFLRLTGYHALKAALETGSTADWQRWMGPDRARLDDIARVLSFFPDEADRRRMIAGAGPAQMDKLVAIDSFRGAVDLSLAAIERILPAMQRGLTYDKACAEVGLDHSRKENKQLKRLPPMPDIRNPVVIRSLAQARRIINAAIARHGMPAKIIVEMAREVGKPKRGRTSPVTGKWIEGRDDIEKQQRKNEAERSDLAARIAAERGCGVDAIRGGDILKWRLWEEQNGFCPYCGVYLDQSALAQAGAVEIDHILPYSKSFNDSYMNKVVCCAKCNQDKRERTPFEVWGTTDRWAAIEAFAARLPRAKAANLLREEVDEEGWRARAMNDTRYIARALKNHVEQSLPVKVEVRNGSLTHHLRHVWGFAKKDRANDRHHALDAIVLACSTQGMVQNVANAQAQRRPLRDIPKPWESFHKDVMHAVYDDPAFFISRPPVIKTTGQAHKETIRAVRQSDGKVIQRVPLASLNPATLENLVDRERNRRLYETLKARLDAHGGDPKKAFQEPIYMPRNDGQQGPRIRSVRVVTQEKSGIPVRGGLARNGDMLRVDVYRRSGKHYLVPIYAHHYAKGILPTKAIVAHKEEKDWLPMAQEEFWFSLHKNDLVRIVTRQTAKKKGEELWGYYAGTHRGNGSIAIDAHDNAWTRAGIGVQSLLTFEKYSVDIFGDKTRIPLPEVRRDLAHDSHPKPRPPG

SEQ ID NO: 6056 - protein, 1055 aa, unidentified
  REGION 1..1055: note = Description of Unknown: Cas Enzyme sequence
MEMKRVFGLDLGTNSVGWSSILLPKHYSSYGEMGSIEGVGSRIVPFDGDYLQKFQSGLPAQTKAEGRRIKRASRRLKHRYKLRRTRLVKVFKELGWLDGTFPEDFKKSMRDSVDFKFQIADHLPFSDDTIAEFEKAHGIYGKKSKNGRPILPEDWVIYFLRKKALTEKISFQELARIIYMFNQRRGFKSSRKDLKSGNVEEVKWVERVKISSVEQEGDEKTKGKYKFTITAYSDSNRVQPWTELRKAKPDWVGKEFTLLITEKTENGKTKQLKPQLPKEGDWDLCVTALDQQIKATGDHPGTYFCNGLLGDRNFRIRQYAVHRWRYERELKAIWEAQLRLNPELRELNENVELRRRLAELLYPSQVKAGKEKLKEFLNNDLLHIISSDIIYYQRELKSQKGSIGECPYEKRMGRDGLLYGLKRIPRSSPDFQEFRIWQDIHSIRLIEREQVVDGVSKLDIEVTDDLMTTAVKEELFELFNERTFLNEVHILGVVQKHFPSVIIEAHGGWSHRVNLFANRKELKGHETKAMFRGMLRKAGIESESLLGDYLTLYGLWHIAYSTTSSDLEKSERGMTTGLNRLLSPFVDAGTVSVSQLAAFVSAMKEMPELEKRYGAYSAKAVKKLLLLMRCGKFWRDPEEVSAELLEDMDASRKVSKAKTLKKLKGEADDVKEVSDRISTILTEGWDLSYDRRTGEYLKRRDFEERGSFSGLPTWMACYVAYGRHSEREDTRKLNDWTEFDVMKLLPYNCIPNPIVEQMVREAMLVVRDMWRQFGQPDEIHVEMGRDLLKNREERKKISERQGGNFQEKQRIRKLLKELLNETFEEYNEEERKVSSNFTVKPNPDSPVDVEKFRIWKEGSEQFDDRFEKLFKSGNKERNPTLSEIKTYTLWLTQGCRSPYTGRIIPLSKLFDETAYQKEHIIPRSLMKNDSMSNLVIAEAAINPPPYKGRKLARNFIKDFGGQTLKIGNENYPILDELTYEEHCKKVFARQRGKLKNLLATEVPKGFSERQMNDTRYISRMVASLLANVTKDENGILFTSGAITSELKGNWGLNKV

SEQ ID NO: 6057 - protein, 1155 aa, unidentified
  REGION 1..1155: note = Description of Unknown: Cas Enzyme sequence
SGSNIENNEVIEKLQKAIYFVRPLRSQKGLVGNCTLEKGKPRIPISHPKFEEFRALQFINNIKWKEKSTKEFVEIPISLKKKILEELFFRRLTSGKNKGKVNEESYFKFDEIIKNYSENGVYEFNYKNLPNISTCPTIASLINIFHNEWPDIFIQDESRYGINWDGLSVNYVVKYGNKSGEKRTLRIDEIWHLLFDYLQTKDKQEELEKFCKEVLGFDIDKAKAFSEIDIPQGYGSLSYKAISKILPFLQSGFIYSEAVLFANLKSVLGDQFDEINEQAKKIIEDTIKETGEIKEKLNIVNGLIQKYFAEMEISRAKGVDNIIKELAYQDTLERLKKYFGENNWNKKSEAEKEKLKENILDLYLRFLNGEQSKEEKASAKNNRIPKIDYYKLPRLDENIKKRIVDNFKISDKNIKHLYHPSDIEMYPISRTEKEFEANGIKSVVKFLESPQPPSKGWKNPMAMRTLYELRHLLNYLLRIGKIDKNTKIVVEMARELNDANKRWAIQTYQRYREEENKEFAKAIVGVVKQKYPNINENDIDNINKVRLWWEQIEYNDEKYKAIKELKEDVEKYRLWKEQECVCMYTGKLINISNLFDGTQTQMMHSFPASISFDSSLSNLTVGDAHYNNKIQGNKIPAQLPNYYEDAIINGKLYTAIEPRLKRWKEKVEHLKNLIDENKKRTKKTQDSETKKRLIQQRHLLQFDYQYWKKKIDTFTLTEIPLKWKNSQLIDTQIISKYARAYLKTVFEKVDVQKGTITNVFKKIYQIKGEEQKCRNKHSHHAVDAAVLTFIPSSAKREAILEEYYKAEEKKQKFHTVPYEKFHFSHINEIENDIIINHIPHDKTLTVTIKNIRQHGKKTGWIAQGDSIRGQLHKETFFGAVKALERDEQGYPVKENGKYKVIKNKNGEDEIWIVSRKPIKDIKVDKDIIVDELLKQHIKKQLSQGVVLTDVLDFNNKAIRHIRVRVKAGVGFLSKEKAMPIKLHTYASKHKHKREYLVQNEENYLFLLYEGLNDKQKTIRHFRILNLYNIAQLKIKNINELKAEAEFQTIVKGKIELSLKAILQSGDRVIFFKESKDEITTENIKSRLFHIYKFNELGPNTAYIYLQNHIEARPDNELEKGEKEFEQNKYQHRLEFTSDKLNCLFENIDFNWKNFI

SEQ ID NO: 6058 - protein, 1064 aa, unidentified
  REGION 1..1064: note = Description of Unknown: Cas Enzyme sequence
MTKILGLDLGTNSIGWAVVDKEANKIIDTGVRIFTEGVVKETIGQGDKEESKNAVRRQFRQARRQHFRKRLRKIKLLEVLINHDMCPLEQDALKKWKNWDKKTKTAGKQFPDEHEFVEWLRLNPYLLRKKASNEEITRHEFGRILYHFIQRRGFLSSRKGSVSEEGAIFKGNDKMDGINETKSLLKDNSTLGENLYQIYPADNKPFKRILIDNKEARIRARYTLREMYVHEFEQIWNKQAEPLQLNKLEVSVKKVIYLETSADSPKSKQKIEKLQNKFGESNVEIDGKRLTIKKLVPFKEFLAGKIEQTEKGINFKSNESVLFWQRPLRSQKGLLGKCTFENHKFYDKTKDKWITIGSTQCPISHPDFELFRAFQFINNIRFGKSTKLNDEQKQKVLNLINKSDTSIEFGKIPKELKLTYENFNYDDKLKIPGSPTHKRIKGFFSEEQWENHYEDIWHCFYFYEDATLLKRKLIETYGLTKLDAEKASKIQLADGYGSVSLKAIRNILCFLKLGYRYSTAVVLGGVKNAFGKERWDRFEMFHDEIIRRVVQLIENEAHKEYELIGKIKRMLADPENQFGFVENDRSFQKLYHHSQAIEKKTVVKRLSEIENLRNPIVQKGLNEMRRLVNELLDNFAQQPEFGPDFSFDKIHVEMGRDLKNSKKMRQEMVFKLRENERENEDARLRLAEFGLKPSRENITKYRLYKEIQAKNGSVVCPYTRKTVKITDLLGRDNLYQIEHIVPFSVSLDDSFGNKTICESNFNRDKGELTPYEFYQKNSDPKIWGADSWEDIEQRAFALLPYRKAKKFVSKKRDEDAGFIARQLNDMRYISKKATEVLSEICDDVRVMPGQLTSELRRLWGLNNIIQPVLPLELSGYDVDPDLSLPHYLVLDQFGVPTEIRPILAKRPEKNANQILIPGFISDKNKFIADKNYRHLKFEVQTDGLPVGKYWAKLNVSEPVGFTRIFTERPAFDELSVVYRGKVLNGFFNHDSLGRKLKASVPDGTYWAKLQVKKTNLIEPEKDKQPKPNKNQVLLFGMVQDNLFTSYIYQCQTELLPGRYWALLD

SEQ ID NO: 6059 - protein, 1077 aa, unidentified
  REGION 1..1077: note = Description of Unknown: Cas Enzyme sequence
KDYFIGLDLGSASVGWAVVDEDYGLVKRRSKNLWGVNLFEEAKSAKERRMFRRSRRTINKRNWRLTLLKQEFKDILSAEDPEFLDRLRNSRLIKENKESIFFRDPDYKDVDYFREFPTIYHLRWSLMHDKEVKKYMDQGRYVRFLFLAINDILKSRGNFWSNVSVTDMNERLSIDAIEQEIRKVVQELSDEVEGMTLDEEFIINSIRAYMDHQEKPSNKRDQNTLLVKLLIGGYKVDCNKLFDIETEEKKTIDFEDELWEENKLDNDPLNPYLDALFHAFSSIKLHMMIGESESYSQSKIKIYDQHKKDLKQLKESIRKIDDVLGTDHYKHLFKDRAEKEKDKKASYTHYVGKYIEGDQKIRVRKKSKYAELIKKLVAIRKGYREKTGDDDLLKEIDRPGYLSIPNNTDNRLIPYQLHLDELKKMLVIFKDVSTRLGLEKNDTQKRIEHIERLLTFKVPYYAGPLSKLNNASADPNHWIQLKKEGVKITPYNFDAVVDKTRTNEAFIKRMIRNCTYLYDEDALQQETIAYQSYIFFNTINKIKINDHILNVEEKNKLFEVLAEGVKLTRTRILNILDYPKDAEVSGFSKDPTKPLDISLSSITKFRGIFSDKKNHPIYQQFYDDVVSTISLIDKEEIELRKKKIQDVIEHYSLIDINEDHLESLSKLSSKKRGNLSRKFLCEILFLHPHDQNGEVKTMLEWLKETNLNLMEVLYDSQGYNLKRIDKENKEAEDFSSIEQIHEYLKRKYIAPQARRPIIQALKIVDEIIKIMDGQLPKRIAIEFTREQGEKKETDSRYAKLRKLVEKIKDDKNLLKTLDRFKDDPTRLKSKKLYLYFIQGGKDLYTGKPIDIDLLLSKSDIYDIDHIYPQSKIKDDSLDNLVLTSSVLNGEKGNNYPISEDIRNKHRPLWEALRNNNLISSKKYDRLTRETELTEKELSDFVNRQKTTLDWVNLEIADILAKKYGKEKNDFIIFSKSRHVSRFRANIEAYKFRDLNNLHHAHDAYLNVLVGNTIKNHRFVMIDEKIKSNNVDNIALYRLEPFICDIKKRLQYYDPFVTKRTFINSSGPFWDQQMIGKK

SEQ ID NO: 6060 - protein, 954 aa, unidentified
  REGION 1..954: note = Description of Unknown: Cas Enzyme sequence
EFEDIAKNLAPKKQYKYFKDNKKNPEDWLFNYSLKATVSGCPVSARFIEIFGDQYMLFKTEYLNKTNGGKGIIDIKDVWHVLFSFDSDKKLADFARNKLNLSTENIDKFLKIKLKKDYSTLSLKAIKKILPYLRMGLIYSHAVFLAKLDDILPSEIWNNEKNRRIISDAISEIIRGQNEEKSIIDIVNGYMQDNRENNSRWSEEAKELYRIELNSRTENYYGKKTYAFFPEERKNQIENKVFTLFESQMKKNCGKGDFASIQRIDEQVKAFISDNFDVSAKKMEKLYHPSAIDVYDPPKRGADGRLYLGSPMVSSIRNPMAMRSLHQLRKLINELIENDVIDANTRVNVEMARDLKNANERKALKRWQETRENLHKEYAGLIKQHYIANGLNIEPSSDDILKYQLWEEQNHKCLYTGSEIKVSDFIGSNPAYDIEHTIPRSISLDNSQVNKTLCSNRFNRSVKRNKMPSQLNNHTEILSRIEQWKEKYENLDKQVHSLTRVVKNAADKEMKDSLIQKRHNLVFERDYWREKYYRFIMEDVSDGFKNSQLVDTGIITKYARLYLKTYFDKVYTVKGNTVADFRKAWGLQSEYEKKERVSHIHHCIDAITIACITKENYELLAKFYHDWEEAEIAGSKSKPKIDMPWPTFTTDILGVEKEVLVSHYTPDNLPKQSKKKLRSRGIIKRNESGQPIFQKGDTVRGALHKETNYGAIKVLINNRHGEKEERIIYVFRKSLDALTASDIKNIVDPHIREIVTVDKTKEGEIKKELDNLNKQIKNTEDEHEINRLNSLMNDLKQELSALFHIKNKNGSITPIKKVRCIAKVSDPLHIKMHRDLSKHFHKHYSHFANDSNYMMIIYEGTDNKGKNKRDFLIINNLDVAKTHKGDGSKTLIPPIHPKTNIPYKGYVKTGTMVLLWERTPDELFYLSNEELGIRLYKVIKMNKDGRLTLKYHQE

SEQ ID NO: 6061 - protein, 1203 aa, unidentified
  REGION 1..1203: note = Description of Unknown: Cas Enzyme sequence
MDRILGLDLGTNSIGWAIIDRNEDNSCALVDKGVHIFQEGVAREKGNEKPAVQERTAARASRRHYFRRRLRKIELLKVLVKSGFCPYLPPEMLADWKLKKRYPMDPDFLSWQKTSEIDEKNPYHDRYIALTRKLDLTRISDRYLLGRALYHLNQRRGFLSGRKDSVQEAEDGKVKHAISDLTKEMQAAGCRYLGEYFYHLYNGGEKIRAKYTSREEHYRAEFNEICRVQNLPEQLYKELERAIFYQRPLKSQKSSVGTCPFEKGKPRCPMSHPSFEEFRMYQFLNSVRLRSLSDEGYRTLNDDEIASVLPLFFRKSKAHFSFEEIATKIAGKKNWSFRDDQAQTPYKFNYRGDLTVSGCPVIAAILSALDCKYSYDWADTLCSLYTKGVGKSKERIIDDIWHALFFFSDESLLSTWLCRNLQLDPKDAETLAKFPLPQGYSNISLKAIRKILPWLKQGYIYSHAVFYANVVNTLPEAVRSDQRKIETIMGNVRVILEDASVNRESSKYKEITDYLLSTGEEVHPEKLYQPSVMELYPKSLPDTHGVTRLQSPRTSAFKNPMALRALFRLRALINSLLEERLISPETKINIEFARGLNDANKRRAIEMFQRENEKARAVAKDTIEKELGIVPSDTDILKFLLWEEQGHRCLYTGEQIGITRFIGDGNVYDIEHTIPRSLGGDDSQANKTLCNNIFNRDKKGTKLPSELSNHAAILANVEFMKTRAEEYEKRVFAAKKAQRTATTKEMKDRAIQNVHLFKMRRDYWRSKYERFVMTSVPEGFTNRQGVDIGIIGKYARMYLNSVFPRIYVVKGATTADFRRAWGLQDQYSRKERVNHVHHCIDAITIACIGKKEYDQWKWYMERMDSFRFGKGPKPVFEKPWKTFTEDVLATSENLTVSHYSPDYIMKRGRKKLRERGRVIRNRNGEVMYCQGDTARRALHKDTYYGAILRDGERRFVVRKPLDSLEDKDIKNIVDDVVREKVTIAKERAGSLKTAIEKGIWMNEEKRIPIKKVRLFVPSIASPIELKAHRDQSDKDYKRSLYVANDSNYCMAVYCGSRPSFHLYTTMDAVKCQKEGNCNTWIPSVDEKGNPIRFVIKVGMMVLFYEDNPKELLTCSQSELSRRLYKITGMSSMIIQKKYSYGTVSLKFHQEARPDSELKSSNGVWRSDSDYRPVITLLHTQLSFLVEGIDFDLSISGKIVFKKG

SEQ ID NO: 6062 - protein, 1017 aa, unidentified
  REGION 1..1017: note = Description of Unknown: Cas Enzyme sequence
VQQKVLGLDLGSNSIGWALLTEESGQSSEIVDLGSRIFSKAVEEKVPTPKNQKRRDMRLGRRVLQRRARRKQRMLNYLVSLNLLPKELQNNTQPEIILNEIGDPYELRTKALDEQLTPYEYGRILLHIVARRGFLSTKKQVAGDLIDDPDTLNYLSTLDEKPTKDKEEGQFKADISQVYQQIKDCGARTLGEYLHGLEIGNVKRNRNHDGGHLRTDRKMYLDELGLIWKQQAPYFDNLPSDFMQKNKGVMNIIFYQRPLKLNKDRVGRCSLEPKHYRANMARIEVQKFRYLQDINNLKFFDRWQEKWISISDEQKSKLKKIFEHNAKITITALKKELGLDRPTKINLDTKNLKGNITAIEIRSVIGDTWDKYTAKQQHDLFEDIFTIKKKSTLKARLITHWDFDKKTAVKLCLIDFEPSHSSHSLKAINKLLPYLEQGMIYSDARKAANYDYKVEEIEAVNTLGMPPETSNPIVNKGMHELRRLINAVIKQYGKPDIIRIEMARDLEMNTKRYKENESRQKKNQKANEAAQHAFEGLNLGKKYASHDDKIRYRLWQDQDERCAYSGNTIALNQVFSSECEIDHILPFKKSLDDSYMNKVLCFTSENRNKSDQTPVDAWGGDNEKWNQITQAIGHWDKSLDNKAQRFYTKEADLQKRDFISSQLNDTRYISKLAQDYVRQLGCDVNITKGFVVSQIRHQWGFNSLIGEVNKKERTDHRHHSIDAVVIAATSRNLYQNAVRQIKQNRLNIAPPYSHIREELAERLEHTIVSHAPRRKISGALHEETGAGYIEKHGGLVYRKTLNQEFTIKNAMSIVDEQVKTTVLEHIENHGTSKQAFNEANLKTLKLGKNPIKRVRVLQSKTNEKKLAQSKFGVRDQTGKIFKYMSYGNTHHVEIIKNTKSGKIKGEFVTTMLASHRAKGINIPKQSIIKTDHGEDWEFIMVLHINDTVSIELENGERVFYRVQKFMIAQGFLVLRLNTASTLKNKDEEIQMSIHRLFTEMKLRNHQMNTIGHFIDHD

SEQ ID NO: 6063 - protein, 1159 aa, unidentified
  REGION 1..1159: note = Description of Unknown: Cas Enzyme sequence
MATRKVLGLDLGVSSIGWALIEMDEDAPQQILAMGSRIVPLTADDSDQFQKGQAITKNADRTQRRTARKGYDRYQLRRALLTDVLRKNNMLPVRMDEHVIDLWGLRARAAQEQISLQELGRVLYHINQKRGYKHAKADNSGDKKQTDYVQKVNDRYAALHATGMTLGQYFYEQLRTTAVRNPDGSTYYTFRIKDQVYPRRAYMEEFDRIMATQRAFYPDVLTADLIDTLRNRIIFYQRPLKSCKHLVSLCEFEKHAFTKPNGQTIYIGPKCAPRTSPLAQLCALWEKVNNIVLTNRSNDTLEPTNEQRVEMVDFLNTHEKMGQKDLQKILRITNKDGWKVRKDIEKGLKGNDTLAKIRKALNGKYQDLLRLNICFDDSLVDAATGEVFHTVSEQVEQEPLYRLWHALYSIDDEQDLRRTLSAQFGIDDEEVLTALCQIDFVKAGYANKSHKFIRKLLPWLMQGYKYSEACEMVGVNHSNSLTSEQNEARVLLEQLPLLEKNALRQPVIEKILNQMINVVNALRAEYGDIDEVRVELARELKQSKDERESATKRNNENERKNKKIADTIQGMGITPTRLRLQKYKMWQEFNGQCAYCGKPLTMAQFLNGVEAEVEHIIPQSVLFDDSYNNKVCACRACNQAKNNRTAREFMEQQGEAALTAYLNRVNEAVETGKISKTKRDHLLWHPEEVPNDFIERQLRQSQYISKKAVEILREGFRHVYTTSGSVTDFLRRLWGYNEVLELLNLDRYEKVEGMTVWNEQKHREQIKGWTKRMDHRHHAIDAVTIAQTSQSIIQRLNTLTASREQMSYEVAKSAEERHYNEKLSLLEKWVVLQKHISVSDLQAKADGVLISFRAGKRVTTPGKRAEYHHGKRIVRQTGLLVPRGALSEETVYGKQGDRFVVKYPLTHPSMKVENIIDPTIRRIVQARLDAFGGNAKNAFAEPLYSDKAQKMQIRSVRCWTGLNEESMRAVHTDAQGNGVGFVKTGNNHHVAIYVDKTGKYQEKLVSFWDAVERKRYGLPVVIEDPKSVWDKLTTMYDTDLPPQEFLDTLPHDDWQFVISLQSNEMFILGMDDVDYASAMENKDYRTLNKYLYRVQSISGGDYFFRYHTEITVDDKYDGKRDLRTSQLLLKLKRLSPKALFALHPHKVRVNILGEISEAH

SEQ ID NO: 6064 - protein, 1110 aa, unidentified
  REGION 1..1110: note = Description of Unknown: Cas Enzyme sequence
MKYGIGLDCGIASVGYCVTELDFNDEPRRIVKLGSRIFDCAEHPQTGASLAEPRREARGMRRRVRRHRHRLDRIKYMLVEKGIVSQAELDSLYNGQLSDVYELRVKALDEPVGNCEFARILIHLAQRRGFKSNKRNDGKDEEAGKLLKATEENKNILEQKGYRTVGEMLVKDEKFAQHKRNKGEDYSNTVLRSMIAYEIKMIFASQRSFGMTFASEDIEEKYTDIALSQRPFDLGPAKGPENSPSPYHDMLGESRVGQCTFYPEEKRAAKATYSFQLFNLLQKINHIYLVSDFGDKRALSDTERMAVRNLCFRKNSVNYADIRKELGISDRYRFNCISYSVKNADKLREAGKNIAEEAEKKAKFEYLKSYYQMKKALGDIFTVLSTDDLDALGRIFTLFSDRDKIHNELSNTEIPQMFFEAIYDKMPSFSGFGHISVKACKEIIPFLEKGMTYDKACEAAVIDFRAHTNAEKHRFLPSPYKTLDDKETADKASASEALADISNPVVKRAVTQTRKVINAIIREMGNSPAYINIELARELPKSRKDRDDITKRNEDNKAANERLKKEIEENFKIVNPKGQDIIKLKLYHEQGGIYPYNLKSFDYESLLKPGYVDVDHIIPYSKCFDDSYSNKILTFSSENRQKSNRIPMEYIPESRQSDYKVWVSANIKNPKKKQNLLKAKLTQEDTDGFKKRNLNDTQYLSRVLYNYINDSLLFDDYKYKKNVRAVKGAVTAYMRKRWGISKIREDGDLHHAADAAVIACVTDGMIQKIRNYSDSQETAYYKANTETGEVIDQLPMPYRDFRNELQKRLESENLDELKLYLSTLPNYSKEALDTVELCFVSRAPRHKATGSAHKEVLRSYSGDGYSVSKKMLCDLKLDKNDEIEGCDFWKNDDILLYNALKAELIKFRDKGKEMPSDFEFHKPKADGSDGPVVRRVKVREKASLYVPLNRESDISQKTGAGNGEMIRIDVFYVENDGYYFVPIYVADTKKKELPNLACVAGGKSWKPMDDKDFVFSLYPNDLIKVTAKKNMTLSVAQKGSTLQPKIERNNTFLYFVKAGIATASIKVRNHDNSYVIPSLGIKTLKSIEKYTVDPLGNIHKVGREKRMRFN

SEQ ID NO: 6065 - protein, 1457 aa, unidentified
  REGION 1..1457: note = Description of Unknown: Cas Enzyme sequence
MVNKTNKFRIHLFELVMLFYNHSISQKRKVVKEIMKYFLGLDIGTNSVGWAVTDEKFNVLRKNRKRLWGVRLFEAANTAEKRRAKRSARRGRARKKLMQFWLQQIFAREVEKVDKDFFIRLKNSAYYADDKDCRLEGGKDSVFRFDIDGNKYTDANYFADYPTIYKLREELLKVPAKDIRFLYLAVYNLIKNRGHFYESGGESENVGFADLLENIKILCDRMDDVEVTFKTDISDADLINVLKNNKYKKDQKTALVELMNCQLQKKHGDNKDKIIVESFISGKIDVNKLFSTDEEKSAPCVDLTDIEKFETCISKLTGLSDDQVLLLEKIKNAYDEIVLKKLIGDCNYVCEAKLKQYNLYKEDLAKLKTFVRKYHKSRYNEIFRSSYTTNNEKTNYSLYTQRLVLGGKNVKLGIELQKDGDKYKEIYHDYKKNIESLHKYLKNILESEPEFQDANYETSKKAILDKITDGSFLVKLRNKANASIPNSLLVKELKKILETNATKFEFLKQKDETGLTNAEKIIKIMQFRVPYFVGPVTAKNNSKNVWATIKNNSLTYTPWNLDKIVDFDQSENDFIRRMTNKCTYFKNEDVLPKNSVIFCKYKVLNELNKITVNGVALNDGKEDVDLKRRIFDELFMTKSKVTVLDIKKLLARSGKYGTEPRMIEIGGIDKDFKSNFAPYVTLKNILGDKVNDVTLTEEIIKLLTIIQDKKRVTEKLKKEFPFLTDDELRKIRALNYSGFGTLSKKLLNDVRFVDKSTGEVFCGVNDALWHTNQNLQQILHNKKFTLKEEIETIEKRYDEEIEYETVENCYCSPSVKRGIWQSVLVIKELRKHLGEYPQKIFVETTRSDEEKGEQGRKLSRLKKLQDTYKSKKDEISKIVKNYNELFKELNNKQESDLREDKLYLYFLQNGKCAYSGEPLTIEDLSDCDIDHIIPRCFVKDDSLNNRVLVRKRYNNIKSDLYPLPQEWVQNCAHIWKSWLEQGTMSQSKYDKLTRRENLTPEDRAGFINRQLVETSQSVKGLIDILRRFVENEKDIVFSKAEVVSDFRRWHNIPKCRDANDLHHAIDAYLNIVVGNVTRAKFTDNPVNYFKKKQELGDFIRPIETDDSSDDVEKQTENPLKIFNKYIYDYSTKELIWQGYKDVSRIRDICKRNDISVSKKMEMQTNAAFYLETIHKSRKNNPNTEAKVNLKGKGTLSNIERYGGFGDQTTAYFMIVKSLKSGKDIVTIERMTTYAYAKIKSNLLTLQEYLTGELGLNNPVILKDKLPLYSELALGKGRFLLSGTSGSSLLLHNFNEWYVDFETQKYIKILTKFNSLSNANVTMDISRDKIVVSPAKNKNGKELSLTKEENIRIYKKIADYVNTDMYSVITKGEISKILNEKIEVFSNLEMVEQSKFLYGLVTTISNRGNLIWKLDAIGRSGQLTNYRINKNVTGKGYKLIKRNVLGYVIYQQDLENVR

SEQ ID NO: 6066 - protein, 1347 aa, unidentified
  REGION 1..1347: note = Description of Unknown: Cas Enzyme sequence
MSEEKIYLGLDIGTDSIGYAVTDQNYQLKKHGGNPMWGVTLFEAANLNAERRAFRSARRRLDRRQQRVLLLQELFAPEISKIDKKFFIRLKESALYRDEAESKYSIFDDIDYSDIEFHKQYPTIHHLIDDMMYSENKHDIRLVYLACAWLVAHRGHFLNEVSKDNIAALTDFSKVVDGFMSYFVDNEYVTPWRREKNGEVEKVLKKKLSITAKYKELVSVLFDGAKVSKNVSNDFPFNKEVMLKALCGSRISAKDLFVNEEYADVKSFSLGDDDASIAEVIGSLNDDADLILRMKEIYDWSILVDSLSGKETISKAKIAVYEQHNKDLAFLKSFIRNHSKESYNLIFRDSSEKNPLSYSLYIASTKHNDNFTEALAKLVGKIQPDATEKSNYDDMIARLELKQFLPKQKSTNNRVIPHQLYWYELDMILKNASIHYSFLSDLDEGISTADKIRSIFTFKVPYFIGPLNSYSKEHSWIVKKCDGKIYPWNFEKMVDFDRSEQEFINRMTNHCTYLPGENVIPKESLLYHKYSVLNEINNIRIDNVKISVQLKQEIYTNLFKSHKKVTRKKLEDYLKSNNYLSESQTLSGIDIQINSNLKPYFDFKKLLDNGVLNEEQVERIIERITYSEDRSRVKKWIKSEFPNLSEDDIGYISKLNYKDFGRLSKRFLSSFDGVNKETGEVTTIISELWNTNNNLMEILSDKYTFAENAENERMLYYTDNRQSLSDRLDDMYISNAVKRPIIRTMDIVNDVVKASGKAPDKIFVEMARGAADNQKNKRTVTRKQQLIELYKKIKTEEVRLLQKQLEDMGDMADNNLQSDRLFLYFMQLGKCVYSGQSIDITQIKGETYNIEHIYPQALVKDDSILNNEVLVLSKINGYKSDTYPVPSEIRSKMAGFWFMLKENGLITEEKYKRLTRKEPFSADEKLGFINRQLTETTQSTKAVATLLKEKYPETEIVYVKARLASEFRQEFGMLKSRTFNDLHHAKDAYLNIVVGNVYNMRFTKRWFDVNSQYSVKTKTLFKNELICGNERVWGGENMIGEVKNIISKNNAHITRYSFCRHGGFFDQMPLKAAKGLIPRKKNLPTEKYGGYNKATVSFFLLVKYRVGKKSELMVMPVELLYADKAVLDMKCAEEYAKDRIGRITGKSIDSVSFPIGLRKLKINTMLSLDGFRICIAGTSGGGRCIIAQPYMQFSADLDTQLYVKRLESFTEKLKNNANLVYNENYDKISSEQNIKLYDMYIKKLKDSVYKKRPNNPIAILESGREKFIDLDVKTQVVALLSIHQVFGRVSRGCDLTYIGGTGRTAGTSGFSTSVSNWKKQYSDVRIIDQSASGIWEKVSDFNLIDLV

SEQ ID NO: 6067 - protein, 1109 aa, unidentified
  REGION 1..1109: note = Description of Unknown: Cas Enzyme sequence
MEEIYLGLDIGTNSCGYAVTDGNYNLVRIGGKDAWGVRLFEEAETAQERRAKRTARRRVVRKKLQNLWLQQLFEKEIEKVDPSFFTRLKYSNLQLEDKILSDKNLTSKYSLFNDTVKQVFTDKEYYAKYETVYRLREKLLKNPAEDVRLLYLAIHSILTHRGHFLSETDFSSTVPIEDSFNILLEKLGEYSVEFNDSKNALTIKPDKISGIFLLLEDFAQGLPFRQVKENFEKNLDVKTKLDKTVASILLSGKFKTTDVFAVEKEDAVKVDFNDEKYEEVYGTLAGQLSETELAILNLLKDLYSNIELKKLLGKNNYICEAMVERYEKHNDQLKELKTFVKTYFPSKKNLVFNAQKTSKKSKGEKAVKIANYAAYCYSDLKDGKKQIIDGVANREDFYKFIKSELLECAPEVETDLVKFEEQKQKILNSIEKNDYLLKIRSHDNIVLPNSLYKAELQQILEVNEKKFKFLSEKDEKGKTISEKIVDVICFKIPYFVGPIGQSERGWIRKDKNLDFKPWTLNEIINMDEAEDKFIQNMTSKCTYLPTEDVLPKDSLLYSKFRVLNELNNLKVNGNDITVETKQRIFKGLFEKYKKISKNKLIEFLKQENIYPKNESIVITGIDNEFANNYSSYVTLVNKFGEEFVNKNYDVFEKIIKYHTIISDKLRLEKRIKREFKIFSNEDVKFLKSLNYSGWGKLSGKFLNGIKFADKKSNSPEFESKTIISAMWETNKNLQEVIFCKEYNLLEKLEANIEKIQRDLVYEDVQNMYTSPSVKRGTWQAISIINELKSKLGKYPDKIFIEVTRNDQEKGDKGRKDSRFGAVVKKYKDKALKEDCLKEAINYNNLLDELNKRNNSHLRSEKLFLYFMQLGKDAYTGEPIDISELGNDNAYNVDHIIPRSKVKDDSLDNKVLVSAAANLAKGDEYPLKRKIQFAQKDFWRMLNKNGLMSDKKLARLERTEEFTDKDADDFTNQQLVSTNQESKAVIDLLSKVYDNRRNIVFSKAMFVTEFRNRYNIFKSRDVNDLHHAKDAFLNVVVGNVLFNRFTEGYWKKDKNIKILEDENRVDADEDKNEKVTSVVDKVFGRYVWSNQTGEVVWKGWKDVGRVSDIE

SEQ ID NO: 6068 - protein, 905 aa, unidentified
  REGION 1..905: note = Description of Unknown: Cas Enzyme sequence
MAKKMVLGLDIGITSVGYCLVELDDENFDGKIIDIGTRIFQAPEDPQTGASLAAPRRENKSARRRLRRRSSRLYEIRKMLSDKNFITQQEIENVYNNTEKVIDVWDLRKQALSRKLTNIELYRILIQIAKRRGFKSVRKSEELKKEGELLKAINNNLSDFEKENFLTIGEMYATKFVGNEAKRNKDGKYFRAIPRSLLEKEIAVIFEKQRELGSEIATKDIEDEYNSIAFYQTPLQSMEKMIKYCIFEPQYKRAPKCAYHSELFTATTKLVNLSIQNDLGDRRFLDEYEIQQLIELAHKNAKVTYEQAKKLLMLEENYKFVTLNYNKKGKDGNLLNPENATLIELKNYHAIKKCVGNEKFERIKNNKEMLDNIAIALTYEKSDETITKKMRELKVDEDIIDDVKNLTMSKTMHLSLIAIRKLLPYMLQGKKYHEACEEAGYNHSVISSDKEKQNLLPVLNIKEMTTNPVVNKAVSQTRKVVNALIRKHHKFDSIVIEMARDLSKSFKERKDIEKAQQEFQQAKEKAKERCLEHGINPDYPKSNLLKFRLWEEQGSGYCVYSGEYLDPQKLADDNYVEIDHIIPYSRSFDDSLNNKVLCKVKQNQEKGNKIPYEFLGGDKNKWHEFVERAKSMNLKTAKFNRLTRKSYTSEGFKSRNLNDTRYIAKFVKDYIKENLDFDNNLKVETRNGSLTAFLRTQWGLVKNREENDRHHALDAAVLACSTQGMVKYLSTYSSQMENYGFINSKKPRIKKPWENFREDVIFSVSKIFVSRALRAKATGAIHDATIRSKKHIQEGFTTVKTNLSNIKLETLEKMYDKERNIVIYNILKERLEQFNNDPKKAFAEPVYMPLSPEKIAKGQKAPEIKSIKIKDSSVSGVFVRNGFAKNTSMVRVDVFKKKNKKGKYE

SEQ ID NO: 6069 - protein, 986 aa, unidentified
  REGION 1..986: note = Description of Unknown: Cas Enzyme sequence
GKVFKNFSDWFRDNDVAFPFGDSADKFGSILIDEKSIRNRPAVFYSVYFGGKKPKPAIDDVIDVNELIKLVSGGVIEISKLFMNEEYQELENNKIRLSDAAFDEKEPELRESLGDDFGLIAAAKNIYDWSLLTGVIGDSGSLSEAKVRVYEKHGRDLAALRSVVRRYCPEQYKNIFKTCEKGNYTSYSGNLKSIKNTIDVKRCNQEEFCDYLKSKLKNVKPEPGDSDCERVLREIAEHTLCPRQVNSDNRVIPYQLYYTELKKILENAANYIPQLNTADEYGSTASKILRLMTFRVPYYVGPLVKKNENDNAWIVRKGEGRILPWNFDDLVDRDRCEDEFIKRMTCKCTYVAGEDVLPKNSLLYSKFMVLNEINNIRIDGKRENFPVEAKQKIYTELFEKRKRVSVRDIKNLLVSEGYMKPESKLEGIDISVKSSLKSWNGFKTLLASGMLSEAEVEEIIERMACTTDIARFRTWLEKFGLTAADIKYVSGLKYADFGRLSLAFLTEIPDIDPATGEELHPNIITMMWETNKNLMELLSRNYNYSSQIESMNREYYSQHPLKLDDRLREMYIPSAVRRPIKRAVEMVREYSRAVRKAPDRIFIEMARDLTDSQKKGKRTQSRRNFILEYYSKLDEDTTALRAQLEKKSDSELRSEKLYLYFIQLGRCMYSGQSIDIEQLSGETYNVDHIFPRCMVKDDSIENKVLVLSTLNAAKGDNYPIAPGIQHDRHGLWEKLHNIGLMSDTKFKRLTRSTPFSDDELAGFISRQMVETRQSTKAVAALLKEEFPESEIVYVKAGLASEFRQQYDLIKCRELNDLHHAKDAYLNIVMGNIYHVKFTSDPLNFVKEFRGKKEVFNLKIETMLSHDVIRNGETAWKGDGSWLDAVKKQMSKNNIRYVRYSFRRKGGFFDQQPLKKGCGQIPRKKALPIERYGGYNGAAASFFSLVKYRSEKTSGVVIIPVELMYSQRFEHEAAFAEKYALADDIIK

SEQ ID NO: 6070 - protein, 1266 aa, unidentified
  REGION 1..1266: note = Description of Unknown: Cas Enzyme sequence
MSMEKDKKVTRELKNYYIGLDVGTDSIGWAVTDENYELLRERGRDFWGVYLFDAAETAVNRRAFRTARRRAARTRQRINLLQELFSEEIARVDFSFFRRLSESKLNVDDKTVGGKYTLFNDDGFTDKEYNKQYPTIYHLRSAFLNVESAKKITDVRLLYLAVHHVIKSRGHFLFEGQTVAAEDRNNVKNAFSEINAILSETDGQPFDDIEKLDDALTLLSDKKTSKNDKEKRLRELLSVGAKDKQNIAIIKAFIGKKTNFKDFFKLDEDPEVKDFCFDDADFTEEKFRESLQEDEYSLLCNVKKVYDWAVLTEILGGHRYLSEAMVEKYAAHKKDLELLKAYVEQNCPERKKEVFHLNDGKTVNYAAYVGLCGKKRFKKSTKDDFYKYLKTNLKVTDPEILKKIEDGTFLQKLRTGANGVIPYQIHKAELDIILKNAAENFPFLTDMQDGYAVADKIKMLLTFRVPYYVGPLNDAHKSAGFAWVKKYDGTEKQKITPWNFSSIVDENASENEFIQRMTNKCTYLLGEDVLPKASICYQRFAFLNELNNLTFKGKRLDYSGRKAIIEYAEKEKKITISKVAKQLERLGYIEKDEGKKDNFGGLESDFKNSLSSYVFMRKVFGDDYNEEICEKIILWLTIMGDKNRVAERIKRELKLSDDLIKRIKDFNCSGWGRLSEKFLKGLYECTPDGELITNENGEPKNILGAMEESGLNLMELLSNNYGFTNAVALHNAGCRSDDKITYSAVEDLYCSPSVKRAIWRTVCIAKEIEKVRGGAPSRVFIEMARGEEENKKGKPPVSRRQRIIDLYKSIKDESREWMNEIESTPEIRFSSDKLLLYYLQKGRSAYSGKPINIQDVFNTNIVDRDHIYPQSKIKDDSLDNRVLAYKTENQQKEDIYPVKDEIRSQMNAFWLELKEKGLMSEKKFDRLTRNTPLTIDEMSDFVNRQLVETRQSTKAIAQILKKLFPESDIVYSKARNVSDFKEEVLNVKKVREVNDLHHAKDAYLNIVVGNTYFVKFNRNAKWFFTEHQNGDASLKKPFNYEVKGAWKPSYKSRVREIALKNDCRVVRFTSMGHGGLFNATIKTKGANDKLIPLKANGAIADTSKYGGYDSATTAYFSLVQSDGKKGERKISIEAIPIYIDKLGKEKILEFLVKNAELKNPCILIGKIKINSLLSINGAYVWLRGKTGAQILLCNANQLILNEETYNYLKRISIYLDRNKKARKEFAIDERDKITKEQNLQVYHVFIDKLSQKPYCLLPIGGQAKLL

SEQ ID NO: 6071 - protein, 1368 aa, unidentified
  REGION 1..1368: note = Description of Unknown: Cas Enzyme sequence
MDKTFLGLDIGSNSIGWCVTDQDFKIKKLNNVNAWGARLFDDASDAKQRKGFRSYKRRIERRKSRIYLLNRMFVEEISKVDDSFFIRLSESNLCCNDKSIKNKNVFFNEPGKEKEFYKKYPTIYHLRKALIEDDKDAFSDIRNVYIAIHHIIKYRGNFLSENEVSFNDFDEENIVNLNSCLNKILSEEDENGLCYDKIFIDKNKANDLIGVLLNPNIKDKKNRQKELLKLFNLDGLEKDFVDDKISFFCKMAVGSKCTLTVDGEEIKDIVIDNKIDEKLSEYESKLGSLFGLLKIAKECHDFAFIKKLLKDSKYLSDAYVKIYEKHNKDLKDLKEIIKEIDNNKDGGSHDLYKKVFKDKNTYDDKKKTGNYVSFVKTNEDSKSIKDNVSGFDTFIKNILNENLKYIQNEKNLHRAKEILTSCENNEFMLKISNVSTSEIPHQLHEFELRKILENAKMYYLFIDDDFINRVLRIFKFRVPYYYGPLNSNNWGNVVKKEGYENTKVSFDNYEEIIDVEKTKTKFINSRLNKCQYLLTEPVLPRYSIYYVVYDLLDKLNTITYNNVHLTIKEKEYAISVIVNSNNQIGIKTLNKKLKEYFNGSSRYKVDDISGIDKDYKFNGFPINVFLDVFNGDKNKLEENIKDVEEIIRILTAYKDSRIDAMEIIEERFSYLSKEQINKIKKSPMFKGYGSFSSKLLTQIKFNNKSVLDLLIETNKNFNQIMFDSEFDFESKIKEINKEAFGEKTKTELVNEIIDDMPSKMKRPVIQTLAIIKDIIRANKKSLDVISIETTRQDLMPEKKKTTKSRYKKIQEFVSKIIKEKDLTEDIKKAAILTKDELDKHKDDTDFENKLKGKHLYLYFMQLGIDMYTGEHIDINDVFDSTQYDIDHIVPQSKIKDDSLDNTVLVKREINQKVKKDIYPVPESIRTKMLSIWEFMLKKELISKSKYSRLIRSKPLTEDELNDFVNAQLKVVDYANLRIRDILKIMYPNTEIIFSKAQYPSEIRHNYGFYKIRDLNDCHHAYDAYLNIVCGILLNERFTKNYRLMSIYDKNLKLNEEEKTHNFLNYLEYKIDNLNLYDTLKEYYLSTDMLFTYKLSYEEDAFYKQTTFKKGQDSLIPIHTNGAMKDTSKYGGYKSRSTKYFYVGSKTNKKGNIEKVLVTVDSLTYALCCEKGVLNENKLLEKLKGCNSDIDIDLSKKVINYQKVIINNREYLLRSNNELQVSLSPLFALSYKIDDLYFIKCIFEDKYSINDNLLTYGKSKELTTSLTKEQLICKIKNIINDFKEEEFLSISIIINCYKKLKDIIESRDNKDISIETIIIGFKKYMETLKRAPNPKIVAKYKPYKTGVLQIVDYFVEESPSGLYKRYIKV

SEQ ID NO: 6072 - protein, 1149 aa, unidentified
  REGION 1..1149: note = Description of Unknown: Cas Enzyme sequence
MTQNILGLDIGTNSIGAALVRVGDNGEKSLLSPLVSRIIPMGDDEIGKFNTGNLESSAAERRKFRMLRRRIARFQLRRERLLRVLNALGFLPKHFADAIDFESRKGKFKPGVGEPKLAWNTAAGTSAEAFLFEKDFEEMCAEFRAAGTVSGKNISRDWTLYFLRKKALTEAISPQALAWILLSFNAKRGYNAERGDDDVEDESKREYFVTARVVSVEREDTDAKGNTWFKLIFDAKDSAGTPLFKKKTNLADPEKMIGSEFTFVATEKNEKTTLREVKEDDWKLRKTRNESRIGEKTVGEFIYESLLQNPDARIVREIATIDREFYRREAKAILEKQAEFIPELRSRELFEKCVRELYSSNNAHATLRLADKAGIIGFILNDVLFYQRPLKSKKGEIDACTLEKCRFKNKNGELKIYGRRCTSRSNPLFAEFRIRQFIENLRVFDEDAFDSDITAELFPTAADKERIFAWLNGRESVKQTQFLKDFCGFGKKGARYGKEDLASGRVHWNYLDDDKVYPCNPVRAEMQKRFRKCGMDTPELSAKIVRNGNATAETLEHALWHVLYSVNDREELRKALSKFASLRIVCGNDETDIVPEESRDAFIAEFLKVKRLESLNLVGSGYASYSERALRKLLPLMRGGNAWRADAIDAATRAKIDAFVAGTQSIDENVLVRAKKNGFDLDTNKSVEKFSGLPHWLASYIVYGRHSEASAEALGTWEKPEDITHFLKEEFRHNSLRNPIVEKVVLETLRVVRDVWKAAGTIDEIHVELGREIRQPAEKRRRTTERILENENENLRIRKTLQQLADSGEARGLRPGSPAHQEKYKLWEEGNKVSPYTGNGIALSELFTEKYEIEHIIPKAQYFDDSLQNKVICEAELNAAGADGQGKGNELAMNFIVRANGGKVRGCKVLSPDEYRTLVGRIYSGKKKEMLLATEIPEKFTNSQLAGTQYITKYVRALLSRIVRKKDEDGKVLEDSAIASAVISCTGTMTDRLKKDWGLNDVWNKLTLPRFEKMQKLTGKEYVVKNAQGKDTGTVPLSEMSGFKKKRIDHRHHAMDAVVIACCTREHVQMMSNESAGTRGNIRFGDLRRKLKENGGNGDFKKPWETFTQDVAVALEAMIPTFKKNVRAMSKGRNTYEKIDAATGKKETK

SEQ ID NO: 6073 - protein, 1221 aa, unidentified
  REGION 1..1221: note = Description of Unknown: Cas Enzyme sequence
MYQTLGLDLGTNSLGWAILYDPPAKIDDTSAKIVDKGVLIFPEGMDENKSSLETPAAERRAKRMARRMKFRRKMRKWMLLKLLIDNGMCPLKEEELEEWKKHGKYPVENKLFIHWLKATEDSNPYCDRAAAAEGKVEKDVLGRALYHICQRRGFKSSRKDAVPEEENSKKSKKEDKSETGKVKSGIKDLSNAIEANGAKTLGQYFYQCLEKNKDNPAKKRIRGQYTGRIEHYEKEFRVIMDAQGIPEGSKLRKDLHKAIFFQRPLRSQSYLVGKCPLEPRQPRAQIGHPLVEEFRMWSFVNNLSFDDGAKKRVELTQEDRVKICEAFNKASPTFKFKSISDLFKKDPRFKEKQYTFHYYRDKDSVPSCSVRYKIATGFGGVPYDEQKVFDALTFFDDDDKLVAWLLKHHAGLSEENARAIAKIHPPEGNAKYSLKAIKRILPFLREGHKLSDARLLAGLSKCITDFEARKEEIVNLLNVEKAEYQNYKKDYFKQHNYGEKLQTLSERYKEVFQSRKMEITSEDWKKWFLNDDSPYSEGKEILPKVELGMIRNPTCQRSMTMLRRLVNYLRKQGKIDADTTIRIELARTVNDFATRKAWKEWQDDRKKLRKEAKTEVEKYVNPATDDAIERYLLWEEQGGECLYTGRKIPLAELFTGGAWDIEHTIPRSRSGDDSLANKTICEAKYNRFTKQGKIPTECANWDEITVRLDKWRDERNRLEQDYKAQNAAAKAEQDPAKKSRKRTEAKKTLLELNYWRDKLKRFEVKTEELEDPVKGLSGFKKRQLVDTGLMSKHAVKLLKSVYHRVETVNGKATSFARKAWGIQEDEEKDRSDHTHHAKDAMVIAALDSRRFQLICEVCKDDGKTEDDKPIGGFPPPWMGFAKDVNDACATICVKHLFRQTTTKQSSKRTALAKAHAPKGNPTGKPIKYVLAKGDTVRGALHKETFYGCIKQKDAETGEEETIYVVRKPLVGATRDAIKKLIKDIVDPEVKARVQEGYDKLVSGKKNVAEEGDFTMASGVPIRRVRIKASVSNPLEVRTQPTLSKKDYKNKVYATVAEGSNFRMAIFRNAKGKLEVEVENSFSWAQNHKKPDYMPRDKQPGFVGYVKPGVMALTYPEGNPEELRKLSPQELCKRLYKIVKIAGNGQMTLRFHIEARASTVLEKALEEAGENKKGSSKINLENPHLLLRLSPGTYLSQVLFEGVHFRMAMDGSIVFLDKAEQA

SEQ ID NO: 6074 - protein, 1102 aa, unidentified
  REGION 1..1102: note = Description of Unknown: Cas Enzyme sequence
MNYRLGLDMGATSIGWAIYDIEQETLLDTGVRIFDDGREDKSKDSLCVKRRNERGARRLTNRRHIKTQELLNTLMNMGLFPQEHNECESLKNINPYKLRKEALDGKLSPYELGRAVMQLSKRKGFKSNRKDNREEGGKLKKGFEELKDTMQNQSARTYGEFLYNRLQQYPAKPIRLKNTFDNSGKFIGGLFPFREIYEEEFNLIWNKQKEYYPKILTDENKEKLKNIIFFQRPLKETEAGECQFEKGEKRIPRAHPLFQEFRIRQNVMNLSFSAEDETDYNLLNETKENKAEELIGLLMNPREIKPNKQGIVAYSNIKKVLRLDPKGVFNFERQRNKNADLEKGLLVNTTQNAINNSKFFAPYWNSFSDKQKGRLINVISRPHNYITFPKTRISIEEETNIITEYLKNNFGLSQEAADELWSELDLENDFGSLSEKAIKKLLPFMRQGIPYHAACKEAGYDSKEYTHIDKLPYYGEILEQSCLGKKSDPKCVEEEFGKINNATVHVALNQIRHLVNELIDRYGKPYDIAVEYARDLSASAKERKSMTDTRDKNERENQQILKELQEKIENRPYSKNDIQKYKIWKKLSLYDKNPLIRECPFSGKPIPLSELLNGQKFQIEHLIPFSRSLDDSMDNKVIATVEANRYKGNRTPFEAFGQSKDGYNWVEIQHRAKKLGVEQQWRFAANAMEKFAKIEAPIARSLNDTRYMTRLLQDYLQPIVKDSGKQRVQAVAGQLTSLVRKAWGLNIYKEKGDMDKYREFHNHHAIDAIVISAVNRSQIKDTVGILARVRDSIREEFENKLHLLNEDKVPDEEKREIKKEIRDAFTKREIAIVKKYFNLPENFSIPMVLQKVADINISHKPSLKNIKQKNSTIGQLHEDRAYGLKEFVDDNGLSAIFASRKDGKNESTPKEITQYIPMFRNKEDKTAYYDAFKNWFVLNGKAASMEAKSKEEKTIKQNIAKQENDAIQALRQTALKAFKWFVGGNNFCAEIYEINPQNKIEGLATKDRGKWKTEIVSNYNATVRNSRGEDIAYWRYKYPNARKVMTLRRNDMVMATFTREQAYGDGFPKGIKEYVCEKFQQKPNCQELDVLFRVKKMGGGSV

SEQ ID NO: 6075 - protein, 1321 aa, unidentified
  REGION 1..1321: note = Description of Unknown: Cas Enzyme sequence
MKGTEDYYLGLDIGTNSLGWAVTDTDYNILTIHHKAAWGIHLFDEGKTAEERRLHRCARRRLNRRKQRVTLLRELFSEEVCKVDPSFFERLDSSSLFVEDRKEKQKNSLFNDPDFTDDDYHRRFPTIYHLRKHLMETDEKPDIRLVYLACHHIVKYRGHFLFGEMEADKVPDFSDAVDSLVESLAVVDPTIIITDSQKLSEVLSDRNLTVNDKKRAVSELLTGDSAMSKEACALLSGGKVTLSKLFDDESYKDLKICFKDASVEDAMSALEDELDSDLFHILRVSKKIYDWSLLTGLLSGFSSISDSKMHSYEQHQSDLVLLKKAVKKYAPEKYREIFKDKAMKGNYCSYIGKCSKGKPKDTCNQEEFCKYVNSILSKTGAKDDGDFAGLMSRLVAGTLMPKQTSIENGVLPYSVHRTELKAILENASRFYPFLSEVDDDGFSVTEKVCMIQCFRIPYYVGPLGKGSKNAWAVRRSDRRITPWEFDKIVDLDSSAEGFMDNLTNYCTYMVGEKVLPKDSILYSKFQLYNELNNLRIDGERLPKSIKPVMVEELFGKSKTRVTKKRILTFLISRGVIDKEGEHEITGMAGDAIQATLKSKQMLEGAIHDKAADERLCEDIIRTITVFGDESRIRKKLDADHPGKFTEQELKALSKLRFEGWGRLSEKLLTGLYDTCPETGTEMNIIQMLEATDSNFMEIYNKFSFHEQVDKHNRSMTTDDEVTYQTLESMYMSPAVRRATWRTISVVRDVMDCIGYEPKKVFIETTRDVCGANEGKRTESRKNALIQLYKACKEDPQWISDLESREEADLKSRNVYLYYTQLGRCMYCGRPIDFDELNRTDSVDRDHIYPQSKTKDDSVHSNMVLACKVCNGKKGNSYPISFDIQQKMRPMWDMLLHKKYITPEKHARLVRTDNLTEEELNKFISRQLVETSQSVKATIEVLKRLFSDDADLVYVRGGLVSEFRQEYGFVKCRSVNDYHHAKDAYLNIVVGNVYDTKFTKNPLNIIKCGEPYNIGKMYERNVERNGVVAWASGESGTISTVRKNMRRDNILFTRYQYIDKGAIFNDTLEKANDSLYNRKRDLPASKYGGFNNAKGACYSLIEYETKGKCVRSVEVVYLHNIKLLNDTACLEAYFSERIGVEVKVVIPVIRVNALFEWGGFRMHIAGRTGDRIYFDSAVQLCLPDEQYLYCKELYKYGDDRKNKIIRGPSYYRITKDSNILLYNVLLKKVESPKFSLLYSALLTNATNLQSSFETADPLAQAVVLNGMLASLHCNSETASFKPIGGGDVARKKLSKVLPSGVPIFIVNQSPSGLRENRTRVDV

SEQ ID NO: 6076 - protein, 1305 aa, unidentified
  REGION 1..1305: note = Description of Unknown: Cas Enzyme sequence
MQNNQNMKKGMFPYVMLLVIGLAIMFLYNMTNDMNKELTYNEFNKALNKNNIKEVVITPSTQAYTYQLTGTLRDAKKGETFSVKTPLSDTVIKQIVKASEKKDFKIVSKSDPTSSTWFMFLTNILPYLVLIGVAFWFFTKQLGGQKGSMDFGRSRAKLNPDKGKVTFKDVAGLPEEKEELQELIDFLKNPKKFTKLGARIPKGVLLVGPPGTGKTLLAKAVAGEANAPFYFISGSDFVELYVGIGASRVRDMFKQAKQNAPCLIFIDEIDAVGRQRGTGIGGGHDEREQTLNQLLTEMDGFGANEGIIIIAATNRPDVLDPALLRPGRFDRQVTVALPEQKAREEILKVHARGKVLSKNVHLDNIAKRTVGFSGADLENLLNEAALLAVRREKNAITMSEIDEAIDRVIMGPAKVTKKYTPAEKKLVAYHEAGHAVLGIKLDNANDVQKVTIIPRGEAGGYNLMLPKEEKYTATKTELLEQIMGLLGGRVAEEVVFGEITTGAHNDFSKATKIARSMVTEYGMSSLGPVQLETPEGSSFLGRDYNKSRNFSDIVAHEIDEEIRKIVGECYKKATEILKENKDLVKLIADALMERETLTKEQIEYLVEHKELPKDVSLEDYTLEELKELAKKKDIKGYSKLNKEELIDLLRVNDVEAEEQVTGIDITINNALTTYGKFKVIFGDDMSKDSVQKMVEDIVFWCTVYGDSKKFLKDRIEEKYGEKLTKEQIKRIVGFKFKDWGNLSKNFLELSGADVSTGESVSIIRALWNNNLNLMELINSRLYNYKERLAEYQNTMIKTLSDIEAEDLDEYYFSAPVKRMIWQTILIIKELVKALECEPDRIFVEMTRRPDEHKMRTASRRKKIEELYKKVKDEDVDWMRVIAHADETGNIRSKKMYLYLTQKGRCMYTGKHIELSDLFNNNLYDIDHIYPRHFVKDDNIDNNLVLVCKEENAHKKDTYPLEPGIHELQENMWSELRRSGFITEEKYNRLIGRNPFTDEQKAGFIARQLVETSQGTKGAANILQQLLPESKIVYAKASNVSEFRNMRDIPKSRLINEFHHAHDAYLNIVVGNVYYVKFTQNPLNFIKNDYDRDKVRNNYNLSRMFDWDIKRNGEVAWIAQKEGGEAGTIVTVKKMLERNTPLMTRYSFEGKGGLANETLYSAEKAKEEGYIPLKSSDGKLQDVTKYGGFTSVTGAYFFLVEHSEKKKRIRTIESVPLYLAQKIEHDPSELEKYCEQILGLIDFDIRVRKIKIGSLINRNGYFFYLTGKTGKQLIVRNAVNMCLKKEWIKYISKLEKAVDKNIVDEI

SEQ ID NO: 6077 - protein, 1235 aa, unidentified
  REGION 1..1235: note = Description of Unknown: Cas Enzyme sequence
MKIYYIGLDIGTDSVGWAVVDENYNIIKFHGKAMWGVHLFDESSTAEERRIFRAARRRLVRRKERLKLLEMLFNEEISKIDPAFFQKLRESNLYPEDKTVKTPYSIFSDDGYTDVDYQKQYPTIYHLRKELLESKEKHDVRLVFLALHHIIKYRGHFLFDSLDVNGIKDFNAVFDIMVNYINDNYLDDEDEKLVCSDTERLSEVLKDKRLSKTAKTAEIAALFGVAKKEKQLYAMLSLLSGTNVSLSVLFGDETLKDAEKPKVSFDGNFADDEEKYESILGERFELISVIKAVYDWSLLADIMDNEQYISQAKAKIYDEHKTDLALLKKYVKTCCPSLYNEIFRYYKKSLDNYTAYSGYSKIGGKKKAIEQEKSSKSKKDVNDQCTQQKFCNYLKTVLPQSDNAEYSDMFERIKLGKFMPKQTTSDNSVIPMQLQLAELKKILENAEAYLPFLKVSDDTGLTVSEKIIKIFEYRIPYYVGPLNNHTDRAWLVRSSEKIYPWNFEKVIDTEKTAEKFIEKLTSKCTYLPKCDVIPKCSVLYSKFCVLNELNNLKIDTEPVSVELKQRIYNDLFLKQNKVKGTTLKKYLKSVLHKDVEITGIDGDFKGSMKSYLDLCRYNITVDDMEEIIKAITIFGDDKKLLRKRLENQFGAKLGKEDLKKICSLKYTGWSRLSKEFLTEIESAYMNTEKENAGEVMNIITAMWVTNDNLMQLLYSEDFDFRDKIAQYNKGGKEKTLKEAVSELYVSPKVKRPIYRAMLIVKEIVKIMGCDPKKIFVEVAKGPTEDQRNNRTKSRKDALVELYKSCKMQSSDLYKSLLEKDDEKLRSDKLYLYYTQMGKCMYTGERIDLDLLMSDNSRYDIDHIYPQSKIKDDSLTNRVLVNKTQNAGKTDIYPIAKDIRDKMQPMWKMLLDKKFIPKEKYFRLTRNSRLTDDELSAFISRQIVETRQSTKAVAKLLEDMFDKEKTEVVYVKASLASEFRHDNDMLKCREVNDFHHAKDAYLNVVVGNVYNVKFTHNKKNFIAGLQDDGKGTISLNAMYYFDTPGAWKARGENNSFDIVKKTMNKNNILYTRYAYKKGGKFFNIQPVKGKEAEAPLKIDSPRSDIKKYGGYKKVTACYFSFVQYTDEKGKEIRAFIPIDLYREKEYKADPVKYLEECKQISNAKIIIPCVKLDSCISIDGFRMHISSKSNKGSTIVYKPGMQLIISYKYEKYVRNISKYLTKYKNRPINAFDGLDK

SEQ ID NO: 6078 - protein, 977 aa, unidentified
  REGION 1..977: note = Description of Unknown: Cas Enzyme sequence
QKHRVGKCPLEKRHSRCLISHPLFERYRMLSFINSIKVKTTGDKELRFLTDAERRRIETVFMVSAPSFKVEKIFHKLFPETGKKNYEGPWPEINYRLDHTVASVSVTHQLSRILKCDDLFAWRHSYVTRHGKEAVMDIQALFDGLYYFSHIYDDDDKAALKFASERVGLSEDAATALIKIKIPDGYARYSLCAIRKIMPFLEMGYVERHAVFLAKLPDIMGECFESRKGELLHDFQQCVNDYVWEKENLSRREHVQGRLLSLTERLRNMLEEKWKIMPPEFEKLYSYQENSNYQDCSKEGILPRIELGMIYNPVVHRSLTVLRHLVNHLRRCGKIDADTEIHVELTREVNDKSHRLAYLEWQKKNEGERVQAVKAFEEYGISNPTETQILRWSLWEEQERRCLYTGRKIEPEEIFSPTADSVDIEHTIPRSRGGDNSRENLTLCDSQFNRHGKVGKLPSECDNYRQPNGILENLESCILPKLEEAESAYSKASAAARKATGIQRAKARQRMLYQRFALDYWRTKVKTFKLAADEINEDFTLHQLSATGVMTRHALQFLKSVYSRVFANSGRITKFARESWEVQNQNEAKDRSDHIHHAVDAIVVAALNRKTLARISAAYHECEELMQGRGALKIAYPWESFPEDVHNAVNQILVRHIVQHNEMKQTKRNGVFLTNPVKLPDGRVIRRVPAAGDTVRGALHNQTWYGCIRQNGAEKFVVRKPFDSKEFKKLEDLEKIVDPGVKNALLEQIRNSGMEFKTAMQQEFRMKTRAGKFDGPVIRRVRIFCSMQEPLKIKEQTYCSEKAYKNYYYAETAKGSNFMVALYRKPDIPRTEKTYEYRLISLWNWAKEHRQPGFVPYKQREKNLDFIGFIAPGTMALFYEKSPEELHGMPKSELQKRLYKITEFKKDMRLSLRWHREAREKKKAEEAMKVMKMAPSVVSYDTPGLLLLISPKSYQNHLLYDGIDFEFTADGEIIFRE

SEQ ID NO: 6079 - protein, 1143 aa, unidentified
  REGION 1..1143: note = Description of Unknown: Cas Enzyme sequence
MKKYQLQRPSNQINNLETATANWREKDFYRTAVVLGIDIGFEGIGICLRRGTKILHAATWVIPWAKPLAERRAKRAWRHCRLNLKVRMLRLKRLYERHGLPWFEERDPMLLHTDPFDLRHKAITRGLDSPEELALAIRHVVAHRGHHYNYYNDEGEYPWGEDHDFKAACGAIQAQYLTGEEADKFSEDCVEFGWADSKIQGFRKLVESRRATGSEILDHLSIYCSQPRRNLRRSPKGTAYPRSLVWRHLEEIITKNSRFLHDVQGFLKELSIHPETNKKEAIFFYHRKTPAEMREHFQKKTKRCSFSPWIGIGGDVPCDTREKIEIRRFLLLEFLSTRRVEVAGSNTTRVNLSPTVVEKLLTWQKEFEARKSSKGSGWREGKKIFEDSMKEAGLWPLAKKSQFNEDFLERLQDILCPTPANRKKKSNLSCRAAEHLFKVATADGYSPASVVRLLGDYFKKRREAVLDPSGRYPQVDFLLGAVAKRDRTPTNRHPNRKQKGQAASVGKLQKLFGRYTHELNGRLTPDFCIIEVISDPPRTEKQKKEIQKEIQKRREEHQKRLESLDPHARASRTARMRIKLFEQQRGMSPFTGISLGNDPLADGLQLCHLYPDSRGGLFMEDNLVLAPRSENTRMENRTPKEAAQDLAGSWEKMVSFTGDMKWSHLKREIFGWEGESVPDFGNTTRMSQLARQLYVAVGEWMGLRDIDDPTLRENRRQERIGTPSGFITSVARAAWNMPRKDRNDLVHHAVDAITLAWLAPGAGMNSVRCGGILFNEHRPESGKSRLSVLPLGPNPSDVEAVTSDTAEACPVVLFRTSSIKTQMHDTTLLGMRADGRLASHIPFGSQKEELDPVSVKKLLLDAGIPPARMPSKSQVESWLADSESSSIRLGDGQPIRRRLKPAKNDRAFFPGLGYVGRSDGGAKWVGLRVVQEKYKGVELWRNYDFKKSRWDFSLRRIPESRAMESLLRMAFSWFHAMEGKFDSTQASLSKRLEKTLRSLKLHPCRWQRISRGTIAAKTLQELVVIGFPIDGVGPRPWEEVEKAIFGDSLPVTARPVLDKKARPTVVRKGQLFRIPVTSNGKLADAGRSFELHWFEVSAILSDKRVEFKAVRRSDWKKIPLSRGNLFRLFGLSEQDDPPLDSPE

SEQ ID NO: 6080 - protein, 1049 aa, unidentified
  REGION 1..1049: note = Description of Unknown: Cas Enzyme sequence
MKTTGLSRIAEDTVLGLDLGVKSVGWCLLRVDGGHPTGIIDMGVRIFDAGMDGDVSTGQAESRAVARRQARQQRRMTERRARRKRNVLRVLQRAGLLPAGTPDELIPPLDQVLLKRHHGAAGAGAPALLAHVLPYWLRARALTQPLAPDELGRAFYHLAQRRGYLSNRRATGDKKDKGQVADGIAELTEEMERAGARTLGEYFAGLDPQQERIRRRWTSRPMFLDEFEQIWTAQAPHHPTVLTDALKARLHRAMFFQRPLRSMRHLVGPCPHEPKRKRCPIGLPIAQRFRLLQMVNNCEVVTDAGELRAFTDDERAALVEELERRGDRTFTQVKRLLKPFGFTTRYTFNFESGGEKRFVGNRTHAKLAAIFGDRWDSLDGATRAQLVEDVRSIVKPGTLERRGRDVYALDADAAGTLAAVELEDGYANLSRRAMEKLVPLMETGMRYPTAAKEVYGEFDPNTAVHDRLPPVGSMADLRNPVVSRVLSELRKVVNAVIVRHGKPGFIRIELARDLRRNIRQRQEATARNRRQEAVREKAAKRIAAEVGIQNPRRDDILKVLLADECAWKCPYTGRSISMGTLFGANPRFDIEHIIPFSRSLDDSFFNKTLCYHEENRQRKGNRTPYEAYAGDAGRWAEILDRVGRFTGDAATEKLRRFQMDELPAMEDFISTQLNDTRQASKLAMRFLATLYGGLWDASGTRRIQASRGGVTAYIREMFGLNGILNDGDVKSRDDHRHHAVDAVTIGLTTPRMIQLLSETAVRNVERGDVRARFRQLAEPWEGFLPELREAVDGIIVSHRVNHGLNGPLHLETNFAAVPDGDGGTTYRVRKPLARLSARDLKRIVDPAVAQAVRAKLDELGVGPDKAFADEANLPYLLRSDGRRVPIRRARVDVSDNPYPIGRKGRQRHVVSASNHHMEIVAVLDADGSETKWEGHLVSRLEAMRRKRQGEAVVRRNHGKDRRFKFSIAPGDTMKLGKPQGRPELLLVRSASQEQNGSTRLEFSAIRDARKKADIKKTKQWFIITPNALRRLDAKKVTVTPLGEPFYAND

SEQ ID NO: 6081 - protein, 1336 aa, unidentified
  REGION 1..1336: note = Description of Unknown: Cas Enzyme sequence
MAKILGLDPGTNSIGWAVVEKEDGEYSLDKGVRIFQEGVKIEKGIESSKAAERTEHRSARRLKYRRKLRKIETLKVLSEYGYCPQLTNEELNLWRYKKIYPQNISFCNWWHTDEDSEKHPYFFRNLAITQQLDLNKEEDKHKLGRAFYHMAQRRGFLSNRLDSTPENETGKVKSGIKELQEKKGDRTLGQYFYEDCYLKGEKIRNQYTSREDDYLDEFKRICAFQNIPEELQQKLYKAIFYQRPLKSQKGLIGKCVFEPTKPRCAVSRPEFEEYRMLCFINNIKIKTPDDEKLRPLNAEERSRIVPRFFLQREHFDFEDLAKQLAPKKQYKYYKDRNKNPEDHLLNYSMKATVSGCPVSARLKDLFGADFIDDDYNYVKDSDNRTPKLISDAWHALNTFDSDKKLKEYAQKHFDFNEDKMTLFSEKIRLKQDFASLSLKAINKILPYLREGLIYSHAVFLANMEETVPAHVWKNEENRKIIRTAIKEIIENHSDNTTIVNMVNGFITNARRENEVWSEEAKQLYFNDLDRRIKTAFGAKRFENFSEYKKSNLINKAQQLITEFMPKNLGKGEHVKVERLDEAVLTFLADNFGKENLNAKKLYHPSAIETYKPAKRGKDGRLYLGSPMTSSVRNPMAMRALHQLRLVINELIKTGLIDTNTKINIEMSRGLLNANERTGLKRWQDDREKKRKEYIERIKEHFSPDYQPSEDEVLKYQLWEEQRRICLYTGKPINIEDFLGSDPKFDIEHTIPRSQSYDNSQENKTLCENEFNRKIKRNRIPYELSNHEEILVRIEHWKEEIEKLEKEIQMAVRQSKGAADKDQKDKAIQKRHQLTYECSYWQNKYKRFAMEEVPEGFKNSQMVDIGIITKYSRLYLKTVFPKVYTVKGNTVADFRKMWGLQDNYTKKARVNHVHHCIDAITIACMDKSNYETLAKFYHDSEDAFERGHEAKPEVEKPWATFTEDVKEIEKEILVSHHTPDVLPKQSKMKLRKRGKIQYKKNGEPIYLKGDSVRGSLHKDTFYGAIEREVLNKNGEAEKQIKYVVRKSLDGLEDSAIKNIVDDRVREIVSNAKIQEKELQKQIDDLLKQRKKAEEDEELDIDNKIAVLKQQIVELYCLPNKNGASVPIKKVRIYQPMVTNPLPGFKKHRDLSGKKYKQQYNVANDGNYAMAVYEGVDRNENLKRSIVIVNNFGAGKFFNGKLEESPFPDKHPKTGLYLKYLLKTGTLVMFWEKSPEELRSKKVDKVKRLYKVTKMDKDGRITFKFHQEARNDENLKLDYEKEYETKPPKTLTNGESFVDFVKPFPKVRLSPPNFNFIVEDYDFKISTTGEIKWLNENL

SEQ ID NO: 6082 - protein, 1150 aa, unidentified
  REGION 1..1150: note = Description of Unknown: Cas Enzyme sequence
LEAQCVKIEANDRAYATTIARDIQKRQILGLDLGTNSIGWAIVEEVVGVGGVGVEVNDRSRTTQNYTKILDGGVRIFKGSVRNAETKMTSECATRRNFRQARRQRTRRTRRKLRVALSLQNAGLLPNIIILKNEKEIQVRESEKSRHEQFNLLDAKIRKDWLEKIDPKNASTLDQLPYFLRAKALDEPLTPYELGRALYHLHQHRGYNSNAKTENETEKDVGVVNTGITSLEKEIENSSSRTLGEYFSKLNPHETRIRSRWTSRKMHIDEYNYIMDAQTQYHPNILTPEFREKLFKDIFFQRPLRSQRKLIGNCTLEPSSKRSPKASLEFQEFRLLQKINDLKIINPNFEIEELTQTQREIILKLSEEKENLTFKFLRSKLNLGKGYSFNLEKNTPDSEIKGNVTSARLYKIFGERWNTFTQEEKDQIIEDVRCIRSRDSLKKRGINAWNLDEDTAANFSKVMLEADYAQFSKKAIKKLLPLMRQGMSYMAAEIEIYGEKNNNNNIACNLLPTLFSEDSPINTNNRGVLRVLSETRKIVNGIISKYGKPDLIRIETMRDLKLSAKKRVQITIKNNSRKKEREIAIEHIKSACGIMHPSNNLIEKYLLAKECRWICPYTGLSISMSNLFGSSPMFDVEHIIPYSRCLDNSFLNKTLCLHEENRNVKINNTPYEAYNSNPEKWNMIISNVKKFTSDSYVKNEKLKRFMVKNINEYTETFLNRQKTETSYITTVIFDYLSVLYGGCVDKNGVVRLEKTNGRITDQLRKSWHIHNILAKLEEANNCSCKTRDDHRHHMIDAIVIALTDKNTINELKKANDRPPDDAGKINTIYGTPPWDEFQKDVIDIVNRTTVSHRTGTRIRGALHADTYYSKPRNDPNYKDGKNYSHIRKNLSSLTEKNIKDIVDPAIRKVVKEKLVVLGKPPKIAFKDAKNHPIWYTKDGVEIRIHRVRIKKKNTTIEIGNSNHKRYLENEKNHHLEIFECLDGNRRGKWGSKIVNQLEAARRNLKNIPIIQKNHDLSIEDANNINKKYRYTKSKFVMSISTGDILELDNEVENQAGLGKKEKLEVNARPKKRELYLVRGIYKDKKLETMIIISFSKLNDSRKDKDIKNSKDWFRVSSIDKFQSFNPKKTYISPLGDVKGGSEWVGGVRGK

SEQ ID NO: 6083 - protein, 904 aa, unidentified
  REGION 1..904: note = Description of Unknown: Cas Enzyme sequence
MAKILGLDLGTNSIGWALIEVNEQGEFLRLIDCGARIFPKGVNVDQQNKESSKNKIRRDARRVRRNNFRYKKRRQKLLIELSKMGIKPDVYFYTNERKSRRGFKKSDLWNHTLELFRLRKRALNEKISLPELGRVFLHLNSHRGFKSNKKEEAFVENNEETKKEKGAVDKRINALKRRMQELNCDTLGEYYFYLIEQNQNSHNVNEPKIESTEDFTDAIRGEGAYTLREMFEHEFNRIWTKQKEFYPKILTDENKEIIGDDCIFFQRKLRSVQHLRNRCTLEYKAITVYKFNKEKAKEQIEAIRFKANDEQDFQNFSDRKIEELYVFLKKNNFQITIGDLTFVLGLYKLISKERRKKDKFRFIFQNLPKEKQIRKKYLPATPISSFEYQEYRIWEQLNRLRYTNSDSTFAELNAEQKQILADALAFKEKILFKGKKEKTVSEILGFPKETEYNIDKDYLIGNKTQTRLINAVGKDFWEKLSLKEKRTLWHNIQFAEDKEWLKGNRNFIEKTQRANKRRNHYHKTNYSVRQEWLATITRLKLSEKQIENYADVTFEPDYAPYSLKAINKLLERMKQGSDVTTASFEVYGKYASEIQSKSFVLEDKVPQLPGNSLKNPIVERAVVEAIGIINAVIDKYDKPDKVRIEMGRELKMPKIAREERNLKNKNINIRREFYAKFLNKHKDIERNNYEASSPDIKKFEMFLELNYSSKAFERIKKNISAKEFRDFLGANIPKNKEKYLLWLECDRIDPYEGKTIGLAQLFTSDVEIEHIIPYSRCMDNSMVNKTLSFKKFNALKGDKIPLEYFDSDKSKLHEFKQRIKHFPDAKKERFLMKREDLGGFLNSQRVNNAYIAKQIREHLLKTFRTNDIEMTNGQLTEIVRRTLALDQILNPAVRADGYNIRGKA

SEQ ID NO: 6084 - protein, 1153 aa, unidentified
  REGION 1..1153: note = Description of Unknown: Cas Enzyme sequence
MTSKQDNLGALTFGLDIGIASVGWAVLGENRIIDLGVRCFDKAETAKEGESLNLARRTARLLRRRLRRRAWRLTKLARLLKREGLIADANLFKLKIEKNTPVPKSAWQLRVDALDRPLSAEEWARVIYHLCKHRGFHWISRAEEKAAESDSKSEGGKVKQGLAGTKRLMAEKGYRTAAEMVITEFFTQRVDEDGKPALTKKTSEPILDGAARNKQGDYSKALSRILLGDELKKLFEHQRQLGNPFATEKLEAAILGNGDRKSGLFWAQNPALAGNDLLKMLGHCTFEKSEYRAPKASFTAERHVWLTRLNNLRIVVDGTTRPLNEVERRIALMPYQQAGDFTYKQLRTALTKAGYLPGSFRYTGLSYASGQKTDEKTKDPESATLVKLPAWQELRKTLEKKELASEWQKISTDALEGRPQLLDDIAWVLSVYKDDDEVKAELSKLNLPNPEKMIDALLDIRFDKFSNLSLKALRQIVPLMEQGQRYDEAVANIPEYGHHSQLHKVGAGVHKYLPPFYKERDKTGRMVFNDDMDIPRNPVVLRALNQARKVVNALIKEYGSPHDVHIEMARDLSRPLDERRDIEKLQKEFRDNNEKGKAQFAQDFNIMGAVKGKEFEKYQLYREQQGKCAYSIEPIDIHRLFEQGYVEIDHALPRSRSFDYSKNNKVLVHIKENQNKGNRTPFEYLDGKDNSERWRQFVAFVEGNKAYRLAKCSRLLRKDFGEKEAKEFRERNLNDTRYICKFFKNYVEQYLQLHEDSEAKRCVVLSGQMTSFLRARWGLVKVRSDSDRHHALDAAVVAACSHGMVKRLSDYSRCKELKQVREGFVDVTTGEIPNPAMFDQLEQHFPKPWENFRNELEARLKIDDIALLREEMQRLGTYSEEALEATRPLFVSRAPQRRNSGAAHKDTIYAQAPSSDKPNRVTQKVALTNLTLSDLGKIDDSDTCKLIDPHRNKKLYDAIRMRLEQHGGKGDKAFPASNPLRKPDHEGNPSGPIVRGVTMVIDKLSGIPIRGGIAKNDSMVRVDIFTKANKFHLVPVYVHHTVAKTLPNRAVVAFKDEDEWTLIDDSFQFCFSMYPNDLLRVKLKNASHLGYYAGCNRSTGAINLWSHDRNHLVGKDGMIESIGLKTALSIEKFNVDVLGNLFSAPPEKRRDLA

SEQ ID NO: 6085 - protein, 1414 aa, unidentified
  REGION 1..1414: note = Description of Unknown: Cas Enzyme sequence
KRVKMKKLSISIDMGAKNNGLFIAKTEGETILNKKAGCIIIDGNSIKFSKKSRRENRHKDRNYKRKRLARRLLCEIINFSKYNKEEQESIMGLMKNRGYTFLNSTTEFEKLETETICFVKSYLPRLESCTTKNDFEEFFTNNFEDKKELVEALEKYIDDINAISMDLDNFIGKQKFLSDLQSLESRSITKFNSFSYIKKILLKYGYRSLGKNQEEIISSLKKDSFDSSKIDFKGEIAYLEKLEFNKESKDNNKIITADLKSLRDFFIGVRTEIDTGSKPRKKYIKEIRHEIENLDFIKDNDKEKYLNIIANISNLQLRVLRKFFNFNSQKNDRFKILKKYFISHHYNLEIEKDRKKELFKCLDSHNNLLDFLQNTPPELTIPPYEDMNNRDTYKCNSMLIKPELIDEDLKKAIDTILHNSNFSSLLYTENYGVFEMQDEYRVKPVKGNGYIKEDFTYSKYLQRILDATKEITTQELNPREVFKYKAILERGSISTVAMFKKEFGEEIYKILKPIASKYYKEESKIINGIYEHSTSLFVKCNTNTPYKENIKHTLLKPIYSYNFTKGDANKFLNAIKDKRGLRVALENISTEAKKYQNSFYTTILACYENKECADDKELIKIVKNLDANIKTIKEIFEEMGIKGSYFDTIKEIDNKNIKRVLNILKQTYEILFKGLDGFSKTCKHCTKENAIRSDEKLVLAKRLLSDVAKPIDGMLDMMLDRLAYEISEQIDSSDIEEIAELEILIEQNRFEFEENLNTIKRNSNSQIKKYKRDIKDSLNISICPYNGKSINKGDYDHILPQSKGVYNSKANMIYCSTDANREKGSTIYTLENLHKKHLKKIFKTDNIAQIKEFITQHLNSIESKNFTNFENLKLPQQIALRYALFMQSDSKEYKKAFTLVKLDKIKTITNGTQKRLARKIYEKLVAKYSNEFKTIEVDSKTVGSELVSSTRKLLSTTKEQIQKQTIQDPHSHCIDAMVVFYLANAKVKKGKPLDAKYDFDDIYLAESTIKNLKKRKTFINSSFKESASIVLFQSTIYSENYYLIKREDDKFKAKIKAKFKEIKKKDIDTLIECKLLYKNKKNKKYFIKNSDEIGDKDSIKIDVLQLSNRLYELFNAKDSKGLKSLKFLDELRYNTIRKEVEDIFFHEKSKKLLELDKIKNIPSASENIFKAIHKKLRLSSNLFKVVDDKKVLDYFELNKLLKDIFSSKQEEEYKKKRKREKKRHKYTLPVIGQAKYRIKRGESWQVLGGENIATKQYLIDGDIKPVPYFTKNTLPLKISDLIDCLLIEEDTKSVYDVKIKVDEINEYVSELKYFLTEAKRHTIVVTFIKKSFKDIDFNKIEQYDTAKDTIFKKLIEDYIENKDLKLFEYIGSIRKDGGKANAIVVNKKKDTITLEYKAELNKHKKEKILQNLKR

SEQ ID NO: 6086 - protein, 1092 aa, unidentified
  REGION 1..1092: note = Description of Unknown: Cas Enzyme sequence
MAEEKTLNYRLGLDIGIASVGWSVLRVDEKGEPCGIENLGVRTFDPLEHPKNGASLTLPRRMARGSRRRLRRRGHRIERTKALLKRYFGENFIENIPLSLFQDPYVLRSKALDEKITKEELAVILLNLVKRRGFKSNRKSELKDDTDAGILKKAAESNRQYRIEKGFRTIGEMFSKDEKYVIIINDIKTYFIRNKESNYINSVFRDDLVDEIKKIFDCQKSLGNKIISDLLVDEYLIIFESQRAFDEGPGGKSPYRKSFNIGKCTFIKEENRAPKASYTFEYNIALQKINNLKITGSSQSELNEEQKKTLIDYILSSKEIKFSQVRKKLNIPLEYGFNLISYSSKKTQEQSENAVFVSMKNSYEIRKALSPQHQNNIDLLDEIAVLLSMNKSDDKILTEIKRNLILQDLNDEEINNLLSLNFSKFGYLSIKALKMIQPYLEKGFKYNKACELAGFDFRGHSGEERSKLLNTEDIRKAVNEINVPVVKRAISQSIKVINSVIREYGSPLAVNVELARELSKNREERDKIKKENDVRAVDNERLKTKIENEFGISNVKGQDIIKYRLYEEQKGKCAYSMSPIDFDRLFDPTYLQIDHIIPYSRSFDDSFNNKVLVMTSENQHKKNMTPYEYFGNNAERWKAFEDFVMSTYQFNRKKRDMMLRKSFTIDDEKEWKERSLNDTKYISKFIYNLINDCLVFDDSIDVGKKKVNAVNGKITSYLRKMWGIQKIREEGDLHHCLDATVIASVTQGIITKITNMNKIVERGVKTNGAYYDYETGERVDITALKEPYDNFARELKIRLSEEPSKMKNVLVEIGYDPEKAENIKPVFVSRMPTRKMKGKIHQDTIKSAKHLESEGIVVSKVDIKKLKLKDGEIENYYNPQDDLLLYNALKKRLQECAGDGEIAFKDGFYKPKSDGTQGNPVRKVKVYEKVTKGVELKKIKGFAANDSMARADIFKKDNKYYSVPVYVYDILKGAIPNKAIDAHKSYDEWTEIDNSFDFLFSLYPNDLVYLEHNKTFKLIDINKKEKSLVKSFLYYKGIDVSTGNASFVSHDQRYFVRIGLKTLKSLEKYTVDILGNQFKVEKEKRQLCNTKD

SEQ ID NO: 6087 - protein, 1216 aa, unidentified
  REGION 1..1216: note = Description of Unknown: Cas Enzyme sequence
MLKRILGIDTGTNSLGWAVVEKNESGEYSLLHKGSLIFEEGVKNEKGIESSRASERTEQRASRKHYFRRRLRKIEVLKVLVKYGWCPFLSDDDLKLWHNKKIYPLNESFLNWQHTDEQTSKNPYFFRHLCLNEVLDLSTEKGRYILGRALYHMAQRRGFKSNRLEQSNEDETGKVKSAINELDKEIHDSECTYLGDYFYKIYQTYGNRVRIRTRYTDREEQYKKEFYAICSKQNLTETQIAELEKAIYFQRPLKSQRKGVGKCTFEKNKQRCAISHPMYEEYRMLSVINSIKIIGPYDAEPRNLNATEIEKALPAFFRKSKANFDFEDIAKLIAGKNNYQYIADNGDKPYKFNFRMSQGISGCPTIANLRHLFGDDYATAIAEVYDIDGKKNPEQKVCDVWNVLYSFQDKENLAHWAQAKLQLDDKASEEFSNIKLPQGFASLSLCAVRKIMPWLRLGYIYSHAVLLAKIPDIVGEYVWNLNRDSILTEIKQIIKDFNADNKKLEGTLDFCVKSYLKDKFNLAPGAADKLYHPSMIETYPDAKIHEGLKVYQLGRVETNAVRNPMAMRSLHEIRKVVNILLREKIIDQNTEIHIEYARQLSDANMRKAITQWNNDRRKEREKHKEELISLYKEATGKTLDPTATDILKYELWEEQKHICIYTGEKIGITDFIGNNPRYDIEHTVPRSVGGDSRMENMTLCSSRYNREIKLAKIPTALANHDDIIIRLEDWKDKIDKLRKEADKVRTYSGMEKKVKDLRIQKRHLIRIEQKYWEEKYNRFTIKEVPEDFALRQGASIGLVSKYAGLYLKSLFHKKGDRNKSNVKVIKGFVTSEFRKMWGIQDEYEKKSRDNHIHHCIDAITIACIDPAKYNETAKYYQQLEEYERNNSNKPTFEKPWPTFTEDIRKLINEVLVVHDIKDNMPKHASKTVVTSKGKFHTKGDSARCSLHNDTYYGAIEKDGEVRYVVRRRLSSLEKESEIENIVDETVRQKVREAVARLGFKQAMASDIYMNEEKGILIKKVRCYANSVKKPIKIKPQRDKSKKEYKQYINVTNDSNYMLAIYEDIVKGKPKRDFELVKNIEAAHYFKESNSREEFSSIVPDYSKNGYPLKQKLTIGMHVLLYEKSTDEIDFSNHTDLCKRLYVITGLSYLPVGNGYGNIVMRHHQEARKSKDIRTINGAFKNGEQYRPSIIMLHTQLNALTEGVDFEINVIGQIKPR

SEQ ID NO: 6088 - protein, 1341 aa, unidentified
  REGION 1..1341: note = Description of Unknown: Cas Enzyme sequence
MRKQFGDYYLGLDIGTDSIGWAITDLEYKIQKLNGKYLWGIRLFDSGKSAADRRMYRVARRRNERKKQRIRLLQELFAEEIAKVDMGFFQRLNESRYYPDDKTEEQTNTLFNDDNFTDKDYHKTFPTIYHLRKALIENRQEAFDIRLVYLAIAHILKNRGHFLFEGAKLSEVTCFEKVFRDFSDCLSNQMELDICCDHIDMVENILLKTKGITARKKELGAVFGTDNKTQKAFLDLISGAKVSLKDLFEDESLDDVDLNKITFSGGEYTDNIDGYAAILGDRMSCIEKAKTVYDWALLSEILHGREYLSFAKVDIYEKHKKDLAILKKVTKQTCSHQGYKEIFSDLYQPRNYCAYIGKSLFSNNKSSCTAEEFYAYLKTKLKISADMGTEYKYVFEEIENKTFLPKQITSDNSVIPYQLNFAELEKILSNAAKYYPFLVMKDGNELTVSEKIKKIMTFRIPYYVGPLNDAHRGDGIHSNTWIVKKNNDKIRPWNFEEVVDLEESAAQFINRMTSKCTYLAGADVLPKNSLLYSEFMVLNELNNLRINGEKVSVPIKMKIYNDLFKKHRKVTQRKLRSYLMSECIIGKSDEISGMDGDFKSSLESYIDFSEIVGDRVNNKDMVEDIIRDIVLFGGDNSLLSRRLKRNYGDTLSAEQLKKICNLKYATWGRLSRELLTEVYDINPSTGELVNIITMMRESNENLMQLLGSKYRFTENINQQNAEINGQVNVYSYENLVADLYCSPAVKRGIWQTLSLIQEIIGFMGHEPKKTFVEVAREEGEKKRTISRRQSLIELYKQCKEEERQWVKELEGKTDDELRKDKLYLYYTQMGRCMYSGEQISLTDLYNDNIYDIDHIYPQSKTKDDSIENRVLVKKTLNLIKGDKYPLPQEFRTPSTKALWKRLYEMKLIGKTKYDRLLRIEGFSDEELAGFINRQLVETRQSTKAVAETLGRVLKEARVVYVKAGNVSDFRRDNNFLKVREINDYHHAKDAYLNIVVGNVFDTKFTHNPINFIKGSKETKYSLNRMYDFDIERGGTVAWKSGPCGTLSDVKKAMGNNRILFTRYAYEQTGGFFNQMPLKHPQGQFPLKEKDERLKNIERYGGYDNVYSAYYILVEHTRKGKRVRTIEHVPIHLSKSLNEREDRIREYCENTLQLESPRILLSKIKIGTLFNFDGFPMHLSGRTGDSLTFKPAVQLCVGEEQERYIKQIVKFVERKKKTKKEAYMVSEFDHISKEENVKIYDMLYLKHRDTIYNRRPSSQVSTLEEGREKFCALPIESQCEAIIKILKLFQCLPGSADLKMIGGSGQAGVPKKNKNISGCEKVKIINQSITGVFENEVDLLTL

SEQ ID NO: 6089 - protein, 1404 aa, unidentified
  REGION 1..1404: note = Description of Unknown: Cas Enzyme sequence
MSKTILGLDLGTNSIGWALVEEAETNHESSKIIKLGVRVIPLTVDEQTSFEKGKPISTNTERTLKRGARRNLQRYKLRRENLIEILISNKIINQDTPLTEIGKNTTHQTLMLRAKSAQDKVDLVDFAKILLAINKKRGYKSSRKSKSSDEGIAIDGMTVAKILYEKNITPGQYVYESLINGNKIIPDFYRSDLRNELKKIWDKQSMFYPTLLTNDLYHAIEDKNKSQTYKILESPWKLEGLKQSGKKDEQRLERYKWRQQALSEKIELEKLSVVLQEINNEINKSSGYLGAISDRSKILYLNKITVGEYLYNQILKNPHTSLKNKVFYRQDYLDEFEQIWETQAKHYPHILTKELKEEIRDVVIFYQRKLKSQKGNVSFCQFESKQEQYVDNSTGKTKYRTIGQRVAPKSSPIFQEFKIWQNINNLNYINEKENQIIEVRNLDDYIREEIFEELNLKGPLTPTDILKNISKHIFINKISDWRCNFEKIEGNTTNKALLSIYQKIAEAEGYGFDWDKKSAKEIYEELEYIFTVIGVNKEILKFDSNSNDFDKQPYFLLWHLLYSAEDSDKASEEDRLIYGNNDTKLRKILHKKYGFKPEYAKMLSSITLEQDYGSLSTKAMRKITPFLQAGHPFAGKATNISEVGACELAGYNHSKSETADDLNRKTLKDKLELLPKNTLRNPVVEKILNQMINLVNQIIDEYGKPDEVRIELARELKKTASERNKMNREIADATRRNENIKNLLIKDFGIPNPTKNDIVRYRLWDELSVRGYKTIFTDKYIPKEKLFSKDIEIEHIIPQALLFDDSFSNKTLAYHEENQLKSNRTAYDFICQDYFLNKTDYENKVSDWYKSKSISRAKKNKLLMTYSEIPDGFIDRDLRNTQYISKKAREILLEVFKTVIPTTGSITDRLREDWGLINIMKELNLDKYRALGLTELEERFDVGSEKIKKVEVINNWTKRNDHRHHAVDALTVAFTTHNHIQYINNLNARRDTSHKKHDIIFAIEKTITERINGNIIFKEPIPNFRTVAKKEIESILVSYKAKNKVTTNNINKTKLQGKERYKKTLQTTPRGQLHKETIYGRSLRPMEKAIKINKKFSIEKLNLIIDKKERDAVLSHLSKYSNNVNIAFDTKVLKSNPILLNGEPLKEVKCFEEIFTIRKPISTDLKIDKVVDAGVRRALEERLKEFNGSSKDAFSNLEDNPIWLNKDKGVSIKNVTIIGVNSAIPLHYKKDHTGKEIISDIGEKISSDYVQTGNNHHVAIYLDKNGELQESVISFYEAVERKNQELPIVDKSYNNHLGWKFLFTMKQNEMFVFPSKDFDPTEVDLLNPENYELISRNLFRVQKIGTKDYTFRHHLETTVTNNLDFTFKRICTPNGLKGIEKVRINHIGRIVQVGEYDKKNPLLR

SEQ ID NO: 6090 - protein, 1258 aa, unidentified
  REGION 1..1258: note = Description of Unknown: Cas Enzyme sequence
LLRISWLDHLHRIFYTLDETFFIRLEDSFKYQEDRQLHNKYNIFIDKDFNDRDYYKKFPTIYHLRKHLINSNQKEDIRLIYLALHHIIKYRGNFLYENQNFDISSIDLKDNLISVCKYLQDIIIEDNVNSIDFDNFNCVLFDNKLNRTQKKEKLKDILNNLFIDKKQLEEFVKLILGFDSKLNILFNLPELSKEGSIKINFSSDKYEENKEKLIDLLDDKFEAVEGIKKLYDGILLKTLFKGSNNTYLSELMVEKYQKHKDDLKKLKQIIRENYSKDDYNRLFKKSDVKNYYAYINSPSKCTYADLKKTIKSILDTKVIDSSDYRYIYAELDNDNFLLRINVVDNSIYPYQLNLIELEKIISNQSKFYPCLAETTSSGESKLVKLLKFRIPYYVGPLNLNSEKGKNESRSFAWIVKKKPDEKITPFNFDEVVDTEACAEKFITRMTNTCTYLRFENVIPKNSLLYSKYMVLNELKQIKINDRKISQDLQKRIYNELFMKYPRITEKKLKEWLLASNNVVSDDIKITGFQKDREFASSLKPYIDFKNIFMEINDQNYNMIEDIIKWITIFEDKNILAQKIKKSYPQITTEQINEIIKLDYTGWAALSKKLLTGLYYINEKTSEYQNIMDLLENTEWNFMQIITKPLFGFDKLIDKENNYIAKEKVEYEDIEKLPCSPAVKKGVWQSIKIVEEIVKIRKGNPKHIFIELAREDAKKERTISRKESLRKTYENLKLDNTKVLLEELKMYENELDNQRLYLYFLQNGKCLYSGEALNINELDKYEVDHIIPRSLIKDDSIDNLALVKKEENQRKSDGLTLTNKIIDSQKDVWYRLLECKLISTKKYNRLMRRQYKEEDIEGFINRQLVETRQISKHVVDLLNSVYGSQTVVSIKAQLSHDFRKKYDLYKIRELNNFHHAQDAYLASSLGNYIMTRYPKLEPELIYNSFKGYDTNSEENKKGYGYILNIISKDLINDNGEVIINSQEWLNNIIKTMGYQDPIVTKKSEKQTGAFYKQTLYPKNEKLIPIKANLDPKKYGGYTGENDAYFVLIKNNRKIKLVGIPIVVDYMIKDDLEKLKEYILKKENIKEADILKNNIKKYQKIIFRGQECYLVADAEVQNAVELKLNKQDIKTLYIALNDNANKSLEMDLNQELNNLMSNILEKMELHYPLFSYEYLNIKDYFEKGFFSALDVEQKRKFIKEVLKMLKADSGNANLIMFNNAQFTKFTDRMGRKSKVSASDISKSKIIYESITGLYRCESEF

SEQ ID NO: 6091 - protein, 1281 aa, unidentified
  REGION 1..1281: note = Description of Unknown: Cas Enzyme sequence
GEGRVYPVDDDEFSSWIKLDFNKDGIPDYSSPYQLRRQLINKQLDLTNKENRYKIGRALYHIAQRRGFKSSRKGGSSEEVAVFKGSDETKTIGRNEYENLIHENGSLGAAFAFLEDNGIRVRNRYTLRKDYLDEVLMIIKKQGLENNVFAEKIKNAIFFQRPLRSQKGLIGKCTLETNKSRCPISHPKFEEYRAWSLLNNIKYRKNSVEQFKPLPIELKEEIYYSKFFRKSKRDFKFIEIRKAIQAHNNNWVINYGEKMDETSVPSCYVSSIFKSVFGEDWTDFNKTITKKDKADKEYKVNYSIEDIWHIIFSYDDVECLAEFLSLNLELEYEQQKDLIKLFNSFPTGYANLSLKAINNILPFLRRGNSYTEAVILAKVPEIVGRKLFFDNKEKIIHDIENLIETIRFEKTAIAITNSLIFKYHSLDHLEKFAYKDFSYQLAQDDINDIQNEAICYFGENTWNNKDENYKDQIINKIKRYYQSFFNDLKREHIKSPHLVDNIKMFLKINYNIADNLLNLLYHPSQIDIYPNKEGQIYLQSPKTGAFKNPMAYKTLFKLRKVINYLIETGKICENTRIVVEVARELNDSNKRWAIEKYQRDREFENTTFSNAISELIKDSDFKGIANPHSETDLDKFRLWVEQTNNSDETFKKIHDIDKKSNLSPSEKNILKYRLWKEQNCICIYTGRIISLTDLFDHNLTDFEHTIPRSKSFDNSLANLTVCYADYNRNIKKNRMPTELPNYEKKSNGFTAIKPRLEFWDKKVESLYKQIEYFKVASRNATDKEQKNNAIRQKHLRQMHYDYWKNKTSRFKQTEISSRFINSQLTDTQIISKYAFHYLKTVFNNVEVQKGSVTAQFRKIYGIQPKNKNRNEHVHHAIDAAVLTLIPNSKKREEILKKAYEFEENHLGQYTMKPFPDFKYSIIEEIKKNILINNMRDQDRTLIPAKKKLRRNGKIVYITSCSGEKKPVIQQGDSVRGQLHKETFYGKNKVAAKNEDGSLLRDEDGSIIYEKEKDGRDKFIMVERKPIEKVDFKKDIIIDSYMADHLKQQLKDGISAIELKDFQGNKVRRLRCAVRLGRGLLNPDKVTIVKEQTYKSNKVYKNYYYATSGDNYVYGLYENENGRKIISINTFQAIQYSLNKNKDSITDIFKYVEPVKIGKGKNEKEASLKHVFQIGQKMLFFFESKEELKEMTKEEISKRLYYIKRFHQAENGNMVVQHHIEARSDKELSAMYGPKGQNGFTINSLTNKFSPPRILFTPSKDIFIIEGKDFEFELSGDIKFKF

SEQ ID NO: 6092 - protein, 1115 aa, unidentified
  REGION 1..1115: note = Description of Unknown: Cas Enzyme sequence
MDKVFADYYIGLDIGTNSVGWAVTDTNYNLLKFNRKSMWGVRLFKSGETAAARRVFRASRRRLARKKQRISLLQEIFRAEMEKIDPDFFNRMKESHYNPSDKPAKYFNTLFGDKDFSDKNYHLKYPTIYHLRKSLLDGEKHDIRLLYLAIHHILKNRGHFLFAGQNLENITSFNEAFGELCTYLKDEFDFDLSCKDLANTESIIKCPEMGKKEKRKALEEMLYAEKNYRIKAIISAIIGSKFELSDLYDDESLKDSEINKADLSGASYEEAYDKIHDVLEERIGLIDNLKRIYDWSVLASIRKGHKYLSESKTEAYNKHKRDLKRLKELVKKYYPAKPNRKQSEKYKEVFSSEIITGNYPSYIGTAKKNKVKIPVEKKCSYEVFCKYIKSIFKDFSTEEDVKEILIEIENKTFLPKQVCESNSVIPYQMHKEELKVILEKASEYLKFLNDRDETGFSGIDKIISLLEFRIPYYVGPLNCAHKDQGANCWIVKRTNDKIRPWNFNSVVDLEKSAENFILRMTKKCTYLKNKDVVPKYSLLYSKYSVLNELNNLTVNGEKISTNLKKKIYNDLFKTKKKVLLKNVKNLLKSEGILCDTDDIGGIDGDFKSSLTSYIDFSAILPPNKLKEDYLEKIIRYITLFGEDKKILRNKISTDFKDFFTNEEISKILRLKYTGWGAFSKEFLTQIEHVDLETGECISIIDALYETNNNLMQLLSSKFSFSERIDDYIKKNLNLNEKLEYDAVKELYVSPAIKRGIWQTIKVVKEIVKITKKHPLKIFIEVARETRPDKGRTESRKNRLIELYKKCKEEARDWVSELTNYSEGNLRSKKLFLYYTQMGRCMYTGKSIELSELSNENIYDIDHIYPRSKVKDDSLDNLVLVKRVENIEKRDAPLSYSIQNKMRDFWRSLLQKGLISKTKYDRLIRSGDFTDDELSVFINRQLVETRQSTKAVAELLSRRFDNNIVYVKAGNVSEFRNFFEITKVRDINDYHHAKDAYLNIVVGNIYDTKFTRNPLNFIRSKEGRNYSLNLKTMLKYNISAGGINAWVADNNQTINTVRALINKNNILFTRQAYKEKGGLFDQQLLKKGKWHFPIKKSDKKLLDLSKYGGYSKVKGS

SEQ ID NO: 6093 - protein, 1506 aa, unidentified
  REGION 1..1506: note = Description of Unknown: Cas Enzyme sequence
MKKILGLDLGTNSIGWALINSDSENNNNKILGMGSRIIPMSQDILSDFTQGNSISQTAERTQYRSTRRLRERHLLRRERLHRVLHLMGFLPKHYDEMIDFENHPGKFLPETEPKIAWSKNDESKYEFIFKKSFEEMMADFKANQPELLTDGKKVPYDWTIYYLRKKALTQKIEKEELAWILLNFNQKRGYYQLRGEEEDEENPNKSIEYHALKVTHVEADEAEKNKSDIWYTIYLENGWIYRRSSKIPLFDWIGVTKEFIVTTELNDDGTVKIDKEGKEKRSFRIPSEDDWTLLKKKTETDIDKSKKTVGTYIYDTLLKKPDQKIRGKLIRTIERKYYKKELKKILTKQKEFHPELKDRNLYRSCVVELYPNNKAQQNNIRNKDFTYLFIEDIIFYQRPLKSKKSLISNCKFEYRTYKDKEGNIRKAPLKCVPKSHPLYQEFRLWKFVQDLRIYEREKKINGKLYIDYDVTNEFIKTEEDLVNLFDWLNKRSGIKQNTLLSSYFKVKKTNKTDKQLPYRWNYVEDKEYPCNETRFSITNRLEKINDLPNNFLTNRKEFELWHLLYSVIDKNELEKALKKFAAKNNLPINEFVDAFVKFPPFERDYGSYSEKALKKLLPLMRMGKYWNYEAIDLNTRQRIEKLLTGEVDETIHDKVREKTSHLTDEKQFKGLPEWLAAYVVYGRHSEMSEYTKWNTYHDLNNYLQDFKQHSLRNPIVEQVIMETLRVVRDCWEKYGNIDEIHVELGREIKNPAEKRKKITKTITQNENTNLRIKALLIELANDGVENARPYSPTQEEILKIYEEGVLNSTIDIPNDIEKIVRKATPTKQELNRYKLWLEQKYRSPYTGEIIPLAKLFTPAYEIEHIIPQSLYFDDSLSNKVICESEVNKLKGNQLAYEFIKTHHGEKVELNFGKTVEIMSKEAYEKFVNENYRNNFFKRKKLLMDDIPDEFIERQINDTRYITKVVKSLLSNIVREEDEQEPTSKNVIVTTGQITNTLKRDWGLNDIWNEIIYPRFERLNRLTNSTLFGQWVNENGKRFFRTQVPLDLQKGFSKKRIDHRHHAMDALVIACTTRNHVNYLNNESAKSSNRETRYDLRNKLCKKVKTDDKGNYIWQFIKPWETFTQDAKIELENIVVSFKQNLRVINKTTNYYQRYVNGKKVIDKQTKGDHWAIRKSLHKDTVAGQVNLRFKKKVSLSVAIDQPENIVDKQLKREIKNLQKEKFDKKQILKYFGNLNYRWQGKEIKQPEIYYFSNDKVEMTASRVNLDTSFGTKKIESITDTGIQKILKNHLSKFDENVNGTIIEHPELAFSPEGIEEMNKNIRELNDGKPHKPIIKIRTYETKGNKFNVGTKGNKKLKFVEADKGTNLFFAVYIDDDGKRNFETIPLNIIIERLKQGYEAVPEKNEKGHRLLFHLSPNDLVYLPTEEDIINGNVSIPLDNNRIYKMVSCTGNVADFIPFYVANPIVKTTELGSNNKAQRAWTGEMIKEICIPLEVDRLGNIVKIKTT

SEQ ID NO: 6094 - protein, 1175 aa, unidentified
  REGION 1..1175: note = Description of Unknown: Cas Enzyme sequence
MAKKLSKRYHRQAEEIRARLKGRPYSMGLDLGVGSIGLAIAAMEESNGYGHEPTDLVFVTSRIFTPSIGASERREKRGQRNALRHRRNRLIFLWKLLAEKGLMLPYSTKSVDDPARLRFEEAMIQADPYKLRLKGLTEALTLSELGYALYHIANHRGASSIRTFLDEVQDADEKKLEEQRSITNKIMTEHNVSTFIEVLTIFNRDTFVGYRNVDKLKDKSIPVPTRDIISAELDRLLSTQARFHPDTLNEDYIQRIKDAVLYENEKIVPEPGDCPYFPDEKKLPRCHFLNEERRLWEAINNARLGEPDESGSFRRYNRISFSDKERQELFTHLRSGRSVTAATVKTLFPHYENHEIILQGRERKTSRIEGFRFKHLEEKPFWTRFTEEQQDEFFAIWTNFADEKRVEEYLVMHLGLSEEEAADAIRTVKLIGDYGPLGKTATLLLMKYIEDGLTFIEAEMKALETGEFQERTSRKVQEFLPYYGRILSKTTQALMGKYWHSSFKNRIDKPGFVKPNTDREEEEHGRIANPVVHQTLNEMRKLVNEVIEILGSKPSEIVVELARDLKVGAEKREEISKEQQRNEKRAQDIYDTYCKENGLSKRYIQAFRLYEDQQFICPYCLETISVAEIAGNQTDIDHIFPIEDTSDNSYANKVLAHGSCNKEKAKRTPYAAFGHTEKWGRIMHYLDATPSMKAKRWRFEKTDDEYAEYLQSKGFMSRFATDNSYIATAAFEYLACLFDYSERNSVRTTKGWETSILRKAWNLQGIDDYFGSMHWDKKDSPDSVKGKNRGDHRHHGLDAMVTLYTSRSLIKQINTFSSKGLKAEKIESLIPIPNYYRDDSLPREDQRNLFRKHVQSFFERNAFVSVKTNHAINGPLVKDTVYSILGANPKGDELVFVVNKKVKDIAVKEGTVEEVESAIKGKFSNKTWYDEELCMKIEAIQRTNEEIIDRYKSNLVLAERILIEENRKLEEEGKKQRAINEKLISKKALELSGGTYQLLSNNSRVKTFVVKEPTATSKGYGFDTGSSLCIDLYHNEEGKLQGEIIRKVYAMDPNYIPTYKQNGYKLFERIYGGDTLEITASSPIAEEKEDAIQKIARIRVPNAMAGRTYLRVVTFTEAGSGIQIFLSNISKADGGQDASFRITSMQQYDVRKVQLSPAGLVEYVSPVLKDLEMGG

SEQ ID NO: 6095 - protein, 1420 aa, unidentified
  REGION 1..1420: note = Description of Unknown: Cas Enzyme sequence
MKKILGLDLGTNSIGWALVNEAEDENEKSSIVKLGSRIIHFDNFVSSETGKESKEPEKDFKGGKGISPNAGRTKKRSARRTLQRFKLRKENLIEILTENSWITPDTILSENGNKTTFETYRLRAKAATEEVSLHQFARILLMINSKRGYKSSRKAKSQDEGQLIDGMEVAKKLYNEELTPGQLVLQILKTGKKYIPEFYRSDLQTEFDKVFDKQISFQPDLLTPELKEELRGKKRDAIWAICAKKFKENGFELVGTKRKGNTAEQKTENYAWRAKGLTEKLELEEFVIVIQQINSQINSSSGYLGSISDRSKELYFNKQTVGQYLMTQLDANPHTKLKNQVFYRQDYLDEFEMLWTVQSKFHTQLTVELKEEIRDVVIFYQRKLKSQKGLISICEFENRQIEVVIEGNKKTKTIGLKVCPKSSPLFQEFKIWQVLNNLQVIDKTDVKRFLNQEEKEVLFTELSVKNKLLKAEVLKLLFKNFKDLDLNFKEIEGNRTQAALFKAYQSIIELSGHGEYDFTKLPAAESLEIVRSIFSGLNYNTEILTFDSLLEGKAFENQSLYKFWHLLYSFEGDDSLTGNNKLITKLTALYGFEKEYANILANVNFQDDYGSLSTKAMRKILPHLKEGNEYSIACEFAGYRHSKSSLTREELDNKVLKDKLEILPKNSLRNPVVEKILNQMINVVNASIEAYGKPDEIRIELARELKKSAKEREETTAAISKTTAEHEVYRAILRKEFGLTNVSRNDIIRYKLYKELEFTGYKTLYSGTYISQEKLFSKEFDIEHIIPQSRLFDDSFSNKTLEVRSINIEKGNDTAIDFVLKKYNEDGHTAFLSRIGEMYKAGKISKTKFNKLKMKGEDIPSDFINRDLRDTQYIAKKAKSILEELVKEVISTTGSITDRLREDWQLIDIMQELNWDKYDKQGMTEIIENRDGQRIKRIKDWTKRNDHRHHAMDALTIAFTKRSHIQYLNNLNARSDKAGSIYGIEQKELYRDDKGKLKFKMPLDDFRREAKNHLENTLVSIKAKNKVATININVTKKQNGINKKIQLTPRGQLHLETVYGSIQQYVTKEEKVNASFTKEQIEKVAKKIYREALLKRLTEFDNDPKKAFTGKNTLDKNPIYLVETQTSKVPDKVKIVTTETIYTIRKDISPDIKIDKVIDVKIREILEDRLKEFEGDSKKAFSNLDENPIWLNQEKGISIKRVTITGISNAVSLHEKRDIDGKLILDENGNKQAIDFVNTGNNHHVAIYKIPVLDKEGQLVYDENSNQKYELQEYVVSFFEATTRVNQGLPIIDKDFKKSEGWQFLFSMKQNEYFVFPKTEKYEKVNEDSGEIIEEEVIVFNPNEIDLLNPDNYHLISPNLFRVQKFTIKDYFFRHHLETNVENNNILKGTTWLRFGLNGISNIVKVRVNHIGQIVSVGEY

SEQ ID NO: 6096 - protein, 1245 aa, unidentified
  REGION 1..1245: note = Description of Unknown: Cas Enzyme sequence
MAKKILGLDLGVSSIGWALIEESENEKKIISMGSRIIPLSTDDKDEFTSGNKISKNQKRTEKRTQRKGYDRYQLRRKALTELLISNNMFDPELFKLKPLELWGLRAKAVSEKITLKELGRILYHLNQKRGYKSARKVENADKKDTDYVKEVKNRYEEIKEKGITIGQKFYEELKKHQYYRIKEQVFPREAYIEEFDRILNCQKTYYPETLSENLINTIRNEIIYYQRALKSQKELVSVCNFEGFWVKSENGKEIFVGPKVAPKSSPIFQITKIWETINNIELKNKYGEKLLISNEKKQQIFNYLDNNEKLSQSELFKILGIKKEDGWYGNKMISNGLQGNITKVKILKALEGKHFDANILNFNIEIENYNTETYLIDRKNGEVLETKKKKIVLPTIEQEPLYQLWHIIYSISDEKECTNTLIKKFGFSYEIAEKLAQIDFKTSGFGNKSVKAMRKILPYLMEGYKYSDACSLAGYNHSFSLTKDEVLQKQLKDKIELLPKNSLRQPIVEKILNQLINLVNAIIDENRGWVTRQDRLNNNFEIRIELARELKQSKEERNATFKNQREREKQNKLIAERLSKEYGLKPTRNNIIKWRLFHEINAENASRVNATCIYCGKQFGLSDALNGNSVDVEHIIPKALLFDDSQNNKTLSHRACNEAKGNRTAYDYMSSLGEEKLNEYIERVKHLYENKLISKAKRDKLLMPQNKIPHDFIERQLRESQYIARKAKEILNNVSYNVWTTTGNITEHLRKIWGWEDVLMELQLPKYKELGLTEWVEWESDGQIHKKEVIKDWSKRDDHRHHAIDALTIACTQQGFIQRMNTLSSQHTRDEMFAEIQNLSSEFKEKLNLLDKYLISKRPFTTEQVKQKVAEILVSFKAGKKVATYSVRKIKQNGKKVIVQQKIITPRGPLSEESVYGKIKIIEKDKNIKYLFKNPDLIVNPKIQQLIKNRLNIFENDSKKAYNSLKKDPIYIDEEKKIMLENAHCFKEEYVIKYPLKDIKAKDVEYIIDKKIKELVKQRLEQYNNKEKEAFKEPLYFNEGKKIPIRTVRCFTGLTAVEPVKRDSSGNPIGFVKPGNNHHIAIYSDSDGNKIEHVCTFWHAVERKKYGIPVIIKDTTEVWDKILKQPEGTYPDCFLEKLPDANLKLELSMQQNEMFLLGMTNEDIKLAIENKDYKTISDKLYRVQKMSLIPSSGHIDLVFRHHLETKIIDNVSSKTSKRFINVQSLRALFNLNPYKLKIDLLGNIS

SEQ ID NO: 6097 - protein, 1056 aa, unidentified
  REGION 1..1056: note = Description of Unknown: Cas Enzyme sequence
MIERILGIDIGIASLGWAVVEFDGENRKNNKIIDCGVRIFDKAENPKTGESLALPRRSAKRLRKRLDRKARRLKALKNLFVQKNIITGEELKVLYDTSEHTKDSWLLRVEALNRALNKKEFARVLTHLLKHRGFKSMRKAEEKEGDVGKMKTAIETNAELMTKKGYLTFGQMVVYETKDGEAKRNRGGSYKNSISRSIIEQEAKIIFDKQRGFGVDFADTEFEKEFLEIFNSQKEPLDEEALRKMVGKCTFFPDEPRAPKASLSAETFVALTKIINNIKIIDSFFNERVLDGDEIEIVLNELFRVKAPTYKNLRKILALRDDEKFKFLDYKKDEKAENKSFFELKGFHTLKKAIIDASGDVIFVNLKNTPKFLDMVAEVLTYNKTDTEIVAKLQKLFENIELEPKIKQNIIEALKDIDTKDFRKFINLSFKALEKILPFMLIGHRYDDACRLADMHHSKRVEPKGLKSLPIATEKTTNPVVKRAVAQSRKVINAIIRKYNMPDKIHIELARELKHSYKERKKIEKGQKEYQVQREAAKKQALECGINPDEGDNLLRFRFWREQDERCPYCGDTLERSRLGEIGYAEIDHIIPYSRSLDDSLINKTLVHALCNQNKGDKTPFEFFGSDKGSEKWLEFIGRVESMRNIRKSKRNRFLMTAFDDERFKNRNLNDTQTLARYIKDYIRLNLAIDVESRNGSLTSHLRHIWGVGEKNRENHLHHAQDAIVLAFSTQSMVQKISTLTQKIETKGKNYLSKDEKLKFKLPMDDFRDKVDESIKKIFVSKAPRRKVGGAAHEETIRAKGDGNIVITKIKLESILDIKEKNSEKIFEKAKAKIESIVDKEHGNKALYEAIKERLEQYKGEKIKDAFKEPLYPKSKDGSNPNQIKSVKIAEVQNSGVDVRGGIAANGDMPRVDVFAKNGKFYLVPIYISDFAKGLPNKAITAKKRTENWDKIDESYEFMFSLYKNDLLEIKHKNKNPVLGYFSGVHSGTAYITITHPANLVISPFKAKKNKEDGSVKSIYEFGVKQGVEYFKKFQVSPLGEYIEIKKERRVGILKK

SEQ ID NO: 6098 - protein, 1043 aa, unidentified
  REGION 1..1043: note = Description of Unknown: Cas Enzyme sequence
MPTAPCYRLALDLGSTSLGWAVFRLNAEHEPTAIIRSGVRIFSDGRNPKDGASLAVTRRAARAMRRRRDRLLRRKARMMSKLIEHGFFPADEGARKTLEQLNPYQLRATGLDTALSPAEFARALFHLNQRRGFQSNRKTDRKDNDSGALKQAIGTLRAQIQTSGCRTVGEWFWKDRMQQRPEGVAGQGVRARYRETPYLTEEGKKRIDKRYDLYVERAMVAQEFDALWEAQTAFNPTQFNEEARTDLRDTLLHQRDLRPVRPGRCTLLPDEERAPLALPSTQRFRIYQEVNNLRLLSDLREELLTLVQRDKIVAMLEARAKVSFDQMRKALELSGATKFNLEDAKRKELKGDAAAAALGKKALFGPAWGSFDATLQDEIVWHLITEESEERLVDWLQEQTGIDEARAQAIANTSLPDGYGRLSRKALARILPCLRDPDEQGRPRTYDKAVQAAGFAHHSDLGFDFEHANDEVDCIGERTIASTGEIKPVYAFKQLPYYGRALQRHVAFAKSDPKNEEERYGKIANPTVHIGLNQVRTVVNALVRRYGRPTEVVIELARDLKQSREQKQEAQRKQAENQKRNDGIRSAIAQALDIAEVRVRTADIQKWILWEELSFDAADRRCPYSGVQISVSMLLSERVEIEHILPFSKTLDDSLNNRTVSLREANRIKGNRTPWEARADFEAQGWAYDGILQRAERMPLRKRFRFAEDGYARWLGEDKDFLARALNDTRYLSRVAAEYLRLICPGSATRVIPGQMTALLRAKFGLNDVLGLNGEKNRNDHRHHAVDACVIGVTDQGLMQRFAQANAQARTSGLTRLVEEMPEPWPTYREQVERAVNHIWVSHKPDHGYEGAMMEETSYGIRRDGSIRQRKKADGSAGREITNLIRVAESTQPSRHGVDAEGKPLPYKGYVGGSNYCIEITVNDKGIWDGEVISTFDAYRIVRAHGLEQLRHPTLGQSGRPLVMRLVINDYIRLEIDGQGRTMRVASMNAAGRLSLADHHEANVDARNRDPDGAWRYTYKQAGSLQKAKARKIIVSPIGELRD

SEQ ID NO: 6099 - protein, 929 aa, unidentified
  REGION 1..929: note = Description of Unknown: Cas Enzyme sequence
MKTLSAYVGLRAIGWLVHSNSEIIQHGIKRLHVPFDNYYEYMAGLPVTKRINRRMKRQMRRNLWRYKSRRDNLRHYLDKHLAKSDATYSRDEMLQLRVKALSVKLQPHELAAVIMNLQQRRGYKSQRGVSDNENSEYLQEIERHEENLKQFPSIAAYLATLPSSKNIIFNRQSYINEFNAIMDTQQLPDEIRRRIYGFIYYQNPLRKGKIAKCPYENNRDVMPGSHPLHQEFRIWRDVLNIKIWDGANNEVEIPWETKKTWVEKLMRGTHLTKAACLKDLSIKKSSMYSWLSGKQIAGHPVNGLFFKLGINSDFETLWQELYSATDTDKLRQFLKKKYAFTEIVLDELCDADFSTLGHADVSAKAAKKLLPQLQLGQKLKQAILDVYGVVDFNQVALRNVILEQHFDAYKSLVEGLQKKYPDLTKIKFELDPLLKAGNKLRKAQASGKRKDEKFVKEHADKPLGGHAGSYNAKKLRLWIESNGRSPYEPEYEIPLAELFTDKYNLDHIVPKSKLVEGGENNLVLCRTEINEAKDNAYTGIEFAEQIGVLDGYLQIMEQMPEAKQVFMKMRMQDIPTDWISRRQCSDYNTKCFASVANGLNIPNKLVHKYLSLWKLPEYTDQDARRYLACAWVLANFDQESITYFDNIQAVNGHVYSLQAALPALDIANSPISLQRIKFTRKTKFGHTPRFALHGESIHGQRTRKFRDNKGNLKVEKFYKIRQPIGKLTAPMVERIMDEALKRKVKQRIAEKGSHEDGILSLIETPVLHDGNPVKAVSVAVNAECIYPLHSTDGKGNTGPKGKYHIPCDFVFSDKNHSLTIIAMPDGKIIRETTTLMQHVDNLNGPKKRPVKALTLLERNMVLLDGTKYMVIGASESLTLRPAYTLSATDNRKVKKEDWAKLKKLHVNQFGEVIKAVTAATFLSDPKANF

SEQ ID NO: 6100 - protein, 1522 aa, unidentified
  REGION 1..1522: note = Description of Unknown: Cas Enzyme sequence
MKKILGLDLGTNSIGWALVGESEGQKKIIGMGSRVIPMSQDVMGKFDSGNSVSQTADRTSFRGVRRLRERHLLRRERLHRILHLMGFLPSHFEQSIDFENRLGKFKNDSEPKLAWKEIAPKKLEFIFKDSFAEMICEFKNCQPQLFLGERLIPYDWTIYYLRKKALNQRIEKQELAWILLNFNQKRGYYQLRGEEEDDNPNKLVEYHSLKVVDVLADDLQKGRNEIWYSIKLENGWIYKRSSKIPLFDLKNKVKEFIVTTELNNDGSVKADKEGNEKRSFRAPSEDDWTLMKKKTEFDIEKSHMTVGCYIYDSLLKNPAQKIKGRLIRTIERKFYREELEVILKKQKEFHEELNNKVLLRNCLEELYPNNESHRNTLQNADFTKLFIDDIIFYQRPLKSKKSLISNCPYEFRTFRNESGLPEKVSVKCIPRSHPLFQEFRLWQFIHNLKIYEREGYIDGKLCIDLDVTDQFLKTEEDLIALFEWLSGRKEIKQDTLIASYFKIRRKKGEELLPYRWNYVEEKEYPGNETHHQIINRLAKLVDLPLNFSNRDNELELWHILYSVEDKNELEKALRSFANKKGLGVDFVESFKKFPPFKKEYGSYSAKAIKKLLPLMRMGKFWSEDEIDGQTRKRIDKIIYGEYDENINDRVREKAINLKEVSDFRGLPLWLVCYIVYGRHSESGDLKKWSTPQEIESYLREDFKQHSLRNPIVEQIVTETLRVVKDIWKKFGDLSEIHIELGRAMKNDKKARENISRQISENENTNLRIKALLLELQDHSDIENVRPYSPGQQEILKIYEEGVLSSIKNPPDEITKIARSGQPSKSELLRYKLWLEQKYRSPYTGEIIPLSRLFTSAYEIEHIIPQSRYFDDSLSNKVICEAEVNKEKANHLGYEFIKNNQGRIIELAFGKKAKVFTIIEYEEFVKGHYGGEKTKTKLHKLLMDDIPDKFIERQMNDTRYISKLIKGFLSNVVRDDEELEAISKNVIPCTGAITSELKRDWGLNDVWNRIITPRYERMNLLTNSNNFGSWVEKDGKRFFQPVMPLELQKGFSKKRIDHRHHAMDALVIACATRNHINYLNNEASKSSSTETRYDLRNSLCFKAVNEWDNGYSWQFIKPWETFTNDAHKALDEVVVSFKQNLRVINKNVNRYQGIIGGEKTLIMQTKGENWAIRKPLHKDTVAGLVNPRLRKRVSLGEGIDNVGIIVDKNIKAKIQELITGGNDKKAILKYFRSHDNKLQDLDISRLEVYYFTNDREGDALVASRVPLDESFGSLKIKSITDTGIRQILLRHLARYNEVAVGQIIEHPELAFTPEAIVDMNQNLISLNQGRYHLPIYRVRTFEPKGNKFNVGHRGNKKDKFVEAAKGTNLFFAIYQDEKGNRSFETIPLITVIERLKQGLSEVPQVNDKGENLLFHLSPNDMVYVPTEEQLASGRLSLNEIEKNRIYNFVSSSGLIADFVPNTSASTLFNMNLKDQQKKGLYFGIQNEFGVGSPKSKNERAITGEMIKKICLKLYVDRLGSISF

SEQ ID NO: 6101 - protein, 1348 aa, unidentified
  REGION 1..1348: note = Description of Unknown: Cas Enzyme sequence
MQSLISLDLGGKYTGFFSFTSHDVSTIDDFQSGTIIYDESFVLSQVERRGKRHTKRNNLRNSLVKRLFLLILQKHYGLKIEFLPDKILGLFNKRGYTYASFEIKEDEKEQLESSILKEFLNDKLTDFTIKNDDETEEFLNQIASNETTFSDYKKDFENLFKTSTCQPNKQLELIDEIKKELEKDEAKELLSGLKIVKKIIDEFDKQQNQGNLPRAKYFLELNEIIKSEKLTLFFQAHNLKSEEMQNLIGNLSNYQLKELRRYFNDENMVKSDIWKPEQLYKVTWRFIQSWHPKNHEDKQRQKENLKSLKDTNIIEFLISTNPLKTIPPYDDMNNRGAVKCQTLRLNEEHLNIYLPNWRDIAGKLSSENQKENLAESTVKGYSEDSTLLHRILDTSKEIDMYALRSDKIDGYIDILGKNDALALKKSAKNYYELIKDKVRTGIWTSTDDMLKICDHNPPYKNNQIHNLVAGILGVKIGADKFSSFETELWNVKFGARKLSSYCKNIEELRKSHGNLFKSYIEELFKEDKKEFSKEEQKDKKLLDIKVLNEWVEKIGEFFGIEQKYQARFTNHFSFAQLHTIIDTKRSGFNSTCKWCSSENQYRASTKIELNPETGEITTTANCQRLPADTQRPFSGKIERYIDKLGYEIAKIKVKELQNSEDKKIDLKIILEQNTFEYEESIRSAKIKNANAKAKKSLEESTKKYKKSLDDKDTRIKYFSDDICPYCSESLGDGGEIDHILPRSYTLKNFGTVFNSEGNLLFVHQKCNQAKKETIYKLQDIKASITKEEIEKIINPISKNSYKTFTALTPEQQKAFKYALFLDNSNEAYQKVVNWLRTDQSSRVNGTQKYLAKKIQEKLKVMIPSKEFEFEFILANAEDVSNLRKTYAIQNPLLTKPDTQPPSSHTIDAIMSFLSVYPKIAKTDELPNSQKVLGWIEIKNIKTKPLSKIQKDQKQNLGGTTIFKDSIYQERFAPIYEYENRFYTGFVGSGKTLNFSNCVEIKPKDFESIKEYFKNETHKPNGLKIYEIDKQKTLTLFHNISKGLNDEIKLAELLNKFSYNLLKTSVAEAPKILKDDKKLSTKVYDKTVTLPIKQEWLNFDKAFKKHLEKNNMEYKEKDGKYNVGDDVLNEFCKSYFNIQNKQIRNKARKVFSLPTVEAPSGGFRIRRKNHKGENVYQLVGIYGAKSAGFGLKDGKINTAVDVTLSTLAKSKNVSFKDPQIMELQEYIDMANFRDISDSVNIEGIKIFVAPASTNRPLIRSVISIDKFMQIINNQEFNYLELSDLKFTTDENFGVIKEKFDELFEGCNFAPRDKLKIIKANQNGIEIEFSNNNKTIMKHYDNGVDIKIDD

SEQ ID NO: 6102 - protein, 1673 aa, unidentified
  REGION 1..1673: note = Description of Unknown: Cas Enzyme sequence
MKKILGLDLGTNSIGWALIEIDHENKIVRILGLGSRILTMDAAEIAKFESGAKTESSAAKRTTQRSPRKLNERYLLRRDRLHCVLNLLNSLPSHYKLSIEFENDKGKRSGKFKKGTEEKLAFYQDDNGKFQFLFKDAYHQMENDFRKKYPEMFYQKRNGNQTKIPYDWTLYYLRHKAVTDKNFELTKEQLAWITLSFNQKRGYEKVIGQDEKVQKEGELTDTFVGKVHSVTNVENEDAYEIVLVDNNNEAIQLFKYKEETKISITEVGDLKEVEIVSKYDEEGTIDKKKTEYIINEVREFTIIDVRNTGRKIKENYVFEVELETGWIKEQQSKFTPKWKDAKRDFIIKTKYDENGIRIPKGADKGRNINIPKEEDWTLLKLKTETSITSFNTKNNTIGVASFVYFNLLQNPKQKIKADLITVIERDYYRDELDVIYKNQEQFHPELKNRNLYEQAVQLLYPNNSSHQKRIKEFDFNHLIKEDVLLYQRDLKSKKSLIADCVYEKENFERTDEKTGKKYKNPLKAIHKSNPLYQEFRLWQFIKRLKIIKKEEIVNEEIKINFDVTAHLLTSELKEELYAFLNDKESATEKDILGFLNKRYKDLDINSESYKWNFASEKEPCNPTRYKFILLSKRVLGLKYKDFLTTENEYSLWHFFYSVKKKDEFNKGLKNIISRLLDKSNLSQDYLNELIKSFSSFGGYANDYGTYSEKAIKKMLPFLRLGKYWNEKDVENILSKANQEVKQKVLDKEEINGELKDFQGLWVSSSCYLVYGRYAEVGEVQFWQSPYDIENYLKYEFRQHSLNNPTVEKILVETLHVVKDIWKYYGHEIGTDEEGRIIYNKLFDRIHIELGREMKKNNKQKEKDDKNNKENRKANERIVELLRDLKRNNSSLQEKSPFQQEKLRILEESLLSSIEYDKETTEYELSNGKITKKEIKEITAKEFSKISKSDFERYKLWLDQRYQSPYTGKFIKLSDLFDRKKYEIEHIFPQERITLNALFNKIICETEINKEKKASTGYAFISNAKSKKVFCSAHDAQIDIISIHEYEELVKNNFSGKKREILLSKEIPEEFTNSQLNNSQYISKMAMKLLSNIVREKDEDTFRSKNVLATNGTITSTLKRHWQLNDAWNEIISPRFKRLNQLTNSNLFGDFREINGHKVFINTVPEEANKNFEPKRIDHRHHALDALIIALTTENHVQYLNNISSQEKNDEEKLKTRKGIKFQLTNSRKGFNDEKEWYFLPPAQIKTKDGIVEFEYQFGEAKGKVFKEIALNSLENTIASFKQKNRVIRQRWNKYLKSEDGKLNIEKQEGLKEVVNYNVRKRLHEDTFYGKVKLQNKVISISLEKALNEKFDLVDNELSKEIDNLKQIDEKSMQEIIETLKSKYPKINVYEKFVATRFGNELESFAQIPSDKIIKVIQSITDTGIQRILENHLDNYKEVVDDKTRFDTENAFSSDGVKELNNNIVKLNNGKFHHSIYKVRTSDAMGTKFSVSDEGQKSTKFVVTAAGSNAFCGFYQKGTDRKFYIPTLRESVESLKQGYEPCPATHPEEPEFKLIFVLNPSDLVYVPTKEEKENPNLVDFDNLRKERIYKFTDGSKSNDGNIIISYIPTNIATVLFNLNKEKQKKAGIDLPIQNEIGVGSQGSKNQNSLDGIQIKSVCWKLEVDRLGKIKRIIR

SEQ ID NO: 6103 - protein, 1442 aa, unidentified
  REGION 1..1442: note = Description of Unknown: Cas Enzyme sequence
MKKILGLDLGTNSIGWSLVDVTDQKILGMGSRIIPMGTDRQDYEKGVGITKNADRRTKRTIRKMNKRYKLRRNKLLYILHELGMLPEQFQFKNGIPEATKIQELELLPIKRGTLQLDSLQHYQLREKALGSSISSKEFGKILYSFNQLRGYAGGNNDDDTKKKKEEDSDDENESKKRYEVFTQKVIIQEVEQSDIKFKGRGKNKDLEFNKFNVTVLLDEEELDGETELQNLSEKINQEEELEIRIRRNKKGETTSVVFALPQKTNWRKQMEKTEEDLKQGNLNISQLILQDLQQNKWTKIRNRVFLRHRYQAEFDAVWETQSKTHSILNNCPKETTKKIANYLFPGKSETQEKLRQSAIKNGLKYIIKEQVIYYQRPLKPQTELISKCQFEKEEQVLANSHPLFQEFRCWKQINNLYITSKQEVYNEKKKKSVFQYTDRFLNNDEKQEIYNRLQIQKQLGFGEVAKIVKLKNNKTEYLNGLNVKAKLIGCDTQITIKKILGEHFDALYTSDNIIVEKIWKAIFDNANNGSEYDTNSLKVSSIKEVLKSLNNETLEMELALKFAQSVKFPRKYAGFSTKAISNILPLMQLNPINVTAKIKTNFSNIQHLIETGEILDENLLEDYVISFVKNNPDLLEKGGIMEAFAVSLIYGKHTAEKISAQFKDYHEIQRVDRNFRNPIVEQLANETMQVVKAIWKKYKFNPEELEIRVELARDLKNSAKERDKIYKGQIKSQKTNETIKKKLIELKQEPSQGNIELYKLWSNQNTEDYPSPKKGSEPTQEEIQKLRLWEEQKCISPYTLKPIPLSKLFSSERLYDIDHIIPKSRFFDDSLSNKVVCETNINEEKSNRTAWEYISQQNSILGICSEANFVKYINDIFYGQKKKNLLLEKIPTNPVERQIKDTQYISIAVKNELAKIVGSNNIKTSTGEVTSFLRSRWGLKKLFMELTESRFKQMELWDWNKETNESNSQWIRKYFDKEKEKHIYEIKNWSKRYDHRHHAIDALVVALTTQSHIQRLNNLNKYLQDELTNRKEEFKLEVKEGETILEAFFNLEKKRREEIQRQIESSRYFEKPFKDLVKQAKILLEEMIVSIKPKDKLEIKKDDNGNAQLKIKGALHQETNYGKTKDTKSGLLRDTKSIDISKITAKDIPQIIDEVLKTEIDNHRKKYDSVKEAFTGEGLKSFNENRFQTKKPTKLKPPVYKVKVWYSNKATDDSTLQRLYNDNHKLSVVTGDNYLFMVMKKADNRIFDIASLFDSADIAKKALREKDENYKQLICEDYRVKHKDKPQRVLFTLQQNDLVYLPENIDDPILNFNNNELNEWLNELKNKKNFSKRVYKVAKFTGKDCFFIPHNIANVISIPKDLTEEQKKYLKEQYKDKTIPKKELNFVEYGSYRDCSPYESGEILTKSLNEDTKGKNKKYKPLKIQDTCIKLKIDWLGNISKA

SEQ ID NO: 6104 - protein, 1503 aa, unidentified
  REGION 1..1503: note = Description of Unknown: Cas Enzyme sequence
MKNILGLDLGTNSIGWSLVEKDEIENNGRIIKAGSRIIPMDQTRIGDFEKGNPVSQTADRTKWRGARRLRERNLLRRERLLRVLNVLGFLPEHFAVEIDFEDRLGKFKTENEPKIAYYKINEDDKNYQFLFKNSFEEMLNDFKVQQPDVIADGKKIPYDWTLYYLRNKALTQRIEKEELAWLLLNFNQKRGYYQLRGEEEEEKENKRVEYFNLLVTDVIETTEKKANGEIWYNVMLENGMIYRRTSKLPLFNWKGTYKEFIVTTDLDENGNVKKDKDGIEKRSFRAPKDDDWTLVKKKTEFDIENSGKTVGTYIYETLLKTPSQKIRGKLVRTIERKYYKQELDAILKFQLPLHAELSDNDMLKKCAAELYRSNEIRRKIVEAKDFLHLFIDDILFYQRPLKSKKSLISNCKLEFRTYIKDGAKIKEPIKCVAKSNPLFQEFRLWQFVHNLRIYERERVYLGKTQLDVDVTDEYLPTPEKRAELFETLNDKDSIKQSVLLGLFFKKKNDVARFRWNYVDDAEKTYPCNETRNAILNKLGASGISDSFLTKEKEYELWHILYSVEDKQEIKKAFGTFAKKYSLPEAFIDNFMKIKPFKKDYGSYSEKAIKKMLPLMRQGQYWNEADILPDAKIRIVAINTRLKSIDYTEKRIEEVADDDIKKQVLRSFLTSKERIVGLNTYQASYAIYGKHSEASEINYWKTPADIENFLKEFKQHSLRNPIVEQVITETLRVVKDIWVQYGNGAENFFDEVHIELGREMKNTADDRKRISETVNNNENTNSRIRALLMELANDSEVQNVRPYSPSQQEILKLYEEGALLSENNAITEEILKISKLKQPSKSELIRYKLWLEQKYRSPYTGQTISLNKLFTSEYQIEHIIPQARYFDDSLSNKVICEAEVNKEKSDSTGYEFIADKGGSIIELNFGKKITLFTIEAYEDFVKKNYAGNKTKMKKLLMEEIPDSFIDRQLNDTRHISKLVKNLLSNLVREQGEEEVTSKNVISSNGNITSILKQDWGLNDVWNAIIAPRFERLNMLTNSTMFGNRDNGHFRPQVPEHLAAGFNKKRIDHRHHALDAIVIACATRNHINYLNNEHAKAKEQKTRYELKHKLCFKQKTDDQGNYKWLFYKPWQTFTQDTQNTLLNTVVSFKQNLRVINKTVNRYKKFEPDATGKLKLVTAKQTQGESWAIRKPMHKETYSGKISLRKIKEVQLSAALDNWENLVDKSLKQTIKTFMSQKMEKKKIIDFFKNLENKWNGNDISRVKIYYWETDLAATRTAVNDSFTEKYIQENITDTGIQQILLNHLRQEKYQKQTDDKGNKIEPHTVAFTPEGIEEMNKNMLALNNGKFHKPIYKVRKYETLGNKFQVGQKKQKANKYVEAQSGTNLYFAVYANTEGKRYYETIPLNEVMERLKQKLSPVNELYIDPSIEDITNKTEFNIANLHVQNIYKVVSFTNNRLYVIPNTVSSVIIDKYEYSQLNKLEFVDGKISAKEFCHKLKSNRIGRII

SEQ ID NO: 6105 - protein, 1141 aa, unidentified
  REGION 1..1141: note = Description of Unknown: Cas Enzyme sequence
IELYQACLVELYSKNEAHRNSNADRDFAHLFINDIIFYQRPLKSKKSLISNCKFEYRTYKEKESGEIIKSPIKCIAKSHPLYQELRLWKFVQDLRIIEREKTVGGKLKTDVDVTTEFLKTEEDQVLLFDWLNERKEIDQKAFLKYPALGLKKNADNYRWNYVEGKPYPANETKSLFINKLSKVNNVPANFLNKDNEMALWHILYSVEDKLEIEKALKSYATKNELGDDFVDFFKKFPPFKKEYGAYSEKAIKKLLPLMRMGKYWNESNIDVKTLERIDKIRTGEWDENMQNRVREKSIHLTEIAHFKGLPEWLASYIVYDRHSEGSDITKWKSPDELEEYLRTFKQHSLRNPIVEQVITETMRTVKDIWKMYGDFSEIHIELGREMKNPADKRKSMTAQISENENTNLRIKSLLAELANHHDVENVRPYSPSQQEILKIYEEGVLNSGIEIPEDIAKIAKTNQPSKSDLIRYKLWLEQKYRSPYTGEMIPLGKLFTSAYEIEHVIPQSRYFDDSLSNKVICEAEVNKEKDNALGFEFIKNNEGRIIELNFGKKVKVFTISQYEDFIKQHYSKSRGKMKKLLMEEIPEAFIERQLNDTRYISNVVKGLLSNIVRVDGEQEATSKNVISCTGGVTTILKQDWGLNDVWNRIVTPRFERMNELTKSNAFGQWTNKEGKRVFQTEMPLELQKGFNKKRIDHRHHAMDALVIACATRSHINYLNNESAKPSSKMSRPDLKAKLCYKSKTDAKGNYKWQFYKPWDSFTQDAQVAFENIVVSFKQNLRVINKTVNKYQGYEDGKKVIKTQEKGDSWAIRKPLHKDTVAGIVNLRLKKTVNLSAAIDQWEMLVDKNLKTKIKQLINDGLDKKKIQKFFAEQENKWMGKEITKVELYYFSNEKDVLVASRVNLDTTFNSKKIESITDTGIQQILLKHLSNYDEVTGNKTIEHPELAFTAEGIEEMNKNMVILNNGKQHQPILKVRTYEPMGNKFSVGNSGNKSGKYVEAAKGTNLFFAIYADEDGKRSYETIQLNIVIERLKQGLGEVPETNEKGDKLLFHLSPNDLVYVPTNETINSSINLIQENNRIYKIVSFTGNRLYAVQQNISSTIVNKVEFTQLNKVESDIENNLSIKQFCIKLKINRLGVISI

SEQ ID NO: 6106 - protein, 1270 aa, unidentified
  REGION 1..1270: note = Description of Unknown: Cas Enzyme sequence
MKKILGLDLGVTSIGWAIVAEDNQAVNIMDWGVRIIPYTGTEGDDFAKGKGKSKNQERTTARTIRKGYDRYQLRRKYLIEKLQELNMLPDNSLIAIDKLSLWKLRNNAAIKPLGAAELGRVLLHMNQKRGYKSSRTEANRDKKDTEYVQQVKTRYDNLRDTGLTIGQYFYSELLKNESFQIKQKVYPRNSYTEEFDAIMKVQKGTHKILTDEVINEIRNEIIYYQRKLKSQKGLVSVCEFEGFKKKITKNGNTKEFFVGPKVAPRTSPIFQVGKIWENINNISIKNRRGEILEISNEQKIAIFNFLDTNEKLTQSELFKILNISEKSGWFGNKQLKTGLKGNVTKVAIAKIIGFENLNLQFELKIQENENEVFLVNRNTAEIHAFNKKKVIAAEFENEPLYKLWHIIYSINEKEECINTLQNKFGFDINIAEQLAELDFKTPGFGNKSAKAIRKILPYLIEGYGYSEAAEFAGYNHSNSLTNEQNLQRQLLTKLQNLPKNSLRQPIVEKILNQMINLVNALMEKFGTFDEIRVELARELKQSKDERNETTKFIGLRTKENKLIEADLIEMGIRPSKNNITKMRLYKEISNEQSKLNGICIYCGKQLGVSSVFNVEEVDVEHIIPKALIFDDSQSNKTLAHRACNSAKDKFTAYDYMSTKSTTEFESYLERVNDLYKRLIISKTKRDKLLASHKQYLERKAKGKQTEHDIKLWESFIERQLRESQYIARKAREILMDVSYKVWATSGEVTAYLRKIWGWEDVLMNLHLPVYRQHGLTKIIEIINKDQIHKKEIIPDWSKRDDHRHHAIDALTIACTKQGFIQRINNLNSEDNRKYMFEEIPTGIYDDKKNLLENYIYAQKPFATKLLEEKASEILISFKPGKRLAVNGVRRVKKQGSKQIVQEGIIVPRGALSESKLYGKIKLIETDSKTGKIAKKTIKYIFENPDLIVKEKIKQLVLERLNEYLGNAKNALASLKKTPIYLDNNKETILEYASCFANEYVVKYPVGFGVGFLFSGKEDAKKAIPILNSIVDKSVRSKIEQRLLDEKGKFIDIRVALKDLENNPIWLNEEKKIPIKSVRCTTGLNMVEPIYKNALGDDIGFVKLGNNHHIAIYTDENGKRQEHVATFWHCIERVKYGTPAIIKNPKEVWNTILENPDKYPQSFISKLPSENWTFDFSLQQNEMFLIGLPSEEQEMALNGNNKPLLSSKLYRVRSISATDYNFKHHLETQIEVKVDLPTMKKSLRFKSLGAFFEQNPVKVTINLMGEISKFK

SEQ ID NO: 6107 - protein, 1380 aa, unidentified
  REGION 1..1380: note = Description of Unknown: Cas Enzyme sequence
MKKVLGLDLGTTSIGWAYIREAVADNEQSEIVRLGVRVNPLTTDEIKNFSEGKSITTNADRTLKRHARRNLDRYQLRREELTQLLIKEGWITSGDPLSEDGLATHSTLELRAKAAEERVELKDLARILFAINKKRGYKSSRKAKNEDESGQVISEIDVALRLREEHMTPGEYALELLRKGKKNQPSFYRSDLIAEFDTIWNLHQGTYPDILTEEFKRQVLGKSKTATSKTFYAKYGIDTIQNKGSDKKMKAYEYRVKGAREICSVDVMSFALAEVNGNIANSSGYLGAIGDRSKILHLENLTVGQLQYKQISDKPNSSLKNQIFYRQDYMDEFDKIWTTQSEYYPQLTDELKNKIRNEIIFYQRPLKSQKGLIAFCEFESEQKVKIVDGKEKTVTIGRRVIPRSSPLFQYFKIWSILANVEVKNTTSGEKRLLEEEERDLLFSYLNTRQKLTASDALKVLFGKEAKDWKINYTELDGNRTNAALYAAYETMLEYEGHEVTLARKKPADARRILQELFTTYGIDESILDFSTELKDREIERQSHYQLWHLLYSYEGDSSRSGVDKLLAALREKYGFSTQQASIIANVELIQDYGKLSAKAIKKIVPYLRDDTYDKACNHAGYNHSSSVKKEENESRELDDRLKILPRNSLRNPVVEKILNQMVNVINAIIDHPEMGKPDEIRIELARELKKNAKEREEMVKAISKATRYHDDIRERLRQAPFNLKNPTRNDIIRYKLYEELASNGYKDLYTNTKIDAHDLYSKRYDIEHIIPKAVLFDDSFSNKTLCPRDFNNNVKGSMTAYDCMAEKRSEQLDEYLARVEDAYSSDSITKAKYQKLLKKKGDIGEGFIERDLRNSQYIAKKAQEILHSIVRTVTPTTGRITDKLREDWDLINVMKELNLPKYRALGMTEMQERKYGRKVEVIKDWSKRNDHRHHAMDALTVAFTKPAYIQYLNNLNARSDRGGSIYGIEDKYIEREDGKRRFRAPMPHFRAKAKNQIEEILISIKAKNKVVTKNVNKTKRKGGLHKQQILTPRGQLHKETIYGRSQEYVTKMERVGSKFDLETVNTVAKHSYREALLQRLAEHDNNPKKAFAGKNSPSKVPVVTASGHELPDKVKTVKLEHRYTIRKEIGPDLKIEKVVDQGIKAVLQRRLDEYDGKAKEAFSNIDEKPIWLDEAKGIALKRVTITGVANAEPLHGKRDHHGNPILQDGKEVPNDFVSTGNNHHVAIYRDKKGNLQENVVSFYEAVARVKAGLPIIDRDYKADEGWQFLFDMKQNEMFVFSADGFDPVEIDLMDPKNKALISPRLFRVQKISTRYYVFNHHLNTMAIGGEDFKVKGLAEQQYYLIQTPNYLKTLIKVRINHLGDIVRVYQAGEADIGPSS

SEQ ID NO: 6108 - protein, 1406 aa, unidentified
  REGION 1..1406: note = Description of Unknown: Cas Enzyme sequence
MKRILGLDLGTNSIGWALVDEAENENETSKIIKLGVRVNPLTVDEKTNFEKGKPTSVNADRTLKRGARRNLQRFKLRRKELFDLLQNHQIINDDFILAEDGKNSTHQTIRLRAKAAREKIELDDLAKVFFAINKKRGYKSSRKTKIEEDGTAVDGMLVAKHLYDNGLTPGQYVLELLAQNKKYIPDFYQSDLQEEFNRIWNIQKEYYPEILSISLFNELQNKNKGTTWTIIQKATGIVGKKLEGNATDQKFQRYQFRAKGLTEKLDLEHLAIALQEINNDKNKSSGYLGSISDRSKILYINSKTVGEFLWEQLSRNPNTSLKNQVFYRQDYLDEFELIWGTQSQFYQELTKEFKEEVRDTVIFYQRKLKSQKGLIGFCQFESWQIEKKDNKGNPIINKYTKLPKRQTVGHRVIPKSSPLFQEFKIWQNLNVLQFKNEETKELIEVVKLDEEIREAIFNELNVRGNQTSNYVLKLLARYLKIGKTSLWKSNLKIVEGNRTNQALYKAYLEIAKREGYGFDWTKKSIEEIKQEVIHLFKEIGVPPNILEFDANLEGNDFDKQASYQLWHLIYAAEDDDKVSEEDRLVYGNSDINLKKKLRHKFGFPAEYAKLITNVSLSDDYGNLSSRAIKKIIPHLQAGHIFSEACALVGYNHSQSLNKEELKNRILKERLEILSKNSLRNPVVEKILNQMVNLVNQVCDTYGKPKEIRIELARELKKSASEREEATKGIAAATKKNDEIRAIILSKFGFTATRNDVIRYKLWQELAANGHKTLFTNQYIPEEKVFSKDVDIEHIIPKALLFDDSFSNKTLAYREVNLKKADRTAFDFISSDYNSNLETYIARVERLSKDKVISKSKHKKLLLSALKLPDGFIERDLRNSQYIAKKAKDMLSEVFENVIATSGSITDKLREDWDLINVMKELNLPKYRALGLTELEKRWDSGQEKYKEVEIIKNWTKRNDHRHHAMDALTVAFTTHSHIQYINYLNARRNEQHKKHGNILAIQNSITEEVTRKNGKKRRRFKAPIQNFRTAATKEIEAILISFKTKNKVVTRNVNTTKTNNGRKAKIQLTPRGQLHKETVYARRKRAMTKPIKLNKKFTLEKATLIIHAKQKALVLNHLASFENNPAVAFDAKTLKKNPLVYKNEPLKEVFCFEELFTIRKPISPELKLDKVVDEGVKEILKARLAEFDGKPKEAFSDLEKNPIWLNKEKGIAIKRVTITGVSNAEPLHIAKNHLGEDVLDSANKVVPVDFVSTGNNHHVAIYRDTEGKLQERVVSFYEAVTRVQENMPIIDKTFNAEIGWEFLFTLKQNELFVFPSEDFNPQEIDLIDEKKLALISKHLFRVQKISSKDYLFSHHLETQATTGEDMKKLKVLIGKKYYYYQTPAKLEGLMKVRVNHIGEIVQVGEY

SEQ ID NO: 6109 - protein, 1304 aa, unidentified
  REGION 1..1304: note = Description of Unknown: Cas Enzyme sequence
MKKILGLDIGTNSIGWALLESDFENRRGSILGSGVRIIPMPQDKINDFDKGNSISQTAARTAYRGTRRLYQRSKLRRDRLHRILNIIGYLPAHYAESIDFDKHFGQFKSGTEVKLSHNRSSDKKESEFLFESSYQEMVSEFENSGVKTPLPHDWTLYYLRKKALTQKISKEELAWIILNFNQKRGYYQLRGENIEVDNNKEYITLKVKELKDTGEKVSDKTLYSVIFENGWVYNKNIVKTEDWLDRTKEFIVTTKELKNGEIKRTFKEVDSEVDWPAIKAKTEQLIDESNLTVGEYIYESIKKNPQQKIRGTLVKTIERRYYKEELNLILSHQEKYHPELTSPQLLKDCLMDLYSKNEAHRNRVLNENVSYLIAEDTLFYQRPLKSKKSTITKCKFESRSYTQKDKTTGETKVVNQAINAIPKSHPDYQEFRVWQFVQNIRVIDLDKEVSGKKDADVTLDVLPDEESMVRLFESLMARSTIKESQFLTYLVKDGKLAKKEVANYAWNYDSTKEYPCNTTRASLTKALKSVKDVSPLEFLTKEKEVHLWHIIYSVTDMIEYRSAIENFAKKNNLDTESFIAAFGKMAPFKNEYGTLSYKAVNKLLQLMRMGSYWSEEAIQSQTLNRINNLINAEYDDGISDRVRDKIANYTQVNQFHGLPLWLASYVVYDKHSESTDTAKWESPSAIQEFVDQFKQHSLRNPIVEQVSLETLKVIKEVWEYYGNGEKDYFDSIHLELGRNLKNSAKKRADISTRNNQNQATNERIKRILEELMSDHSIKGDVRAYSPSHQELLKLYEEGIYHNGTYTKVSEDEINKIRSNTQPSKKEIQRYKLWLEQGYLSPYTGKVISLSRLFTTDYEIEHIIPKARYFDNSMSNKVICEATVNRHKSNMTAYEYIAKSKGKTIDGEDLFSLQQYEEHCVAYFKTNRQKLKNLLSEDIPEGFINRQLNDTRYISKYLKNLLNNIVRKDGEVEGTAVNLLAPPGAITSMLKYQWGANDVWNELIAPRFKRLNKEKDTEDYGYYDKEINAYRIAVPQDLRQGFNKKRIDHRHHALDAIIIACVTRDHIHYLNSLNANNTNYALKKKLFREEKGNITKHYIKPWKHFTTDVKAQLNNMVITFKSNTRVINKTNNKIWKYVQDEKQQWNKKLVKQTKGSNWAVRKPLHEETITGKADHIPVGKHKIAATKRISLTEVTNAKILNKIVDKQVIKLLTKHLDRYTDESGKHVYAEAFSHAGIEDLNNSITALNDGKHHHPIKKVKTSVESTNRPLGDTYNNPSKYVKAAKGTNLYFAIYLDEKKGKRTYS

SEQ ID NO: 6110 - protein, 1081 aa, unidentified
  REGION 1..1081: note = Description of Unknown: Cas Enzyme sequence
MGRPIRYRLGLDLGANSLGWCIVQLNDANEPIGLVRMGVRLFRDGRNPKDKASLAVARRMARGMRRRRDRWLKRQHRFMQALIAHGLMPADDAARKALESLDPYSLRSRALDEALTPHQVGRALFHINQRRGFSSNRKLNSSVTDAKKKKEQGAINTALVATHKLREDQEARTIGQLLAARHEKREAVRARRSSSDEKAPYVIYMDRGMISHEFDEIWKEQSKHQPSLFTEAARKELHKELTHQRDLLPVSVGRCTFEPEPRAPKALPSAQRFRILQDLNHLRIEDQLGQWQPLHLDQRNLLADLLETRASPLPFDKIGEKLKLGKTVRVNLQSEARKDIKGNSTCSALSAKDCFGKSWQTFSLSEQDEIVERLIGDEPECVLIEWLTKHYELSTEHAENVVAAHLGVGHLNLSKTAIGKLLFELQRAVVPYSRAVEMAYGTSHSDLAVGAARDRLPYYGEILHRHVIMPIRPKTDGSIDADAERHGKIGNPTVHIGLNQLRRVVNKIIERYGPPTEIVLEVVRDLKMSEEKRKKKLKEQNANKEANKLLRDELRARGMSDEGDNFLKLKLWHELKALNPMAVRCPYTGERIGQERLFLDVEIDHILPFSRTLDDSSANKTLCITRANRDKRDDTPYEAFHSSPGKYSWEDIQQRLAYLPEKKRWRFAPNAMQLYMDKYGGDFLKRHLSDTAYVSRVAREYLSYLLPEDRRQKDIRVTPGLLTSLLREHLGFEKSRLDQRHHALDAAMIAVTDMRLLKTISDLSRQGRLEGMKHRIVVPPPWDGFHQAVSGALDRIAVSYKPDHGHEAAMHDEAAVGFEKPIADDNLDDLIATQVVRRIPIEKLKPKNLGFSGKAQEDVGDEDDAEDDEITGRQVKSPSLRERLRAHVGSARGVDFTIKLKEFSKLTGTRSVRITEPLTVIPVRDDSPRHKHRAYKGYRANSNYCFEIYRQDGEWAAEITPTYLIQRIAEQPGWQERRQDKTKTIVKGLPLVMRLCKDDTIAIGESDPAKRTILRVVKFSKGSVTLAEIREGGDLKKRNSMPAHKDPFSYMDRAASALFKLKARRVIVTELGFVHDPGFKP

SEQ ID NO: 6111 - protein, 1370 aa, unidentified
  REGION 1..1370: note = Description of Unknown: Cas Enzyme sequence
MNKDTRTILGLDLGTTSIGWALVKEGENADIIKTGIRVVPLSTDEIQNFDKGKSITTNADRTLKRSARKNLDRYQLRRKDLIDTLLKNGLINSETILPETGNHSTFETYRFRSTAATGQIQLTEFAKVLLMINKKRGYKSSRKAKGEDEGVAIDGMEIAKRLYDDNLTPGQLVHARFEEGKTTVPDFYRSDLQQEFDRIWKFQHTFNPAFITPENYEALVGKTKTIAASYLRKIGLEGVELKGNLGEKKKQRYAIRSKAVDQSCSANELAEILPEIIGNMNTSSGYLGAISDRSKELYFNHQTVGQFLYQQIQENPHARLKNQVFYRQDYLDEFNTIWEKQREFYPTILIEELKREIRDTVIFYQRRLKSQKGLISVCEFEGVKKEIEVDGKKKLKLIGPKVCPKSSPLFQEFKIWAVLNNIELLEGNKRKGERLLLEDKQRLFTELNWKEKLTANEVLKLLGVDKGFKLNFEQLDGNRTNTALLKALEQLFNAEGYDELSLDKLNAKKLIETILPLMETIGIHTEILNFNSDLEGNDFERQAAYQIWHLLYSFEGDNSTSGIDSLRKILTEKYGFPYETNTVIANIALQDDYSSLSTKAIRKILPYLKEGNQYDVACSLADYNHSHAETTVDLDNKVLKDQLTVLSKNSLRNPVVEKILNQMINVVNQVIETYGKPDEIRVEMARDLKKSAKERNDTTVAMRKATEEHERYTKILQSEFGLSYVSRNDLIRYKLYLELEQNSFKTLYSNTYISKEKLFSGDFDLEHIIPQSKLFDDSFSNKTLELRSVNLKKGNATAYDFVLAEYGEEGLKQYEERIKSVFGNQLGKKTKTRKLLLQEVDIKEGFINRELRDTQYIAKKARELLLELVRTVGTTTGSITDRLREDWQLVDILKELNWEKYQKLGMIEEFENRHGQKIKRIKDWTKRNDHRHHAMDALTVAFTKPSYVQYLNNLNARSDKSSSIIAIQNKETYFEKDQKRRFKPPMPLSEFRAKAKEHLENTLVSFKAKNKVSTKNKNITKTKGGKKTTISETPRGQLHLETIYGSSQTYVTKLEKVGSSFDAEKIGKVANKKHRELLLKRLEEYGNDPKKAFTGANSLVKKPIYLNTLETHSLPESVKLVTLEKQYTIRKNISPDLKIDKVVDKGVQRILQERLDEFGGDPKKAFVNLEEKPIYLNQEKGLVLKSVTITGINNAVSLHTKKDHFGNEIMDENGIPIPVDFVNTGNNHHVAIYRDEKGNLQEEVVSLFEAVTRKNQGIAIIKKEHEKRWEFLFTLKQNEYFIFPNELTGFDPKEIDLLDTSNFKKISPNLFRVQKVTSGDYWFRHHLETTVEVTTELKDISYKRIQSLSPLNYIIKVRLNHLGLIINIGE

SEQ ID NO: 6112 - protein, 1045 aa, unidentified
  REGION 1..1045: note = Description of Unknown: Cas Enzyme sequence
MKIRETIIKLRNGFGIAEKITLGLDIGIASCGWAVIDNKNKKILGAGTWGFEVSEVAKTRESKAAVRRVARGQRRRLRRRRQRMREMRKLLHENGLLSSALPAKDEKGVAKPSLNPWELRAQGLDRLLTGEEFATVLIHIAKHRGYRSNSKSDRASNAPIEDKKVLSGLASIEGKSGKYRTVGEMFAQDPEFADKKRNRDGDYSHTVLRKLHEEEVSALFRCQRKFGSAMAMADMEEAYASLAFDQLPLQDSEVMLGKCPFEPDEKRASSLAYSFEKFRYLSKLANIRVDDGSRSGRRLTPEELSKAVNGFGKTAKAISWKRLIALTGLAKDTRFIGVGDKDMGRDVARNSKGCAFGSYTLYRIIGEAAWNSLVQSPEKLDDIAHVLTFREDVGRIEKGLRELQLEPAIFDAIIRGVDEGGFAGFAKAGHISTKAVRLIIPGLLQGNFYSESCELAGYDHTKENPANFESMTNPVAKRAITETLKQVNVLVRHLGLRPDQIHIEMGRDVGKGPEERGKIEKGIKDRTAAKEKARAAFCELVEKADCSFGELQRYELWKEQGHKCMFCDDYINPEDLCDGRHVCEIEHILPLSRSHDNSWHNKVLACVKCNRDKGDKTPYEWFGEDAARWDEFEFRVKALKADGKIKGFKIRNLLMRDYEEREQGFIERNKNDMRYAARVILSELKLLYSDQEFSDRRRLYSRPGQITSILRRLWGLDRFKYLPKEGKQERIDDERHHAVDAMVVAAASESLLQRLIRAMQEREDKGLPPLKLRDFKQPWPDFSRQVEAARDIAPVARGENRRARGAGHAATIRQIRVEDDKRIAYERVAVDKLSQAKLERMKDPDRNQDTIDALSKWITAGKPADKPPRRNNGFVIRKVTLRSEKNPTTQRAGFEAHGGLVDNADMVRVDVFEKDRKFHLVPVYAHQVADREHWPQPPDRAIPSKTTPEHDWLRVDNSYSFKFSLYPYSWVQTVKRDGVVVEGYYRGSDRSTGAINLSEEHSRQRLIRGIGVKTLHSFKKFQVDRLGNKNEIKSEVRTWHGVACT

SEQ ID NO: 6113 - protein, 1358 aa, unidentified
  REGION 1..1358: note = Description of Unknown: Cas Enzyme sequence
MQSIISLDLGGKNTGFFSFTSKDVSSIKNFQSGTIIYDESFVLSQVGRRGKRHTKRNNLRNKLVKRLFLLILQKHYGLKIDYLPNEILGLFNKRGYTYASFEINENEKEQLESSILKEFLNDRLSSYNIENDDETEDFFNQIASDEVEFREYKKHFEDLFKVSTHQPKKQLELVEEIKKEFEKDDAKEILDGLKIVKKIIDEFEKQKNQGNLPRAKYFEELNLEIKQNQKIQDFFKAHNIKIQDMKNLIGNLSNYQLKELRRYFNDKNMVKGDIWKPEHLFKVTWRFVASWHPKNDEDKARQKENLANLKYKNIIEFLTTTNPIMTIPPYDDMNNRGAVKCHTLRLNEAYLNKHLANWREITQKLANENQKKDLDISTVKGWSIDSTLLHRILDTSSQIDEYELRSEKPSLLLEKTLGNQANKFHNFAQDYYELIRTKVRTGIWTKDDYMLKKCDHNPPYKNNQIHNLIAGILGVKILPEQFAKFETELWNAKFGNKKLSSYCKNIEELRKSHGNLFKSYIEELFKEDRKEFTKEEQSDKKLLETKVLDEWVEKIGEFLGIEEKYRARFNNHFSMAQLHTIIDTKRSGFNSTCKWCSSENQYRASTNIEVDSETGEITTNANAQRLPADTQRPFSGKIERYIDKLGYEIAKIKAKELQNLHEEKIELKIILEQNAFEYEESIRSAKIKNANAKAKKNLEELTKKYKKSLEDKDERIKAFSGVIKNKDNSYSNGICPYCGQSLGEDGEIDHILPRSFTLKNFGTVFNSEGNLLFVHQKCNQAKKETIYKLSDIKAPITQKEIEEQIATIKGYKTFSILKPEQQKAFKYALFLDKENESYQKVINWLRTDQSSRVNGTQKYLAKKIQEKLKVMLPQIEFDFEFILADAEDVSLLRKKYARENPLLKKPDTQPPSSHTIDAIMAFLSVYPKLSKQEELPNSQKVLQWVEINNLKIKPLSKIQKDQKQNLGGTTIFKDSIYQERFAPIYEVENKFYTGFVVNSKILDLSNCAELKAKDFESIKEYFKTKNQKPNGLKIYEIDKQKTLTLFHNISKGLSDKLKLAELLNRFSYNLLKTKVEEAPKILKDDKKLSTKVYDKNIILPIKNEWQNFDKAFKKHLEDKNIEYKEKDGKYNVGDDVLTEFCKTYFKIQNKSIRNKARKVFSLPTVEAPSGGFRIRRQNYKGEDVYQLVGIDGAKSAGFGLKDGQINTAVDVPLATLAKSNNVSFKDPQRMELKKYIDMSAFRDISDSVSIDGIKIFVAPASTNRPLVRCVIFINKFMQIINNQDFNYLELSDLKFTTDESFGVLKEKFDELFKGCNFAPRDKLKIIKANTKGIELEFSNNNKTIMKHYDNGIDIKLDD

SEQ ID NO: 6114 - protein, 974 aa, unidentified
  REGION 1..974: note = Description of Unknown: Cas Enzyme sequence
MRRRRDRQLKRKARMMRTLVAHGFFPGDDAARKALQLINPYELRAKGLDQALKPEEFGRALFHINQRRGFKSNRKTDKKDNDAGALKIAISKLRQSLVDEHCRTVGEWLQKRDATGQTVRARYRQQRVERTDGKTSILKSYDLYIDRAMIEAEFDALWRKQAELNPVLFHDTARDELKDCLLHQRALKPVKPGRCTLLPDEVRAPLALPSQQRFRIYQEANNLRVLREGMKEEPLTLAQRDQLAAALERNPKRSFIQIKKLLGLGGEVQFNFEDPKRQELKGNATSATLSKNEHFGASWFDFSEDHQDAIVMQLVSEENEAKLIVWLQAETGVDEARAEAIANAALPEGYGSLSAKALIRILPPLRGAVQTYDKAVQAAGFEHHSRLNTFSEVPGLTFDTGIERIDPQTGEVQRIHAFNALPYYGERLTRHVSFGTGAITDPPEKRFGKIANPTVHIGLNQVRVVVNAILKRYGHPAEVIVEVARDLKQSQEQRKEDNERQAKNQLRNERLRADAAGILKIAPERVRHADIQKLILWEELSFDPADRRCPYSGAQLSAAMVLSDQVEIEHILPFSQTLDDGLNNKTVATRQANRVKGNRTPWAARDDFAVQGWDYIGILHRAEQMPRFKRYRFGEDGYEKWLKDDKGFLARALNDTRYLSRVAREYLSLICPQDTRVIPGQMTAMLRAKFGLNDILGLDGEKNRNDHRHHAVDACVIAVTDQGMLQRFAQASASAREKQLNRLVEDMPLPWPTYREHVARAVHNIWVSHKPDHGHEGAMHNDTAYALLGGGMVSVRKTVDGVRQKEVGALKVIEFSDSSALQRHGQLPNGEPRPYKGYKGDSNYCIEIVRNEKGKWEGEVISTFEAYQLVREHGAERLRHPSLSLSGKPLVMRLVKDDTIRLTHADARRLVRLAHANAAGIMAFAELHEANVDKRNRSKQLSYIFKTAGSLQKSSARPVPVSPLGELRDPGFKE

SEQ ID NO: 6115 - protein, 957 aa, unidentified
  REGION 1..957: note = Description of Unknown: Cas Enzyme sequence
LVSKCPFEKHHKSVTKSSPYFELFKILQKVNDLSWNTLDGKKHFPTKEQKQRLREVLWSGKLNSKHKLTVTQIKSILGYGRNNRVYFNFTELDGSKTYAVLKAALMKAGIESPERYLFFNLDRHDEKAGLFELWHITYSLPTEKEVVNTLVKRFDFSEKQARIIAQNVGYTTDYGNLSTRAIRKLLPHLQDGLNYSEACDKVNYDHSGYRTKIQLQPKLHLINKNELRNPVVEQILNQVVNMVNLVVQEYGEINEIRVELARELRNSARTRKRISKSNTKNKKNNDRIRKELKEKHGFKLVNGRDVKRFILWEETNKQCLYCTKAISGTDVLTGNADIEHILPKSRSFNNAMSNYILAHKSCNANKGQMTAYDYMASKGEKELDQFVSKVNDFYGDGKGSISRAKFENLLCKGKDIPSDFVERMKKDSQYIVKESVKLLKYICPNVYTTTGQVTDFLRDEWELKHLMQDLNIDKYKAIDQIEEKTIKTGNGQTKTFSAIKDWSKRDDHRHHAVDALICALTDQKIIFKLNNLNKIYQYERGSLTKDEIETDEKFLDGKFSLKEFSDHKGNVIPCAIPNIRQEAKKHLEKIFVSFKKENSKVLTKNTNRPKNSIEQTTWVPRGRLHEDTVMGKIKRIADKKVKLNGSFSLNDLKMTANPKIKKILTQHLLKYDNNPKQAFLAKSLKQNPLLYKNEHLKEITVYEQVYTKRVAINKDKDITNAQIDKIIDTESKRAVKERLQKHDGKIKKAFKNLTKNPILLKNGMIMNTITVCDESKIIEVRNGYAISGKNHHVLIFKDENDKYNEKVVSFWDAVKIGLLNIDISGKPYPIIERKNDAELGQFQFSLQINDLVVFDLVYSKNPQEKNELDFFDEKNRKQISDKLFRVQKISKNKSGQFIIDFRHHLETKVERKDKEGKKINESKLKHITWEKISKNSDLARLTKIRLNHLGKIKKIGE

SEQ ID NO: 6116 - protein, 211 aa, unidentified
  REGION 1..211: note = Description of Unknown: Cas Enzyme sequence
MKRILGLDIGVSSVGLAIIKDVEGKKSIENLAVRIVPEDSDFHGKFYSGNTASKNLGRTIKRGMRRSNQRFKARRDKLKSILEENKMYPDETLFNLSATELYGLRSKAVTEEISLQELGRVLLHLNQRRGFLSNRKSVSKEESSSEYKERIVTLENELGGLTIGQKLYKELQCSKNSFDILLRERTYQRVSHIEEFLVQATNIIAEERFMT

SEQ ID NO: 6117 - protein, 999 aa, unidentified
  REGION 1..999: note = Description of Unknown: Cas Enzyme sequence
VADELVLGLDLGTSSIGWGLINLSDRSKPIVDSGVRIFPEGVDRTRGEKSLNQERRTARSLRRQTYRRVRRKRRLLQSLRGANLLPEDMGALHNILNDAINYPVYQLRTKALDEELSHYEFGRALYHLGQRRGYLSNRKTGAEKDGAVNAGIQTLNEEIKQASARTLGEYFAGLERQGERIRSFYTARQMFVDEFEAIWNRQTQFKPNLKAHKKRIFNAIFDQRPLKVQKHLIGKCQFEPDRKRAYAATLVAQEFRLWQNLNNLKVLFADGSERFLNEKERLKLYESLKTAKSKSWGAIKKSLGFYEADRFNLERVRKTGLPGNQTAAIVSAAIDKKRWKAMPTRQQEQLVFDLLNIEQEEALKRRLVNHWKLDNETAARLVEKSVSFPRGVMHLSHKALRKILYHLRARTSPEAVGIRYDEACGLAGYHHSDRPDKPPEEFLPLFNRNLRNPMVERAIHQVRRVVNAVIREYGQPGIIRVEMARDLMNSRKQREEIQNRQRDNEKANREAKKFLEEEAGIPNPGGGDLLKYRLWVECGRQCVFTGKSISVHQLFGDAPVFEVEHILPYSRTLDNGYMNKTLCHTDANREKGKRTPKEAFSGSRYDEILQRAKKLPLGKFRRFSVDLEKTDRDFVSQQLNETRYIAREVKDYLSCLDCKVESVKSGEITAVLRRSWGLNNILSDSGEKTRLDHRHHAIDALVVALVSRGTVQQFSRCHAFGTYGQLRMENLPCPIDDIRRHAEQTVTQLVVSHKTNHKIKGALHEESLYGLTGNRDEHDVPEVVIRKPVASFKNKKQLEEIRDPAIRAKALSRLDEAGGDIKKALQDKENPFGFATKKGKFVPIKSVRCVSNRSVTQVGQGLRARQVYTRGNHHIEIVELIDRRGRPEWKARAVVTTLEAMRRHARGLPVVDDSSSESERFICALHRDDMVELEDKECKGERIICRVQKMDVNGRLVFRKHMDADISDPKKEIRFTAGSLRKSAPRQIRVNCLGKVGNR

SEQ ID NO: 6118 - protein, 1072 aa, unidentified
  REGION 1..1072: note = Description of Unknown: Cas Enzyme sequence
MTEQQKETIWSFDLGTGSIGECIRCGEKISHLHSLILPKDFAALGEVRKRRHQIKTRIAHKKREEWWREKAKEAGIEVIETGHIDAKGIFTKPDERISKQFPSDNDKTIYNSCLLRIALLQGAKLEGWQIYKAIWSAIQHRGYDAALPWKKGLKRNLSSKENEVSAETANLQNQTEDIDPDEQENLTAVENYQKELEKIFSDKKFHLPCYYEAYKLGIWNPKFPDKLDGKLALNPEPARNKDNRTTHIPPRSLVAKELLLMLTKASEQYPKLKDKVRYILYGPAEKEYASCVDTKYKKYRGTEWDAQGLLSQKIPRFDNRAISKCVLIPRLNVCKAKDELNQEVTFLMKLKNIRYVNITTGETDIPLPLKNINDLFNTHKNTKHMTAKQVEKYLKTHLGGVPLAKNYEIEPPKTEGRSRFCRPALRILKEIILSGKSPCQYYKEWVATNRNHDPQKGLVENDLKFLKTMPDDWNKFYIPDHRLEESTLNKNNREQAISDILSSITNPVVRHRLILFVKRLDYLEKISGGKPDKIILEFAREGEESFQGAKNKNRLKWEKIQNENRQKKDEAYKSLQNSNITGKQSLLKMMLFKEQGGYDFYSMSPLEISKLDDYEIDHIVPRESGGSDAYINKILTTASNNRSKGNRTPYEWLSHNKSGWTNFIDAVRKSGLHDKKKTLLISENPADLINKYSDLASTSYISKLAQKIIHLYFGWPQLTEGSQRKVIIANGGLTAKLRRQYKLDRLLHSQLTDNEFIDLIKQGKIEEKNRSNPRHHALDALVISMIPELKPDPRTQKDVLPAWFHKDYCRKIIENVYPEPIRFKKPVLAETIYGLRKINRNGNISYVFVTHFGTGTRIGDFRKLENAKKYVSKIFDDRIRDDFENKLQTCATQQDWDNFLDNYTVGGSRPRRILKIESSQIEQQIGEKLENGTLGRYGEYIRGKMPGQWLKNKKEFFGFIVYQNKKGKWAREPIYAFESPYEKTEQFKKDQTVKNPVFFRSGMLVEIKNDCNIQNPEQKVTKGYWYLDTIMHTNTAKLTSIDGYKSVLSSLNNLMTNGKMKPVHKTHRLLLM

SEQ ID NO: 6119 - protein, 1064 aa, unidentified
  REGION 1..1064: note = Description of Unknown: Cas Enzyme sequence
MGNHVGLDIGIASVGWAVLDPASEEIRGLGVRTFPKAENPKNGASLALPRRLARSARRRLARRRSRMEALRQLLITRQILAPDEITEAFVPKAGDPTPYQLRAEGLDRLLTNREWARVLSQLCKRRGYKSMKLASSSASDKSEEGAVKSAIAENAARMAEYGYRTIGEMLWRDEHFQESRRNKGDYKGVASREQVLDEITRLFEQQRTMGNPHATPEIETDYLVILQSQASFLEGEALRAKVGRCSLDQTNPRAPLASPLFERFRLLDKLYNVRYTVPGSGQRIGLTPEQREAVLGRAFGKTAKLTYADVRKTCGIPDEARFVGVRYGRETEDLSAESKETLPLPKAWHAMRRAVAGCPKGTWDTLAGDTVLLDSVVDALTYFKHEEAVRRELKALGLSNDVIVALAELRFSGHGHLSRETLRSILPHMEAGLPYSEACAAAGYHHSQKAAAERSPKLPPIPTDDIRNPVVIRALTQTRKVLNAIIDEFGPIEELHIEFGRDVARSYDDRRKIEKQHKDNRAKNESVLEDIDKVYGIASPRPLDIVKYKLWKEQGGRCAYSGAYIDAHRMLSGEPGVAEVDHILPHSRSFDDGYMNKVLVTTAENRNKRERTPFEYIGADPERWHEFEERVQAMHLPRPKRERLLRRDFDEHASEDFRERNLHDTQYTARFFKTFVEQSLQFADERKAPVITVNGRATAYLRTAWQLQKVRAEGDLHHALDAAVIAATTRSMVQKVSRFFSVRPLRNPDGIYVDSDTGEIVEAKHVPEPWEGFADQLRERLSIRFGPDPFGELARYGEGPKPVLVSRMPNRTVRGEVHKETVKRIEGTDDRGLIRTSKRVRLEDLTPKLLESMVGRYRDRVLYEALAKRLAAFDGDGAKAFAEPFYKPARAGRQAPRVRAIRVYDAPSSGGTEVRGGFADNGVMVRTDVFERDGKYYLVPVYLKDTVAGTLPDKAIVQGRPESQWREMDESYRFLFSLHLNDPIRLVRRSGGTETAIGGYFRGADRSSGCIGIEAHDSSWLRRGQGVAQGIVAFEKYTIDPLGRSIHRVRQEKRRGFPDGGDKQ

SEQ ID NO: 6120 - protein, 1006 aa, unidentified
  REGION 1..1006: note = Description of Unknown: Cas Enzyme sequence
MIADRRELEAALATLPGDKSPWELRVEGLDRELDPREWTRVLFHIVRHRGFRSTRRGEMEVASEDEKKKLGAMLEGIRSIHDGMLRHGYRTVAEYMTSADWPFGDQKRNKGGQYICTIGRDDLIAEARALFAAQRSFGNPHATAEMEERYIEILDEPPKLTEGDDLMKKVGRCFLEPQERRAPRATFTAQKFMALQTLVNQRLTSATSTEGRRLTPDEIQTLFKEALEVKELKYKRALKALGIADGWYFEVRGRKKKSKDLADLQSETLLKLDSYHKLRDALEKDFPETWRRLRSDLGLMDEVASRLTYWLRPDSAFQALVDLGIEDAAARRLADTVVFDGHARLSLKAMRALIPFLEQGHVYSDACAMAGYDHSRRIAGEKKDRIPPLDTLEDFNSITNPNVKRALTQARKVVNAIIAEYGVPSRVVVELAREAAMSPEKRREIEREQLKNRNEKLQRFQHILEIAPGVDPERVWRKHLLYEQQGGKCAYSLKELDLKRVLTDSTYTEIDHAVPRSVSFDDSLANKVLVLTEENRNKGDELAAVYVRRAHGDDHFERYKAWVQGSAMPAKKKRLLLTEELSEDQRRELQGRYLVSTQYAARYFLRVVREHLDLPETRALAANGRMTNDLRYHLGLAEQKDRQASDTHHAIDATICALADPKLVQRMARYFKLKEIATHTPDGRWVDPEGVIIEPPSLAPWPTFREDVIQAVQGIVVSRMPNRRLSGRGHKETIYSLKHVRKHLGDVPARGKIALSASDPRPTKRTKLAQLSDTQIRQILEKPSPILVDEDANWRLYDLIRERLREVEHESGKTWAERAFGPQAEPLRMPTNDGRPGPVVRSIRLYTNTRSGLAVRGGLAKNDTIVRLDIYRKPNKTGKMRHYVVPVYAADVAAGWVPKRAATAHKPESEWLEMDASYEFMFSLHPGEYFRVWKSEKTPGPLLYMTRFDRNGVQVFGNLHDRSNRRDDGAMNPVRTAMATAARVEKIEVDLLGEAHPVKHRARTAS

SEQ ID NO: 6121 - protein, 1176 aa, unidentified
  REGION 1..1176: note = Description of Unknown: Cas Enzyme sequence
  MOD_RES 54..71: note = Any amino acid
  MOD_RES 1083..1084: note = Any amino acid
LPLRVLRKYFNDPAMKEGDYWNEERLKKIFLREVRSWHPSGDEQLRERRRRLIXXXXXXXXXXXXXXXXXXRRLIEALNESETMWDFWKKIDPVETIPPYEDMNNRRIPRCRTLYLSPRVLDQEYPLWREAIQKMLQEEPEMGRGLWGESCSSALQRQRIEEDKRLARVLQRFLDRAQERDPYAFRRVAHGNPFQDVSSLEALDHLERLIGPEAAVQLRTLAKEYFSEIEKAKKGLWDQRRSLFYRCDQHTKHKVNVSHLLIGDILGVPLVSEDVPNLLNFLRQTCVQRKTLLKIMEECSKKVTQKGNLLKSQVEVALYKRSKNLELNEEESSLLSLVESVGVAAQEIAGAYCLGDEGERIANVWSFAQIYNILEKDRHGFSSLCEACHEENAFRSRVSDGAASFVRLVADSVRPFDGVVARLVEKQAGIISKQVITYLQGKELSHSSEEHFTLILEQNEFSFEEELRDLKKKPKEKESLKEDEFYKSKFERIVSFNQHCPYTGEIIENGDIDHILPRSWTRRMYNAVFNDELNLIYASVRGNREVKLHYPDGICDFEHLHENFLGELYPGNTREEIKDLVWRTIQELGIDRQQRIVFSRLDNSQKRDLRIALFIPKYRQYLIPYLFNALSAKVNGTQAYLAKRIVAKVRKAFPSLKFAVIKVPSDSIYQQRSLLARENPIFKKEDVQSLYSHVIDAVIATGIVENVEDYHVLLPRSVGTISIESKSSLYKKKIGSLFSTRVFKDGIYGEKFVPVLVYRGKLYFGFSLNNALRVPEGSEKAFFECLAPFLRYQKNSLSDTAWETWVQASQERLYRFFVNKQKAFEFYEKVAKNPPTEEEKKVFHLLEGLRYTTQRCDVSSLLIKNNTYQRKEELLKEGNFAIKIDIPSMFGCRALKGTLFFPGRASIERFLELPTVSQALGQKISECGIKIEDILREAKENIFHPYGNRNPGEPRVKARKVFAFDCLKKPSGGVRVRRKTPEGRFVYQVVDIYDRLYVGREIVNGRFGESLIHQGILQAPGCVPVGYLYRDIRGDIVLMDEWRELLLSEEEKKKVQRVWACPGTENRSYYRLGFSREQFFAHXXVPYLGDQDLRERLERSGLEFYKLLPSEVKLRYPDHWELYENLSGLLVVPRKNDSSGKIKIVEASEDLVIIHYEANGFMPGEAQRRYIENRPH

SEQ ID NO: 6122 - protein, 1073 aa, unidentified
  REGION 1..1073: note = Description of Unknown: Cas Enzyme sequence
MKYRLGLDVGTASVGLVALELDGDDRPVKPVWHSVRIFDEPLLQAKRGGVGEPKKAARRLARQQRRGYERRSRRMKRIAHLARLMGLDPETIESDKGQRIHELRDSAVTSEISLPDLLRVFLVMGKRRGYAGGFKAKKGKDNGQVETGIGNLKTAMREHGCETLGQYLWSRIQHGQHLRLKDDGLFADRQMVEDEFNRIWKTQEKYHQILKKHYNGKPLQNFFYKTIVEQRPLKSPAAMVGNCSLEPMLPRAPMAQPVMQAFRIEKQIADLRWGTTRRAQQLFPEQREVIREQLQDKKEAKFTSLYKELKKAGCPGPEERELNLAHGDREALTGDRTAAAMKSLNLLEKWRELTEGHQLSVINLLADMGSPEAFDAPDWDKKLKGSNGVERKIKPEVKHFIDEMLETGKFDRLAKMGFDGGRAGYSIKALRKLVATMRERGVDEHGAIALAYPEAHKSNPELLGKDMQRSEALSAHRETGSTVVDVALGQVRQEVNAAIARLGTPPSEIIIELSRDMKTGLKARDESIKRMRANEKRRREAACEIEKLTTRSATQSQIRRYLLWKEQGEKYCPYCTDPINLSDVINGNETEYEHILPQSLTRIGKKRDFLVLAHKACNQAKKDKTPWQAWGQDEERWRIIEHRAEQFKHKGKARQLLIRDFESEALDDDVINDFTDRQFQETAWIAKECGKWLRSICSNVFVSRGLLTAHLRRTWGLDTVIPEVRYEEDMPVFDDDYQPNKKESDQTACKVSKEDFDRYRSHWEGHPVSKDNRIHRRLNKRIDHRHHLIDALVIALTSRSLYQRMAADYKKVSDSGPKTLRLYAAPELKDIRRRALELVRTCLPSHRPDRWLAGNMFKENPSAIREENGKRFYAQRKMLKGLSEKDIENIVPQSLRDVIRTTFEQRIRAGKTPEQAWKDILHPQYKTPIRRVLIRKNAAQDAVRVEHGNRKTDLYKYLEPEGYVCLEFDSEDADAEPRLIRLHEAMKPERQRRSSLNVVRFYKNDTLYDARDEKHYVIRQIKKDQGPSLMLSPITEAVADIGKVSSPRQKKVSGKQIKKLKLVKDGRQSNFAG

SEQ ID NO: 6123 - protein, 1059 aa, unidentified
  REGION 1..1059: note = Description of Unknown: Cas Enzyme sequence
IHPEYRFVKGRGYENTGRFDDEHHLLTYCNHKPRQKYHQSFYDVAGVLQVSPEHLQKIIGDQSDDALVKWLKGFHGLPTLCKKSADAQKKHRGALKISMDKAIRDPDKKNDLYKLNESIEKIARKIGEALFGKIDEGPEKSQEILEQKIKKFRSVFSFAQINNIAFTERSGNANNCAVCSMDNAQRMQMVEVTKENGKEDTRTKARRLPAIPTRMFDGAVMRMARIVGGAIAEDKWQKIKGELEAENHVHIPIITESNRFEFEPNLKEIKGKNLRNAEKNDRSEGQKKLSVSKDDRIKEASLGICPYTGDPLGNAGDKDHIIPRSSEWGTLNDEANFIWASDRGNKEVKKDNEFSLAELDPKYKRKQFGTDDDQEIEEWIIRQIGDGEGEFKFGPYRNFINLTSDQKKAFRHALFLTDHPLREKVINAIDSRTRTFVNGTQRYFAEVLANKLHKEAKRIGKDHLLSFDYFGVEAQDNSRGDGVYNLRKDLVEHYRDDLKKYDKDKINGKSQHLYSHLIDAQVAFCMVADAHQKEGSLNLNLQENGLGLWPRVDRRTGEIKPDKAGKIYDGSLFNAIQVDTKQLKPEPLERQIPKPQVRSVAHRPLFNENAVALHFLRLIEIQESNQKPKYFKGFVALSELKKCLKERNDNKFKNYEKYAVELTDDRDVKKYTPLYTDTFAIRNGRGVILLTDFGVRNVTVKVYSLDKKKVSRFLVDHFNTASDISLWHSEKKDEIKILELLYNLWYFTQRKEIIVKEKLYYLKDNDKKCLKLVNPQIEKDWADLYSSIDESQDLRTQLKDYFLYKEDNENRVLKHDHKHKRVTKEFSLPISCQKGFLIRKKNWKGEDIYYCRPASNDFSQTLLHKDRDGVIPDGNKDERLVNAYRQKNIFYSSDDFCELKKSLYPIDPNLAIDPNKYYEAQIPPEFSAYLCRVENRRTDADRPKFKFYLNEKNRMDFIEFKKFILKYRFRNLQDLKAKLRKEWVEDRISDPESLQNAIEEVEKMTKKPEKLLPTLKEIERLFEESKTNQILAYSAKEKFTLEKNYIKNIVMKHLPVKIK

SEQ ID NO: 6124 - protein, 1047 aa, unidentified
  REGION 1..1047: note = Description of Unknown: Cas Enzyme sequence
MTLIFGFDIGTTSIGFAVIEHDQDRATGTIRRMGVRIFPEARDPKGAPLNQERRAARMRRRQLRRRRERRRLLGDLLHQAGLLPARGSPDWDEAMKSDPYDLRKRAFEGDALSPFEVGRAVYHLAQRRHFKGRDIDEISEQGDLVEDKEESTDEKKAKTGREETLQELKEAGGTLGAWLANRGPHERKRGVHATRKIVEKEFERVWKDRLPGNISEAVREAVFRQRPVFWRLNTLGECRFVPGAPLCPKGSWLSQQRRMLEKLNNLEHATGNRRPLDPEERAAILDRLQTRASMTWGSVRSALKPVYKARGEPGAERRLKFNLEEGGEKTLLGNAVEAKLTGIFGDDWQNHPHKQGIRDAAHDYIRQADYGEIGKQRVVILSAEDRRKGRERAAQRFAGDFGISKERAEALAAIKLPTGWEPYSVEALRAMLPRLEEGVRFGALVSGPDWETWRNETFPARDRPTGEIMDRLPSPTRKNREEMERIARLRNPTVARAQNELRKVVNNLIDMFGKPDLIRVELTRDVGLSKREREEKSFGIRRQERRREAARKDLEEKGIVEPSRRDIEKWMLWEECGRRCPYTGDHICFDDLFHTGEFEVEHIWPRSRSLDDSYRNKTLCRKDVNIKKGNRTPFEYFDRDAHDEWETVLNRLDGMKASKGGAGMSPGKIRRFKAESIPEDFAARQLNDTGYAARETVAFLKRLWPDVGPEAPVTVQAVTGRVTGHLRRLWGLNNILSEDGEKTRADHRHHAVDALVVACCHPGMTQRLSRYWQQEDNPEIPDPPSLPKPWEAIRADADRAVAEVVVSHRVRKKVSGPLHKETVYGDTHEEETGKDGTVYRYFVTRKQLEDLSKSDFADKNADAWPDEKIRDIVKNWVDRHGGDPKKAFAEGYPKRGRKGPEIRKVRLRRKQQVKLMARVSTGFADLGNNHHIAIYRMADGSVDYDVVSLMEASQRLANREPVMRRKRGDGSQFVMSLSAGDSLEFTKNGETKVRIVEGAWDNGQVVLVDHDDATGESRFRPGAKAIASSGAKKFSVDPIGRIRPAND

SEQ ID NO: 6125 - protein, 961 aa, unidentified
  REGION 1..961: note = Description of Unknown: Cas Enzyme sequence
EDEEERRVYAEIDNYQFLTKLRSKENGLIPYQLQLKELKAILVNAKEYLPFLSSKGDDGISVEDKIISLLTFRIPYYVGPLAKPNDNNKAWLERKDDVIYPWNFSEVVDLQKSAKNFMKKLVGRCTYTGEMVLPKDSLLYSQYMALNEINNIKVNGNPISVEAKQQIYKDLFLGNKKAKTKKSIKQYMIANGIMEKTDEISGIDDKINSNLKSYHDFKNILDKTNNDTEMVEEIIEHILVFGSDKKMLREWLSEFEVLDENDKKHILRLNYKDWGRLSKTFLKDEKNICHIDKRTGEAQSIIDRLWNTNDNLMVLLSKKYDFNDAVQKYREEYFGLNLSLKAQLDEMYIAPAVRRSVLQTMRIIDEIVDIKKSYPEKIFIEMARTSSKEMEKKRTESRKDKLKKLYDSCKKQAEDLIPEGLYENLMKETDQSLRRDRLYFYYTQMGRCMYTGELIDLGKLLNDKDKYYDIDHIFPQSKVIDDSIDNRVLVKSTENRDKTNIYPIKEETRAKMYKFWTMLFDKGLISRKKYERLKRATPLTQDELSSFVQRQLVETQQSTKALADILKRTYPGTTVVYSKAMNVTRFRQKYQIPKFRNVNDYHHAKDAYLNVVVGNVFNTKFTENFFNHIMEKQDDYSLNRVFEFNTPGAWVAPKREESYNYDRNHNNEILSGTIETVYKFASKNTPIVTFAPTQQKGELYDLNILPKNNRLLPIKKNLPPEKYGGYNSITGTYFFLAEHTEKKKRVRTILPVYLYELKEYESNPVGYCIKNFGLVEPLIIIKKILMNSLFEINGSRLIITGRSGENLLAKHTYELAIDDERATYLKRIDKYVSKCNDSKKPIEVTEYDGITIEENVNLYNWFIDRLESNAYKNLFKSALKDLADNRDKFKTLDISDQSILLNEILKLFICDRQLTKFEKLNGKGKIGEIKPSATLSKNQSVYLINQSVTGLYETKVDLLKG

SEQ ID NO: 6126 - protein, 983 aa, unidentified
  REGION 1..983: note = Description of Unknown: Cas Enzyme sequence
AEETKKKQALAAFDKLFVDSNCDTISQFIVKHFKKGNDRYPTIRNRETNDTRYLIRRKYVYDEISKILNTQASFYPCLNQANIKAIIKIIFSQRDFEDGPGNPKDKHRRYKGFPYGIGKCAIYRDQDRGFRNTVMADVFAVVNTLSQYRYIDINTGEFKFTKPVAHDIIQHLLFNGNLTITEVKNILKKHNLKLLKSNNSDGEGLSEAIKYLKTARKCIEEAGLNWQECISEPQFDYQRPSRLHKLGKVISKYHTPARRRDELKKLNFITDKLANAFARKKISGTSNVCYQYMCEAIQAFLNGEIYGNFQAEKLKAQKNADATKRNKKYLLDLFKDEEVRDNPVVFRAINETRKILNELIRIYGSPECINVEVASDLNRSLINRLKIKKLQDKNKKRNIRDRERIAELLSIPVDEVSAAFLDRYRLYEEQRGKCLYSGKPLGDLQEVITNRSGMFERDHIVPYSLILDNTLNNKALVFIEENQAKGQRTPLMYLNPERRVEYIASINTLCSYSRKENPISSRKYQYLKLDDLYSKEAEDLLCSWKSRNINDTRYITRYIVAYLENNLIFSGNRTSPVYGIKGALTSRFRRLWFNGKTWGCKEKDRSTSHLHHAIDAVVIANLTPEYVEIASDKLKLNDILRGNNYKTDLEYQQYLNNCTKKMKKYYRMNEDYVRELLTKTWRIPSYIPNLREEVDIRFNDYDAELWQEQIKSFYKDKGDFVRPPRMPLVSYKQERKFRGAITNSNPVKTCVENQKLKKIERVKIQDITKDKLDRIRTGDKSLIAFLEKIFFGKDDKYTIKKYLEENGLPYFVTENGQRINKLSITGQTIPEPYRKDISTDNYSLLEANKYYCIEVYKDNTGKTRTRGLRFVDVAKKDKKLWLKHDSTPSGYGEHIMYLFDSDYIRIANRKGEVKFEGYYKKVKNVYRNQFYCAKGNEPQKPSDYISITSHDFVKKYYIDILGRRGGEIKCSAPLSLLTENPSE

SEQ ID NO: 6127 - protein, 1360 aa, unidentified
  REGION 1..1360: note = Description of Unknown: Cas Enzyme sequence
MEKNIMKKPYNIGLDIGTTSVGWAVVDTNTFKVIKRTVKKIEKKGKVKGEQKVLWGVRLFDEAESAKSRREKRSTRRRYDRRRARIKLLQKQFEEEILKVDPNFFVKLKESFYNEKDDKNKTVKLTKEEKKQIKDYYKEYPTIYHLRERLIKNPEKEDVRLVYLALHHIIKYRGNFLYENDNFNVNDLNIREKLEEVFSSFINYVESFDADTLQSIDYFNLEKALLIKSKKDKKVELKKELEKFLSKKMTTSFVNALMGYKFSLNNMFDLELEKEEKTTFDGSVFEDNIDELVKVIPDKIEFLNALKELYDMIFLKTLFRDSNEVLISSLMVQKYNIHKENLKLIKELLKHNKDEYDKIFKTKDKYICLYDRYMKNPNTDFDNKKIKEALKESLSKTMGKINDTKLLEKYNELKEKLENENYIIFPKITETDNGKFPYQLNKEELIRIIENQGKYYPFLLEKVREKYKILKLLEFRIPYYVGPLHNYTSDYEIDNPNMWMIRKQDNVLITPYNFEEVVDINASAEKFITRMIKNCTYLLDEPSIPANSILYSKFKVLNELKQIKINDQKLTNEQQKAIYNNLFLKEPGIITNNKFVSYLISCNYFSPYLELNVKGYSAKDRFANNMQSYIDFFGDDGIFKGTNYKEADAEEIIRLITIFEDKKILKEKINANYKLDDQAINKILSKKYKGWSNLSKTLLTDIYYQDDITNEHKNIITLMTETEENFMQILNNRNYKFQDKIDKFNNKNIDSKLSYELIENLVTSPATKRGIYQALKIVDEIVNFMGYEPEHIVLEMARGEEEKKRKDSRKEKLEKIYKSIKKDVENYNELCKELASHEKIDNRKLYLYFLQLGKSLYSGKKLNIENLSEYEIDHIIPRTLIKDDSIDNLALVLREENQNKAASFVVPREYRNKSFVFWNQLHKLDLISTSKLNRLKRKEYKDSDIEGFINRQLVETRQISKHVANILKNLYPKSNIVYLHANLSSNYREKFKLYKFREINDYHHAHDAYLAAVLGEYKEEYLKIVDFAKLKEISEKNFKNKQYDYFRYGYVINSLENGLQHISEKTGEIFDTSEFNDVVEKTLYRNDILVTKKTELSTGEFYNQTKKTKADKNIDIKVKLKDNLPANLYGYYDGVNKAYTIVVKYKKKNKETNKMLGIPIHIFLQSKKNQNIINEYIRKALKLKDDTEFKIIKDKIPFNALLNWNGKLCYLVGSGAGLVEVCNAVQFHFERDKLIKWGNTLHRLLNNKKKVIDDINYGVQLGEIIDYIIEKIKKHYPIYEKNVIRLKEWYKYKNTEILSLEEKENIVKQTFRMLRANSENANLKFLGQTDRFGRLNELNISSAKIINQSITGIWESEDEF

SEQ ID NO: 6128 - protein, 1410 aa, unidentified
  REGION 1..1410: note = Description of Unknown: Cas Enzyme sequence
MKRILGLDLGTTSIGWALVDEAEHDFEESSIIKLGVRVNPLSVDEQQSFERGKSITTNADRTLKRSARRNLQRYKLRREKLIDTLKENQIITNETLLAESGNKTTFETYRLRAKAASERIELDEFARVLLMINKKRGYKSSRKVKSSEDGKLIDGMEVAKMLYYENLTPGQLSYKLTMEGKKQLPDYYRSDLQEEFNQVFQKQSNFHEGILSEELRQELIGKKRDAVWAICAKHLDKNGIELTGIKRTGNNTQQKVENLSWRAKGVKEKLSIEEFVIVIQDINTQINNSSGYLGAISDRSKELFFNKIEIESGQMRAQTVGEYQMSVLKNNPNASLKNMIFYRQDYMDEFDHIWNVQSKYHEELSTELKYEIRDIIIFYQRKLRSQKGLISFCEFENKKIEVEIDGKTHTKTIGSRVIPRSSPLFQEFKIWQILNNIEVFGKNTKSKKTTSTSLFSDVEDPISFGGRRELYQEEKELLAYELSVKKELKKADILKLLFDNYKELNLNYKTIQGNTTQYQLFTAYKQIIELSGHTIDIDKTPAKELINSIGEIFDALGIDKEIIHFNPLKPIEEQSMYKLWHLLYSFEGDDSISGNEKLISKLKELYGFEKEYAVVIANITFIEDYGSLSAKAIKKIMPYLTSGNKYDLACEYANYRHSASSLTKEEIEKKTYKDRLEILPKNSLRNPVVEKILNQMINVINSIIDLYGKPDEIRIELARDLKKSASEREEMTRGINQTTKLHNEYREILSKAPFNLSYISRNDIIKYKLYLELKNNGYKTLYSNTYIEPNQLFSGNFDIEHIIPQAKLFDDSFSNKTLEKREINIEKSDKTAFDFIKDKYGENGADNSLDNYILRIEKLYKDGSISSAKLNKLKMTENNIPSGFIERDIRDTQYIAKYAKHLLNDLVKNVVSTTGSITNKLREDWQLVDVMKELNWEKYNILGLTEEFENKDGHRIRRIKDWSKRNDHRHHAMDALTVAFTKPSYIQYLNNLNAKSDKSSSIYGIQQKEMTRNSRGKLLFKPPMELEFFREEAKKHLENTLISIKAKNKVTTNNINKTKREKGYNKITQQTPRGQLHNETIYGRSKKYVTKIETIGSKFNSEKIQTVANKKYREAIQKRLSEFDNDPKKAFTGKNSLKKVPIQIDEINFVPEKVKTVTFEYIYTIRKEITHELNIEKIVDKRVREILKNRLEKFGDDAKKAFGNLDEDPIWLNKEKGISIKRVTISGVANAEALHSKKDNFGKPILDEKGKEQPNDFVSTSNNHHVAIYKDKNGNLQENIVSFFEAVARANIGLPIIDKTYKKEEGWEFLFSMKQNEYFVFPNEETGFDPNEIDLMNPDNYKTISPNLFRVQKFTYKNYVFRHHLESTLEYSGSKFKTITWTDFRSSKGLDKIIKVRVNHIGMIVSVGEY

SEQ ID NO: 6129 - protein, 1381 aa, unidentified
  REGION 1..1381: note = Description of Unknown: Cas Enzyme sequence
MKKILGLDLGTTSIGWAFVHEREKDTDETSKIIRLGVRVNPLTIDEQTNFEQGKPISTNADRTLKRSARRNLDRYKLRRDNLIEVLRENNILKDQTILSEEGKDTTHSTYLLRAKSASERIELEDFARVLLMINKKRGYKSSRKAKNEEEGQIIDGMQVAKTLYENNLTPGQYSLQTLLSGKKYLPDYYRSDLQNELDRIWKFQQQFYPEILTDELRKEISGKGLRATSAIFWSKYGFNTAENKGTRDEKKIQAYKWRSEALSKQLEKEEVAFAIAEINGNITNSSGYLGAISDRSKELFFNNQTVGQYLYSQLKKNPHTRLKNQVFYRQDYLDEFEKIWETQSQFHPELTVGLKEEIRDIIIFYQRKLKSQKSLISFCEFEKKEVVVKKNGKKVTKTQGLRVIPRSSPLFQEFKIWQNLNNLKLKNTATDEVFVLDDEAKQLLFEELNIKGNLKKESVLKILGYNTKNWEINYNEVEGNKTNRALYEVYFKMFEMEGHEEINLSDISAKEAKEIISIFFDAININTEILNFNAELEGKEFELQSSYQLWHLLYSYEGDNSNSGNELLYKLLNTKFGFKEEHAKLLANITLLPDYGNLSTKAIRKIYPFIKDNTYDKACAEAGYNHSSSLTKAEIESRELKPLLELLPKNSLRNPVVEKILNQLVNVVNAIIKDPELGKPDEIRIELARELKKNAAERAEMTASINNAKTEHEKIRKLLIAEFGIKNPTRNDIIRYKLYDELKLNGYHTLYSNTYIPREKLFSKEFDIEHIIPQSKLFDDSFSNKTIETRKDNLAKANETAIEYVERKYGKEETNEYLSRIEMLYNQKENGISKAKYRKLKMRTEDIGKGFIERDLRDSQYIAKKAREMLLTICRTVTPTTGSITDRLRQDWDLVNVMQELNFDKYKKLGLTEIIEKKDGGTKERIVDWSKRNDHRHHAMDALTVAFTSHNHIQYLNNLNAKSDKNSNIYAIENAITEVVNRKRRFIAPTENFREEAKHHLENILVSIKSKTKVVTSNINKIKTKKGTLEKIELTPRGQLHKETVYGRIKQYSQNEEKIGSNFTKEKILQVANESYRKALLSRLEEYDLDPKKAFTGKNSLSKNPIYLDNDKTLTLPEKVKTVWLKDVYTIRKDITPDLKIDKVIDVGIKRVLENRLKEFGGNSKEAFSDLDKNPIWLNKEKGISIKRVTITGIKNAEALHYKKDHNGKEILDDSGNKIAVDFVATGNNHHVAIYKDENGNLQDNVVSFFEAVERVNQGLPVIDKTLNRDLGWQFLFSMKQNEYFVFPSDDFDPNEIDLQNPDNNSIISKNLFRVQTMSKVEYGNAVVRDYIFRHHLETTVDKKKELQDITYIQLKSLARLNDIVKVRVNHIGQIVKVGEY

SEQ ID NO: 6130 - protein, 1155 aa, unidentified
  REGION 1..1155: note = Description of Unknown: Cas Enzyme sequence
MKDYYIGIDDGTDSVGWAVTDTDYNLCRFKGNSMWGVRLFDESNTAAERRAFRTARRRTDRKRQRIDWLQMLFNKEISKKDIAFFQRLNESRLYPEDKSSDSPYALFADENFTDVDFHKLYPTIYHLRKELIEIHEPHDVRLVYLALHHLIKNRGHFLFDNIGSDFEKESSFEVLFANLQEHIYTEYELILDCTDCTLIADILKDKSKRKTAKSSEICKLFGINKKDYPRQTAIIYLLCGQTVKLSDLFGDENYNNEEKPSITFEKDYDDNEDYYRDLLLERFELIERIKALYDWAVLADILRGEKYISFAKVKTYEEHKSDLHLLKTFVKERCRSEYNEIFRETRSGLNNYTAYCGKYKENGKSGVILHRTNQSDFCKYLKGKFDKLDKTGYEEMFKKIESCTFMPKIVIKDNGVIPMQVNKSEVKAILKNASEYLDFLNETDEKGVSVADKILQILEFRIPYYVGPLNSHSDKKWIVRKSGRIYPWNFNEIVDVDKSAEEFIKKLTAKCTYLPDKDVIPKNSVLYSRFMVLNELNNLKLDGEKPDVSFKQSVFNDLFMRRKKVTQKALREYIKSKTGNEPEITGIDGDFKSNMRSAIELADFNLSEQEKEEIITAITIFGDDKKLLKRRIKTKYSDKLSEDEIKRICKLKYKDWGRLSRQFLTEIYDFDSETGERRDNIINTLWYTNDNIMELLGSKYNFAKSIENAVQGSTHKASIEKMVEDLYISPKVKRTVYQSIKIIREIVKIKGYAPKKIFVEMTRKDGIKGDRGRTKSRKLQLEELYKKCKDDSRELWEELEKTEDDKFKQDKLFLYYTQMGRCMYSGERIELKDLFNNNLYDIDHIFPRSKIKDDSLDNRVLVKKQINAHKDNDFPLDSTIRDKMKEHWRYLVTNNFISKKKYDRLTRVTCLTDDELSDFIARQLVETSQSTKAVASLLKTLYPETEIVYVKAGLVSEFRNSFKKEDLSFKKCREVNDLHHAKDAFLNIVVGNVYNVRYTHNKAIFIKGLQTKKYSLNKMFSFSTPNAWDTENGKSFGIVRKAMNKNNILYTRYSYMQNGGLFKIQPLKKGCGQAPLKKEFPLCDINKYGGYDRPTASYFSYVKYEGKKGKECRQLIAIDNYLKKYYEPIRGMVQSNHFELENTQVITNGNLAVLN

SEQ ID NO: 6131 - protein, 1066 aa, unidentified
  REGION 1..1066: note = Description of Unknown: Cas Enzyme sequence
MKSEYFLGLDIGTNSIGYAVTDLEYELKKFNNKAMWGCHVFEEGKQCAERRMFRSARRRLNRKKQRIQLAREIFAKEIAKVDNDFYIRIDESALLKRDKTTDSKYSLFNDTTMTDKEYHERFPTIHHLIMYLIETKERPDIRLVYLAAAYILSHRGHFLIDAPKDAIAEVISFDKVYADFNNYLVEGEIPSNWSFDIKDELGNILKSKVGIKEKQKRIKELVFKDIKRIDKDQEAIIKAISGAKFNLSDLYNNEEYKELEYNSISLQDSEIDAKIISIGEMINQEDFELIMRVKALYDWSLLADILKGEEYISKGKIALYEQHKKDLKLLKYLVKSYKPDKYDEVFKFSKKNLHNYTAYSGNFKSSCNDPKEDKLSLTKTTNKNFCDYLKKIFKDISVKSEDNEQYDDFKARLEIDNAFMPKQVHTNNGVIPYQLYRYELKAILENVKTHYAFLSEKDEDGLNAIEKLLSIIEFRIPYYVGPLNNYHGEFSWIKRKAEGKILPWNFNDRVDLEKSEEAFIRRMTNKCTYLAGEDVLPKYSLLYSKYMVLNEINSIRIDNVPISVNIKQKLYKDLFENSRRKVTKKRLQDWFLSNQLISENQEIRGVDEEIKSSLRSFHDFKQMLVNGILNEAQVEELIFRISITTDKQRLRIFIKSKYPTLSEPDIKKILSFNYSGYGRLSKKLLTEIEVFMPQVENDTSIIGALWNTNYNLMQLLSQEFKFINKIDNHNALYYQQNPSNIDSKLDEMYISNAVKRPIFRTIDIVKEIKSIMKKDPKKVFIEVARQKQEKKRTKSRKDSLKDLYKGLEQEYREEWSKRLENVSDDKLKSDRYYLYYMQLGKCMYTGKEISLHQLMDNTYDIDHIYPQSIVKDDSIHNNKVLVDSSINRIKSNNLIMPEIQERMTGYWNMLASKGLITKEKLFRLTRKNTFTDEELVGFINRQLVETRQSTKAIARIINDIFPNAEVVYVKAGLVSDFRHQYDMLKSRDVNDLHHAKDAYLNIVMGNVYNVRFTKNPLNFIKSKEIYSINIKEKGGLLSRDIERNGEIAWKSDGSSISTVKKTMNKN

SEQ ID NO: 6132 - protein, 1137 aa, unidentified
  REGION 1..1137: note = Description of Unknown: Cas Enzyme sequence
YEGTNFNIENVKVDEKLQLLFDFLEEELDCEFENNKTNTNKIIGILSEDKTKTEKEEQILSLLKATKDSKKMLKELFKAILNKKFSLNKIFLLEGNDISIYINDFGEKSDEIEEYLGEWYEYFTIIDEIYQWTVLKNILSEGNNISEAMIKKYKKHGKDLKILKKLSKQCGIYNDVFRDKGKSNKNYHYYINEPRITSAEDFYKNIKKQFQPFVDELKNDLDYEYMISSIEMENFLPKITSKDNGAIPYQLHKNELEKIIENQSKHYSFLKETKKRIVNILEFRVPYYVGPLNVNSEFTTIVKTKDEKIYPWNFDEIVDKYSSSLRFMEERIGNCTYLPQYKVMPKHSLTNSLFGLLNELNKVRINNKLIDVEVKKSIIRGLFQKQKKVSEKAFKDFLFKNNLIESKDVQITGYQDDKAFASTLSSWIDFAEIFGEFDFGEKLKIEKYEKIILMITMIQDKEILSKIITKEHPDITEEQLKKILSKRYSGFSNLSKEFIDEKVYVSDSFGEVVTILDQLYNSTLNLMQILSDDKLGFKEAYEKIMVKPKMGKITYDDILEIPGSPAIKRGIWQTVQIIDEIVKIMGYEPDNIFIEIAREKGKAGRTSSRVKRMLDLYKKIVEETNEYNEAYQELKNIEKEKRNLDDRALYLYFIQGGKCMYTGQKLDINNLDKYEIDHIIPRWVIKDDSFDNLALVTHEANQEKGEQLGVPEQFRHKQYYVWETMLKYALITRKKFSNLKKSKFSEKDIEVFINRQLVETRQITKHVLNLFKSSYSKTDIVVLRPNLLSDFRKQFKFYKIRELNDLHHAHDALISCFVGNYILNRFPKMSSKYIYDEYLKFKEKNEFKHGAIISSMKKDFENHENNFIWNTQEQIRKFANYFKYKNCNITKKIEEGSGKFYKQLPLKKGTSNKLIPLKSSKELNPKKYGGYTGENPAYFLAIKYKKGKKLIKELVTIPIHIKKLIETGQTTELEYLKSSIDGENLKIISKKILKNQYIKWGKDYFYIVSTDELHNAKQLFLEEKHYNMLYCIKELDEYLLNELYLYIVNKMQYYNVFENTRKKLLDFNNKFINLTKEDKKDVIYEILKITKCNAVNANLKKYGGPERLGRIQRAIQLDQIIFIHQSITGLYEIKRKI

SEQ ID NO: 6133 - protein, 1195 aa, unidentified
  REGION 1..1195: note = Description of Unknown: Cas Enzyme sequence
MKTLGIDLGTNSLGWAILDEQAVLKAGVLVFEEGVSIEQRDSLETPAAVRRAKRMARRLRFRRQLRRRLILEILIENNMCPLTAEELNLWSQKDIFPKDNAKFVAWLKSTDTRNPYCDRARAATEKVEPLTLGRAIYHLAQRRGFKSGRKDQLEEGDTGTSARAKELGIVKGEIARISAELAKTGLTLGQFFYNEIKAGRKVRKQHTGRDEHYRKEWERIAAVQNLDKTLADKIARTLFWQRPLREQSFLVGKCSLEPTRKRAQIGHPEFEEFRALSFVNNIRVIDGETRNPLTPEQHAVAVDCFNRKTPFDFQTIRKKLEKQCKELRGAEFNYEDNISLTPSKITASLEEVLPGIDGTGRQKAFDALTFFDDNEKLTVWARKHFDLSPEAADKFVKIRVPEGRAAYSLHAIRKINRFLRKGVELSEAICLAKLPDVIPGFDAKEDEIIAKVHEHHELYRENKRVAYRDIRTENRIGVIPLEKRLGSWLQEEYGIDTKKANLYFRNPRADSSYASLTKEEKTGVERGILPKVNLGMIRNPIVQRSMTMLRKLVNELRKKGDIDADTRIHIELARDVNTHNDRMAIQEWQKQNEKKRAEARAELQKYPCHITEELVLKYILAEEQRRKCPYTGRVINIEELFEGGVDIEHTIPRSRSGDDSQANKTLCDAAFNRNIKKGLMPSELHNHDEILTYIRPWLDTIEELKKLRAKQSKAVKSVPKDNPEARARARQRLLVTKLNLKYWEDKYHRFTKRPDEITPSFINRQLVDTGVMTRHAVALLKTVYRDVYPVNGQAVAFARKLWKVQGEDTVKDRTDHRHHAKDAMVIAALSRDRFHKICTELKTDDERKNPKVAVEPPFPGFAQTVFETTQDILVKHVTRHNELKQTKRKSIRLSSPKQTRIGTITRAPTGGDTVRGQLHKETFYGKIRRPGKTETVCVVRKDLNSSNFPDEKALKKIIDSAVRKAITDEIARRGGEFKKAMDAAVAEGTFKLPGERGALIKKVRVEATTVKNPQVVRVRTVTPSRHDYKNAYWAESGADSNFRLAVYKRPNEKSASKAYEFIAENLLKYVKEAIKSQGDDSVRIGYIRPGAMAIVRGTEKTEAPLLYKVVAFGNMETEKRITLRLHTEARGSVELSEALGEAGKNKKGESSIDRERPHLLLRLQIGYAWDSLLFEGIHFKMDLNGDITYRPDASE

SEQ ID NO: 6134 - protein, 1070 aa, unidentified
  REGION 1..1070: note = Description of Unknown: Cas Enzyme sequence
KVVSYEEHKEDLKTLKYLVKKYVPSTYYKAFKDPSIQDNYAHYIGSGSKAGKKVQVDHKGKCLQEKVNKYFHNLLKPYQNVEDSILHNMLEKLEQKNALPKQRVRDNRVIPHQLHLRELQIILENAQQFYPFLTIPDADGYTPSQKIVSMLTFRIPYYVGPLNTSHMEKEGNEGFCWMVRQQGKENVPILPWNWSEVVDKNASAEKFITRMTNSCTYLFNEEVLPKHSLLYNRYMVLNELNNLKINGELISVELKQKIYNELFLRSGKKTITLKMLQKFLITNNIINKGDASTIEGIDNGFTNSLKSYIDFASYLETKILCEEEIERIIEWKAYYVDDATILKEKIAQELSEKLTSEQIDDLTKLVRNYKGWGRLSRAFLEDIYHVDRATGEGYSIIHMMWKTNKNLMELMSSKYDYLDEIQRINNETLINRRFSYDSLVKPLSVSPPVKRQIWQTLLIVEELKKVMGRAPSKVFVEMAREQGEKKRTTSRKESLRKLYDSCKNDITFNKALLDSLETKADAELRSDKLYFYYTQMGKCPYCGGKIELDQMNDTQFYDIDHIFPQSLIKDDSLNNKVLVHKTCNGAKGNSYPINLQWQNKMIGFWKVLLKCELISKDKYARLTRTTPLSDEEIFAFINRQLVETRQSTKVVASILKNLFQDEKTEIVYVKARNVSNFRTDFEIKKSRLVNDHHHAHDAYLNIVVGNAFHTKFTADARNFIKELRRGDQQYNASNIFSRPIQRNGSSAWIADERYDANRGRPKSEKQETGTIVTVRKTLRNHQVLVTRQAVKNTGVLFKLQPLKKKKNLLPLKGSSEILQDTTRYGGYNAPATAYFALVEHEKKGKQVRQLVSVPILYAQQFKKDAKGLAKYCGEKLELENAKIVVPKILRHDFVQLKGFTMSLSGITGSQIIANNEIQLVLSDDHYDYVAQIEKYLSLLRKVKDTEVQENVEILADNLHISKQDNLTLYEQLLAKERDSIYKHRPANQAKILDEKKSTFESLDIKAQCEVLIQIINLFTCTPESANLTKLGGGASSGIVKFQSQITDRDAMLIHQSPTGIFTKSRRIYKL

SEQ ID NO: 6135 - protein, 960 aa, unidentified
  REGION 1..960: note = Description of Unknown: Cas Enzyme sequence
RVCPKSSPVFQEFKIWQILNNIQVINTETKESFPLDEECKRMLFAELNLKEKLSKTEVLKLLNTSKNHDLNYKEVEGNRTQARLFKAYERIIEMTGHGEPNFSKMEASKIIEMTTSVFEALGYKTDFLTFNSNLEGKEFEKQPFYALWHLLYSFEGDDSKTGNEKLIQKISDLCGFEKSYASILAGVTFEDDYGSLSTKAIRKILPHLKDGLEYSVACEYAGYRHSKRSLTKEELENKEYKEKLNLLPRNSLRNPVVEKILNQMINVVNTVVDTYGKPDEIRIELARELKKSAKEREEMTKSISQTTADHEGYRKILQEKFGLTNPSRNDLVRYKLYLELSENGYKTLYSNTYIPQEKLFSKDFDIEHIIPQAKIFDDSFSNKTIEVRQVNIEKSNSTAYDFVKEKYGEEEANAYTNRIEDLLKKGVLSKTKYKKLLMKEPEIPSGFIERDLRDSQYIAKKAREILEDLVKFVVPTTGSITDRLREDWQLIDVMQELNWDKYDKLGLTEVYKDKDGRSIRRIKDWTKRNDHRHHAMDALTIAFTKRSFIQYLNNLNARIGKSVDEYIDLANYDLRHINPKERTSVIYAIEKLELHRDRNGRLRFNPPIPLDEFRAEAKKQLENTLISIKAKNKVVTRNINTTKGKNGDVNKKIQLTPRGQLHNETIYGSMQRPVSKEEKVDSKFTIEKIATVTSQKYRDALLARLSQFEGDSKKAFTGKNSLEKNPIYLNEQHTEQVPLKVKTITYETIYTIRKAVGPDLSLEKVKDENIRKALEKRLKEYGNDPKKAFVNLDEKPIWLNEKKGIAIKRVTITGVSNAIALHKKSDQNGKSKPVDFVSTGNNHHVAIYRDKEGNLQENVVSFFEATTRVNLGLPIIDKDYRSADGWTFLFTMKQNEYFVFPNKETGFDPDKIDLLDPNNYALISPNLFRVQKIATRNYMFRHHLETIVGEKKELRRLAWE

SEQ ID NO: 6136 - protein, 1161 aa, unidentified
  REGION 1..1161: note = Description of Unknown: Cas Enzyme sequence
  MOD_RES 1050..1070: note = Any amino acid
MGDIHKILALDLGVSSIGWALVQIPENIQYPEEDTPTLFDNTSEETEESIIEGAEILAMGVRLVPLDTDSKNNFEEGKAVKLNQNRTTKRQARRGYFRYKKRRIALKKLLETNSMLDTNLFPMEKISLWGLRAKAIQEQISLAELGRVLLHLNQKRGYNQKIKGQAEEKEEESKETKTEKTAKNNVEEKPNKVKKEGYTDKIARNSKELNGKTIGQKVYEELLKNPDYRTKDVIYYRTDYEDECRKILNTQKQFYPDVLTDEFIQKAFNIIYYQRPLKSQKGLIKICPFTQKIITIKPKSEGSEEKKEIIIGSKVAPKSSPLAEYKKILEFVNNLEIREFEKLEEESENTENINTEDTKSDKKEKRTRVRIIRKFEPTPEQRQKLIVELQKCEKMTKKQVLKCLGYATKNHTLSHENIEGNKTRSKLIQILGENHPALQFNLKKEPRTVVDKKTGEISTYEQISPEIEKEPFYLLWHIIYSIKDIEECKNALIKRFDFDETTAEKLANIEFTKGNNDFTNISAKVMRHIIPYLEQGKKYSEAMEAAGYKHSKESETKEENKERPLKNKLDLIIRNELRQPVVEKILNQMIHIVNEIIDPEKGWVSKEERENGTFKIHIELARELKADIAERNRIHEHNKKRADDNKNIEDNILKPKNITLSRNNIIRYRLFRGVNVKEKETKTHARCLYSGKTFEFSQVFDDKVVDKDHIIPQSIYPDDSQGNLVLVYKDENKTKSNKTAYDYMFSKGMEEFNKYIVRIQNAFDNGAISGIQVRNLLTTLEHDETQSPHNSIEIKGKSKNGEYFIKVTKLNEEKGFAARDLRETSYVTKQARRMLRDICREVHTSTGSVTAMLRYLWGYDEILPKWHIQRLREIGKTELIEQKPIKQENNQQTYKETIKDWSKRDDHRHHAIDALVVACTSKSIIQRINTASGKQGQEKLFTEIHKEEPTQDPKNRLTKLKQDLIKKRIFTHAQVKNFVDNILISYKAGKKVATWNKNKKNGKWDKSIPLTLTPRGALHEESYYGKIAVFKPEKKAITKIAEDLDKIHLXXXXXXXXXXXXXXXXXXXXXIVEQDIKNLMNTDNVMYYIKTGDNKRLVKYLKDKGLKEYSIFNPYHYYTIRYPITEISKKDTKTKDNFPDEKIYKIIKQAFPDNAKDKDTI

SEQ ID NO: 6137 - protein, 1050 aa, unidentified
  REGION 1..1050: note = Description of Unknown: Cas Enzyme sequence
MKLKGNKITLGFDLGAKSIAGAIAVDGKVAHLDSLIFPEDWGSMSESRNKRRLARTRLAHRAREYHWWYHAKKAGIPVPYDYDPESVEKKEYRIRIAPSQEAHEAYNRFKAPNPPPVVLRIQLLEGKKLSGEEVFKAIHHAIQKRGMDYDVPWKTSEKSTSETEVKAELLKKKPEELKPEEKLEVARYHFKQDSEELPQGYDYPCYLLAWKMGLWNPCSKKFHRDDFHERTDREKREFKVRGRYAFPRDWVERELVALLKQAKKLFPKLDIEAILGKMPSKKMLKGVNEQYHEKLRYYQGHQSVLGQKWPKFENRAVGSCRVIPRFKAAKRSAEEFRDFYYLSQFHKLSVRDGSGVACRLTAQDVRELFQHFQERIKNGEGIPATHLHSALSQLGYELISEKASIEKWNHEGRCAYSKVALRLLNRIYIGEVTPDEAYDTFLNDPIAANSTKKVKDNKDPLKGLVPADLELFYLMKKLKMDYAGFYLPQLPKKISSEEFIKQVPSPRVRVRLQLFLRLLRDFKKRVGGAKNIDKVVIELVRDPHASFKAAQISDKQKWDQQVWEKAKQQAQRYFKSPSDDQILKTMLWQEQQGTCVYSGEKLCLTRLDEYEIEHIVPRKLGGGNQRSNLVLTTRKWNQEKGRRIPYHWLGEHKERWEEFCLRLTQIYKTDKLWQRKYYEKKVKVLLAQEIPEEALSNRALVATAYLEKLAHQLCYLEMGWTMPSDHHEKPVEQKVWVVPGYLTAKYGKKLERERWLELVPQSEGNTKNQDKKSSKESKSGKSEKERSNPRHHAFDAGVCALLPQWYSLAVTQKMSKAKYHREREINDSVDIFATPLPAKVNPKSVIGDAILNHYPIVLPDKKPKLSEEFVNLYRYAREVVGKRFETTQLPKRVSGEYLLHDIQYAKDVGGHRGFVALKKWNEKKERFDYFVFKWPSYESFEQFFSNVRASEGELVWPYLFAPGQWFSVQAKESVRGEKKKDQSIPSGIFRLGSLMNEVKFVFESPQSEPWMKNIAPLLEGAHVDLFFPDSVFVHLIRRPLSLSKRTTKAA

SEQ ID NO: 6138 - protein, 1150 aa, unidentified
  REGION 1..1150: note = Description of Unknown: Cas Enzyme sequence
MTYTLGLDIGAASIGWAMTTDNDLSCIGSRLFPEGLEAKSREPKNRKRREKRLVRRQIARKAMRRQTTLQAFQILGWLPNDTAELEKIWHEEPYALRKKALDEPLTKSELARALFHLSKRRGFKSNRKTDTNEETLVEAAPETESKSKKSKNLLRDGDAEKHGYGEVEQLLNSGKVRTIGEYLATLNPHEVRIRSRYLLRKHYEDEFEKICNAQSAFHAELNAPVPETLLKALCSRKQQDAWKKKSDTSLRAFIKLYLIFFQRPLKSQKHTVGNCSLEPKSRRAPISSLTFQTYRIWDKLATIELLTPERRFLTPEEKARAAELLEKTKEIEVGKLLEKISLTVQGTSDGLSESLFNDEPKAIDINTVTCNYDLDKKIKGNETAVQLMTMFKETNDKPTKKEQAAIEAKWNALSEEEKEHRWKIIYDATDNEWLERYGKEKWGLSDAGAKALTKIQFKQGYASLSQRAMKKLIPFFKQGFNYADSCVKAGYHHSDKRPKALLDKLDEVPNLRNPIVQQGLFELRRLVNALIKKYGKPNAIHIEFARELKLPKAKREELTKENEMRRKINEHAANEIRKLGIPNPSSTDIIKYKLWLECKGVCPYTGKQISAEMLFRNNEIDIEHILPYSRTQDDSFNNLTLCFADFNRERKQNRSPYEMKARGIISEAEYEQMIERVTKFDNRAKLRRFTQKEIDDDKFVSRQLNDTAYLAREAKAYLETICPNIVVSNGQATAKLRNLWGLNSLLHPLEKNRNELSLKELEALAEKNRKDNRHHALDAAVIAATTRGFVQKLSTYSKYKRDATAEKFPLPFPSFREQLKAELDELLVSRYRKNRVQGALHEDTFYGAVREQDGSHREEGNYKIYTIRKPVSSLTGKMIEEIADIEIRRAFELLIATLKAKGVAFKEGSEPLPKEFYEAAKQVKMPIKRVTLNGKRAGAKTLTPNDIPNIQPYFIRAFFEKRLQDFPNLAPDQPLPDAFFENFGVPIKCVRIHQKSQARRELRPGVFIETGNNHHIEIFRKLNTKKGKTKYTGRIVTLLDAAERKRKGLPVINKTMDGHEFVMSLMIDEMFLMSEDGFDVRTVNWEKPDYKTISKHLYRVQKMTGNQVFFCHHLDSTLETSLGKSVNKLRGIKVKVDVLGTIKPMSEPMI

SEQ ID NO: 6139 - protein, 1125 aa, unidentified
  REGION 1..1125: note = Description of Unknown: Cas Enzyme sequence
MKILGLDLGTNSIGWAIVDDEQKKILGTGVRIFPAGVENLGDGEGELSKNASRRMARGTRRQYFRRKLRRNMMKKVLRANAMCPANSPEYKDWINLNPYTFRSKALKTQISLLELGRVFYHMVQRRGFQSNSRSQDPQESSVIFDEDKTNEEKTGKPGIVSTREGIKSADSTLGDYLNSLLPTEGESYIRYSQRVRNRYVERSMYREEFDQIWAKQKKYYPEILTDDLRISIGGNKKIDGSDGILFFSRPLRSQKFLIGKCTFEPKKPRAPLSCIESEEARIYQLVNSFKNKGEFLSDDLRQKAVNVFLTQKRVTVKTLRKKLKIEGKTDNFNYDDEEYWILSHYLQPMQSNKFFGKAWSDITQKNKEELWHVLHSYDDKLKVEEWVLKNLPADKGLAKALADFHFKSEYNSLSRRALRRILPFLKRGFQFHEAVVLGGVVNALGKVRYEGLPSEAKSELEDNILGIVSRKEKGGYLEKIKEYLTLEFGSSETDLKKLYHHSVETTKIKVRDRLPVGPDADREITGIRNPVVIQAIFELRKVVNDLLNRFGKFDIIKVELARDLKSSKQRRNEILKKQRFQRRENDRVNQELEKLGEPTNYKNRLRYKLWEECERTCPYTGNTISVAQLFNCVQVEHILPYSKSLDDSFLNKTLCFTEENARKGNCSPYEFYSAQGEAKWQEVKNRAFSIFQSSAKFRDRYRKYERFIAEKYNDDFVSSQLNDTRYISKVAKNYLQGICHDITVSPGIITSELRHRWGLNNVIKYESEVKDRSDHRHHAIDALVMALTSQAVLHNLANQRFSGNRDDSFEKPWNGFREDAKRSIDQILVSYKQTNKVFVKRKYWSKKNNRVYVSTGVAARGPLHKESLYGKRTDPITQTTSFHMRKELSALTPAMIPKIVDSSIREIISQSLESAGIAIDSKSGKATVKGKAQEKVFQGVMNSSIFLPNKNGGDPVPIRKVRIKEESSSAIPLSKEENRWVNSASNHHIELFENEKGEMKERVVSFWEAVERKRQGIPLINKVYEDGWMFVTSLSKNEMFILLGESDVREVFESPTELASRLYRVQKISTKFYEFRKASEASLVNKKWPYYQYITSFGSGKTGWKAFNPVRVSISPSGILSKAND

SEQ ID NO: 6140 - protein, 1329 aa, unidentified
  REGION 1..1329: note = Description of Unknown: Cas Enzyme sequence
IGWAIRDLSEKENQIIDYGVLTFEKGVGEGKSGEFPLVQKRTQSRSKRRNYQAEKYRKWTLLQTLIENGMCPLTIDELNEWRKYVRGVGRKYPASEKFIQWLRFDFDGDGKPDFERLGFSKHENHYLFRRLAVSEEGSHKKIFTDNPHLLGRVFYHLVQRRGFRGRDEIEAKTIREGSAETNTAGVDELIPFIQKYKTLGAGLYHMHKERKQRIRKRYNLRTDYEQELQEICRIQNISEPVYKKLWQAIIWQRPLRSQKGLVGVCTFEKNKSRCPVSHPLYEEFRIWVFINNLGIKLPENVNRINFVHEKIYPLFINVSRDFSIGSILKELRKVNGDIKSRFKPETKAVSATLLAQFEKLFGRVWKERYGWEEALRNQPKKCAYSFEDIWHVLFTFDDKEKLRSFAVEKLGLSEDDADKLSKIKLQAGYATLSLSAIKKILPYLQQGFLYSHAIYLANLHKVLGKASLGTDETQSIGIALKDIFEKEKRERVPKSVVNKLISDHLNSENRFGMNESYQLDEDDKNDIQKELLEIFGETTWKEMPGEAKAYNIEFVASRYLDFLRKPIHTKDVFLKPEKLHDSIFNYLRDAYGVPEEIKKHLWHPSEQENYLPAARHNNVLQLGDPQPISRGFKNPMALKTLHKLKKLLNYLLRSGKIDEDTRVVVEIARELNDANRRKAIEKWQRQREKENEEFKKNILEISNEYNLAIDVNNKSVTDKYRLWVEQNRMCIYTGAMINCTELFNGAKYDFEHTIPASISFDNELKNLTIADGMYNKYIKGKRLPSELPNYEQAATIEGKEYTAIRPRLEFMEKKINDLIKSFEDWKLKARFASSKEIKDSCIQRKHLIKFELDYWQKKFETFTIKEYKANWRNSQLKDTQIITRHALPYLKTVFRRVEVQKGSVTADFRKIYQVQLQDEAKDRSTHSHHAIDAAILTLIPAASVRDGILLRYNEAKDRDNNETYHEPVTQWKNFNPNYILSIRDNVLINFQPQNRTLSQTYKNVRKRGKLQYVKTRSADGKWQYKLDSNGRKIPLIANGDTIRGQLHQESFFGAISSDGAQCLVERYPISSFDNISDCRHIVDARIKEIVQQTLEKRMAEGMTFDRAKLEPIPFPNGREVIRKVRCKVAAGRGYLTPEKALEISKHAFPSRQNYKQFLYARNEENALCLYYENGSGVNSLRAFRIVGLYELAQLKLEKMEEIRNEKYYSTIEAGKGKKRDEIPLCYIITVGLKVILYAINKSELKELSRTDLFKRVYRVYKFNERAPTLYVYMQHHTEARKDGELGDGEKDIDFARYQPRVFLNASKFNCALEGKDFQVYPDGEIKWLF

SEQ ID NO: 6141 - protein, 998 aa, unidentified
  REGION 1..998: note = Description of Unknown: Cas Enzyme sequence
VNDKPATDSLTFGFDIGIASVGWAVLAPNRIVALGVRAFDKAETAKEGDSLNLVRRNARLMRRRLRRRAWRLTKLARLLKHRGVIDDVRLFQPENPFAPSLWRLRVEGLDRRLNAEEWARVIYHLCKHRGFHWISRAEEKQAEADAKGESGKVKQGLAATARLMQEKGYRSAAEMVLAEFPEAQRNKQGDYSKALARRLLGQELAHLFQRQQDLGNPHANPELEKEVLGIGDTKSGLFWLQKPPLSGADLLKMLGRCTFERGEYRAPKASFTAERHVWLTRLNNLRVFVDGRARPLTEAERQVALPLPYQQAGDFKFKQLRTALVNAGYLPDSFRFAGLAYPSEAQIAEGKAKHPEETMLAKLPAWQAMRLTLKKKGLETEWEGMAAAAIDGQPELLDQIAYVLSVYKDDDEVRRELGKLPLPNAAAMVDALLDLRFDKFHALSLKALRAIVPHMERGLRYDQACEKAGYQHNAPGVPAAGEHKYLPPLYAGRDKEGRMVFNPELDVPRNPVVLRALNQARKVLNALVRKYGSPNEVRIEMARDLSRPLDERRQIEKEQTEYRERNEKDRAMFAEHFGRPPKGAEFEKWRLYREQQGKCAYSVDAIDLPRLLEEGYVEIDHALPYSRSFDDSKNNKVLVMAAENRNKGNRTPYEYLGGEQESERWQRFVALVESNKAYRQAKRNRLLRKNFGAEEAKEFRERNLNDTRYICRFFKNYVERYLQLADGSDAKRCVVVSGQLTAFLRARWGLLKIREESDRHHALDAAVVAACTHGMVKRLADYARTRELEHVRAGFVDTETGEIVNPAAFARLEQHFPAPWSEFRHELETRLKEDDPARLRAAMKALGTHPTAALDELRPLFVSRAPRRRSGGAAHKDTNYAQPERLKAQGGVTQKVPLANLTLKDLEHLVDPHRNERLYAAIRGRLEGNGGKGDKAFPPTNPLRKPDRDGNPTGPIVRTVTMVIDKLSGMSVRGGIAKNDAMLRVDVFAKGGKFHLVP

SEQ ID NO: 6142 - protein, 1435 aa, unidentified
  REGION 1..1435: note = Description of Unknown: Cas Enzyme sequence
MPYEFISPIAIDLGAKYTGVFHAHYPSGSDPADGPRSGRLITAPDGGKQWSQQGRTAKRHQRRGYQRAKLAKRLLHVILTGVFKFDLTYPMGNNQSARQWVDSLLNNRGYTYLADEINKELLGAAKNTIVHRNWPKEFPGNEPLFNCLQRLSGDLSTAAHLHNEFPGPRDFFKRPAVRELMEEHFPEKMDAKAQLEIYTETRDALDRLIKAEQEGHRRRQEYLDNIRADIKSHPEAPSLLRGTSLTHDSLSNLIGHISNLQLRPLRRYFNDASMSKKDRWDENRMKKFFWNWIKSWRTQGPKDKANRKTLLARQNDPLLRVWQETNPKLTIPPFEDQDNRRPPHCQSLLLNPKRLDTVLPNWKVITRKFLTANPGLDEELTLREEPTQWPMTKSMPNGHSWRGEANYLARLLQRVLDRSKDRDPYRLRLLAGITGAVVSQSAQNGRAELEQHTGSQHTDDFLRFAADYYKEVRAARDGSWNPEDSETLLLRCDLHTPRKSKQREQLIGAIVGTLLPDVTPLYGFLRTDKIGRSTLIGVARRAAEAQKEYGNALKEIYRHNRLLEQGGKKPEDKDVLKLFRECEQAAEKIGQWLKQDQKAWSNYASPFSLAQIYNILETDINGFSSTCSGCSRENAWRSRVDAMGSANATRLPADSVRPFDGVLRRLLDAQAYEIAQRKAEQIAQAGTSGAVHVPILIEENRFQFAEGLAEIKKSTKKKRDVLHKLGEEQTARWLDKDDRIRQASHGVCAYTGKPLGKDGQLDHIVPQSETKKWQGTAYNSEANLIYVSTRGNTDKGNQIYNLEDLKPGYLTKQFRTKDTVVIAARIQATLQPYLEGHKSYTSFLDLDPEEQLCLRHALFDPHLRGPVIRMLSAQTKARVNGTQKWFARHIIQHLKHALAKNPNPQLAVTYSIHRINAEDVHHARNVLAAAEPVYQKTAPQPAASHVVDAALTFACGLQDPQLADVLTWPLNDDLEQQTGWLKSLVPTTIGIQALQSKPKYRKPNPAGQKLFKDGLYGERFVPLLIDKKGKLAVGFEPGNSLPISKGEEQWFDLLRPFLRFQNKPLESSFSDWQQRAHDSGRSHLYFTIDRPAAFERLHRVAKEPCDDTALQQADLLDGLSYVVQKQNLSEYLTKDKGKEFKTRDEVLDRKNFEWKPDFSGGALPREFFRPKDKPLTLPAKADWERIVNSECLKYKLGKDGAKGFNWRNELESLFPSHRTGRLHQAVRKDYSLPTIPSKSGKLVRIRRRTPEGQPVWQVVAIDGAATVGFAVNQNGTLAWDEPVPIPLFLRSPAVHERGGRHRPAAGNVCPLDDWRKVDFDKTRYGWLTHVEYAPGSQERFYIRVQMPFAEFKKRIAPFTEIKLTSPSDLPTEIKITDAKGFKEKYGELLGQPRKPGSRIVIVSAGDIVIFWYIVESTSSAMRERYEQARRSEPGI

SEQ ID NO: 6143 - protein, 908 aa, unidentified
  REGION 1..908: note = Description of Unknown: Cas Enzyme sequence
GFRGRDEEEAKTIMQGSKESGTVGVDAIIPYLEKYKTLGAALYYLHKEKGEKIRRRYNLRSDYEQELKIICKCQNIDETLYKQFWKAIIWQRPLRSQKGLIGLCTFEVNKARCPTSHPFYEEYRIWIAINNLKIRFTDDKNWERLISEKIYPLFYNASRDFKLKSVAAALTKADGKITSRTGSDSDREKEKYKLENTKLVSASLLYQLESILGEDWKQKYGWHEALQNQPKPCPYSVEDIWHILFTFNDRERLRAFAREKLNLGDEAAEKFSKLKLTQGYTTLSLSAIKKILPYLRQGYLYSHAVYLANIHKVLGKHQISHDEAIVIAKSIGNIFHESADEKLLIAAVNGLISDQLNSNTRFGMDPAYQLDEDDKRDIYTKLEEIFGEKSWGIRDEEEKQKSFEFVARHYLAFLKRPIQYTKERLFLKSENIHDKIFSHLQDTYDIPENRRKLLWHPSEQESYVPAKRVNGIALLGSPVPISRGFKNPMALKTLHKLKRLINYLLMKGKIDEDTRVVIEIARELNDANKRKAIERWQRDREKENDEYRARIKEIDDEYHLGLDVNNKNVIDKYRLWIEQNRQCLYTGEIISCKDLLDGTKYDFEHTIPASISFDNELKNLTIANSKYNREIKGNKFPTQLPNYEDIRKNIKYMEEKVATLESLHEDWLNKAKFASAKDIKDACIQRRHMIRFDLDYWRHKLHTFTLTEYKAGWRNSQLRDTQVVTKYALPYLKTVFQKVDVEKGSVVAAFRNIYKISPVNEKKDRDLHSHHAKDAAVLTLIPPAAVRDKILLRYNQAKDLQSNAVIHEFPRDWKDFDSNYILSIEEDMLINFQAQNRALTSTYKNVRKRGRQQYVKEKGDDGRLLYKLDEKGARIPIKSDGDTIRGQLHKESMFGVIERNGERWLVER

SEQ ID NO: 6144 - protein, 1086 aa, unidentified
  REGION 1..1086: note = Description of Unknown: Cas Enzyme sequence
MNNSLHFAFDIGHSSIGWAVLRSLDAHDANLLGCGAVIFQADDCLASERRGFRRQRRHVRATRLRIARLKSLLSHLGVLSETELNAVTSSSPWLLAARVLRGGPSLSWRELWDVLRWYAHNRGYDGNKAWSRQEIDAAAEREDAEKVQNARTLLDQYGTRSMAETWCAVCGLDPLGTRASCALPGDKRPKALNAAFPREIVEGEVARVLRSHIGVLPGVDESLVSAVMTDWTALACPAIRLPLRYRGGLLFGQLVPRFENRIIARCPIAYEAIYRSVLDDTGDIAAAKAAADKQAKVPAANCPEFFRYRWAMQVANVLLTTPGGMRRLTAEQRRALDETMRDRGGMTRGEFKDAVRALTGGAPDNLDQMLLHEDADKALVLDPVRRAMRRKEVASLLDTQPERLLKRAAGQMRRGKRLTLGAIRVWAGEDGGAFDAEVERQLDAANTKRGRKTAPPTREGLLSTELRVEFPGGRAPHSREVMRAVADFVFAGEGHPAEEGGPLFRSEAIRKAQLQRAIDEQTNNHLVRHRLRILERLHRDLLATYAKGEDVTRVTIEVNRDLRELSGKKAKEIAQDIGLRLSNFKSVAAKLERELVGKGIAITPGLIRKARVAEDLGWTCPYTGQTYDVLDLVHRRVDKDHIIPRSVRPSDGLDALVITFSEVNRMKGKRTAVKFIEEDGGKAVEGRPQLTLRTPGLYSEAIRKLETFKGHEDDKRRKRNRRRLLELRDYVEKEFVPRDLTQTSQLVRLGAQILEREYEGREMKPVITSLPGSVTGAVRRSWDLLGCLGAANPLVMDPATNEPRTKTEIRDITHLHHALDACTLAFTSLVLPGKGRDGSAWELLVRRRLNAEQQTKARELFKNCVEFEKDGTLRLIDLPKAFKEQIRQRIAERRVVQHLPSDMSGLRAELNAWRVVNSMPDEDGKLLLRQRIRQPDGRRPFKERREKPEKLVGLRPGKLQKLKGALVIGDNYGLALDPEPTIIPFHKVWNRLRELREKNGGKPVRVLRNGMLIEVPSGRYAGAWKIFSVKNNTSGIAVDMARPDVVRPMNKTENSRINVLLASLLRDGMKLQPVSLCGIAPKSEAV

SEQ ID NO: 6145 - protein, 1042 aa, unidentified
  REGION 1..1042: note = Description of Unknown: Cas Enzyme sequence
MADRYRFAFDLGTNSIGWAVFQLNQVDHPVDLIDAGVRIFSDGRDPKSGASLAENRRGPRAMRRRRDRYIQRRTFLMDEFIKAGLMPASEPDRKALEHLDPYKLRLKGLDQKLELHEFGRALFHLNQRRGFQSNRIADAGNDDEGGKIKDAEKRLKAKLEAEGCRTYGEFLARRQDHPEVRKRQAVRVRLKGQGTNALYDFYPTRDLLKHEFDALWSAQAKFHSELTPALHNRLFNAMFFQRPLKPPVVGKCTFFPDETRLPKAHPLSQARRIYQDVNHLKYRRGLGPWQSLTLDERDRLVLFLMAGESLSFAKIRKELKLPADTVFSIEEGAKIDKLIGNQIAERLGYKKGPLKDRWGDFRPEQREDIVDKLTSEPDEDRLLDYLRDTYGLSDAVARLAMKVRLPDGHDNLGLTATTKVLEELKRGVVTYDKAVKAAMPDKHHSDERDGVILDHLPYYGEVLERHTVGGSSDPNDDVEKRYGRLTNPTVHVAMNQLRRVVNALVERYGHPEQIVLELARDLKLSQKQKDEIERENRKNREKNEARRKLLEDEGFIANPGNLLLLRLWEELGPPMQRQCVYTGQPISLHQLLSGDVEIEHILPYSRTLDDTSANKTLAFLGANRGKRNLAPCQAFTGDQYDAIRQRARTLPPNKRWRFEPDAMERFENEERDFLARQLNDTRHLAKLARKYLVGINNNPNDVWVVTGQLTALMRARFGLNSILSDHNHKNRTDHRHHAIDACVIGICDRALLQSVARAAGLRESNDELNEITRHIEPPFPAFRDRVDEVVNAVVVSHKPDHGSTSKDSRKTSGALHNDTNYGINDTEDRIDGELVTRKAIDALTANEIDKVRDLHLRSQLQILRAEVGKDAKALAKALGEFGQKNDIRRVRILKKREDYATIRDRKTGEPYRAVIPGENHAMDIIEDADGVWRGFATRVFDFNSKASRPGWQAEYPGARLVMRVHKGDMVEVTDDDGIRRVKRVVRLSPSNNILYLVNHNEGGEFPKRHEDKDDPFRWDFANIGKLRDRMCRPFMGNELGKI

SEQ ID NO: 6146 - protein, 1081 aa, unidentified
  REGION 1..1081: note = Description of Unknown: Cas Enzyme sequence
MSPAMEASQKYVLGLDLGSASLGWALIGLNAAGDPEHLIRTGVRIFEPGVDGSALDVEQGKDQSKAVERRTARLHRRQLRRRVARQRELFIELQRAGLLPTSSTGQGAGSEQRHQLLNNFDQTLTAKYLATDGEAFAQSPLYFLRKRALDHALEPHELGRVLFHLSQRRGFKSNRKETKKAKEDEDLGQVKADIHSLELTMQEVGARTLGEYFAGLDPHTEKVRRRWTARRMFEHEFELIWSAQLPHHTSVLTQELHDRIWTLLFFQRPISAQKHLIGTCELERGDEKHPPKRRAPWASMAAQRFQMLQKINDLVVLDATMRTSRKLTPEEHKSLYDLLDREGTQTFAAIRKHLGLKGTTFNLEAGGDKTLPGNRTLKSMRNAFGSAWDSFSEGKQNQIIENWRNSESDDLLVAEAIEHLGLDAASAKTLVDEKPQADYCALSLVAIKKLMPLMLDGKSFKEAETEIYGSRFSGLPVHDILPPVREALPTLRNPAVERALTELRKVVNAVVRAYGKPYEIRIELARELKKPRQERVKATVANRKREAENKLLAKRMADECGILNPSRKDLEKAKLWVEQQGECPYTGKRLSFSRLFDDPEFDVDHILPISRHPDDSYQNKVLCCLNENRMHKRNQTPYEAYSNDAERWRVILARVAKWSNPGKLSKFEIATADKLTEFTSRQLNDTRYTSIKAAELLSLLYGGRDVIRDGKPEQAVYASTGAVTATLRRNWGFERILQGLVSPEAGETRGKPRTDHRHHAIDAITIALTRQSVIQAMARESQLAPWQPGTRAWRNIPRPWTSPEFEHELQQQIAEMVVSHRPEHKISGELHKGTNYGKPYLLNGKSTVHARCAISALSASDIEADDVIVDRAVRDAVRAKLAEIGGNPKAFEKPENLPHLFAANGKAVPIRRVRIRQTKDPKQVAMGSRERFVDSAGIHHAALFVMRDAARKETWISEVVQTTDVYDRCPRRDKRKGRPKNHIYGAAVSRVSSEYPEAEFIFSLMKDDTVEMDFKGERDIFRVKKFYANGQIWFTSVNNAQQDADQMKQKTTWSKSPNTLGPLNPRKVVVDLLGKVHPAND

SEQ ID NO: 6147 - protein, 1410 aa, unidentified
  REGION 1..1410: note = Description of Unknown: Cas Enzyme sequence
MKKILGLDIGSNSIGWALVNLDFNNEQGEILGAGSRIVPMDTDLLNNFEQGNTISKTASRRQARGARRLRQRYKLRRQRLVELLKVIGWLPADFNAGHKLPATENSIREMHELFGTSKIPEDWVVYFLRHKALREPVTLNELARIIYHMNQRRGFKSSRKANDTPNTPEEEDDDNNVQKRESRVEIVKVTGIRDTGEIIRKKKAFELTVAQPLSGNINKGVILRDTAPDWLNQEVELEVRIIPSKKDTRIEFALPDKSDWQKLREALAKDFDTKQLYPGSYFLQEILNNRNYRIRERIIDRARYEAELKAIWEKQAGYHPELQARDKLAVIAEKFYPRNKEKQKELQANDLFYALTRDIIYYQRPLKSQISSIGDCRYEKKNVVLTKQLHGKNISYSPGYKAAPVSSPLFQEFRIWKTLHNLRVLTTQKLVNGKLETEVDETAAYIHPKLEALFTLFNSKGKVKVSEINKLLGLKADNHQLNYPADTDLPGNETRHTFFKVFKKHNYLAEGETLLNDKEKLQQLWHLLYSVEDSSSIKNTLKKKWGFPEQLADHLSKLPPFKLQYAAYSAKALGKLLPLMRAGKYWTIADIPAPVKERIDKLNNGELDNELDEAMRARIEKFRSEYQLAEITDYQGLPEWLACYIVYGRHSENTSGPVCTVPEEVKGLEAKSLRNPIAEQIINETIQLVKDAWKKYGRPDEIRIELARELKKTADERKKLYDNNRQNKEDKDRIKAILRELKLGNPNSLSDIDKVRILEENGNYKYQNSQEKFFKKAVEPTRAEIEKYRLWIEQHCISPYTGKTIMLSELFTPKYEVEHIIPRTRFYDDSLANKVIVESWANKEKDKQTAMQYIEQGSRQDRLLSPEHYIAHIEKNFRGKKRRHLLSLEIPKGFIDRQLNDTRHISKKVKELLYQVTEQVWATSGQVTDELKHKWGLNNQMKEILEGRFKRLEDITGETLVSHSVDENGQRTTHLQGYEKRIDHRHHAMDAIVIACSTQSHIQYINTLEAQNTDEKKKYEFRKSLLQSNKTRDFRKPWKTFVEDAKNALENIIVSHKNRHRILNKGINRYTKYVQNEKGEWVKKLVEQTKGELYAVRKPLHKETISGKVNFREYKKVNLEEALKQIDNLADRAIKKQLRDLQAQFEGDVKKIKAAVKANPLKDVNGAVVEKIMAWDWKPYSLNRVTLDASFTKDKIDKIAEYDNNKQKGLKYQLYQHLAKYEDNPKQAFTGEGLEALAKTVGRPVTKVSIYEPIGNKFEIRPGQMVEAAKGTNLFFVIYENVSTGERSYTTLGLRDVLIAKMNKLPIVPPKDGHKYILLSPNDLVYVPETEENIKAIDWNDKKSIGGRIYKMVGASGPQCFFVPHHIAKPVLEAKELGANNKSERSWDGKMIKQSCIKLKHDRLGNIVPS

SEQ ID NO: 6148 - protein, 1317 aa, unidentified
  REGION 1..1317: note = Description of Unknown: Cas Enzyme sequence
HPHELGRALYHLVQRRGYKDIGDVDKETEKQIQRRGESGFNSALKNNRTIAEALQNDFLNQGKGARNQYPYRDEYRSELELICQGQGYNISKNQKGEFNDGFVQKIWKAIIWQRPLRTQKGNIGQCTLESSKPRCPLSHPTFEVFRAWSFINTIKYKDKNCEKQSIPQELRNMLFEQVFLKKAKNFKFEEIRKFLDKQFKSSKEYNYPYNAKKEIYDSTVAGMPVCNGLVNLLGERAKNAICTIESYQISNAPKIVSNYSLLDLWHILFQFDEKSSEDKNYLEKFAVQKLDIPTVKGKHGEYNPFVRLKDNFQTGYADLSLKALVKIIPFLKKGYLYNEAVLLAKIPEQLEADWEQNEDIISQVMEESNNLYEWHRRTISISNNLIDNYKGLETPVFAFNDYEYMLDEDDKREVEQACIGYFGEKTWQLRNDKEKIIEAVTNQYQSFFHDKTRAYRETPNLTKIFEEKLYDKHIKIETDSLYHHSNTQNKYGKAVEDKKSGMLILPEARIDSIKNPMFNKALSVLRKLINQLILKELIDENTEIIIELARELNDNNKRAAIERYQREREDRRKKYREFLQEFNERENRTINVEESLAAFELWNEQAFAETLDENKQQISNKNSNEILKEKEALKRYELWMEQKGQCMYTGKMISITQLFSNEIDIEHTIPRSLLPDNTMTNQTVCYAWYNRDKKKQRLARNCENFSDDKDGWGTRIKDRLENWIQIRDNYKELYEKRLKPISNEDEVTKAKRIQEKHYYQLHYDYWFEKVGRFCADEVKDSWARRQLTDTQTISKYAREYLKTYFKKVVVQKGSVTSDFRKIFSFQGEDEIKNRNKHTHHAIDAAVLTLIPTNSSYRDKLLKKMCETWEKERKHFTTLPFANFNSQQLINQIENTTLVVNYENDKLLKQTFKYIRKRGRLECLRDKESRPVLNENGKRIYLLSAGDTVRSTLYKQSYIGKIKDVVRDSAGKPLRNAEGDWKYKTGKDAFLFTERVPVKDALNKIEDIVDPEVQKWVSEQKKNNTEIKDPQGNIIRHIRIRTKGGQIVKERLNYRSTHEHKNYFYSAAGSIPYAVLIQRINNGTVQREMIPVASFELAKLSKELGRFDTEHYIKKYLPDYVSWPDKKLLKVGQKVFVLNRDQEYEERFDINFQVRRMYRITQFSEGSIWLKYHLEAQADGDIDDSVKKEKDKILRSYEIENNIPEIVEDLTIKDNKQRKDDFDKRKYSFAQLNSFRFTRLAEKIGMNRVKEIKIELDKWKKQASIIEIEGKTPLLKMSKECWNFLYEGYDFEISMLGEIKWLNENNAYKINTRKADTN

SEQ ID NO: 6149 - protein, 943 aa, unidentified
  REGION 1..943: note = Description of Unknown: Cas Enzyme sequence
MGVRIFPDGRDPQSGASLAQERRIPRSARRRRDRFLDRRADLVSRLVKHGLMPADPVERKALEVSDPWQLRAEGLARALTLHEFGRAIFHLNQRRGFKSNRRADHNEKASEAQGMKAGAAELTKRLDPEKPGRRTLGEYLYTQSRKGRTPRGSNDGTVPAMEPVRFRAHLKGSKAEWDVYPTRVMVEAEFDALWSAQASFHPILTDEIAKEIRDIIFWQRPLRPVEPGPCTFDPEPDPKKRDRRAPLALPIQQEFRILQELANLELRHRRTGETRRLSRDERDKLFFQLRRCERLTFRKIYKILGIENIWSFNLESGKREALKGDIVSYRLSHPKAFGDVWYGLSTQDQARIVEFLLTENNDEKLIRTLIHEWGLSTERAEHIAMLSLPDGFGRLGRVALGRIVPLLRDGVTKNGSLMQFDEAVQAAGYKHHSDFRIRELFDEAPYYGRVLDRYVVPVSQNSGSSDETQYGRIANPTVHVGLNQLRRLLNAIIGAYGHPTEVVVELARELKQTWEERKETIERQTENQKKNERRKEQLVDAGIAMTADAMLRMRLWEELGENIADRICVYTGEPIGIRKLFGSEVEIEHILPFALTLDDSPSNLTVSLRRANRDKGNRTPYEAFGTGPDGYEWDAIALRASALPRTKRWRFQPDAMKLIQDRLLREEARLKGSLPRDVLADIEKTGGFLARQLVDTAYLARVARQYLTSVVPAEQDGDGTLRSNVWVVPGGMTGMLRRLWGLNRYLWGNRPEGHDESGVDDWRGKLRTDHRHHTVDAFVLTLIDRPLLQAIQYRSGESGHRTIDDMPDPIGWPRFREDLKERFDRIVISYKPEHGPSRSGGRRLGTSGKLHEETAYGLIRDPAREGGATLVYRKPFTDLNANEIARIRDPDLRARVLTAISADRTDRKKLREALNSFARVEPKPLRHVRLTKVERGFKPIEDR

SEQ ID NO: 6150 - protein, 1041 aa, unidentified
  REGION 1..1041: note = Description of Unknown: Cas Enzyme sequence
MADRYRFAFDLGTNSIGWAVFQLNRANHPIDLTSAGVRIFSDGRDPKSGASLAENRRGPRAMRRRRDRYIQRRTFLMDELVKAGLMPASEPDRKALEHLDPYKLRYKGLDQKLERHEFGRALFHLNQRRGFQSNRIADAGNDDDGGKIKDAEKRLKAQLEAEGCRTYGEFLARRQDNPEVRKRQTVRVRLKGRGANALYDFYPTRDLLKHEFEALWATQAEFHSELTSALHDRIFNAMFFQRPLKPPLLGRCTYFPEETRLSKAHPLSQTRRIYRDLNHLKYRRGLSPWQSLTLDERDRLVLFLMAGESLSFAKIRKELKLPADTVFSIEEGAKIDKLIGNQIAERLGHKKGPLKDRWADFTPEQREDIVDKLTSEPDEDRLLGYLRNTYGLSDDVARLTMKVRLPDGHDNLGLTATTKVLEELKRDVITYDKAVKAAMPEKHHSDERDGVIWDHLPYYGEVLERHTVGGSSDPNDDDEKRYGRLTNPTVHVAMNQLRRVVNALVEHYGHPEQILLELARDLKLSQKQKDDLERENRKNRDKNDARKILLEEEGYVANPGNLILLRLWEELGPPMQRQCLYTGQSISLHQLLSGDVEIEHILPFSRTLDDTFANKTLAFLSANRGKRNLAPCQAFSGDQYDAIRERARSLPPNKRWRFEPNAMERFENEDRDFLARQLNDTRHLAKLARKYLVGINNDPNEVWVVTGQLAALMRAGFGLNSILSDHNHKNSTDHRHHAIDACVIGICDRALLQSVASAAGRRENNDELNEITKHFDPPFPSFLDRVDEVVNAVVVSHKPDHGSTSKDSRKTSRALHNDTNYGINETADRVDGELVTRKAIDALTSNEIDKVRDLYLRGRLQMLRSEVGKDAKALAKALAEFGEKNNVRRVRILKKHEDYIAIRNRKTGELYRAVIAGENHAMDIIEDAAGIWRGFATTVFDFNSKERSSGWRAEFPGARLIMRVHKGDMVEVMDDDGVRRIKRVVRLAASASRLYLVEHNEGGDFQKRHDDLNDPFRWDLAAISKLKDRECCIIHLSELGK

SEQ ID NO: 6151 - protein, 982 aa, unidentified
  REGION 1..982: note = Description of Unknown: Cas Enzyme sequence
MGKLGLDLGSSSIGWALREANEISKSGIITFQSGMVKGQGGYSSPAADRRKARSKRRLIQSRKYRKWELLKTLIENENHSFAPLDVKELLTWSQYRKGQRQKFPESKIFQMWLRCDFSYLPNGTKYKNPYELRVKSLDHELHPHELGRALYHLVQRRGYKDIGDVDKETEKQIQRRGESGFNSALKNNRTIAEALQNDFLNQGKRARNQYPYRDEYRSELELICQGQGYNISKNQKGEFNDGFVQKIWKAIIWQRPLRTQKGNIGQCTLESSKPRCPLSHPTFEVFRAWSFINTIKYKDKNCEKQSIPQELRNMLFEQVFLKKAKNFKFEEIRKFLDKQFKSSKEYNYPYNAKKEIYDSTVAGMPVCNGLVNLLGERAKNAICTIESYQISNAPKIVSNYSLLDLWHILFQFDEKSSEDKNYLEKFAVQKLDIPTVKGKHGEYNPFVRLKDNFQTGYADLSLKALVKIIPFLKKGYLYNEAVLLAKIPEQLEADWEQNEDIISQVMEESNNLYEWHRRTISISNNLIDNYKGLETPVFAFNDYEYMLDEDDKREVEQACIGYFGEKTWQLRNDKEKIIEAVTNQYQSFFHDKTRAYRETPNLTKIFEEKLYDKHIKIETDSLYHHSNTQNKYGKAVEDKKSGMLILPEARIDSIKNPMFNKALSVLRKLINQLILKELIDENTEIIIELARELNDNNKRAAIERYQREREDRRKKYREFLQEFNERENRTINVEESLAAFELWNEQAFAETLDENKQQISNKNSNEILKEKEALKRYELWMEQKGQCMYTGKMISITQLFSNEIDIEHTIPRSLLPDNTMTNQTVCYAWYNRDKKKQRLARNCENFSDDKDGWGTRIKDRLENWIQIRDNYKELYEKRLKPISNEDEVTKAKRIQEKHYYQLHYDYWFEKVGRFCADEVKDSWARRQLTDTQTISKYAREYLKTYFKKVVVQKGSVTSDFRKIFSFQGEDEIKNRNKHTHHA

SEQ ID NO: 6152 - protein, 962 aa, unidentified
  REGION 1..962: note = Description of Unknown: Cas Enzyme sequence
WNYVEDKVYPMSDTRAQFLSRLKKVKTNEGVTLSDTLITDELIQNIWHIIYSVNDKEQYKRALNTFAKKNNLDANSFVSAFEKFPPFKSDYAAYSEKAIKKILPLMRMGKYWNEDEIIDDSKQRIKDIIERLESIGFNKSKIESISDDDIQKQMLKSFIEFQNKNPFCGLNTYQAGYAIYGRHSEANDIARWNTPADIDLFLKNFKQHSLRNPIVEQVVTETLRTVRDIWNEYGDFNAIHLELGREMKNPADKRKRLTQQVTENENTNHRIKQILKELMNEGVSEVRNFSPSHQEILKIYEEGVYQSFENVSDDIEKIRKNPKPSRNDIVRYKLWLDQGYISPYTGAIIPLNKLFSTDYQIEHIIPQSRYFDNSMSNKIICESEVNELKTNKTAYEFIKAHQRQIVSLTNGNKVKVFDLEAYVNHCKRYFSKNRAKLKKLLSEEIPEGFIERQMNDSRYISKLVKGLLSNIVREEDEQSETSKNLIPITGSITSKLKQDWGLNNKWNEIILPRFERLNKLTDTNNFTYENTEGTIVPTVPDELQKGFNKKRIDHRHHALDAIIIASTTRKHIQYLNSLNNEKEKYNLQPSLLIKNKDGHYTKHFQLPWSSFPIDVKNSLDNIIVSFKQNLRVINKATNRYQKWVKDENGEYKKKLVKQEGQNWAIRKPMHKETVSGKISFNAPKGKIATAVRTSLSDIKNRKHLEKITDKGIVKILENHLRNYIDDKGKEDFENAFSPIGIEELNKNIIQLNDGKKHHPIYKVRLFEVGSKFALSENENSPKSKKYVEAAKGTNLFFAVYETTDKNGNKKRVFNTIPLNMVIEHQKQMANLPKEERSAIPVDNSKGKLLFTLSPNDLVYIPTDEELENINAIDFSNLSVEQKNRIYKMVSTTGGECHFVPNRNANEIIKNENGTNSKEQRMQQFFDKNIDIIDNKEKPTMIKDRCIKLKVNRLGQIVKVGEY

SEQ ID NO: 6153 - protein, 1119 aa, unidentified
  REGION 1..1119: note = Description of Unknown: Cas Enzyme sequence
MFQVGLDLGTNSIGWAIVSYDEHVASDGPVAAGSYVFPEAGDEEGGKFVSHRRKRGAKRRQRKQLRRKRQRRNAVLRLLVAAGLIPKHPTERVRTLTSTCPYRARAEALDRRLEPHELGCAIYHLAKRRGYLSTAALKLIGVPRVEELDARLAAKALKELETDAEDRSEDDQEAIKELKGALKSIAQTRKRLEQGEARTLGELLFKEIQDKRPVRAITGKRITQPVENALSSALGEKKWSEMRAKDRRRVVEKLKRIAELSKQQRSELDEKRLQKLFDELSSKTNLNSDALSSIADSVRQPVMGIRADRKMYQDEFNQIINAQRAHHPEVLTEDFCNALREALFYQRPLKPTSDLIGFCSILPQRKRCHNATMLAQHSIILQRLNTLRIDEKTEDGPVERRLTPREIGLLVDALDHNEKLSWEDATKIINLRKGEQWFDEMPPEEAPPQKGGKRKKGRDGLVGNQTCAAMRGAIGDAWDRLTNRRKEELIHRILTAKHFKDIVPGLRRDYGFSDEQIYYIATAKLPEGHNRHCAKVLRKIEPFLREGHVYSEALELAGLREPHKSTEDRPDVDTAPEYASTTVQIANPVVQRAVKNALIVLNAIIKKHGKKPDVVRVELPRDVSRTNKQRERVIEAQKRRKRHNEEAEKLLKDSGLPTTSSNIRKVRLWQEAGCCSPYDPETKLTIRQVIEECDIDHIIPRSRSLDDSYMNLTICPNQLNLVKGDKTPYEAFGTDSDRWRKIKAHLNALKSMGRRKKALILTENPETDGFVGRDFSDTSYIAREVMKAIKAIGVEVQVTRGALTAELRKLWRLDELLPLSDEERKRIQDANEKGRFKSRDDHRHHALDAVITALMNPDTHQCLTQYYKRRETEPKKGISLPEPWPGFKEDLKRVIDEAPVVFQPTRGIGGPLHEETARTPPSREEIQRAIAQLPVHRRDRIDRAVVVGSQLVRLDERGEPLAAYDLGSNHHCIIWQQKSRDKKGRFKREIEVVSMIEAATRACCGEPVFSAKHSARGDDWEPFLFLCKNDIVEYDHPEEGRKRMRVAKFSSWAFRREGKKKMIEGVRAELVLRPVLDAREIKQHNVRVRGQEALARILHRVILSPLGDVVGLEPRDAEH

SEQ ID NO: 6154 - protein, 1125 aa, unidentified
  REGION 1..1125: note = Description of Unknown: Cas Enzyme sequence
QEFRLWQFVQNLKIYQKEKEVDGQLQTDVNVTSEFLKTEDDVVALFDWLNNKKEIDQKAFLKFPAFNLKKNAENFRWNYVEDKLYPCNETRALIQSRLDKINGIAEDFLDRATEEALWHILYSVEDNEDIKKALKTFAAKKGLSEKLQNDFVSQFKKFSPFKKDYGAYSAKAIKKLLPLMRTGKHWKEEAIEAATKQRIDKLITGEWDENIKNRVRDKAINLTQINDFKRLPLWLASYIVYNRHSEATDLRKWKTANEIELLRQHSLRNPIVEQVINETLQVVKDIWKQYGNGQGNFFNEIHVELGREMKNPADKRERLSKQIAENEATNLRIKALLQELLNDSEVENVRPYSPMQQEILKIYEEGALLAAEEVPEYITKIAKQAQPSQADLVRYKLWLQQKYRSPYTGEIIPLNKLFTRAYDIEHIIPQSRYFDDSLSNKVICESVINPKPYKDNRLAYEFIKEFSGQIVDELSTKSKTVKIFTVAEYEEFVKRHYSGNRSKMKKLLMEDIPEEFIQRQLNDSRYISKVVKGLLSNIVREQNEEEATSKNVLASNGAITNALKQDWGLNDIWNDIITPRFERLNAITDSKNFGDRTNKEGKDVFQTTVPLELQKGFSKKRIDHRHHALDAIVIACASRNHINYLNNESAAGKGTKEQKEKLRYDLKTKLCFKKFNDDNKQHYKWVFFKPWETFTQEVKDVLESMVVSFKQNLRVINKTTNYYQRWEKNASGELVKILSKQTKGESWAIRKSMHTPMPYGKRIYEFDNLKLSDNVGKVDLIIDASIREKVKKVLQQCGNKITVAQKFLKENPIKGDDGVEVINVAFRGSVEKFRRRQPITKLSNRGQGGLKTYDDVTKFISKIGNYLLQQDLLNHLKDNGNDIDKAFSPEGIEKFNELRSIPVYKLPIVEGGTGRFVVGDKHNTKHKWVEADTGTNLFFVVYEDQNGKRNFETVALNKVIEHQKWKASLPKKEQKHIPPVPTDSSKGKFLFSLCPNDLVYFPTEEERENLRNLNFNKLTKDQIKRVWVVNDFSSAIYFTQNHFAKAIAPKEADLTRDEKTKRLKGSFDTKTASFEGMQIKDYCIKLQIDRLGHVTKAVKLSLFDEPGENFGNIPQPTEPDKPVIL

SEQ ID NO: 6155 - protein, 1034 aa, unidentified
  REGION 1..1034: note = Description of Unknown: Cas Enzyme sequence
LDLGSNSIGWALLEEAKGKPNKIIDLGSRIFTKAVEEKTPTPKNVKRRDARLARRVVQRRARRKQKMLNYLISLKLLPIELQGNTQPEIILNNLGNPYKLRAQGLNKPLKPFEMGRVLLHLVQRRGFLSNRKTLLGDMVDDPDVLAIINELDNQETTKEKNTEEGAFKQDISKLRETIEYTPSTFNNGDMCRTLGEYLANMEHHTCQRNRSREGGHLRSDRQMYHEELNLIWQKQAKHNTTLTNDVKEQIEQIIFFQRPLKLKDDRVGKCSLEPSKKRAQQAKLECQKFRYLQDINNLQYFDPHREQWTKITTEDKEALKILFESKATITFPQIRKKLGLDRHIEFNLEQGNKKLKGNITACDIRAVLPSWDNLNDTQQHALVEDIITIKKKSVLKKRLINHWQYDLKTSINLCLLELEPAHSNLSIKAIRKLLPYLEEGKIYSDARIAAGYDYEQKKITITNKLGMPPELANPIVSKGLHELRRVINALIAEYGKPDIIRIEMARDLEMNTKRYKDFISRQKKNTSANDEAIKKFQLMGAKNPHLKLRKYPSHNDKLRYRLWKDQGELCAYSGQKINLSTLFSPEIEIDHILPYSESLDDSYMNKVVCYTDDNRLKGQRTPIDAFSSNTNKWQQITGAINHWHPSLKSKKNRFYMTAADVQQRDFINSQLNDTRYICRVAHDYLQQLGADINVTKGIMTGWLRHMWGLDSLIGQDRSAKDRTDHRHHTIDAIVTACIDRRLYNTLVKLAKELEKKSSQTNMRDIHIDPPWQNLRKDLDASLQKMIVAHTPHRKLTGGLHEETGAGFIEGIGTVYRVNLNTDFKLTQAKKIIDPDVKEIINKHLEQYDNEPKKAFAEGITVLHKDGKTPIKRVRILQAKTTLKKLEANKLGIKNKEGKVFRWMAYGNLHHVEILKEISTGKHIGKFVTTLEASHRARGINMEKQAIIKTNHSGFEFIMALHINDLVSINEDDEVKIYRIQKLDKANKRIKLRLHNASTLKNTDETLPDKESTIPSLINKGMKIYKVNAIGKTIT

SEQ ID NO: 6156 - protein, 1075 aa, unidentified
  REGION 1..1075: note = Description of Unknown: Cas Enzyme sequence
MITLGLDLGHTSIGWTLVDTKNGKIIDGGVQVFEAPEDEKGNTLASVRRGYRSSRITNKNHEKRILNIKKLCSKYKLVPKEMLITPKGGIAPLFKKGIEKDTPLSLRTKGLDELLTGRELVRVIIHLASRRGFKFDIEDEVNNEDKELGKIRDSQSELKNEFSEFNYRSYGEFLYKEYELKDKKTRNRANKDKTPTYKFSVYRDDLADELRQIFSKQKMLNSIYVTDEFTDKIMDEVLFVNEPKSLRKMIGECSLINGKKRASKALYSSEIFVARGILVNLRVKEPNEDEYRALSKDEIEQLLKEGHRSKITKAEAKTLLKISHKSKFKGDEDDKRTHIVYLEAYLKVKNLFEDEKFFDKFFDDLELYENIINLLTYEKSLKRRKEKLESFLLKSKFSDDEKKYIFDKLIYLSFSGYLNVSTEAVQKILPYLENGYRVDQAILEQDMSIKVEPQLYLPPLVDTPLMIPNPIVIRAITKSRHLINAILKKYREVYNDSEWTFDRLNIELAREINTQKEKKEITTAQRKDSNNKQKAVEFIVEKCGEKYISSNNILKVRLWQQQDELCLYSFTSIGATEMVNDIIKGNNAYQVDHVLPISRSSDDSISNKVLVLSQENMAKSNKTPFEYFGKNKERWEKFENFVRAKDMYFKLGKAKVGKLTMQDFSSKEQGFLQRHLNDTRIISKMVKNYVEKYLKFKDAKEERRVYVVSGKLTSTLRHQWGLENKNRENHYHHFEDAVLIAFSNASIINRLSKYYHALETYKRDGKDKPKFTKPYENFVDDINDMVKSINVVREPKVKNSGKVHSDNPRKKDEKNRKGMEIRGGIVDNSEIVRTDVFKDLKKEKYFLIPFYLKDLNKPLPTKFITAGGKEWEAFDESKHKFVFTLYPNDLVRVETKTDTIQGYYISPHTGTANITLLSMDNIDDGIFTKSIEKHILKVFINNPLDTDSRKEQIEKMAKLPNIKKRKPTGLLALIMDIKITDVKNTKDKKNNLELVLEELAENYSIESFKNSTKTVEVDEVNKSDNEIKLTVTLETIYDNRALRSTGVKAKTLGFKKLQIDLLGNITELPHETVRK

SEQ ID NO: 6157 - protein, 1187 aa, unidentified
  REGION 1..1187: note = Description of Unknown: Cas Enzyme sequence
MYKKVLGLDIGSNSIGYSLLELNESKNEIIFNELISNSIVFSEPNTAEERRTARGSRRLHRRKSSRNKNSRTLFVEYKLADKAFISDATKYLQSMGLKDYDVYRLREKAVTGTFLSKDEFTLAVYSILTDRGYSNMFALVEEETEEQKKEDEKLNGAIQKNKDKYLENAYELPSMVLTFNRKELNNSYQNTPIRNKKGDYRNSLDRDMHIEEFKKVVLSQATNKDIFKSVESCEKFIATIVEEKYNAFYQRPLKSFEGMVEYCSFYDEFNPLGSEKRMPLSNVANVELTLRQSLDNYEVVNKNGETRIFTKDEKDTVVSFWLNTPSADKITNKNIYKNAGFKDVKIHVKDNKDLLILNIQAYRGMLDVLTFYKVDFQNADNNFYNEILLELYYYKNYSSRVEHITKIVKKYNLELDDSFSKEVAKLKYMDGFASLSLKFANEVLNSMNKDLKIHSEALNSLGFNDKYIGMPSYDYLPPLEPTKADIKWLQKNISYFETNHLFYQPRMSPKVKRVIAVLRKLINELIKKYGNIDEIRIETAKELNSTKEEDKIKKNLVDFNRKKSEAEKFLNKNKLSVGRKNIERAKLFIEQKCKCLYCDENLTKDEAFDETYTEIEHFIPRSVIWINSQKNKILVHKKCNQNKGSQNPINYLKSIGEWENFKKRIKLSPKSPKYKWLTDEDLINGVMQGEHWKESYLNDTRAATRAIQKYLNHYLYPPKTRHNKGGDRHISSVTGLAIHELKYIWGIHAIMPKNEEDGKDRNTNYHHTLDAFTIALCSPSAIQTLNNHFKKNENRFKVKAMKKSLESKLPQTKEGVNVVEHLKKLVEKYETNQFYVCPYNKRKTNLKGFKDGNLKLYVAKDPKNETKEILAEMEKVKIDTSILLKKDGLNFKDRKDDEVKKFIKDIQDRLNPQKQQNIIDAIEIYANALLKFRREIIEIDNEIKKLNGLLKKTVKGKEKNKEIKEEMTSYKEKKKEMVKKQQLLSCSYVVKNGKRQRVRTLRLHKVKIQETSADSIVFSNRDSKSIERLSLKNFNKALQLNEPFVIKENKNTLCVELYAHPKQNQVVGLKYFSSISNPHITTKINEKYKNIFHNVEPDLTLYKNDIIKVINTKEGTANYYIFNGGGNVTGTNNKLSIKHINWNKVMKENKKGKKIESKDITPNKISIVSKVKIDFFGNILEDKPHEK

SEQ ID NO: 6158 - protein, 906 aa, unidentified
  REGION 1..906: note = Description of Unknown: Cas Enzyme sequence
NPKKDNVSPKALRSEYKSKRKIRKKRKKRVLAVQKLLFSLEIYKGNAKEQNIDIWSLRGKIAYERKLEDYEYFAILRFLAKHRGYKSLKIEDLIKEINSKNDLQADCDKDATIKAPKDLENFADTLAYLDALKCQNQDKSVTQIIYDMQKDKSVKTFRNHDNYRYMIRREDVKKEIELITDRQSELGFFDKFVDVEKLKNDLVEIIVEQARVKLNPALINNCALIATEKCAPIYSYSYDLFKLHKIVNDLKVDGQNISDEQKEIIVDYILSKLQEHEKVEFITVGEIKKLLNIFNPDIKLNNLSEQRVIKGKKENVILLKFLWFAKMYKFDNKILSFINACDKKLEIYDKIATTIQTKIDPSDFLNSVVGIFDTYKICMNCKKEEIESFSLSLFENKKSGTGSYSFEAIKRLLEVMKNGTNEADAKEQTGLSVKEEDYSIYHKGIKYLDFYQYEKDKNTISNHVVKSIVSGALRVIKDLHSKYGYFDLIKIESARELSIPEDAKNEIKKANEKNEKIWENLKKTYQQHVGESGLTNSDILKLKLYEQQNQKGIYSNVSMGVSDILSEKTEIEHIVPRACGGSSAEYNLAIDFKDENAQKGNKLPLDYLVGDKRTIFEEKIQQMKDAGVINYKKWKNLLAEDLSKTFKETKDDANMHATSYAEKLLGEIVKMYYPFNDKQKQKNGVGVMHISGRGTTHLRKVLGVENKSRDTNFHHAEDAIIMAIMSRGYLQKLSRTFRENYGKDKNSAKEHLKSILPTIEGAVPAEIIARLRELYEKDIDSSPFFRDHEGRLKTIYFWVSKKPIGTQAHNETIQSAKDFSYRVKLETLFNDVKPKPSHKISPDSFAKVFNSKVYERLQLVKDNPSDFTAKAIKQRGDEVVSLLNKYQFVTTKEEQEQADKEIRELF

SEQ ID NO: 6159 - protein, 1067 aa, unidentified
  REGION 1..1067: note = Description of Unknown: Cas Enzyme sequence
SLSKEEFVYCTYSILTDRGYNNMFSISNEDGVINEAVTQNTKEYESKNYALPSMILTQRRKELEDKFQNIPIRNKKDDYSNSLDRNMHREEFINLVSSQADNKNIFISKDMAQNFIDEIIDESEVNTPFYQRTLKSFEGMVEYCSFYDEFHPNGSQKKMPLANIRNIERTLRQAIDNYGAKADAKTGEIKVFSEEEKNSIVDFWINEPSSNEIKATNIFKSAGFKKLKLNIPEKSSQLVLDIKAHRHILEILSKYEIDFQNKENEFYNDILLELYYFKNNSSRVENIKKQIEKYNLTIEQECVEELALLENMDGFASFSLKFTNEVLGVMKKESKTHHEALESLGYYSKYLKMPTYDYLPPLEPTKKDIKWLEENIQYFESKHLFYQPMMSPKVKRVISILRKLINEIIKKYGRIDEIRIETAKEMNSKVEQEKINENQAKDRAKNNRAVTFLKDNEIKKSPKNIQRAKLFLEQDCECLYSGENITKDEAFDENETEVEHFIPRSIIWINSYKNKILVKKKYNQNKGSAHPVEYLKSVGEWENFKGRVDKTYIAFNKKDWLTKEEIIESVMNKDKWLDSYLNDTRSATRTIQKYLNHYLYPKENIYGTSEDRHIFSISGRAISELKYMWGINKVMPKKEDDKKDRNTNYHHTLDAFSVALCSPRAINTLHSHLKKKENKYKSKALKEKLINSLPHSTKGINIVEHLRILVERYETNRLYVCPYNKRKMNMKGFKDGNLKLYVTNNPKDTTKKILAEMQKVSIDSSLLTKIVKGFPKPRNDDEVKKEIKSIQDRLDPLKQKKIINAIEIYADELLDIRAKKLAKESEINKLGKTKKNAKQHKEFNDAVNESIKLFSQEKKVLELQLKDLKCSFAVKNAKRQIVKSLKLYNPKISETKADAILFSSRKSKKIERLSLVNFQKALEDKEPFVIKANESTLNVELFNTEKRGQAVGLNYFSSIANDVKVKINNKFMTELKDKKSDMVLYKNEIIKVNNIKENKQEYFIFNGGGEISLTNNKITIKNINLNRFIKKDKKGGTKEILVDNMTPNKKTIISKVKIDFFGNITEV

SEQ ID NO: 6160 - protein, 1548 aa, unidentified
  REGION 1..1548: note = Description of Unknown: Cas Enzyme sequence
MKKILGLDLGTNSIGWALIERDFDQKIENILGKGEILGIGSRIIPMSQDVLDKFGQGQSHSQTAERTSYRGVRRLRQRHLLRRERLHRILNIINALPEHYSDRIDFVNKKGQFKNSVEVKLNYKEIVPNKFEFLFQDSFKQMLDEFKQAQPDLFYKKKNGEETKIPYDWTIYFLRKKALTQKITKEELAWLLLNFNQKRGYYQLRGEDDDIDKTKLIEYYALRVKTVRAEEANYKKEIWYSVDLENGWVYRRKSNVDLGDWVGKIKEFIVTTTLNEDGSVKTDKDGIEKRSFKAVNSEDDWIAIKKSTEERIEKSRQFVGEYIYGTLLANPTQKINGKLVKTIERHFYKDELIQIIKTQIDLHEELQTKSLLEKCINELYPNNYAQQNILKQNKDGFINLIVNDIIFYQRPLKSKKSLIDGCSFESRSYIDKNDGKFYTKPIKVIPKSHPLYQEFRLWQFVGNIRIYEKEKLIGGKLYADYDVTSEFIPTELEKVELFEFFNKKDKIKQKTFLSHYKLRENQYRWNYVEDKEYPLNETRAALLAKFNKHKNTFNIDDYLKKNEVKLWHLLYSISDKKELERSLDIKEPKKDNDFIFNLPIEIRQDLKSMKPFKKEYGALSEKALKKLLPLMRLGKYWKFEDINDETKDRIEKIISGEYDDKIKDRVREKAIHLAVESDFKALPLWLASYVVYNRHSESGDLLYWKNPDDIENFLSDFKQHSFRNPIVEQVITETLRVVKDIWNYYGKGDKDFFDEIHIELGRDMKNPKSVREQMTKSINKNQNTRQRVRNLLYEFKKQNIEGVIPHSPSQQDKLKIFEEDILNSAKEIPDDIEKISKSTEPTSREIEKYMLWMEQKYRSPYTGETIPLSKLFTTEYEIEHIIPQARYFDDSYGNKIICEAEVNRFKDRKTAFEMISKSPREVIELGKGKRVRLFTLDEYQNYVSINYRSGSKKQKILLSEDVPEQFIARQLNDTRYISKVVKGLLSNIVRTEGEQEATAKNLISVTGYATTKLKRDWGLNDKWNEIITPRFERMNRLITKEGEPLSTDFGFYDKKIIDGKKTGKEFYRIQVPNELKKNFNAKRIDQRHHAMDALVIATATRSHIAYLSNEYSKSENKRYDLRNKLRRIEEIQIHGRTIKVAKEFLLPWAGFPVDAKMSLDGIVVSFKQNLRVINKATNYYQKWESVNNQLVKKNVAQEGVNWAIRKPLHKETVSGRVNLRYKKTLSLNQAIDSGLVLVNKELSAKIKSLRKDGFDTKRIKKYFKDKKNIFSEKNISKVDVYMFCDDFSATRKPIDESFNSKKIRNSITDTGIQKILLKHLEKYNEFNDKEEIVENPRLAFSADGIDELNNNIQELNEGKQHKPIYKVRVYETLGSKFAVGYTGNKKDKYVEAAKGTNLFFAVYEGINNKEEKVRKYETIPLNVVVERLKQGDNPVPDKIIDKKKEIEFILLFYLSPNDLVYMPSEDELENSNSIDFSNLSKDQKGRIYKVVSSSKTQCFFIRNNIATSIQNKKEFGPLNKMERAIDNQMIKDVCIKLKVDRLGNIVKA

SEQ ID NO: 6161 - protein, 1073 aa, unidentified
  REGION 1..1073: note = Description of Unknown: Cas Enzyme sequence
YQRDRNSLENKIRNNYTSREEHYLKEFEIICKTQKLEGIDVYKRDASQRYSGIVKELYKAIFYQRPLKSQKGLIGKCSLEPKRIRCAVSRPEFEEFRMYSFINTIKIRSTGSEKFRFLTKDERDKIIPKFYRKSKANFTFEDIKNVLGKNNYFNYRDKSTVSGCPTIANFINVFGNDWRDVLYENYDRKSISNRKTKDIIGQKTHEEVIADVWHVLSTFDSEEKLKYYAIHKLNANNTIAEKFSTIPLKKDYANLSLYAINKILPYLKAGLLYSHAVFMANMDKLVIPERWKNIEDRVLIENEIGSIIDNHQTENKILYIVNSLLKNCFDSDYHYSKEAENSYKSDLENSLKKEFGAKTWGIKSNRKEILSNAFEKFIFYLKQRKHGTIKRIDEKILEFLSDNDLLIENSSKEMYHPSDIQKFKAQIIKDKNSNEYKGLGSPDVGSIKNPMAMKALHQLKKLINTLIIEGQIDDYTKVNIELSRQLNDANKRKAIEKWQNNRKELYQEYEKKIRELYKVETGEEIKEITSSDIEKFTYALEQTNDGKLVSKEDVLKYALWVEQNHICIYTGKTISLSSFIGGNSKFDIEHTLPRSRSWDNSQKNKTLCDLDFNRKIKGNKTPYELQMDDEILPRIQHWKEKYEDLEKGIEKLRRQSRSAADKDQKDRLIQKRHFLQMEYDYWKGKYSRFTMEEIKEGFKNSQAVDIGIIAKYARAYLKSVFNKVYSVKGEMVAEYRKVWGLHDTFKDKSGRTQYKPKDRSSHIHHCTDAVTIACMNKSKYDKLAHAWGLEDKGDFNTAKKELEKEKPWESFTEDVRNLENEVFIVHQNKDVLPIQTKKKFRKRGKVKKDKDGKVIYQKGDTVRGSLHLDTYYGAIAKNKDGVIKIGDNDIVIPNYVVRKELSKLKKSDVDNIVDKKIREIVQNAAKEGLIKFNNNGAKVNVEVIWQNREKQIPLKKVRVYMPSVKSPLKGFKKHGNPFLSKKEYKQHFNVVNEENYCMAIYEGINEKDKLKRDFELVNNIEAGEYYRLSNKKHREDHALVPNPHTKSNLPLKYILKKGMMVLMYDKKPDEIWE

SEQ ID NO: 6162 - protein, 1044 aa, unidentified
  REGION 1..1044: note = Description of Unknown: Cas Enzyme sequence
MQQNFRYRLALDLGSTSLGWALLKLSNNQPAAPVAVIKAGVRIFSDGRNPKDGSSLAVSRREARSMRRRRDRLLKRKARMMRTLIEHGFFPRDEGGRKALESLNPYALRAKGLNEALKPEEFARALFHINQRRGFKSNRKTDKKDNDSGALKSSIKQLHAALDPSGADGKPRTVGEYLHRRYQAGQTVRARFRERRVMKDDGKTRVDKSYDLYIDRAMIEAEFDALWLKQSALDPHQFNERARTDLRDCLLHQRNLKPAIPGRCTLLPEEHRAPLALPSQQRFRIYQETNNLRLLRDGLREEPLSLEQRNTLADALERNSKLSFTKIRSMLGLGGAVRFSLEDPKRQELKGNATSVILSKREHFGQAWFGFSAVEQDAIVMQLVSEENESRLTQWLEMNTGVDAVRAEAIACAALPEGYGSLSTKALDRILPELQRALISYDKAVLAAGFDHHSRLNTFGEIPNRTFDTGVQRINPATGEIQNLHALKELPYYGEFLQRHVGFAKDNPKNDEERFGKIANPTVHIGLNQIRVVVNALIKRYGHPSEVIVEVARELKQNLEQRKEENERQAANQKRNAELREMAASILQVAPERVRHSDIQKLILWKELSFDPADRRCPYSGVQISATMVLSEQVEIEHILPFSKTLDDSLDNKTVALRIANRIKGNRTPWEARADFEAQGWFMDDVLKRVQQMPRNKRYRFAEDGYERWLRDDKDFLARALNDTRYLSRVAREYLSLICPQATRVIPGRMTAMLRAQFGLNNILGLDGKKNRDNHRHHAVDACVIGVTDQGMLQRFAQASASASDRQLNRLVENMPPPWETYREHVKRAVNCIWVSHKPDHGHEGAMHNDTAYALLGNGVVRYHKSVDGKRENVTEALKVIEFTCEKAQERHGLQPDGSLRPYKGYKGDSNYCIEIVRDENGKWHGEVISTFDSYQLVRLHGLSRLRHPTLSMSGRPLVMRLVNGDIIKLAIDDSMSVMRVASISSAGRLSLAAHNEANVDARNRDKTGSWRYTYKQAGSLQKALARKVSISPIGELRDPGFKG

SEQ ID NO: 6163 - protein, 1098 aa, unidentified
  REGION 1..1098: note = Description of Unknown: Cas Enzyme sequence
MAYRIGIDVGENSVGLAAIEYSADGKPLRILAALSHIHDGGMMPGSAKSPISRLAAAGVGRRTRRLVRNRRKRLIALDALLRQHGYPPTEPADGITYQQWRARAELLQGFVDDEPYRRELLALAIRHIARHRGWRNPWWTYERLASELTPSESMEKMSADAALRLGVPAEAVRFVGQIGALSASRNTPLRPRTREGSLAKAPDVNAMLSQQVKQVDQFAELREIFEVQRIEPVLADAMLRAVFSQETASVPVERIGRDALPGMKAFVRAPVAALEFQEYRIRSVVANLRVQQGRETRSLEAAEHDQVVAFLFECRDEPPVWADIAELLGVSARNLRKPTADDEGAGSRAPIDRTSKAIEAKFPAKSTFGSWWRSADAEHRADVVRWLIDGAAQPGDADSLVEVVDDVEVREKFDALDLTSGRAAYSIPSLKRMNEYMAKHRCDAHTARRECFDIPDDWQPPRPRLEDAIEHPTVDRVVTIVRRFLVNAVQQWGVPESVAVEHVRGSFMGPSALAEYKFELRTNERRNEAQREELRKAGVAEPRRADVRRYQAVRQQNGKCLYCGDAISFDTCELDHIVPSKLGGSNQSENLVAVCRLCNQDKSHTPFAVWAASKGDSRISVHAAQERLREWDRAGRSVPQSRALRAAVSRRLAATSDEDFPDERSLASTAYAAREVRFRIESFLAEEAAKQGVEVPPVQVFRGTMTSEARKAGGVDSMLRLRGAEAKSRFDRRHHAIDAAVLTTITPSVAQTMGIRHRMRISNEFAGDADTWKAFEGVDAGHTASWHGWRECTGALAGLLVTAVADDAVPVTRSLRLTPRFGEIHAATVRPLKAKPVNDVWTANDVSRIADFRVRRAFTELLISKRLSEPSALNSVLPSETTSVAMFDKDSAQILLRGGSAEIGTSVHHARVYAWRTKRGEINFGYVRVFAGEFPLIGFTGKTDVLTAPIPMWSQSMLKANETLFGRIVSGEAVEIGWLAVDDEIEFDPSSLNFGTDKFGRLMSESAERHWLVTGFFDDTKLSLTPALLASEGLGESQGEALKLVLTANRLPLAVNGTLSLPSCTIVRRTALGRPRWISAHLPVSWQPREVAEARLRR

SEQ ID NO: 6164 - protein, 996 aa, unidentified
  REGION 1..996: note = Description of Unknown: Cas Enzyme sequence
MYTLGLDIGANSVGWAILDPDASKVIDAGVRIFQEGVDRDTKGAEISKNANRRAARSARRNRNRRNYRKDKLLRLLIRNHLLPQNTQELQQVFTKDPYFLRAKGLDEQLEPYELGRVLYHLNQRRGFWSNRKSGKSKEEGVVVKNATALQEQIQQSCCRTMGEYFANIDPHEQRIRGHYTFRSMYEDEFERLWEKQKAYHDGVLTDDLKKEIKEKTIFFQRPLKPTDGLIRNCELEPGEKCCPRADWHARRFRILQTLNNLKIQNPDGTDSVLTDEQRKVVLEELLNNKDVKFDTLRNKLGLLETQTFNLEEGPRGKKKESLQGDEFNAHLRKVLGKNGFARLNQTVVIEINELLLDDSLSDGEVAEQLMEHYGFSEEEAQSVLAAPLPQKYMSFSRLAIRKLLPSLEKGLLTHEAIREVYGDLQTRRPLQELDRLPFPEDLRNPIVNRALWEVRKVVNALLRVYGKPRKIRIEMARELKGSAREREEIQFQQRRNEEENKKAQEELVRMGILSPSRDDIIKYKLWQECGQVCPYTGRPISQSALFGPHPEFQVEHILPYSRTLDDSYMNKTLCAVDENRRKGDKTPYEFYYGTERFEQILQRIAKLPYPKRRRFWQEEVELDTFIQRQLNDTRYISRKVVEYLKNLGCIVQGTRGQITAELRHQWGLNLILDDTGLAGKNRDDLRHHAIDAAVTAVTENIHLRGLARSKYTPAGQAAVRFALPWDNFRQQLKDIVNQINVSHRVCRKVSGPLHEETSYGPTGLKDEKGQDIYVYRKPLEALTLAMVLKIADPVVRQIISERLAAFGLSPGGKGTIPKEVWQEPLYMKTKSGRPGPQIKSVRIRDVFNNLIPIKDKEGKPYRYVAPGSNHHIEIFEYTDRKGRLKQEGRVITMFEAVQRSRNNQPVICRDYGDGKRFVCSLAINESFMLEVEEGSFVLHRVQKLDQNGRIILRPHTFGGKLKDSDKPPLIQRKSPNTLRGYKVTVDPIGRIFPAKD

SEQ ID NO: 6165 - protein, 1141 aa, unidentified
  REGION 1..1141: note = Description of Unknown: Cas Enzyme sequence
MKKILALDLGITSLGYGILHEIENNSYECIDYGVMMRDAPFDSKGNSKQSLRRDHASQRSLNEKKKRRIRQLALLFEEYGLCSFDACMQVQYENKITNKWELRAEDALNRKLTTEELFAILTHMAKHRGYKSIATDDLLYELEVELGLIDEEVNVKDADDEKRQVYAALKRLEKLKSEYKHETIAQVIDRAVKEGKFRSYRNHDNYEKMIRREDIEDEIETIIDKQCAFGAFSFGSDLYIAFIERIKEIITDQVMPENDPSLFGKCAFYENEKAAPKYSYLYDLYKLYKTLADLKINNEPVRKEEREKIVDFLFDKMSMGRNIKELKYKEIRKILKLSDDRKIFGKEDTITIKGKKSDRTLVKFSFLSEIGKFPQLVSSIAEHPKYIDIFADLAEALRLHKTPQEAFKAIKSMCQFYAIEADESEVLALIKSKSAGTLSVSHKFIIDALPYLKDGCSESEVKEQLGVNTSEDYSAFPKSLKHLHLGKKNLFEQTQNKINNHAVKSLASWILRRIADLSWRYGTFDEIVIESARDTLPKSIRDAIDKSMREREKEIDKIADKYKKEFPNIDRKTARKIKLLESQKFMDLYTGKIINISDLFEGRADIEHIVPRSLGGINADYNIVISHRDSNMQKSNRLPMDWLGEDTEYVNRVEKLFSEHLIPWKKRKNLLARSLDETYVEVQDTKALRATSYLEALVAEVLKMHYPFASKEHCKNGIAVRNIPGKTTSKTRSILGIKSKSRDTNFHHAEDALILATISRGWQNRLHKMLRDNYGRSEEDLKKIWEAYTPHIEGLAIADYVKEAYERFMSMGEESLFYRDMFGDVRSVSYWVNKKPLSASSHKDTVYSAKHKDPNDPNKTIPTIRKSILGAFTSMKIVENRNKWSVDDFEKVYDKEIRQKLWLYRIGNTNDPVYRAIEARAQAFRDIINEYIYKDAGSDKEEDEVYKQKLNALLNEPIIAADKPVYKVHFVDETFNPIAIERGRGNKVLVRTDDNFLAVMFSKGEKEKLNIEKVDVNSGEKLQSKDALIVYLNEMIYLFNKTKIIHYGCLRSFIIKSSGARQVALYNPRFPAFPKMQPKYFSTGSQIKQVSIGSTTGVIKAHLDLTGKVKSYEKFGLISKELEEQFLKESGYGSVEDDTHH

SEQ ID NO: 6166 - protein, 1092 aa, unidentified
  REGION 1..1092: note = Description of Unknown: Cas Enzyme sequence
MDYSLGLDIGTTSIGFAIVDMDNGKIIESNSIIFEEKETEPHKNKTLIRRQSRAKRRLIKRRRQRKYNLRKLLFRYGFVCKDFVNNPKEYIKNNPVDNLFYLRYKAAKELISDYELSRILYSFGSRRGYSDRYDIDTGEKDKAKEKGAIKQSINTNQDILKQYNTFGEMMWSLHPEKCRNSNDDYSQLATMQDIKKEIKYILQKQKSLGNKKINDAFINEILSEKHYQDDSVSLFYQRPLKEISKQVGLCAYQHHKGYKRASKATYTFLEYIFLEKLHNTKIYYRDKECSLFSVINDFEVALEKFIKKDGKYNITFIKSLFNKKDLKNITIKLDKNDEKENKILGKDACLLINTIKEFDKDLSIDNIDEIATVLSIYQDKEQKAQQLNKLSISLSPAEISKLSELDFKGFGKLSIETMRSMIPLMKNGSTPYEAKKECGFTLITNTQNINFLPPLNCDERYIKEVLTKKVPSLDVENFIPFYDAIGNPVVNRVVSVLRKVINQIIKDYGVPEQIIIEMAKGYNSKKEKQHINKIQRQLEKQKEQIEKELKEKDIKGNDKNIRRYQYWKEQNGYCLYSGKPISFADLFSKKIETEHVLPQSKVFIDSQKNKIVVFAKENQNKSNSYHYDYLKREGRWDNFVEMVKKLEEEGKMPSNKAEWLLSEDFSNVTKESYMNDTRYATRLIRSYLEYYLYPASDIHRTGFRRQVFTINGKATAFFRKHWGLQKEDEKKNRDNHYHHAIDAIVLASITPKMINDISTFFRAKEQGKKVSFPMPYSNFRKDIFNLVDKYKNNQKFVHHIQKIRKNVNAYKEKPISTIVVNGKEFEKNKKTIFDFAKDIQKEFNSSKNQLALDLVIEKEITKIVDNSTDKFIINNIGDRIKKILSLESKVKRLEADKEKIKNNQDEIEKVNNNQDKIEKINNIIKKLKNKINAPFIIYRGKKKTPQVVKSFQVIGKAAGKYNNVSNKRDSTIQKRKNDETIGMEIWQKDNKKYCVPLYLHDLWNKNDKKSKTGTKIDNSFKKILTMHSNTVLKIEKNNVIDYILYRGVGGNRENIEYKPINKKVEQQLYISINTLSNIELKNIDIYGNVLDK

SEQ ID NO: 6167 - protein, 1499 aa, unidentified
  REGION 1..1499: note = Description of Unknown: Cas Enzyme sequence
MNKIKTVVSPIAIDMGAKNTGIYLNHFEQGECPTTSRHSIGQTLVIDGNNITWPQKSRTDKRHQVRTGKRRKLAKRLLHLILQQYKFNLDQKQIEFLNGLMNRRGYTYLVDDLDESLVNQPIVAGYFCDKFPEFFQNESSFYNDFLNLSNDINQVHTLLSKLTLSKNKAKKEIDEKGYQQAFSDAYDNIKKALATQVKSEEEGHKYRKKYLENIYKDISESILLKPLFSKLSAKDLTNLIGNISNLQLRVLRKYFNDESMKTGDIWIPEKLHQKFFKWVRSWHSKQDNEKRNRIDILQLQKNGQDILEILTTLDPIKTIPPYEDQNNRRPPKDKTLRLKPASLDKVFPEWEKITHSLIQNYCLPPIKENHIDKINITENLEKSTLSQKGSHETKERQKLANTLHRILDRTIILDPYKLRWQADSLETPYTKKAKQLLNEHSQNQANIIIEFAKKYYQEVEIAKQGLWSDNEQTLFFCCNTNPPQKGNIQHKLISHILREDFSPERLERFINECWNQKINRSTMKSLAGKIEATRKNYGNGFNYIVRTIQSRQYIQQNKTVSPEQLNRWEKYEQAHSDVMNAIKDAELISSKISIFLAHDKQIKYNNPFSIAQLYNILETERTGFSKTDRFNTEENAWRDQEETVEILNKQGQLEKRTASNAVRLASDSIRPFDGMLARILDRQAYEIASMKIKQIDAANLLEDEVLFVPIIMEQNRFKFEQGLAEVKANSKKKNEAVDKLQKQQERWKTKTDRIQKNTICPYTGKMIGKGEIDHIIPRSQSRNRGNVVYNSEANLIYCSGTGNQQKGATRYTFEQLNKNYLKEIFETTNTEDIKQKIISYVKELDTNDSISFQNLEETEQNYLRHALFIEELDNFTYPLLNTRFKTLVNGTQSYLGKKIRKILQEKYPNIKVRTYQIDAQNVSHLRTTLGHYDEQYIKQDKQGAFSHVIDAALVFATALQNEKISTELQTVNTIELSEHGEWLSALIPTDGEVKHIKRKPKYRKKLQSTQIFKEGIYGERFIPILLKDKEIFYGFSFDNCIKIKPNKKQGFTTLEDYFELLKPFLYTGNKNTKKPVDGTLSDNQSYQYLSIDKTKAIEFLQRCTKQVCSEVETQQEEQLKKLRYSVEKKEIKSLLLTGTGKRSFIKQLETKKFNLSGIELPAKLDWLRLINYPIKNYCGDITTLQNCFGQPEQIETENPKMVGFWEKLSNESGLEIEYLKQQLLKRNDKGMLAKKLAIIPKTVFDKKIKEEERLKKLENSELLKANFGVEFTIMTDLIPQQSWKALFNEFFHTNKIQNPHAHKQVRKIYSLPIVSAPSGGFRIKRINPVTNKSEYQVSGIEGFATKGYDKLLKTPALIDQLEKSKNIAPLEPTSKVEDVCYFDNWKRIKLPDGLDDKLIFIEYAIGSKDRFTIRVCMKLDQLMALDKTLNSFSNIPPEIKEGEWKFKKTKLLASELLGKPRSNLFIEKVNQTNITFSYIVESTNSAMKLAYQNGTAVNE

SEQ ID NO: 6168 - protein, 954 aa, unidentified
  REGION 1..954: note = Description of Unknown: Cas Enzyme sequence
MSKITLGLDLGITSIGWALVNIDDENIENNKIIDSGVRIFTIAEHPKDGKSLALPRREARGARRTTKRKAQKLRAVRRLLVKNKILTQNELGNLFIGNKGQKDVWQLRKDALYRELNNKELSRIMIHLAKHRGYFSNRKSEEPNDNEGKAVLSGIGKNKEVLESQKYLTVGEYISTKSKKRNGKDSEGKLNYDNSIARSMLIDEINIIFAKQKEFGNKFINDEFLQSYKEVAFSQRPLKSVAHMVANCPFEVDEKRASKSSYTYEHFRALQKLKNLRVIDENGYEMPLIFEQIEQVLREAKKTKNFTYKSFKKLFSQYKDMKIKGLVYHDHKTGEVKDPEKVKFLDFKAYQDMKKVIQNADNLYWDKIENNSDILDAIATILTTEKNDIESLKQLKQIVDNEKVCESLLSLSFSQFGHLSNKALKKIIPYLEKGFDYDKACEKVGYDFQAIFKGDKTLTLPPLSKQENLEMTNPVVKRAVSQMRLVYNAIARKYGKIDVVHVEFTRDIKNSYNDRKRIEKDQGKFRDAKDEARKHATEILGYEPSAKELLKFRLWREQNQECIYSGNYIDPHQLKDPYATEVDHILPYSRSLDDSLNNKVLCLTKENQDKGSKTPYEYMDADKFSQFEVRVNALKNLKQAKKRRLLKTNFDESSAKDFRERNKNDTAYISKFIKNYIESHIEFKKSNGKRHIYTMNGMLTSQLRFKWGVGDKNRDNHLHHAEDAIILAFATQRMVQKLSSVSAKREGFSFKDKEEKSKVLRFIPPMDNFHKKVQESIEKIFVSHMPRRKVGGAAHKETIYSKNTKSRGVVEINNGLAEAGEVKRIDVFLKKGKYHFVYMYVNDFVKDSIKNITIKDVKIDDSFQFIFSVFKNDLIKLEYKDKNVFGYLKFAEGDGRFNISSHQQSQLDKKLDRHATGSLINIKKYQVDPLGNYVEVKSEKRQGTIKEVRLNRKK

SEQ ID NO: 6169 - protein, 1052 aa, unidentified
  REGION 1..1052: note = Description of Unknown: Cas Enzyme sequence
MVLKNETSIKAYKGKNMSKKILSLDLGITSIGYSVLDELQNDRYSLLDYGISMFDKATDKDGNSKKLLHSASASTTKLYHLRKKRKKDLAKLFEEFGFGDKKYFLYQEKQNIYKNKWELRAKKAFDEKLKIEELFTIFYTLAKHRGYKSLDSDDLLEELCSELDIKIDDKKPKKVEDEKGQIKKALLTIEELRKDSSKTVAQIIYESETEKSNPTFRNHDNYNYMIRREYIDEEIEKLIQSQAKFGLFKDDFNEKLFVEKLKNIITWQNPSTNDMSLFGNCEYYPDEKVAHQYSLISDIFKMYQSVSNITFNTKPTIKITKEQIRLIADDFFTKIKKGKNIADIKYKDIRKVLKLSSDMKIFNKDDGKLTITKFHFVSNLSKLDSSFMLDALTKENGYEILKEMFEALQFEKDPKAIYEELKDRVDDKTIINLIKEKKGNSLNISHHAMIKFIPYFEQGYTTDEIKEKLRLNRNEDYSEFKKGIKYLHVNTYEKDDGLKINNHPVKYVVSATLRLIKHLHVEHGAFDEIRVESTRELSQNEQTKKDIEKANRAFEKQIDDIVANKEYQKIAEYFGKNLRKYARKILIYEEQGRRDIYSGDGIEFKDIFTNAVDLDHIVPQSLGGLSVKHNFVLVHRDTNLQKSNQLPMNFVKDKQDYINRIDNLFAEHKLHWKKKINLLATTLDESFQDRFESKSLRATSYIEALTAQVLKRYYPFVDEKKQVDGSSVRHIQGRATSNIRKLLHVKMKVRDTNIHHAVDAVLIGLTNASWLQKLSNTFRDNMGVIDDEARAKIKKDLPLIEGIEPKELIEMIEDRYNEYGEDSVFYKDIWGKTKSVNFWVSKKPMVSKIHKDTIYAKKPDDIYTSRINITNALMGLKTTVTTKSDDFMKKFEKDILKKMYLYKTNPNDVICQVVIKRAQEINGLLIGFADTDKKDKEAMQEAKAMLDELIHKELIDNNDKVIRKIKFFQTNLTGFNIRGGLATKEKTFIGFKASIENDKLRYERIDVANFQKIKQKNDNSFKCFKNDLVFFIYSDGSFKGGKIVSFLEDKKM

SEQ ID NO: 6170 - protein, 1022 aa, unidentified
  REGION 1..1022: note = Description of Unknown: Cas Enzyme sequence
MGKRILGLDLGSNSLGWALLEEQEETIYKFIDIGSRIFSKAVEEKVPTPKNVKRRDMRLGRRVLQRRSRRKQRMLNYLISLDLLPKQLQENNQPEIILNEIGDPYQLRAQALEHQLTPYQFGRVLLHFVVRRGFLSSKKQIAGDLVDDPDTMTYLEGLDNEPTKDKEESVYKSDIEELRNEIEKSGFRTLGEYLHNLEQGLCKRNRSHEGGHLRTDRKMYQDELNIIWNKQSSYFDHLPDDFMVDNKGIKQIVFYQRPLKLKKDRVGKCSLEPNKYRAATARLEVQRFRYLQDVNNLEYFERQLDQWLNINNEQKLTLIEYFEKNRSINISTLKKELGFDKHYKFNLEMKNLKGNVTASSIRNVLSEIWDNYSKQQQALIVDDLLSIKKKSALKARLLKYWKLDVFQAVQLSLLEFEPGHSSHSLKAINKLLPYLEKGLIYSDARVQAGYGYETAEVEAQEKLGAPPETANPIVNKGMHELKRVVNAIIKQYGKPDAVRIEMARDLEMNTRRYKENEARQSKNKKENEKAIDAYRGLSLGQYPSYDDKIKYRLWQEQNNFCAYSGKAIPVNAVFTAEIEIDHILPYKKSLDDSYMNKVVCYTSENRNKGDRTPKDAWGENEEKWNQITQAINGWKGVDSKVKRFFQTETDLQKRDFISSQLSDTRYISKLAIEYIKQLGCEVSTSKGVTTAWLRHQWGLNNLIGETDKKDRTDHRHHAIDAAVVACVDQSLYKKILNWTKSNEQKLRVKRPYSDFRDELKECLNHVIVSHDTQRKLSGSLHEETGAGYIEKHGGLVYRKTLTSDFTEKNARSIVDDVVKELVLNHMAKYSYNSKKAFADDVLVFHKDGKTPIKRVRVLQSKTTLKKLEQNKFGVKDKTGKVFKWMAYGNMHHVEIVKHKDTEKFKGVFITMMEAHRRAMSGTKSADIRNVEREDVIQKNHGEKWAFVMALHINDLVSVDVGCGVREFYRVQMLEREGSIKLRLHTASTLDNRNEMIRKSISSLMSHGMKNHKINTIGILMND

SEQ ID NO: 6171 - protein, 968 aa, unidentified
  REGION 1..968: note = Description of Unknown: Cas Enzyme sequence
TPTPKNVKRRDARLARRVVQRRARRKQRMLNYLVKLGLLPQELQGHTQPEILLNSLGDPYQLRAKGLDHPLSPHEMGRVLLHLVQRRGFLSNRKTLLGDMVDDPDVLEILAEREDEENNSSERAKEETAFKKDISELRTTIQTAGYRTLGEYLASLDHHDCKRNRSREGGHLRTDRQMYRDELDLIWRQQRNSNSILGADIKKEIEHIIFHQRPIRLRSDRIGKCSLEPQRNRARIARLESQRFRYLQDINNLKYFNSYGDKWIPLNQDDRKKLVELLEKKVNPTFKTDVREVLGLDKKTEFNLDNENKKLKGNITACEIRAVYPEWDNLDAKKQGVLVEDLLTIQKKSVLKKRLVTFWNIDKRIAINLCMLEFEPGHSNHSAKSINKLLPFLEQGQRYDEARVSAGYGYEVKNVDVVERLGAPPEIANPIVQKALHELRRLINAIIAEYGKPDIIRIEMARDLEMNTKKYKAFEKQQKLNTLSNDKAIAEYRTVGIKNPHLHLGKYPDKTDKIKYRLWVDQGKHCAYSNKLIMPAALFSAEIEIDHILPYSESLDDSYMNKVICFAGENRYKAKRTPIDAFGGDNEKWEQISQSVNRWPKGLKSKRDRFYQTDTDAKKRDFINSQLNDTRYISKVALGYLAQLGADITTCKGATTSWVTCIDRAFYKTLVVLAKDLECRQSAINIKDIVFDPAWEGLRDELKVRLDEIIIAHVPQRKLSSELHTLIASGFSEGKGTIYRQVINNEMTSKKIEGIIDYTVRSIVKEHLNKHGGDAKLAFSQELVLFHKDGETPIKRVRVIRSNQIKTLKKLESEQYGAKNKFGNVFKWQPYGNMHHIEVLKNDSTKKYIGLFITMMEAHRRAMTGTGSAKKRGVSQENIVKNQNGNGYSFVMALHKQDTVSLNINGSREYFVVKALGQMSQKNQPRPVLFPHTSSGSKERRISDSISNLIQKYDLKLHSINAIGKLVN

SEQ ID NO: 6172 - protein, 1020 aa, unidentified
  REGION 1..1020: note = Description of Unknown: Cas Enzyme sequence
MSNKNETILGLDLGTASIGWALIEHNAVKEPVRLIGCGSRIFPEVVEAKTRTPKNHARRDHRSARKVIRRRRMRRDKLQNILIQKDMLPKDKEERTKLLTDTKEYCPYTLRAKALDKELTLFELGRALYHLGNRRGFLSNRKTVNKKEDGPLKQSIGELNTKIAESGARTLGEYLKNLEVAQDAARPGHRHYAERLRGRYTERAMYLAEFDAIWKAQAAFHPDLMTNALRVAIKKAIFDQRPLKIQKHLVGGCTFEPCDENGIKITVWDKENKKEISPIRKRAARATLPAQRFRILQDVNNLTVKDPATREYRELLPEERKIITDKLERQKTLGWNAIRSALKLNENETFNLEEGKKTSLLGDSTAYALEKILKKKWQAMEAADRDQLVTDMLTIDDVEGFMNRMTGHWGFEAETAEKLADTELEKGYMNISRKALLKIIPHLEEGLKYDEACKAAGYHHSKAQKTAYPTKLGEVPNLRNPVVQKALNETRKLVNAITKEYGQPDKIRIEMARDMKLSAKKKKEVQIEQNKLKKANEQAAKELKEDFGIEQPSRADIQKYNLWHECNKICPYTGTPISKEMLFSSGEVDIEHIIPYSRSLDDSYMNKTLCMANENRSVKHSRTPYEAYHSNEERYDAITQRVKKYSYKKLRRFEQKEVNTDEFVARQLNDTRYICKEVKRFLEGTGSTVEVTKGMATAVLRHVWKLNRILGDDLLNKKERTDHRHHAVDAIVIALTGRRLFQRLSKISAGCDGLAPGRRGFDLPQPWPGFYNEVCDNIENVVVSHAQSHAIKGALHEDTAYGYSEAEGCFIVRKPVESLTNKMIEKIRDDKVRGLIEARIAEFDGDMKKALGDKDNPVKHADGKTPIRAVRIATHFEKDTLHEIKSKDGTPYKYFKYGNNHHVEILEDIETGKRKGVFVTAMEAAKRARRDKTKIVQRDHGPEWRFIMALFNNDMVEVERDGVRQIYRVQKMSGPVNNITLRLNRTAVLDDTGVLRTSPNTLKCRKVNINTIGKIETAND

SEQ ID NO: 6173 - protein, 1045 aa, unidentified
  REGION 1..1045: note = Description of Unknown: Cas Enzyme sequence
MSKQKVLGLDLGTNSIGWALLEADSGRPNKIIDLGSRIFIKAVEDKTPTPKNVKRRDARLARRVVQRRARRKQRMLNYLVKLGLLPQELQGHTQPEILLNSLGDPYQLRAKGLDHPLSPHEMGRVLLHLVQRRGFLSNRKTLLGDMVDDPDVLEILAEREDEENNSSERAKEETAFKKDISELRTTIQTAGYRTLGEYLASLDHHDCKRNRSREGGHLRTDRQMYRDELDLIWRQQRNSNSILGADIKKEIEHIIFHQRPIRLRSDRIGKCSLEPQRNRARIARLESQRFRYLQDINNLKYFNSYGDKWIPLNQDDRKKLVELLEKKVNPTFKTDVREVLGLDKKTEFNLDNENKKLKGNITACEIRAVYPEWDNLDAKKQGVLVEDLLTIQKKSVLKKRLVTFWNIDKRIAINLCMLEFEPGHSNHSAKSINKLLPFLEQGQRYDEARVSAGYGYEVKNVDVVERLGAPPEIANPIVQKALHELRRLINAIIAEYGKPDIIRIEMARDLEMNTKKYKAFEKQQKLNTLSNDKAIAEYRTVGIKNPHLHLGKYPDKTDKIKYRLWVDQGKHCAYSNKLIMPAALFSAEIEIDHILPYSESLDDSYMNKVICFAGENRYKAKRTPIDAFGGDNEKWEQISQSVNRWPKGLKSKRDRFYQTDTDAKKRDFINSQLNDTRYISKVALGYLAQLGADITTCKGATTSWVRHQWGLNNLIGEDNQKDRSDHRHHAIDAVVIACIDRAFYKTLVVLAKDLECRQSAINIKDIVFDPAWEGLRDELKVRLDEIIIAHVPQRKLSSELHTLIASGFSEGKGTIYRQVINNEMTSKKIEGIIDYTVRSIVKEHLNKHGGDAKLAFSQELVLFHKDGETPIKRVRVIRSNQIKTLKKLESEQYGAKNKFGNVFKWQPYGNMHHIEVLKNDSTKKYIGLFITMMEAHRRAMTGTGSAKKRGVSQENIVKNQNGNGYSFVMALHKQDTVSLNINGSREYFVVKALGQMSQKNQPRPVLFPHTSSGSKERRISDSISNLIQKYDLKLHSINAIGKLVN

SEQ ID NO: 6174 - protein, 1401 aa, unidentified
  REGION 1..1401: note = Description of Unknown: Cas Enzyme sequence
MRRILGLDLGTTSIGWALVNEVKDEKEKSTIVKTGVRVIPLSSDESSDFEKGKATSINADRTLKRGARRNLQRYKHRRELLFEILKKNNLISDETVLAEEGENSTHSLWELRSKAATEEIGLKDFVRVLFAINKKRGYKSNRKAKDEGDGKAIDGMEVAKILASKNITPGQYVLDLLKNNKKNIPDFYRSDLQTEFDKVWEFQKQFYEDILSDELKESVIGKSKKATWAICKDPFDIIGEKRTTKGAKLKEENYQWRVNGLTKELTLEQLAIVLQEINSQISNSSGYLGAISDRAKELYFNKQTVGQYLYKQIKENPHARLKNQVFYRQDYLDEYNQIWETQSKFHPELTNELKSEIEEKADIFYQRRLKSQKGLISICELEGKERELRDKGGNPILNLKGEPKKKITGPKVIPKSSPLFQEFKIWSILNNLEFRNVVSKEKTKIKGIDEDLELRKTIFNELNTKGKLASSQVLKIAIEKPKEWELNYKEGLEGNNTNQVLFKAYQSILDLAGYEGIDSTDTNAISEIFESLGINKEILYFDAELEGKAFEKQASYQLWHLLYSYEGDGSVTGNDKLFYHLKEKFGIEKEFAQVLVNITFKDDYGSLSTKAIRKILPYLKDGNDYYEACDYAGYNHSHSVTKEENEKRILKDKLELLAKNSLRNPVVEKILNQMINVINAISKEYGKPDEIRIELARELKKTAKEREEATKGINTATKLHDGIREKLMAEIPPFTSGVRVTKKDIIKYKLWQELESNGHKTIYTNTYVPLEKLFTKEFDVEHIIPKAVLFDDSFSNKTLSVREFNRWKSSKTGVDAIIEKYQKDSEDYNRYVLTIEKLHKEYQKTKNSSNPRGIGKAKYNKLLMKGTEIPDGFIERDLKNTQYIAKKAKSMLLEVFRTVTPITGSVTAKLREDWQLINVMQELNWDKYNKLGLTEYQINKEGTKIPKIKDWTKRNDHRHHAMDALTIAFTQHNHIQYYNFLNARKDEKHKKHFDIIGIEKSITEAIEDNKGSKKKLMKPPMPLNEFRAEAKKHLEGTFVSFKTKNKVVTRNKNSTKKKIGKNTKIELTPRGQLHKETVYGNSKSYVTKVERVGAKFDEKKIKMVAKQSYKNALLKRLSEFDNNPKKAFGGSNTLAKKPIYTDKHLSETVPEKVTLVWLENRYTIRKEVSPDLKIEKVIDKGTQEALQQRLSEFNGDAKKAFSNLEENPIWLNKEKGIQLKRVTITGVSNAEPLHNKKDHHGKEILTKDGKLIDVDYVSTGNNHHVAIYRDEKGNLQEEVVSFYEAVMRKNQELPIIFKTHPDYPDWEFLFTMKQNEMFVFPNEETGFNPSDTDLLDERNCHLISPNLFRVQKIATKEYVFRHHLETVVQRRTNKGEKVNETPLRELIWKRYKSMGAFERNF

SEQ ID NO: 6175 - protein, 1406 aa, unidentified
  REGION 1..1406: note = Description of Unknown: Cas Enzyme sequence
MSKTIGFDIGTNSIGYAIRDIREKEQQIIKSGVLIFEKGVAEEKGIEYPKVQKRTESRGKRRNYQAEKYRKWTLLEFLIKHNMCPLTIEELNQWRKYTKGSRRKYPQSEAFIQWLRFDFDGDGKPDFHLFNASKHENYFLFRAKAASTNPTDIMVFKETPELLGRIFYQLVQRRGFKGRDAEEAKTMLEGSDKNNTKGRNDIADDIKKYNTLGAALYYKHKETGERIRKRYNLRSDYENELIYLCKVHELPEVYYQKLWKAIIWQRPLRTQKGTIGTCTYEKNKKRAPLSHPLYEEYRTWIYINNLKIEPPVGITKKDYLQNTIYPLFLRNSELTVKTIRNRVTRDGGKLGASFKDKEKIVSAKLLNLFEILWGVDWKEEKGWHTSIMHRAAITRKKETKHYNYEDVWHVLQTFDSTEKLIEFAQQNLQLNEKQSNAFLKITLAKGYAPLSLSAIKKILPFLQEGVLYSHAVFLANLPKVLGTSLSNEEIIVYTQLLTDLQTKLKLQKQIAKTVNSLIEYELHQEDIYIIENNRGLKASDLKTVHQAINNNWTREEWNQLTDEEQNLISTTVTNGFYEFLCKDREERKDLSIVYWQVSNLRDAFIEKLKESYRFDIKRIKFLWHPSDQETYKEAQNYVEVSQPGGHFFIKEDQLDSYLTKNSKADSEGIVYKLLGSPEPMSKGLKNPMALKTLHKLKKLINYLIVTDQIAPDTRVVLEIARELNDTNKRKAIEKYQRERENENDSFRKIIDEYNDQYPEARLDRDNTMLLKKIRLWKEQEKQCLYTGKPICVSHLFNGVFDIEHTIPRSMSFDNENKNLTIADKAYNNFKGKRIPTQLPNYDTQANIEGEVYEAIKPRLSLFKDKINHHENLVKEYRYKTKLASTKEIKDNLIQKRHIEQLKLDYWRKKLNSFTLKEYKPHFKNSQLRDTQVITKYALPYLKTVFKKVSVEKGAVVNDFKAIYKIKSPDETKDRSKHTHHAIDAAILTLIPIAFYREQLLYKYNTAKENNKKFTTIPRDWKNFHRNYILGLENELLVNNLTEKRTLTQSYKKERKRGKLQYITYVDDKGQLHYKRDSQGDKTPKIQQGDTLRGQIHEESFYGAIKQPLLTEEGKFQFDEYNNIIIQDKVDLVIRRELVYKKDANSSGFTTLKEIEDVIVDKSLFQQIEQQVLAFNSLKEALANGIYMLDKKGNKVNQVRRIRCKVKGLKYESAIKFGELDFASKHTYKQHKIAKNGENPYCLYYIASIGKKEERFIKIISIYELSKLKSIIPNFNIHSFYELPSYKNLTVQKGKKQIEASLYHILEGGMKVVFYKEHIEELKELKKQELSKQLYKIYGFEADGRIKLKHHLIAGADTDIKKQYKEASSINFNTYQPLLRITKKQWNFALESKHFTMALDGTMTWLF

SEQ ID NO: 6176 - protein, 1031 aa, unidentified
  REGION 1..1031: note = Description of Unknown: Cas Enzyme sequence
MGKNISYILGLDVGIASLGWSVVAKEGEELSRIVKAGVRTFTKAEHPKGDSLALPRRLARGARRTTRRRAYRLSRIKKLLIQERILSVEEMNTLFNTHKKMRDPWQLRSEGLDRILTNQEFSRVLIHVGKRRGFRSMRKTESEDKETGKLLLGIRANRDLLDSKHYRSTGEMFYKDSKFVDHKRNKAEEYSHTVSRELLIDEINILFTKQRLFGNSYATEKLQSAYLTIFLSQRPIGDIYHMVGCCTFDSNEKRAAKYSFTSERFILLSKINNFSYAEKFGNKIPLNTDEKQLVIGLAYNQVKISYKQLRKLLNLGDLHHFTGLNYFLADKKQKDAESEIFIELKGYHALRKAISRDLGNQTWREIAPNKKLLDEIATALTYFKSDDSISDALKHIEPAIIDAVLGVSFSKVVSLSLKTMQKLIPHMEEGLRYDEACKEEGLQHYKPVNKSKHSLLPVIPYQDIRNPVVFRALTQTRKVVNEIIRRYGMPKQINIELARDLARPFQERRAIEKGQKAFRDNKEEAYRHFIELYKTQPTGADLLRFRLHKEQNGACPYSGEYIEPSRLLEGGYAEIDHILPHSRSFDDSINNKVLTFASENQQKRNQTPYEYLDGKNDSLRWRMLITNAARFKDAKKRRLLKIDYDPSAENAFKERNLSDTRYIARFILNYIKQNLEFDIDDDKERVQVRAGALTGFLRQKWGILKVRSDNDLHHALDATVVACATQAMVKKVSEYSRRKEMRETTSNAKKKNDTFPVPWFSFREDLLNALEAVFVSRKPNRKITGQAHKDTIRSSKCLVENISVVKTPINKVTLHELDNLYDLTYNKAIYNTLKQRLNEYNGDHQRAFNKPIYMPTKSGKPGPVIRSVKLKRVTNNGVLVRNGISDNGAMIRTDLFTKGNKYYLVPIYVADRLKNELPNHAIFQGKTLDQWPLIDESYTFCHSLFKDDLIELQTKKGEKLIGYYKGCHSRTGNINIEAHDRSWKREGVGIKNATVFRKLEASLLGEISFVKQETRHGLAKPSNNTTSKTQS

SEQ ID NO: 6177 - protein, 951 aa, unidentified
  REGION 1..951: note = Description of Unknown: Cas Enzyme sequence
YQLNRGLKENKIRKHYTAREKHYLKEFKIICQKQGLNGIEKTKKDPNLKYTGIVRDLYRAIFHQRPLKSQKGLVGKCLFEKTKARCPVSRPEYEEYRMYSFINNIKVKTPVDENLRLITEDERNKIIPKFYRKSKPTFEFRDLKKELGNQNQFNFKDTTTVSGCPTISALIGVFGNDWKQSIYQAYTDKDIHSRKTKEVIGNKTEDEVVADIWHVQNTFTSSDKLDEFAVEKLGLDKAAAEKFSKINLKQDYASLSLNAINKILPYLKAGLIYSHAVFMANMQNVVKAERWKNKEDRELIENEVRNIIVNHQIENKIQFVINSLLINCKDNNFHYSKEAEDGFRNDLNKYFEKEFGQKTWNQKEDKDSVFSKAVAEFIKYLKAGTFISIKRIDEKVFTFLNDNDLLQFSDKLYHPSDIEKFKPQIVKDKNGNEFIRLLGSPITGSIKNPMAMRTLHQLRKLVNTLIKDDVINEHTKINIELARELNDANKRKAIERWQKDREELHQIYADKIRELYNGDINPTESDIEKFQMALEQRKDGVIVSKDDILKYQLWDEQNHICLYTGNTIGLADFIGINPKYDIEHTIPRSASLDNSQMNKTLCENKFNRTVKKNSIPFDLENHEGILPRIEHWKKRYEALHDEIERLKRATRGATDKDMKDRFIQKRHYLQMEHDYWKGKHDRFIMEEVREGFKNSQFVDTGIITKYAVAYMKSVFNKVYSVKGEMVDQYRKAWGLHEKEIDKNGRLALDNNGLPIYKKKDRSNHIHHCIDAITIACMDKWKYDRLAHAWGLEDKGYFQKAKEELERMKPWDAFTKDLNKLQDEVLVVHHTNDVLPKQSKKKLRKRGKIQRNKNGNIIYQQGDTVRGSLHQDTFYGTIDVNGELKHVVRKELSKLKERDVRNIVDSHIRAIVEQAKKDKKISFTNSGAKLSNETIWQNEAKQIPLKKVRVFT

SEQ ID NO: 6178 - protein, 1046 aa, unidentified
  REGION 1..1046: note = Description of Unknown: Cas Enzyme sequence
MKKVLGLDLGSNSIGWALLEEKDGKAHRIIDLGSRIFTKAVEEKTPTPKNVKRRDKRLARRVLQRRARRKQRMLNYLASLDLLPTKLKGHNQPEIVLNPLGDPYELRAKALDTPLAPHELGRVLLHLVQRRGFLSNRKTLLSDMMDDPDVLSVLNELDAQDEHDDTTEKAKEETAFKKDISELRNKINAAHCRTLGEYLSKLPRHTAKRNRIRNGGHLRTDRQMYQEELDLIWAEQKKHHAMLTANVKEQIERIIFFQRPLKLKEDRVGKCSLEPRNKRAQIARLEYQKFRYLQDINNLQYLDFFEDKWVALNDGQKEVLKPLFESKISVTFSNIRTKLKLDKSTEFNLEHGNKKLKGNITACEMRKALPQWNDLSPDDQLALVEDVLTMHKKSALKTRLMNHWSLDARTAVNLCLLEFEPGYGSHSLKAIHKLLPFLKKGEIYSEARQKAGYGYEQEDEDTIDRLGMPPEIPNPIVSKGLHELRRVVNAIIAKYGKPDKIRIEMARDLEMNTKRYKAFEKQQKANTDANKDATKLYQEMGKKYPHLHLSKYPSHADKIKYRLWKDQQALCAYSLQGMKISDAELFSANIEIDHILPYSQSLDDSYMNKVVCHTRENRVKGQRTPIDAFGSDEDRWQQISGRFNKWNRNLKSKKNRFYMTAEDVQKRDFINSQLNDTRYISKVALEYLKPLGADINVTKGIMTSWLRHQWNLNSLIGQDKKNKDRVDHRHHTIDAVVTACIDRTFYQALVKLAKDLEKEKSQFTPKDIHTDTPWPNLRNDLNEALENMIVSHAPQRKITGSLNEETGAGFIEGVGTVYRANLSPDFKLSQVKKIIDSEVRELIAKHFLAYDNDPKKAFAEGITVYHKDGKTPIKRVRIVQSKTTHKKLESTKFGVKDKQGNVFRWMAYGNMHHVEIVQHKETGTYKGIFITMMEAHRRAMTGTKSARKRDVRFEPMVMTDHGEDIRFIMALHINDLVSIETDDGERFYRVQTLDSFNKRVYLRLHTASTIANDSETLPDRELTVMALIKKGMKLHRMNAIGKVMDD

SEQ ID NO: 6179 - protein, 1542 aa, unidentified
  REGION 1..1542: note = Description of Unknown: Cas Enzyme sequence
MKKILGLDLGTNSIGWAVIQLDFDKKQGRINGLNSRIIPMDQAQLTDFASGNSISQTADRTGYRGVRRLYQRDNLRRERLHRVLNILGFLPEHYKNEIDFEAHPGQFKKEIKLNYHKNEKGKSSFIFKDSFREIVLDFQSNHQNTKIPYDWTLYYLRKKALTQKISKEELAWIILNFNQKRGYYQLRGEETEENEKKDEKFYSLKIVDVIETEDKNAKGTWYKVILENDWIYKRQSKEPLFNWIGKTKDFIVTTTIDKNGNPKRSFRAPKEDDWKLSKKKTEQEIEKSEKNVGEYIYDYLLQNPHKKIRGNLIKTIERKFYKAELKAILKTQITFHPELKDRKLFKACIEELYPRNEAHQNNIKDKGFDYLFIEDIIFYQRPLKSKKSTISGCQFETRTFRKIIADKITGDEKKIWVTEPVKAISKSHPLYQEFRLWQFLKNLRIYQTNDDKARLIDKEITSELFKSEADWTDLFDFLNQRKEVEQKNIIQYLISKGLINKKQKENYRWNYVEDKKYPANETKAQFLSRLSKVTDLKDPFHFLQEKTKSGKEIILSREEQLWHLIYSIKDIKEYEQALRSFAKKHNIDEVSFVKNFIKFPPFKNEYGAFSMKAINKLLPLMRRGKYFDENIIPENVKNRIVAIMERVNALNSDAEDLSKEIEKVVDDDIPRQLVKSFIPLIGKNPFRGLNTYQASYAIYGRHSESKDIQKWENPKDIDKFLAGFKQHSLRNPIVEQVVTETLRTVRDIWNYYGNGEKDFFDEIHIELGREMKNPAEKRKKITQRNIENENTNQRIKAILQDLKNEGFKEIKPYSPSQQEILKVYEEGVYQNLGVDYNEVPEDEIEKIRKSSSPTKTEILRYKLWLNQGYISPYTGKVITLSRLFTTDYQIEHIIPQSRYFDDSLSNKVICESEVNQLKDNQTAYEFIKNHGGEKTDLGQGRSVEIFKLEDYENHCNKYFKKNRIKLKNLLSEEVPEGFINRQLNDSRYISKLIKGLLSNIVREEGEQEAIAKNVVPLTGAITSILKQNWGLNDKWNEIIAPRFKRLNSMTKSENFGFWDDNIHSFRIKVPDEISKGFSKKRIDHRHHALDALVIACCTKDHVNYITSLNTNRKNYSLVSKLREIEEVEFYNKTTGEHEKRNVAKAYKLPWPGFPMDAKNAIENAIVSFKQNLRVINKTNNKTWQWVEKQGKYKKQLVPQTKGDNWAIRKPLHKETVSGKVLINDKREVSFNKALEKPELIISPNIRQLIESADIHNIKDRIAYFKKNPIKINGKKVTRLLIFVEATAARTDLSAIKTHKHIEKITDSGIRNILNRHLRNYLNNKGEENYELAFSPEGIDELNKNIRQLNNGKAHQPIYKVRMYEEGNKFVVGIKENRKRKYVEAAKGTNLFFAIYQDDNGKRVYETIPLNEVIEHQKQTAHLPKEERTAIPIKPDKGQFLFTLSPNDLVYVPTNEEKDNPAIVDFKHLTKEQVNRIYKMVSSSGPQCFFVRNEISIPIKNKFEFSTLNKMERDMNGIMIKEFCWKLKVDRLGNIIQVLKHQF

SEQ ID NO: 6180 - protein, 1122 aa, unidentified
  REGION 1..1122: note = Description of Unknown: Cas Enzyme sequence
MSKLILGLDLGPNSIGWALIRDDSDDPSQSELVDLGSRVFPEGVDAFDTSKEKSRNEDRRIARAMRRQVRRRVVRRKNLIKALIESGLWPGGSASQEALYGLDPYVLRAKGLTERLEPHEFGRVLLHLNQRRGFLSNRKKDRGDSEVTGMLAEINENEAKREAGGFATIGEYLASKAKKEGDKQAHRNPVEDDHVRNRHLARSQFYHEFDVLWREQAKHHPELLTDALRWGKLGSEEDPKKAVAFRKPISKSDERRKEKGKKLSDLKSFGLHGMIFFQRPMYWPKSVVGLCELEPKQKRCPRADRHAEQIRVLQEINNLKYADTETHEEHPLNEEQRTLLLDHLATREKSTFDQIRKKLGFLESVKFNLERGKRSFLKGMTLDWLLAKATDKKWHDRTEEDKDAIVTLLRDNEREDDLVVAQLIDKYGFSAEHAEALLDVDLPPGYGSLSRMAIDKLLPHLAKGMIYQSQSDPERSALHAAGYLRRDELQRRLFDQLPDLSRTNPRDCKLGDLPNPVVKRALVEIRKVVNAIIKAYGKPDAVHVEMARSLRMGPKARSEYNTRTRQREKERDEAAKAIRNTGVAVRREGIIRFLAWKEQSCECVYCGKAISQEQLFGGGVDVDHILPYSRCLDDSQMNKVVCHRECNHDKGQKTPYEWLADSDPKRYEAIGQRVGSLMRKGAFPYPKYRRFLQKELKLDDFIARQLADTGYITRATVEYLQLLFDKPSDVLGLKGQLTAELRWQWGLSTILSELPDSPAWQEEANVPTGEKNRADHRHHAIDAVVLALTNRKRLRVLSDLVHRGGERKHGEIVFEPWDNFRSDVAKRIAAVNVSHRVERKVRGALHEETLYGPTKNPEEWVVRKAVVDLSAAEVDRVRDPAIKKIIRRALANAGLIAGRGKKPDAKKMKMTLSNLAMPSGVPIKRVRLIKPEKTIAPLREEGAKDQAYVKPGSTHHLCIFEFEVKGKKKRDAVFVTMLEATQRIKRQKQALAKSLNELKGQGLSAKELQKHRKEAMRQAATEHPLIQRDATQLSSEDRKKIPADAEFVMSLSSRELVLANYKSEKLLLQFRTAASTSGQIWFTLATDSRPTKTRKVYSFRAATLDAQKVTTDPLGQIRWAND

SEQ ID NO: 6181 - protein, 1342 aa, unidentified
  REGION 1..1342: note = Description of Unknown: Cas Enzyme sequence
MGKRILGLDLGTNSIGWGVVDDLGGGQFELVKRGVHIFPEGVKIEKGNESSKAAERTGYRSTRRLKFRRKLRKIETLKVLSEAGFCPTLSVEELKAWQSKKVYPENLAFRDWCKTSDPKDKNNGGFENPYYFRWLAATQMLNLDDETDRFKLGRVFYHMAQRRGFKSNRLDSTPEREDGVVKKDISELSEKMNGRTLGQYFWEECYQKGAKIRKVHTSRDDHYLAEFEFICEKQGVSDGLKEKLHRAMFYQRPLKSQKGLVAKCPFEPQKKRAPSSHPLFEEFRMWQTLNNIKIKTQDDDALRPLTEDEKTLIRPLFFRVSKSHFDFKDIAKAILKSLNPKKQKHAYVKSRDASSAHVLFNYRDDHSVSGCPLSAGLMRLFGDDYTQGLFDAYCGNKQDKVGNSKSNEDLLHEIWHVLFSFDDAEKVKEFAKAKLGLDEEGAEKFSKIKVPQGYGALSLKAIMKILPYLKQGLLYSHAVFFANLDQVIGVSANENESLKADISKLIDEHNQYSAEARCVNEFIREYKESPQAFEAKYDLRNVQGFEGELSKELRDSSESICQKIRIQTSGSNGNGEYTPVKRLDERVGDYLVKEFGVSTHALEQLYHPSAIETYKLAEKHPDGKYYLGDPRISSIRNPVFMRAMHRVKAVVNELLKQEVISEQTQVHVEMARELNDANKRAAIKKWQWNNEKRRKEYKAAIEEVLSGQGIDREASEDEILKYQLWEEQEHVCAYTGATIKSSDFIGENPRFDIEHTIPRSQSCDNSQENKTLCDREYNRTVKKNQIPFDCPDYEKILQRVEHWQDRVDELNKLIEKQRPKSKYASTKEAKDNAIQKRLVWEFERNYLREKYRRFTMEEVTRGFKNSQLVDTRMITKYARLYLKTVFPMVHTVNGKTTDDFRRCWGIEKSRDNHAHHTVDAIVVACVTRDQYDKLAHYYHEYESYGQNDPSIPTKPHFYKPWETFTEDMKSLKNEILVSHYAPNHLLKQTKKRAKVRGKMVMQQGKTARGSLHQETFYGAIKRMEKDKKGGVEEVVKYVVRKPLADLSDSDLKKIVDDRVREISIAGRKEESRLKKEIEVLAKKKATSDEVGELVIEQQIQSLESQLSGLFALPNKNGNPTPIKKVRIYSNLTNPIELKAQRDVSIKRPASHKEKYYVNNDGNYILAIYEGENSKGKLVRNSLIIENLKAVNSERGSLVPAEKEGLPLKCIIRGGMLVLLLKEDENSSDFWNMTHIQRAGRLYIIRGLDNDGIKLYFHQEARQTTEVLQHMNNVITESNRRNNIVDKKGDLKISKLTTPKGGDVLERSSDFPYVKFRPSNFNALLEGVDFRINALGDIEFMEE

SEQ ID NO: 6182 - protein, 1073 aa, unidentified
  REGION 1..1073: note = Description of Unknown: Cas Enzyme sequence
LYFHKETVGENLYKQIKNNTHTSLRNQVFYRQDYLDEFEKIWETQAKYHPELTNKLKEAIRDVVIFYQRKLKSQKHLISNCEFEKHNKAIPKSSPLFQEFKIWQVLNNVEFKNKKTKEITIPDEDLKELLFNELNLRGNLKTAEILKLSGLKTKDWALNYKDGLEGNRTNEVLYNVYQEIAKNEGYGFDWTKKSASEIKEELKRIFTEIGIDSKVLEFDSDLERNHFDKQASYQLWHLLYSAEDDSKISEEDKLIYGNSNVFLKKKLHSKYGFKPEYANMLANVSFQADYGSLSARAIKKILPYLKTGNEFSEACSLANYNHSHSMTKEEQEKRSLKNTLELLKKNSLRNPVVEKILNQMINLINLVIETYGKPEEIRIELARELKKSASERADTTKYINAATKYNEEVRKIITKDFGIPNATRNDVIRYKLYEELSENGHKTLFTNKYIPREKLFSKEIDIEHVIPKAMLFDDSFSNKTLAYRNVNLKKADRTAFDFIESDHNNDLENYKFRVETLYKKGKGSISKGKYKKLLMSKEDLPDGFIERDLRNSQYIAKKAKQLLEGVFRTVNTTTGRVTDKLREDWDLINVMKELNLPKYRDLGLTEIQERKEGKKVEQIIDWTKRNDHRHHAMDALTVAFTSYNHIQYLNNLNASRDRENSTLYGIRNKITKQYENKNGGRKRRFVPPMPNFREEAKQHIEGILISFKAKNKVVTKNKNRTKLKGKDKYHEKIQLTPRGQLHKETVYGKSKHAMAKATKINKRFSLEQANLIVDKDIRVLVLDYLKRHQNNPEIGFDTKILKKDPLIYKDEPLKEVWCFEEIYTIRKDISPDLKINKVVDEGVKKILQQRMVEYGNKPKEAFSNLDENPIWFNKSKGISIKRVAITGVSNAEPLHYKKDHLGNEILDKNNKKQAVDFVSTGNNHHVAIYRNPKGKLQEKVVSFYEAVARVNEGLPIIDKGHNRDQGWEFLFTMKQNEMFVFPSEGFNPLERDLMEEKNAAFISKHLFRVQKISTKDYLFAHHLETKAINGEDLKNKKMLSQTTYHYIQSTSPLDGIVKVRTDHLGKIVQTGEY

SEQ ID NO: 6183 - protein, 1189 aa, unidentified
  REGION 1..1189: note = Description of Unknown: Cas Enzyme sequence
MGLFMSKILGLDLGTNSIGWSLVDDEKQKIIDSGVRIFPEGVNIEKGKEFSKNATRREKRQGRKQLFRRKLRKLKLSKELIKHNMFPMVTNVKDELNQLKLNGELKFFFSIDPYKCRAESFNGNKLTLLEIGRIFYHFAQRRGYKESLKNYDEEKGKIYEGKPKELKIGIKETQERIKNFGTLGNYLYNENPHKTRLRNRYTTRKMYIDEFNIIWENQRKYYPDILTENLKSKIGDSQKGILFFQRPLRSQKHLIGKCTFEPKKSKCSTSTIEFEKFRMYQFINGIECNGKKLNTEQRKLITEIFNSKSKFKFREIKKKLKFTEGRFNYNDDDNIIGNNTISNFSKIFGKEKWNKLNSQEQFDIWFIKNNAEDKEWLTNYAKTKWDLAEDKIEKLLKINLSKNYSNLSLKAINNILPYLEKGFIYSDAVLLGGLKSAFGSDRWNSFSSEDKKNIEYKVFKVGEEREDKVPIIEKVKELLKSQFNLDEKQLDKLYHHSFLSKINGLKEKLPEPENIRNPIVQQALYELRKLVNAIIDVHGKTDKIKVELARDLKSSKDKRYEVRQENRKNENRNDEIKKRLDEFSIEHSRTNIQKVILWDESQNYCPYTGQKIGFEELFNDGYVQIEHIIPYSISLNDSMQNKTLCLADENKRKGNKTPYQFYGHDENKWSEVKNMVYELIVKKGNSQLYKKNYRKYQRFISKQLPDADEFIQRQLNDTRYISKSAKEYLKNICDDVDVTQGTVTSLLRHHWGLDNILNDVYITNGLTDGDYYAAVNDEDIIEILKWNAENKEKDLDHLKKLGKVVQGKIKDGKLYPYKNRDDHRHHAVDAVTVALTKKSYLQQISRMSARNSNYENIKTKIRIDKPWEGFWQDADNSIKSILVSHKINNKVLTPVNKRLYDAKGKVRKINGKVIYGKGDAVRGALHKETVYGKHVDANGEEFYHVRKPLESITTKTLIDKIVDENVRKIMLQKLKNDGVDVNKNKFNIPNNSFFKYDDKNNKTPLIFLPNKKGEHVPIRKVRIKEKIGNAEKLKEINQYVNPRNNHHIIIYKDSKGNYKEKVVTLWEAVERIRQGLTLINKNPEPDCEFITSLTQNEMFLLGLTEEEIKDNKNNVTFLSQYLHKVQKIAGGDYFFEICFKKHLDSRMDKEAKVDYKYVKGFGDGKTGWVKLNPVKVKVNISGKFIFNND

SEQ ID NO: 6184 - protein, 1058 aa, unidentified
  REGION 1..1058: note = Description of Unknown: Cas Enzyme sequence
MKILGLDVGTASVGGVLIDDEEKNPIRCSFARIFPEGVDRDQQGGEQSKSQARRISRGQRRQIARRSDRKRLIRLALQQVRLLPSESTALNEVMAENPYPLRARAISEKIELHELGRVFFHLAVRRGFLSNRKTDKTREASDMLQEIGELQQRLDDREKTLGEFLHEQLASHGHAHEEAERPVRKRHTRRNMYETEFEAIWEKQREFYPGLLADALKTGRLDRTKYPCEPIELEDASYISDDDHWPELARRHLEQFGLHGMLFFQRKMYWPRSVVGQCDLTREDDPDKRCKSKRCPKADRSAQRFRILQEVNNLKILDEGGERRLTAEERETIVQALVTTKQQAFGALRKKLKKFGFTEAMTFNFERGGRDKLKGHETDSILSSKKVLGKRWKELSNEVKDLVVDICIHEEREGVAIDRLQEECGLTLEEAQRTSAAHLPDGYMHFCRGAIRRLIPYLEDGLFLMANDPTDSALHAAGYLRPDQRVVDQKQFLPAPPDLPNPIVRQALIEVRKVVNAVIREHGRPDRIHIELAREAKKSFEQRQEIRFTNLKRQKLREQISDRLVDEFGIKPSRNNVNRYLLWQEQEGDCLYCGKKISPIQLFNGDADVDHILPRWRSLDDSLGNKVVCHRKCNEEKKDRTPAEWLKDSDRQRYDQMLQIARKLDYGKRKKLEQMDVQLDHFVERQLRDTTYIATCVKEYLECLGVPIVCPRGGMTKDLRHWWGLNNILDPEKKGRKNRSDHRHHAIDAIVIAMTDHARLHALANARGENMPVPWAGFLNDARMAVLGINVSHRVQRRIADALHEATFYGSTNKPFRKKKETDARPWAEEWIEKDNVYVRRKPVTEIQNAKHLAKVRDLTIRDILAEHLRQQDVDPNGKKAYPSNSFKGENSPHMASGVPIKRVRMLEESETFRSVSGRRDYQFVKPGNNHHIIYWAQVDEEKEKWSAKVVTMWDAAKRARFGLPPVNTTPPKGKRFVMSLSIGEMFEMVDDDGEIQLCVVRKMDQRSRRVYYKLHQDAREAEIINKDNLYLSPKKLQEKSARKVTVTPLGRIRWAND

SEQ ID NO: 6185 - protein, 1038 aa, unidentified
  REGION 1..1038: note = Description of Unknown: Cas Enzyme sequence
MSKHILGLDLGTNSIGWALLEEDKGRPSKIVNLGSRIFIKAVEEKTPTPKNAKRRDARLTRRVLQRRARRKLRMLNYLVKMELLPKILRENTQPEIILNALGDPYQLRKKALDERLEPHELGRVLLHFVQRRGFLSNRKTLLDPEMRDDPDVQAVLAELENEEDHSSERAKEETAFKSEIRVLRKTIEDEGCRTLGEYLATRAPHECKRNRSREGGYLRTDRQMYRDELELIWKEQVKTHKQLNNDVKEAIQEIIFYQRPLKLRADRIGKCSLEPIRKRANIARLESQQFRYLQDINNIRFFDPDQEEERTFDAAQRKELIDLFEHDAKPSFKKIINKLKLDKKTEFNLENEIKKLKGNITACEIRKVMLSDWDALDDKQQHALVEDLITIRKKSVLKNRLVAHWGFEMERAVHLCLLEFEPGHSNLSVKAINRLLPFLEKGEIFSTARVSTGYGYEIKTEDIKDRLGPSPDLPNPIVKKALAELRRLVNALIAEYGKPDAIRIEMARDLEMNTKRYQAFEKQQKANTKKNEDAVKEYQVMVETNPHLHLSKYPNRRDKIRYRLWIDQDKRCAYSGKMIKLSTLFSSEIEVDHILPYSQSLDDSYMNKVVCSTGENRKKGQRTPIDAFGGHREKWEQITQALQHWEKKLRLTAKKNRFFKTSEELQKHDFINSQLNDTRYISREAQDYVKQLGVDVSVSKGRMTAWLRHQWGFNTLIGDGDKKDRSDHRHHAIDAVVIACVDRAFYQGLVRKAKVYEARYLGGNLNDLEIPAPWPELRSALRAKLDGVIIAHTPQRKLSGALHEDTGLGFIKERGTISRVNLDGTFKITQVNKIYDEGLQDLIKLHLEKYANNPKIAFSENMTVFHKDGKTPIKRVRIIKSSTTMDKLEKSKFGIKDKQGKVFKWMSYGNFHHVEIIRHKEKSQYSGIFITTMEASHRARGIKRKEQPIIQRDHGNEFEFIMALHISDLVSIEKEGQRFFYRVQKLDSAHKGIKLRLHTASKIDKDYETLKVGDSTIPALMRQHLKLHKINAIGKLVE

SEQ ID NO: 6186 - protein, 989 aa, unidentified
  REGION 1..989: note = Description of Unknown: Cas Enzyme sequence
MTSTNDSPPSLRYSLGIDAGCASIDWCVVELNKTGHAIGLHSTGVRRFEAGVEGDITRGRDESKSQQRREARGPRRNTWRRQWRMRKVFRILQQADLLPPSESDSHDSRHQLLLTLDKQLVQDLKLITNHTSAHVVPYTLRARALDQPLPPHALGRALYHLAQRRGFLSNLKAGRGEDEKESGKVKTGISELAQAINQAEARTLGEYFAGLDPEERRIRQRWTARQMYSDEFETIWLAQAAHHPQLTSQLSEELNTAIFDQRPLKSQKGLIGRCDLEPYKRRAPTACLPYQHFRVLQRVNDIKVLCPDGELRGLDLAEKDKLHAELIVQGDITWAAVKKLLGMKKSKTYGRHFEFNFEEDGDKKMLGNRTASKFAAALGDEWQALDETAQTVLVDSVLSFEDEQPVVAHLERHWKFSGEQAQAVAELSLEAGYGNISRRAINKLRPLMETGIPFSTARKEVYPESFESNEPVKYLPPFLEVVPNARNPTLTRVMAELRKVVNALIKQHGKPTFVRIELARDLKRSRKDRKQLTEQRDQNTQSRDKAKERLIKREWGEKYATPHNILKIRLADECNWECPFTEKGIEMGTLIGDNSQFDVEHIIPYSRSLDNSYANKTLCFNDENRHVKKNRTPFETYGSTDKWDEMLERVRHFQGKTAKRKLQLFQTEKLTDSEDFANRQLSDTRYLSRSAADYLATLYGGRTDENGKLRVQASPGRLTAILRRAWDLNRLGVGDPDDPHQKDRADHRHHAIDAFVVAVTNPGTVQAANKAAARAENYYSRELLSDMPLPWDGFSWTELGEKLDQIIVSSRVNRKLNGKLHQDTILSKPYEIDDPKKPGKTKTVHHVRKPLEKMSQGEVQAIVDPAIKKAVVEKLEKIGGDPSKAFADANNHPYLTAKDGRLIPIHSARIRKADKTIEVGRGSRLRRVCPGDNHHMEIVAVLDKEGNHKKWEGHIVSQFEAIRRYRMKEPIVQKDHGAGREFVFSLTNG

SEQ ID NO: 6187 - protein, 945 aa, unidentified
  REGION 1..945: note = Description of Unknown: Cas Enzyme sequence
LDEFEQLWETQSKYHNELTAKLKEEIRDVVIFFQRKLKSQKGLVSFCEFESWEEEYTDKLTGKRKKRQIGHKVIPKSSPLFQEFKIWQTLNNLTLENNDLNEKIIFNELDDEVRQSIFEELNIRGNLKLKSIINFLKLKNPKGWTSNYTELEGNRTNERLYNVYQKIAEIEGYGHDWAKKTAKEIKDELKNIFPIIGISPKILDFNPEIEGDKFDKQENYQLWHLLYSAEDSDKIEETDKLKYGHINTALKKKLHLKYGFKPEYATMMANINLQQDYGNLSAKAVKRIIPFLKVGHIYSEAAKLAGYNHSHSLDKEALSTRKLSERLELLKNNSLRNPVVEKILNQMVNLINQLIEIYGKPDEIRIELARELKKSAIERQQMAKSINTARIYHTEVKKILQKDFDIKNPTRNDIIRYRLYEELRENGYKTLYLNNYIPREKLFSKEIDIEHIIPKAKLFDDSFSNKTLAYHKPNQDKDKMTALDFIRKKHSDLLDEYTLRIERIYAKGKGNISRAKYKKLLMQEKDLPNDFLERDLRNSQYIAKKAKQMLEEVVKTVNTTTGSITSKLREDWDLINIMKELNLPKYRILDMTYFEVRKDGQKIEKIKDWTKRNDHRHHAMDALTVAFTSYDHVQYLNNLKATSGEKEDLNLENSKLYGIKNKITKLYEQKNGTKKRKFIPPLPNFREEAKFHIENILISIKANNKVVTRNKNKIKIGKSIHLEKIQLTPRDQLHNETIYGEIKRYETKTEKVGTTFNFEKIEEVAIPKYRNALFQRLMEYEGNPKKAFGGKNAPSKKPIFIDESRNIKVPNKVKLVQLQNKFTIRKDISIDLHIDKVIDTGIRRILQKRLKEYNDDAKKAFSNLHENPIWLNKEKGIAIKRVTISGVSHAIPIHSKKDHLGNYITDKSGRKLPIDYVNTGNNHHVAIYEDEKGVWHEKVVSFFEA

SEQ ID NO: 6188 - protein, 905 aa, unidentified
  REGION 1..905: note = Description of Unknown: Cas Enzyme sequence
CDLEPTDHQCPMGDMWAQEFRVLETVNRIKVEWQGKDARLPTPEERSKVIAVLSKQKTATYKTVRKALGFDKKEVKGVVTLNLEREERIDVNTSWFASKVIAAFGDDHWNEMSADRQESVNRAFLRIGSADHLRAGAKQWWGVDNETAELLVEAWKSRPNPSKRQKLSRKAIKNLLPYMRGEYEDGRFMGVTEARQEFAADAGNDATDLQRERYSLTGRALTAADRHYLAKHTNSLPPAPMLANPVVRKAIHEVRRHVNAYLRKFGRPDRVVVELARDAKMPAKLRNQQLTANRNREKETKEIIEEFSLSESSKNQQLRAVLRVKLCVEQRLQCAYCSDTITPRMAANGQTSQGERIEVDHIVPMSRSQNNGFNNKVICHARCNREKGSQTPKEWLSESNFHGMEQRLSHLGNSKYRSKVDGYDCKGNPTKWKNLHRDVHSLEDEEAMDEWRNSQLTDTSYASRQVIAYLRDALYGGETEGERHVFASNGKYTSMLRRDWGFVEDKLDQQWHGWKLAGNDEKGRARKSEKDRGDHHHHAIDAVAIALSPNYISKVANLAAKWEQYKVGETLRPDSEGQDPPWGTREKGEFRRQVLETLEKLVISHRPQNRRIVGALHKETSYGKAEEYPGLYTERISIEKLKSSQFIKPEPEYQRNKLVRWKIPGRGQGRAIRDPGLRDDLLVCLKENGINPEKFTESELKKLINLTDDEKHKIRLPSGVPIYSYIALLTLNDPVCIEGRDGAKRYYVGGNNHHMEILEDEKTGKWSSICWDMYTVARRIRPPKGVKKLPMVIGRRLEQLRMNNELPDELVAMYKGKRFIISLAIGEVVFLKHKDTKQPGYFVVHKLDDKNAYLHPHWDGRRASGESKREELLLSANQIQEHVIDRSKMKVAIDPLGNIHPLHND

SEQ ID NO: 6189 - protein, 1135 aa, unidentified
  REGION 1..1135: note = Description of Unknown: Cas Enzyme sequence
MGTTYTIGLDIGIASVGWCVLGETRIIDLGVRAFDKAETAKEGESLNLARRNARLMRRRLFRRAWRLKKLSRLLKNEGLITDTKAFQPEHACTKPLWQLRVDGLDRLLNDEEWARVIYHLCKHRGFHWISRAEAKQADGDSKSEGGKVKQGLAGTAKLMAEKGYRSAAEMVLSEFPEAQRNKQGEYTKALSRELLAKELALLFAKQREFGNPNVSIALEAAILGNSDKKSGLFWQQKPALAGADLLKMLGTCTFEKGEYRAPKASFTAERHVWLTRLNNLRIVTNGVTRQLTEQERQLCLPLPYQQAGDLTYKQLGTALTKAGLLEAGSFKFTGLAYPTGAQKTEGKAKDPESATLIKIPAWQELRQTLTKASLDDEWKKLSGDALCGQPEIFDQIAWVLSVYKDDDEVHDELAKLDLPNHDELIDALLNIRFDKFHALSLKALRAIVPHMENGQRYDKACVEAGYHHSQLHKVGEGEHKYLPPLYAGRDKDGRMRFAEDADIPRNPVVLRSLNQARKVLNAIVRRYGSPAAVHIEMARDLSRPFDERNKIKKEQDEYQARNQRDREQFIELFGHPPKGLEFEKWRLYREQNGQCVYSQLPLAPSGNVAEIFHEGSTEIDHALPYSRSFDDSKNNKVLVLTRENRDKGNRTPYEYLSGAENSERWQRYVAFVEANKAYRLAKRTRLLRKDFSAKEAEDFRERNLNDTRYICRFFKNYVEQYLKLAQGSEARRCVVVSGQLTNFLRARWGLLKIRSDSDRHHALDAAVVAACSHSMVQRLSNYSRTRELEQVRDGFVDIETGEIVNPAMHQQLREHFPDPWPYFRHELEARLKIDSPELLREEVARLGSYGEAELAVLKPLFVSRAPQRRNGGAAHKDTIYGQPEKLKEKGSVTQKIALPNLTLKDLDSLADPHRNTKLYGAIRERLEAHGGKGDKAFSASNPLHKPDKDGNPTGPIVRTVTKVIDKLSGIPVRGGIAKNDTMLRVDVFTKAGKFHLVPVYVHHRVTGLPNRAIVAFKDEHEWTLIDESFDWCFSLYPNDLVKVTQKNGETILGYYRSCHSGTGALNIALHDRHAFGEKTTSLAYFKKDPDKPIPNDKLGLIESVGVKMAAQLEKFHVDVLGNVYPAPPEKRRGLA

SEQ ID NO: 6190 - protein, 1087 aa, unidentified
  REGION 1..1087: note = Description of Unknown: Cas Enzyme sequence
MANKLVYGVDLGINNVGWCALRKGQDEVEILGIGTFVFDSPLQDAHDPSEGLKSKLRGEQRRTRRTLRRRRQRKMALYRLLAEHGFLPPRMADRAKLLCDTDPYRLRAEALDRKLEPFELGRVLCHLNQRRGFLSPRDLMLWGVTSLGYEDEPEESDAPKEKDEDLGQIKKEIQATQAAMAGCRTVGEFLYDRIKNKLPVRKKQLKKKNGKPTSAQQKAEDQRRFVRTDRHMIEQEFWAVMRAQAQYHPLLTEDLQNRIHGHMFHQRQLAANAATRGKCVYFKDELRMPRASLTAQRYTIAQEVANLMLIPSEGEAPRTLTPQERQTLVGALMEGRNLPWDEVKQVLGLDASAVFNIEPAKIKVPEKGKRKTKTQSAGTKKELRGSQTVGRLRGILGEKWDALGPQAQREIVGEIVSIRDWVHERRTQPAALRRMNLFKRKAYGPNQVTFTEAEAARLATVELPEGYLNVSLRAAKRIVPHLLRDCVYSEACERAGFDHANPEGELPTLDRLPAPSERDIPHAIVRASVQSAVRVLNALHREFGKPDAIHIELPRDLAMGAKQREAVEKRQKDNASERQRIAKDLIAICVRPTRDNITKVRLWEELGGNALPYEPDVFVPDLKTLMTGDFEVDHIVPRSHSLDSSMGNLTLCTRDFNIHVKGNKTPWEALGNQPEVWRRVEAHVNKIKSMPLAKRRRILAKERPEDFTGRHLAATGYIGKEVLKLAQRMVRNKPDALVVQGRATGDLRDFWGLQGLVPLHPEEQHSEDERRAFLERAERGEATEDDVRNVLAPKAKQRSNYLHHALDALVVALTDRASLQARATYYQLRDSQDQRMIDKAVRSALRMNALPDPDIRRKAAEALEQAVIVHRPSRKPKGELHKQMPEEAVVHEMPPGEPWSAKVIGKYLVKYDHDGKPAQAYPLGNNHHLVIWERTEPNKKGEYERIAEVVPMIEAVRRRDAAAAARKYNRDNPDKPPKKVEPVIRKQHPDPGWRFVMALCKGDMVELRDGTIGVVSKFSVSESGSPDIAVWHPFAAQQLAPPGSHALSPSNPYLIKRVAGRRDLHMFADRIVLDPLGRVVYREGPRE

SEQ ID NO: 6191 - protein, 1081 aa, unidentified
  REGION 1..1081: note = Description of Unknown: Cas Enzyme sequence
MGNDLVLGMDIGVSSVGWGIINRTSGDIVASAVRKFEEVDRNANEKRREFRGSERLSRRRKHRLKRTKDLFDAYRIPHDAIQTVDPYEARLKGLSLPLSELELATALYHLAKRRGTTIDTPEDDDAAADSLSTKDQLKQNAKELKDKYIVEIQYERLKEDKSIRNHKNRFRTEDYIREANTLLDTQRRAHEKIDEAFVNNYLEILTSRREYYEGPGSQKSPTPYGRYFYDEDGELRYEGMIEKMRGKGTYFKDQPRMAKRSYTAELFNVLNELNNVRYPDEETGEMKALTQEEKQQLINNYLKKNKRITLNAIAKLVNLSNKLEIKGAPINMKKNKAEFSELKRFKELKKQLKDVDVPDYFFENVPCLDSIADILTSEKGMTRREEQLSDLFETHYADPLTNVVETLKNDTFFKEYHSLSKQGIDLIMTELWETEKNQMQLFTEYGLGADRISQLQSGTEIQFDGEAILSSVAQRAHREAVKITNELRKTYGEFDYVVIEMAREKNEKEKKDRYSAFQKQHGKFERRMAELLGVEELKDLRLNGKQMTALKLLDKQDFKCIYSGKGILPDQIVNDFHLFEIDHIIPISYSYDDSQQNKVLCYVDENQKKGQKTPFHYFQSGEASRSFEEFEQECTNLFNSKRISKKKLNYLLEKRDVQRDEEVQTSFINRNLVDTRYAMGSFSNNLRAFYQNNQIPTRVLSVRGSFTHALRKRARLNKDRDESHAHHGIDALIVAAIGVMPLLNQFKNLTMDPQGVAVDKNTGEILSKEDIFSESSLRFLHTLRNYEPFINYSHKVDRKPNRSMTNQTIYSTRKKNDEEYRVRKIKNIYTLDKQAFKTLKKKIDQHPENFLMAQHDPKTRALILKVMEEHDHADNPFQDFYTNHGYILKDGKVPVKGLKYLHDKVGVYKDITHHYPNAKNKVILKSQKSIRIDVYQNEQGKYKYLGVPYNWFKKEKNAYVLDMDAYNAEKKAPYKRIDGKYTFLYSFYKNERISYDKEEKRTNPVTGEKEKQQVHYDKLFRGDSSPRDNKLEVEDISFQTKKQQIISVGSLKNIKKYTVDLLGNEYLIEQETFTDRVPIIR

SEQ ID NO: 6192 - protein, 1437 aa, unidentified
  REGION 1..1437: note = Description of Unknown: Cas Enzyme sequence
MARILGLDLGTNSIGWAIVDNEKNSFSLIDKGVRIFSEGVNIEAKTNSESSKAAKRTEFRSSRKLKYRRKIRKIELLKVLSDNNFCPKLSDQELNDWRYKKIYPLNDEFRIWLSTDNQNNEEHRIKQIKNPYYYRFLAAKNNLNLSNKEDRYILGRAFYHIAQRRGFLSNRLDSSDNSIIEDKNTEISEIINDANSILEFSEVFSEFLLAFDKDDISNKPLFTLSRSFNTIFKENSTLKYPDVKEKLNERLNKKEFLGPVKRAISDLTEKIQEEKCCTLGEYFYTLYQKGEKIRGEYTHRIDHYLTEFNFICNKQNISDEVKEAIERAIFFQRPLKSQKGLVAKCPLENRKACIPISHPDFEEFRMLNYLNNVKIKLPSDEKLRLLDEEEREKVKSLFFRKSKANFDFIEIAKKLTPKGLISKYHKDKEASNENVLFNYTLGSNVAGCPTIANLVDVFGANWKEYLNSNYVKNTKTQDNVKSIKSIEDIIDDVWHVLFRFDNEELLKQFAIDNLNCGEKTATKFSKIKLKQDYGSLSLKAIRNILPYLRQNLIYSHAVFLANMKNILPTEIWNNEENRKVINNEINSIIENYKLYSNNIDIVNGLIKNVKKENGTWSSNDFVAEAYRSGLEKQVKDFFGTKKWNETPENFQNKILSECFELFTNQMKLNLGRGEFAKKQTIDEILKTFLSDNFNVSNESLKKLYHPSAIEVYKKAKRSDVDGKKYLGSPLISSIKNPMAMRSLHQLKKVINQLIKDDMIDEETIIHIEMPRELNSSNERVAIRQWNEILKDRRNKYIEEIKSIFKGDVKIEGCNDSNSNYNDYEPTETDILKYQLWEEQNKVCLYTGKTICLSDFIGNNPKFDIEHTIPRSRNLDNSQVNKTLCCSIYNRQTKKNKIPFECPNHDEILPRIKHWYAKVKDLEDKIKDLSKKVKAASTKEKRDKYIIERTKLRFEYSYYLKKYKFFIMEEVPESFKNSQSVDIGIISKYGNLFLKTVFTKVYPIKGKTTANLRQMWGLNEKSRDNHAHHAKDAVVVACCTRDINDVLANYYHDLEQFEFFGKPKPSFSHRIPWEGFHMDVDEFDNNTLISHHTPDNLPIQSKKKIRKRGIIQRNEKGEIKYKQGDTVRGALHKESFYGAIIREEVNKKTGETEEVIKYVKRQGIEHFKDADLKHIVDDKIKEIVTYGREQEKLIKKDIEELKKQLKKVKEEEEQSIKDAIEVLENKIKNELYILPNKKGNPVPIKKIRYYTSDVTNPLFIKKHRDISRHEHKQFYHAKNDGNYCYAIYEGIDKKNKKIVEYKVVNNFESAEYFNSGLSNLKYPLEINIMDSRQNVLELKYILKTGTLVFFFKDSKDEIWDLSVVDLAKRLYKTVAIESDGRVQFRLHSTSKPDGQLEKASIVNFETPNEKLRVSKSSLNILVEGFDFKISATGKIRKL

SEQ ID NO: 6193 - protein, 1019 aa, unidentified
  REGION 1..1019: note = Description of Unknown: Cas Enzyme sequence
MADVIWGLDTGTNSLGWAVFAAELLDGRWEPVRLLNGGVRLFDSGRHPKHFSSLEAERGKNRRARRQVRQRRWRRDQLLKLLAARGIVPPSPLPDDVLALRVAALERPLVGPELAAVLRYLARHRGFKSLRLALQAPGAAADDEDGGKWAEIQRAFEARLAELPPQRRSVAVVLAEKLREAGYVRARDGVGDAPTRKLIAAEFALIRAAQAPHHSALYGEDWERIEELILDQRPITPPPVGRCSFRPDEDRLAKAMPSAQRARIMMALANLRVIDGRGPARELTVDEFSVLVAELGRGGAHTWANLRKKLGLGRAKFSIETEKSAGRRAAAQIEGDAVAALFAPVLPDWPSRSLDEQDSIVAGLLADRRDRRALLRRAEALGLSGASAHDLADAVQFSLPRGALRFGATAARAMIEGLKPGVTVRDVENQILGQSETERQAVPRLDTLPDFAELVGEVRNVSVRIALGQIKLIGNKLLTRYGRPRRIVIETARELKASAEDLRRYRAEAAARETENRKIDEALAENGPCAVSPRERRLRWRLKERQGGLCLYTGTPISVADLETELFEVNHIIPRRLGGNDGIANLALVRAEANRAKGGRTPHAAFSSTAAWPQILRQAEALGAATAWRFGPDAAARIGEDNDGWLPRQITDTSYIARVALKYLAPVADEVVATKGAATAWLRAAWSLNLPDGRRVKKSRADHRHHYIDAAVIAVTGRRLVQVINTLYSRHGSLPRADHPDVAALLGEPFPGFAEQVARRWYTVIPSIRPDHPEGAAGKLHDQPYGVRPVGDGRVRPARRLPVEAIFAKGTLAEGLAKFVNEVFADRFKWAAEEELKADPTITVLEAARRAAAQRHFGPRGIGKIKVWAGQQTYDPADLPTVARGNHRAFVKTRAKAYVDIVEFDGKWKAVPVSLFDAARGAVPANAGRRVMRLRHGDVVAWEDEAGQRELLRWKSWGGNGRLFFWPISVLEDLSAAESLGYELSERYGIGITGEGLRARRARAVTISPLGRLRDPGSR

SEQ ID NO: 6194 - protein, 1061 aa, unidentified
  REGION 1..1061: note = Description of Unknown: Cas Enzyme sequence
MCILGVDGGIASVGWAVVDIEPEQRSGRIVATGTWMFDSPEEATQTGPRLKNADRRMYRGQRRVVRRRAQRMRQIRRLFVSYGMIENADRDALRGDGLDPWSLRAEGLDRRLSPREWAVALGHIAIHRGFRSIRKGERGNAPGTEKEKKGFFSGLEANHIRLEKSHSEDRQYRTIGEMFARDPLYVQQRRNRAGSFTYSIYRRDQEDEVRTLFVAQRRYENPATDVEFRDAFILQAFSQRPLKSSEELVGPCPFEPGERRAARFAPGFERFRLYSRLTALRLQVGRAPEQPLAPEQIADFPKDYGSTAKLSFTALRKHLALDNNTRFAGVSRDDEKNDIVARHGSSLAGTAAFRKALEPAIGALETRRLFSDTRQLDRAAEVITFNEDLDAIRIGLVGTGLSEAAQTAIMAAVKVGEFDAFKGAGHISAKAAANILPGLMQGLVYSEACERTGYDHSASAVTSIDAVTSPVARKALAEMLKQIQLLERVYGNRRDANGKKRFDRVHVEMARDVGKSIEERGKMERGIRDRNAQKDRLRDELRNLLNLERVTHEDLLRYELWKEQYGFCLYSNAEIPIAAVIATDNRVQVDHILPWSRFGDDSYNNKTLCFVKQNADKRSYTPFEWFMNVMPGEWERFSSAVELCKMMRGFKKRNYLLRDAKEIEVRFRRRNLNDTRYALRALLAELGRQYHTEPDGSLRVFARPGELTSKLRQAWGIEVLKKGPNGERLPDDRHHALDAMVLTVTTNSLLQLATRISQEAERKGNDFHLRGLPPPWDSFRMDVENFFASIFVARQEIRRDSGKAHEATIKQIRKTDGTEVVYDRKHVEKLTEKDLDLIPVPEAYGKIKDPKKLRDQMVETLRAWIAAGKPKDNSPRSPKGDVIRRVRVRSSSKPAVRVRGGTADRGEIIRVDVFTKVSKQDKHEFFLVPIYVHEFATHSMPPLRAVQQGADESRWPQISSEFSFVNSIFPMSLIEIVKSDGEVIRGYYRSLDRNTGALTVSDPANPSIIRKGIGARTLLRLQKLRVDRLGNVREVKGEVRQWRGREFMSPGPQRSALPTAN

SEQ ID NO: 6195 - protein, 1028 aa, unidentified
  REGION 1..1028: note = Description of Unknown: Cas Enzyme sequence
MRIWGFDVGTTSIGFAVIDYDSDRKAGRIERLGVRIFPEGVTEDKGEPRNAQRRAKRMMRRQLRRKRWRRRALHEILAEAGLLPTDDPKQWPAELAQAAPYDLRDRGLSQKLSPHEVGRALFHILKRRGFQSARIAAVEPSDPAKEKEDEGIKAEISQIAAELQGRTLGQWLKSQSKRRGHHTARTMTQEEFERFWTAQVKYHPDLLTDNLRAALAETAFRQRPIFWRLKTLGTCLLEKDAPLCPKGAWIGQRFEMLQTLNNLRLAGGNARPLDEDERRLLLAALETSPSLSFPAARKLLKPVWQRNGTSLKTKFNFEVEGGKEALPGNALEAALIDAFGEAWNTHPKKDAIRAELQDRLWAIQYRKLGEKRVEIRDGNSAEAERQRFIAFAQAEWNASRKTAETLSRIEPPAAWLRHSITAIQKLLPHMEAGLTYAEARKLVYPEQFEKSDPIEKLPSDPRQFEDLRNPTVKRALTELRKVVNNLLTTYGKPERIRIELARNVALTGKDKANYMRTLAERERQRKQAAKELKASLGREPTAGDIEKWLLWQECEKTCPYTFDSIGFADLFGNMPRYDIEHIWPRSLSLDDSFANKTLCRRDVNNKKGQRTPFELYASNHGIADLPDWEEVKIHLRNKVDAGHFPESKWKRFTREQPFAAADDRSDDRLIGDTAYIAREARAWLGQLMPRGIFDVEPRNGRIVSRLRKLWHLDRLLGEDGRKNRDDHRHHALDAAVTALFDTRAMQDIVRWYKAQEDRPEEKPPAIDLPWPAFRDDLRTALEAIVVSHRVRRKVNGPLHDETRLGDSGEPPIREGGKEYRFYVKRKALAQMSKGEIDAIRDERIRTLAQERLAAHDGDVKKAFATPLMLPGRAGKPDREVKKARVIVKSQPHLVTALNGGKAYAAASDNHHMAIYRSIDGKVSYRTVSRIEAARRTARKEPVVQRVLPDGAQLLFTLTPGTTLAFPNNNGRPIYRVVTSVWDSGQIVLVDHTEAGGTVWKRPNASSLVAMGAKKVSVDPIGRVRPARD
